United States Patent Application Publication US 2013/0332133 A1 - sequence listing, part 52

SEQ ID NO: 315214 - DNA, 1612 bp, Unknown
  Bacterial polypeptide expressing nucleotide sequence isolated from the Sargasso Sea
aatgcattttgtttttattacgggaggagtagcctcatcacttggcaagggtattgcctcagcttctttagcagcacttttaaaatcaagaaattttaaagtaagaattagaaagcttgatccttatttaaatgttgatccaggtactatgagtccttatcaacatggagaagtttatgtgactgatgatggagctgaaacagatttagatttaggacattatgaaaggttcactaatcaatcatcaaaaaaaagtgatagtatttcttctggtaaaatttattcaacagttttatcaaaagaaagaaaaggtgattatctaggtgcaactattcaagtaattcctcatgtaacaaatgaaattaagtcatttattaatagtgatttaaaaaatgaagattttgcaatttatgaaattggaggaacagttggtgatatcgagtcgctaccttttttagaagcgataagacaaattagaaataataaaaaaatatcttccgcgttaatacatatgacttatataccttatttaagttttgcaggtgaattgaaaactaaaccaactcaacattctgtaaaagagcttcttaatgctggaattcaacctgatataataatgtgtaggtcagaaaaacctattgaccaagagtctattacaaaaatatcattattttgtaatgtaaaaaaagaatcagtcatacctgcactaaatgctaattctatttatgaagtcccttctttgtattcaaagtatggattagatgaatctctcttaaaacacttagattataaatctaaaaatcatcctttagatttaaatccttggaatcgtttattaaaaaaaatcaaaaatcaaaaatcccaagttagaatagctgtcgttggtaagtatactaatcttaaagatagctacaaatctttgagtgaagccctaatgcatggtggaatagaaaattctgtaaatgtaaaaattaaatggataaattcagaaaaattaaaaaaacaaaaattaattttagcgcttaaagattgtgatggtattttagttcctggtggttttggatcaagaggcattgaaggaaaaatagatgccattaaatatgctagaaaatacaatatacctttttttggtatttgtttaggtatgcaattagctgtaatagaaattgctcagaatgtcctaaacattaaaaatgctaactcttctgaatttaaacaaacctctaattctgttattggattaatgactgagtgggttaaaggcaataaaattgaaaaaagaagtaaaaatagtaataaaggtggaacaatgcgcttaggctcttataaggctaaactcaaaaaaaattctaaaatttattctatttataataaacaattaatttctgaaagacatagacatagatacgaagtaaataagaaatttatatctaaatttaataataaaggatattattttagcggaatgtcgccagatggattattacctgaagttttagaaagtgaaaatcacaaatggtttataggagtacaatatcatcctgaactaaaatcaaggcctttaaaacctcatccactttttgtttcatttattaaaaattgtataaaatga

SEQ ID NO: 315215 - DNA, 329 bp, Unknown
  Bacterial polypeptide expressing nucleotide sequence isolated from the Sargasso Sea
catgcaaacaaaatatatctttatcacaggtggtgtggtttcaggacttggcaaaggaattgcggcggcttccattggtgctttgctggaatcacgggggctgactgtcagcctgatgaagcttgatccatacatcaatgttgatgccggtaccatgaatccatttcagcatggcgaggtttttgtcaccgtagacggcgcagaaacagatttggatctgggacattatgagcgctacacaaatgcagtgctaacacgcaggcataaccgtactaccggtcagatatatgacacagttattcgaaaggagcgagccggtgattatttgg

SEQ ID NO: 315216 - DNA, 526 bp, Unknown
  Bacterial polypeptide expressing nucleotide sequence isolated from the Sargasso Sea
atggctcaaacaaagtacatttttataaccggtggggttgtttcatctcttggcaagggtattgctgccgcttccataggagcactctttgaggcaagaggcttaaaagtttcattaaataagcttgacccttacatcaatgttgatccaggaactatgagtccatttcaacatggagaagtttttgtaactgatgatggcacagagacagatcttgacttaggtcattatgaaaggtttgtaagatttcaagcaagtaaaaaaaataacttcacagctggaaaagtctatgaagaggttatacaaaacgaaagaagaggagattatcttggagggacagttcaggttatcccacatatcactgatgagatcaaacggagaattaaattaggtgctaagggcgctgatatagctttagttgaaatcggtggcaccgttggtgacattgaaagtcagccctttattgaagcaataagacaaatgatgttagaacttcctaacagctctactgctttagctcacctta

SEQ ID NO: 315217 - DNA, 580 bp, Unknown
  Bacterial polypeptide expressing nucleotide sequence isolated from the Sargasso Sea
ttattaatccctggtggctttggttacagaggtgttgaaggaaaaattcaagctattcaatatgcacgtgaaaacaacattcctttttttggcatttgtcttggaatgcagttagcggttatagaaattgctagaaatttaatgaatctttcagaagcaaattcaacagaatttaaaagaactaatacaccaattgttagcttaatgactgaatggattaataatgataaaatagaaaaaagaaatcttaatagcaataaaggtggaactatgcgattaggagcttataaagcattattaaaggaaggttctaaaattaattctatatataaatcaaaagaaattattgaaagacatagacatagatatgaagttgatagttttttcactaaaggttttgaaaaacaaggctttgaatttacaggaatgtccccagataatattttgcctgaagttttggaaagtaaaaatttgaaatggtttataggtgtacaattccatcctgaattaaaatcaagacctcaagaaccacaccctctctttgtatcattcataaaaaattgtaaaaaaaatgattaaa

SEQ ID NO: 315218 - DNA, 1011 bp, Unknown
  Bacterial polypeptide expressing nucleotide sequence isolated from the Sargasso Sea
atataattatatgcaggtcacaaaaatcaataccgtttgaccaaagaaaaaaaatatctttattttgcaatgttcctattgaaaatgtaattgaaactgttgatgtaagaacaatttatgaagcaccaattagtttttttaatcaaaaactagataaacaagttttaaattattttagactaaaaccaaaaaaaagagcaaatttattaccatggaaaaaaataacaaaaattactctaaacacaaaaaaatcaattaatatcgctatcattggtaaatatgtaaatttaaaagatgcatataaatctttagatgaagcgcttacgcatggcggtatttcaaataaggttaaaattaatttagttagaatagagtctgacaaattaaaacctaatcaaatatctaaaaaattgaagggtgtttctggtttattgatacctggaggctttggcaaaagaggaactgaaggtaaaatttcagcaatcaagtatgctagagaaaaaaaaataccttttttaggaatatgttttggaatgcaaatggcaattattgaatttgctcgcaataagttaaaaatcaaaagagcgggatctactgaacttgataaaaattgttatcctgtaattggtttaatagaagaatggagcaaagatggaaaaattattaaaggtactgatatagatttaggtggcacaatgagattgggcttatatgaagcaaaattaagaaataattctgccataaaaaaaatatataaatctaattcaattaaagaaaggcacagacatagatatgaagttaataacaatctcaataaccaatttgaaaagaaaggtttaatattctcagggatgtcaccagataataatttacctgaaataatagaacttaaaaatcatccttggtttattggagttcaatttcaccctgaatttaaatctagacctttattaccacatcctttattctcatcatttattaaagcagcaaaatcatttaatggaaaataaa

SEQ ID NO: 315219 - DNA, 1123 bp, Unknown
  Bacterial polypeptide expressing nucleotide sequence isolated from the Sargasso Sea
aaatagaataaaagagtttattaaaaaagatattacaaatgaagattttgttatatgcgaaattggaggaactgtaggtgatattgaaagtttaccatttttagaggctataagacaattttcaaatgatattggaagatcaaaatctttatttatacatctaacttttgttccttttttaaaatcttcagatgaaattaagacaaagccaactcaacattcagtaaaagaattaagaagcataggaattcaaccagatatcgttatctgcagatctcaacaatctattcctttagatcaaagaagaaaaatatctttattttgcaatgttgatatcgacaacgtaattgaaacggttgatgtaaaaactatttatgaagctccaataagtttttttaatcaaaaattagacaagcaagtgttaaaattttttaaattaaaatccaaaaaaagaccaaacttattaccttggaaaaaaattactaagatagttctaaacacaaaaaaaattgtaaacattgcaatcataggaaaatatgtaaatcttaaggatgcttacaaatcccttgacgaagctcttacacacggaggaatttcgaataatataaaggtaaacttagtaagaatagagtcagacaaacttaaattaaaagaaattaagtcaaaattaaaaaatgtttcaggaatattaatacctggtggatttgggaagagaggcacagaaggaaagattgaagcaattaaacacgcaagacaaaataaaattccttttttaggtatttgttttggaatgcaaatggcaatggtagaatttgctagaaataaattgaatattaaaaaggcaggttcaagtgaattagacaaaaattgctttcctgtaattggtttaattaatgaatggaacaaagatggaaagattattaaaggcactgacaaaaatcttggaggaacaatgagattaggactttacaaagctaaacttagaaataattctgccataaaaaatgtctataaatcgaatgtgattgaagagagacatagacatagatatgagatcaatattaacctaatgcagcaatttgaaaaaaagggtttaatgtttactggagtttctccgagataa

SEQ ID NO: 315220 - DNA, 1615 bp, Unknown
  Bacterial polypeptide expressing nucleotide sequence isolated from the Sargasso Sea
atgcattttgtttttattacgggtggcgtcgcatcatctcttggaaaaggtatagcctcagcctctctagcaactcttctaaaaagtagaaaatttaaagtaaggattagaaagttagatccgtatctaaatgtggatccaggaacaatgagcccatatcaacatggagaagtttatgttactgatgatggtgcagaaacagatttagatctaggtcattacgaaagattcacaaatcaatctgctaaacaatcagatagcgtgtcgtcaggtaagatttattctaatgttctcctaaaagaaagaaagggagattaccttggttcaacaattcaggtaattcctcatgttaccaatgaaataaaatcatttattaatagtgatttaaaaaatgaagatatcgcaatttatgaaatagggggaacagttggagatattgaatcgctaccttttttagaagcaataagacaaattagaaatgataaaaatatttcatcggcattaattcatatgacttatattccatatttaagttcagcaggtgagttaaaaacgaaacctactcaacattcagttaaagaacttctcaatgctggtattcaaccagatatcattatgtgtagatctgaacaaccaattgataatgattcaatttctaaaatatctttattttgtaatgttaaaaaagagtcggtaattcctgcattgaatgctaattcaatttatgaagttccttcattatattctaaatatggtttggatgaagctctgcttaaacaattgggttttaaaccgaaaaatcataaattaaatttaaaaccttggatcaatcttcaaaaaaaaattaaaataagaaaacataaagtaaaaattgcagtagtaggaaaatacacaaatcttaaagatagttataaatcacttaatgaagcattggttcacggaggtatagaaaattctgctgatgtagatattcaatggattaattctgaaaaagaaaacaacattagtttaatgaaaaaattaaaaggttgtgatggaattctaattccgggtggttttggtattcgtggtattaatggaaaaattaatgccatcaaatatgcgagagaaaacaatattcctttttttggaatttgtcttggaatgcagttagctgttattgaaatagcacaaaatgtactaaaaattaaaaatgctcattcctcagaatttaagaaaactactaaatcagttgtagggttaatgacagaatgggtaaataaaaataagatcgaaaaaagagataaaaatagtgacaagggtggaacgatgcgtcttggagcatacaaagctgttttgaaaaaaaattcaaaaatcttttctatatataaaaataaagtaattagcgagagacacagacatagatacgaagtaaatcagaaatttctatcaaaatttgaaaacaaaggttattatttcagtggtatgtcgccagatggattattacctgaagtgcttgagagtaaaaaacataaatggtttataggagttcaatttcatccagagttaaaatcaagaccattagatcctcatcctcttttcgtatcatttataaaggctgcaattaatgattaat

SEQ ID NO: 315221 - DNA, 1187 bp, Unknown
  Bacterial polypeptide expressing nucleotide sequence isolated from the Sargasso Sea
catggcgcgatttatttttgtcacgggcggcgtggtttcatctttaggtaaaggactttcttcagcttcactcgcttatctacttcaatcaagaggttataaagtaagacttagaaaattagatccttatttgaatgttgatccaggaacgatgagtccatttcaacatggagaagtttttgtaacagatgacggagccgaaacagatcttgatttaggacattacgagagattttcaggtgtatctgcaaaaaaatgtgataacattacaacaggtaagatttataatgatgtacttaaaaaagagcgaaaaggaaaatatcttggaaaaactgttcaggtaataccacatattactgatcggataaaagagtttatcaaaaacgactcttcaaaagaagatttcgtcatttgtgaaataggaggaatagttggtgatattgaaagtttgccatttgttgaagcaataagacaatttgcaaatgatatcgaaaagaaaaatgctttgtttattcatttaactcttgttccttatttaaaagcttctgatgaaattaagacaaaaccaactcaacactcagttaaagaattaagaagtattggtattcaacctgatataattatttgtcgatctgaaaggtcaatacctttagaacatcgtaaaaagatctcattattttgtaatgttgatattaagaatgtaattgaaacagttgatgtcaaaactatttacgaggcacctataagtttttttaaagaaaaattagatgttcaggttttaaattattttaaaatgaaatctaaaaaaccagtaaatttgaacccttggaaaaaaattactaagattatccttcaaacaaaaaaagaggtgaatatagcaattattggtaaatatgttgaattaaaagatgcttataaatcgcttgatgaagcccttactcatggtggtattgaaaataagattaaagtaaacttgattagaattgactctgacaagcttagggtttcagaaataaaatctaaattaaaaaacatatctggaattttaattcctggtggttttggcaagagaggtaccgatggaaaaattgaagccatcagatatgcaagaaacaataagataccatttcttggaatatgttatgggatgcaaatggctataattgaatttgcaagaaataaattaa

SEQ ID NO: 315222 - DNA, 934 bp, Unknown
  Bacterial polypeptide expressing nucleotide sequence isolated from the Sargasso Sea
tctaatgtcatatctatgcatgatgtagatacagtttactcgatacctttgttgcttcataagcagaaagtagatgaaatagttttaaaagatttgggtctcaagacaaaaaaacctaacttaaatgattggaaaaaagtcgttcaagctaaactaaatcctaaaaaatctgttgaagttgctatggttggaaaatatacagaattaaaagattcttataaatctctcaatgaagcactcgatcatgctggtatcaaaaataatgcaaaagtgaatataacttttgtagaggcagaaaaattaactagaagaaatgtaaaagctaagcttaaatttgcagatgctgtgttagtacctggtggatttggtagtaggggtattgaaggtatgatcatagcctgtgaatatgcaaggctaaaaaaaataccctattttggaatatgtcttggaatgcaaatcgctctcattgagtttgcaagaaatatgttaggccttagaggagctaatagtactgaatttgattcaaaaacaaattatcctgttgttgcccttattacagaatggaaagataaaactggtaaaactgaaaaaagaacagctgactcagatttaggcggaacaatgaggttgggtggacagacctgcgttgtaaaaaagagctctaatgtttttagaatgtataaaaagctagaaattgttgaaaggcatagacatagatatgaggttaatccagaatttagggatggatttaataccaaaggcatgaatatagttggtacttctgtagatgacatgctggttgagatgattgagatacaaaatcatccctggtttcttggttgtcagtttcatcccgaatttacttcaaacccaagagatggacatcctatctttaatagcttcatttcaagtacaataaagactaaaaaatgaa

SEQ ID NO: 315223 - DNA, 1648 bp, Unknown
  Bacterial polypeptide expressing nucleotide sequence isolated from the Sargasso Sea
gatgggaaataaacaaacacgatttttatttgtaacaggtggagtagtttcctcacttggtaagggtgttgctgctgcctctctcggtgcagttctcgaaagcagagggctttctgtcactattcttaaattagatccatatatcaaccttgatcctggaactatgagcccatttcagcatggagaagttttcgtcactgaagatggatctgaaactgatcttgatttaggacattatgaaaggtttcttacgtctaagatgtctaaatccaataacttcactacgggacaagtgtatgaagaagttctgagaaaagaaagaaaaggagattatttaggaggtacggtacaagttattccacacataactgacgaaataaaaaaaagaattataaaaggggcagggaattccgatgtggcaatagtcgagataggtgggacagtaggtgatatagaatctcaaccttttttagaagccattaggcagatgaagatagatcttcaatcctatcaaaccttatatatgcatttgactcttttaccgttcttgaaatctgcaggggaaactaagacaaaacctacacaaaggtctgtgaaagagatgttatctcatggcttacaaccagatatcttggtgtgtagatctgataaaccaatggaagaagaggaaagaaagaaaattgcattattcaccaacgtaaaaccaaatgctgtcatctcaatgccagatgtagattcgatttataagatccctattgaactaaattaccaaaaagtcgatgaaatagtgttagaaaaattcaaattaaattcttctaagaaacccaatttaagagactggagaaaggtaattaaagaagatcttgagccaaaagaatcggtcaaaatatctatggttggaaagtatacggagcttgcagatgcttataagtccttgaatgaagcacttaaacatggaggctttaaaaacaatcttaaggtggatatagactatgtagattcggagaaattggatataaaaaatgtccataggaaactaggaaaatctaatgcaattctcgtcccaggaggatttggagaaagaggaatagagggtatgattactgccgttaagtatgccagaacaaaattaataccttacttagggatttgtcttggtatgcagatagctgtaattgaatttgctagaaatattgcgagactgaagttagcaaatagtactgaatttgataagactactaattatcctgtagtcggtcttataagcgaatggctagattccgaaggctcaataaagagacgagattctaattcagatttaggcggcacaatgaggcttggctcccaagagtgcattctagataataattctttaactagggttctttataaaaagagtaggattcaagagagacatagacaccgatatgaggtcaataataaccttatcgatattttagtttctaaaggattaaaggttgtaggaaagtctgcagataaaatgttggttgaagttattgagatagatgaacatccttggtttattggttgtcaatttcatccggaattcacatctgacccaagaagtggacatccgttatttacaggatttattaaagctgccaagaagaataaaataagtaaatga

SEQ ID NO: 315224 - DNA, 802 bp, Unknown
  Bacterial polypeptide expressing nucleotide sequence isolated from the Sargasso Sea
atgagaaaaagaaatactaagtttatattcgtaacaggtggagtaatgtcctccttgggtaaaggattagctagtgcttgtataggtgcacttctagaagctagaggaatttcaatttctattcagaaattagatccatatataaatgtcgatcctgggacaatgaatccataccaacatggagaagtgtttgttactgatgacggtgctgaaactgatctagatttaggccactatgaaagatttacaaatgttaagttatcacagtcaaataatgtaactacaggtagagtttataatgaagttatttccaaagagagaaggggagattatttaggacagactgttcaagttatccctcatattactgatgagattataagtagagtatttgatttacaaggaaaaacagatatttcaattgttgaaatcggtggaacggttggagatatagagagtcttccttaccttgaagcaatcaggcagattaggactcaattagggaaggaaaatgcattatttgtgcatttaacatatgttccatatatttcggcggctggtgaattgaagacaaagccgactcagcatagtgttaaagatttattacaaataggaattcagccagatatcttattatgtagaactgacaggtttttatctaatgaattaaaaaagaaaatagccttattttgcaacttaaatgttgagtctgttattactgcaaaagatgtagatattatttatgaggttccattaatttttcataaagagggattagatgacataattctcgagtcttaaa

SEQ ID NO: 315225 - DNA, 1069 bp, Unknown
  Bacterial polypeptide expressing nucleotide sequence isolated from the Sargasso Sea
atggcgcgatatatatttgtcacgggcggcgtggtttcatctttaggaaaaggtctctcctcagcttcattggcttacttactaaaatctcagggatataaagttaggttaagaaaaatggatccatatttgaatgtagatcctggaacaatgagcccatttcaacatggtgaagtttttgtaactgatgatggtgctgaaacagatttagatttaggacattatgaaagatttacaaacatatcatccaaacaatcagataatattactacaggtcgtatttatagtgatgtaattaaaagagaaagaaaaggtggctatcttggaaaaactgttcaagttattcctcacataactgatcgtataaaagaatttattaaaaaagatattactaacgaagattttgttatatgtgaaattggaggcactgtaggagatattgaaagtttaccatttgttgaagctataagacaattttcaaatgaacagggaaaatcaaaaacattattcattcatttaacttttgttccttttttaaaatcttcggatgaaataaaaactaaaccaactcagcattctgttaaagagttgagaagcattggtattcaaccagatataattatttgtagatcacaacaatcgatacccttagaccaaagaaaaaaaatatctttattttgcaatgttccaattgataatgtaatagaaacagtagatgtcagaacaatttatgaagcgcctattagtttttttaatcaaaaacttgataagcaagttttaaaatattttaaactcaaacctaaaaaaagagccaacttaaatccatggaaaagaataactaaaattgtcttaaatacaaaaaaatctgttaatattgcgataattggtaaatatgtaaatttgaaagatgcatataaatcattagatgaagctttaatacatggaggaatttctaataaagtgaaagttaatctaataagaatagagtctgataatttaaaaagtaacgaaattaaaaaaagacttaagaatgtttcaggacttttgatacccaggtggttttggtaaa

SEQ ID NO: 315226 - DNA, 1030 bp, Unknown
  Bacterial polypeptide expressing nucleotide sequence isolated from the Sargasso Sea
tcattgggtataagtcctgatgttttaatttgcaggtctgatcaagaattacctagtgatgagaaaaataagatagcgcttttttgttcagtgcctaatgatagtgttatctctatgcatgacgttgaaactgtatattctgtgcctcttcttcttcatagccaaaaagttgataaaactattttaaaaaaattaaaaataaatactaaacaagcccagttaaatgactggaaaagagttgtaaaagctaaattgcttcctgaaaaagaagtaactgtttctttcgtaggtaaatatacagaattgaaagattcatataaatcaattaatgaagctttagagcatgctggaataaaaaataaaacgagggttaatataaattttgttgaagcggaaactttaactccaaaaaacatacataaaactttgaaaaattctgatgctattcttgttccaggtggttttggagaaagaggcatagagggaatgatcttagcatgcaaatacgctagagaaaaagatatcccttatttaggtatctgtttaggtatgcaagttgcaataattgaatacgctagaaatgtattgaaattaaaaggtgctaacagtacagagtttgatcaaaatacaaaatacccagttataggtttaattactgaatggaatgatatatcgggaaagaaagaaaagagagacaaacattctgatcttggaggatccatgagacttggtggtcaggtatgtaaactgaagaaaaaatcaaattcgtataaaatgtataaaaacttagaaatcgtagaaagacatagacatcgttatgaagttaatccaaagtttaaagacaaaatgataagtgcagggcttgacgttgtaggcacatcgattgacggaaatttagtagagatgatagaaataccaaatcataaatggtttcttgcgtgtcaatttcatcctgaatttacttcaaatccaagagatggacatccaatttttaatagttatataaaaagtactttaaaaaataattaaa

SEQ ID NO: 315227 - DNA, 1090 bp, Unknown
  Bacterial polypeptide expressing nucleotide sequence isolated from the Sargasso Sea
caaaccgacccagcacagtgtcgggaaacttcgggaaatcggaattcagcctgatattctcatctgccggacttcgaacagtctctccgatcaccttcgccggaaaatctcacttttcaccaatgttcaggaagatgcggtagtggatggtctcgaagtcgagtcggtttatgaggcgccgttgatgtttcaacagcagggactggataacacgattgccaactacctgaaaatgtggacacggcggccgatgctccaaccctggatcgaattggtgaaccggctgaaaaatcccaaagacgcggtggacattgcctttgtcgggaaatacgtccagcagcgggattcctatgaaagcctgaatgaggcattgatgcacggtgggattgcaaaccaattgaaaccccggctgcattacatcgattccgagatgctggaaaccgaaaaaatcgaggatcttctctcaggtatggacggaatcctggttgctccgggtttcggggaacggggcatggaaggcaagattgccgcggtcgaatttgcccgtacccggaacattcccttcttcggaatctgtctcggcctgcagatggcgattgttgaatgtgcaaggaatcttggtggaatcaaggatgcccattcggcagaattccgtccggaccacaaaaacaacgtcgtcgatttgatgccgagtcaggccggtttgcaggaaaccggagggtcgatgcggcttgggagttatcctgcccaactgcaaaagggatccaaaattgcgtccatctaccagtccaccgacatctcagaacgccatcgtcaccgttatgaggtgatgaatcatttcattccgatgctggaaaaatgcgggatgcagatcagcggaagaaatccggaacttaatttggtggaaaccatcgaacgggccgatcatccctggttcattgcctgtcagtttcatcctgaactgaagtcgaaaccgcttcttccccatcctctgtttgcctcctacatccaggcggcgtatgagttccgcaagttccgtttgggccaggaacggcgtcaggtggagaaggcccggaccagccatggctga

SEQ ID NO: 315228 - DNA, 1627 bp, Unknown
  Bacterial polypeptide expressing nucleotide sequence isolated from the Sargasso Sea
atgacgcgatttatatttgtaacaggcggcgtggtttcatctcttggtaaaggcttagcttctgcttctttagcatctttacttcaacatcatggatataaagtaaggattagaaaattagatccatatctgaatgttgacccaggcacaatgagtccatatcagcatggtgaggtttatgtaactgatgatggcgcagaaacggatttagatcttggtcattatgagagattcactggcgtagtttcaaaaaaatccgacaatattacctctggaagagtatatcaaaaaattataacaagagagagaaaaggggagtacttgggtgctacagtacaagttattccacatgttacaaatgaaattaaagaattcatttcaaacgatcttgagcaagaaaattttgtgatatgtgagataggcggaacaattggcgatatagaaagcttgccttttatagaagctataagacaatttcataatgataatgggcatgagaattcattatttattcatgttactttggtaccatacattgcaagttcaggcgaattaaaaacaaaacctactcaacattccgtaaaagaattgaggagtttgggcatacaaccaaatattttattgtgcagatctgacagaataatacctgaaggtgaaagaaaaaaaattggcttgttctgcaatgttcaacataactgtgtaatacaagcgataaatgcaaattcaatatacgaagttccaattaatttttacaatgaaggattagataagagagtcttagaatatttcaatttagatgcaaataaaactataaatcttaaaatgtggtctcaagtctctaaacatgttcttgaacctgaaggaaaggtcgtaattggaatagtgggcaaatatactggacttgctgatgcttataaatcactgaatgaagcattatctcatggtggaatttttaataatgtaaaagttgaattaaaatggtttgagtctgaagaattaaatagttccaatacgtcaagcttattagcaaattgtcatggcattttagttccaggagggtttggtgaacggggttcggaaggaaaaattgcagcaattaagtatgcgagagaaaaaaatataccttattttggaatatgttttggaatgcaacttgcagttatagagatggcaagaaatatattaggcattcaggatgcaaattctagtgaattctctaattgtactaattcaattgttggcctcatgacagagtggacaacttcagataatacgaccgaaaagagatctaaaaatgacgaccttggtggaacaatgagacttggatcatatgaagcaaaattaagaaaaggaagtaaaatatataatatatataaagacgaaattattaatgaaagacatcgtcacagatatgaagttaacaataaatttgctgaagaatttgagaacaaaggtgttattttttctggttattcacctgatggattattgcctgaaactgttgaattgaaagatcatccatggtttattggagtacaatatcaccctgaattaaaatcaaaaccatttgaaccacatcctttatttaagtcatttatagatgcagcaaaaaagatagaaagatgaa

SEQ ID NO: 315229 - DNA, 1113 bp, Unknown
  Bacterial polypeptide expressing nucleotide sequence isolated from the Sargasso Sea
catggcgcgatatatatttgtcactggcggcgtggtttcatctctcggtaaaggtttgtcatcagcatcgcttggatacttgctaaaatcacaaggctataaagtgagaataagaaaaatggatccatatttaaatgtagatccaggaacaatgagtccttttcaacatggtgaagtttttgtaacagacgatggtgcagagactgatttagatttaggacattatgaaagatttacaaatatttcagccaaacaatctgataatattactacaggtaaaatttatagcgatattataaaaaaagaaagaagaggaggttatcttggaaaaacagttcaagtaattccacatgttacagatagaattaaagagtttataaaaaaagatattacaaatgaagattttgtaatttgtgagattggagggacagttggtgatattgagagtttgccatttttagaagctataagacagttttcaaatgacaatggaagatcaaaatcattatttattcatttaacatttgttccttttttaaaatcttcagatgaaattaaaacaaagccaacacaacattctgttaaagaattaagaagtataggaattcaacctgatatagtgatctgtagatctcaacagtctattcctttagaccaaagaagaaaaatatccttattttgtaatgtggacatcgctaatgttatagaaacagttgatgtaaaaactatttatgaagccccaataagtttctttaatcaaaaattagacaagcaagttttaaaattctttaaaataaaatcaagaaaaagaccaaacctgctaccttggaaaaaaattacaaatatagttttaaaaacaaatagaacagtaaatattgctatcataggcaaatatgtaaatttaaaagatgcttataaatcacttgatgaagctcttacgcatgggggaatttctaataaagttaaagttaacttagtaagaattgagtcagataaacttagatcaaaagaaatcagatcaaaattaaagaatgtatctggaatattgataccaggagggtttggtaaaagaggaacagagggaaaaattgaagcaattaggtatgccagaga

SEQ ID NO: 315230 - DNA, 1045 bp, Unknown
  Bacterial polypeptide expressing nucleotide sequence isolated from the Sargasso Sea
tcagttaaagaacttctcaatgctggtattcaacccgatataattatgtgtagatctgaacaaccaatagataatgattcaatttctaaaatatctttattttgtaatgtcaaaaaagaatccgtaattcctgcattgaatgctaaatcaatctatgaagttccttcattatattctaaatatggtttagatgaagctctccttaaacaattgggttataaaccgaaaaatcataaactaaatttaaaaccttggatcgatcttcaaaaaaaaattaaaaaaagaaaacataaagtaaaaattgcagtagtaggaaaatacacaaatcttaaagatagttataaatcacttaatgaagcattggttcacggaggtatagaaaattctgccgatgtagatattcaatggattaattctgaaatagaaaacaacgctagtctaataaaaaaattaaaaggttgtcatggaattctaattccgggtggttttggtattcgtggtattaatggaaaaattagtgctatcaaatacgcgagagaaaacaatattcctttttttggaatatgtcttggaatgcagttagcagttattgaaatagcacaaaatgttctaaaaattaaaaatgctcactcttcagaatttaagaaaactactaaatcagttgtaggattaatgacagaatgggtaaataaaaacaagattgaaaaaagagataaaaatagtgataagggtggaacgatgcgtcttggagcatacaaagctattttgaaaaaaaattcaaaaatcttttcgatatataaaaatagagtaattagtgagagacacagacatagatacgaagtaaatcagaaatttctatctaaatttgaaaacaaaggttattatttcagcggtatgtcgccagatggattattgcctgaagtactcgagagtaaaaaacataaatggtttataggcgttcaatttcatccagagttaaaatcaagaccattagatccacaccctctttttgtatcatttataaaggctgcaattaatgattaat

SEQ ID NO: 315231 - DNA, 656 bp, Unknown
  Bacterial polypeptide expressing nucleotide sequence isolated from the Sargasso Sea
catggcgcgatatatttttgtcactggcggcgtggtatcatcacttggtaaaggtttatcatcagcatcacttgcgtatctattaaaatctcaaggatataaaataagacttagaaagatggatccttatttaaacgtagatccaggaacaatgagtccatttcaacacggagaagtttttgtaacagatgatggagctgaaactgatctagatttaggtcattatgaaaggttctccaatatatctgcaaaaaaatcagataatattactacgggaaaaatttatagtgatattattaaaaaagaacgtacaggtaaatatttaggtaaaacagttcaagttatacctcatgtaacagatagaataaaagaatttataaaaggtgatattacagatgaagatttcgtaatttgtgaaattggtggaacggttggggatatagaaagtttacctttcgttgaagcaataagacaattttcaaatgatgtgggaaaaaaaagaagtttgtttatacacttaactttagttccttttttaaaatcatctgacgaaattaaaacaaaacctacgcagcattctgtaaaagaacttagaagtttaggtattcaaccagatatagttatttgtagatcacaaaaatctattccaatggatc

SEQ ID NO: 315232 - DNA, 1492 bp, Unknown
  Bacterial polypeptide expressing nucleotide sequence isolated from the Sargasso Sea
catggccaagttcgtctttgtcaccggcggagttgtctccagcatcggcaaaggaatcgtggccgccagcttgggccggctgctgaaaagccgcggctaccgggtatcaatcctgaagctggatccctacctgaacgtggatccaggcaccatgagtcccttccagcacggggaagtgttcgtcaccgaggacggtgccgagaccgatctggacctaggccactacgagcgcttcaccgacacggccatgtcgcgcttgaacagcgtgaccaccggctcggtatatcagtcggtgatcaacaaggagcgccgcggtgactacaacggcggcaccgtgcaggtgatccctcacatcaccggtgagattcgcgagcgcatccaccgggtagcggccaacagcaatgccgatgtggtaatcaccgagatcggcggcaccgtgggtgacatcgaatcgctgccctacctcgaggccatccgtgaattccgcggtgatgtcggccgtaacgatttggcctatgtgcacgtcaccctgctgcccttcatcggcacctccggtgaactcaaaaccaagcccacccagcactcggtcaaagagctgcgatccattggcatccagcccgacattctggtttgccgaagcgaccggcccatcgatgatgagctcaaggccaagatcggcggcttctgcggggtgcccaccaaagcggtggtgccctcccttgatgccgacagcatctacgccgtgcccatcgccctagaaaaaggcggcctatgccgccaggtgcttgatgccctgagcctgcaggaccacgaaagcgacatggcctcctgggaagccttggtccagaagctgcgtaatcccggccccgccgtgaaggtggccctggtgggcaagtacgtgcagctgaacgacgcctacctttcggttgtcgaagcactccgccatgcctgcatccattgcgacagcgccctcgacctgcactggatctgcgcagaacagattgaggagcagggggctgatggcctgcttaaaggcatggatgcggtggtggtgcccgggggctttggcaaccgcggcgtcgacggcaaaatcgcagccatccgctgggcccgtgaacagcgggtgccgttccttggcctttgcctgggcatgcagacggctgtgatcgagtgggcccgcaacaccgcaggactggtgggggccaccagcgccgagctggaaccggccaccacccatccggtcattcacctgctcccagaacagcaagacgtggttgatctgggcggcaccatgcgcttgggcgtttacccctgccggctctcatcaggtagcaaagcccatgagctttatggcgaagaggtggtctatgagcgccaccgccatcgctatgagttcaacaacgcctaccgcagtttgttcttggaatcgggctacgagatctccggcgtctcccctgatgggcgtttggtggaattgattgaactcaaaggt

SEQ ID NO: 315233 - DNA, 1648 bp, Unknown
  Bacterial polypeptide expressing nucleotide sequence isolated from the Sargasso Sea
atgggaaataaacatacaagatttatatttgttactggaggggtagtttcttctttgggtaaggggattgcttcagcctctttaggtgcacttatagaaagtaggggcttaactgtaaccattctaaaacttgatccatacattaaccttgatcccggaacaatgagtccttttcaacacggggaggtatttgttacagaagatggttcagagactgatcttgacttaggtcactacgaaagatttcttaactcaaaaatgtcaaaatccaataactttacaactggtcaagtttatgaagaagttcttagaaaagaacgaaaaggagattatttaggtggcacagttcaagttatacctcacataactgatgagattaaaaaccgcataattaaaggagcaggtaactcagatttagcaatagtagaaatcggtggaacagttggtgatatagagtcccaaccctttcttgaggcgatcagacaaatgaagatagatttgcaatcgcaccaaacattatttatgcacctaactttactaccttttcttaaatcagcaggagaaactaaaacaaaaccaacccagagatctgtaaaagaaatgctatcccacggtcttcaaccagatctattgatttgtcgatcagacgaaacaatggaagcagaggagagaagaaaaatagctttatttactaacgtacaggagaattcagtaatctccatgcctgatgtagattctatttacaaaattcctattgagcttaatcatcaaaatgtagatgaaattgttttagaaaaactaaaacttaattctaaaagaaaacctaatctaagtgattggaagaaagttataaaagaagatcttgaaccaaaagagtctgtaaagatatctatggtaggaaaatatactgagctagcagatgcttataaatcccttaatgaagctttaaaacatggaggattcaaaaataatctaaaagttgatattgattatgttgattccgagagattgaattcaaaaaatgtgcacagcatattaaaaaattcagacgctatattggttcctggtggttttggagaaagaggaattgaagggatgattagtgctgtaaagtatgctagaactaaatcagttccttacctaggcatttgtttgggtatgcaaattgcagttatagaatttgctaggaatgtagctaagttaaaattagcaaatagtaccgaattcgatgataagacaaactatcctgttgttggtcttataagcgaatggttagatttagaggggtctatagaaaaacgagattctaattctgacttaggaggcaccatgagattgggtgcacaagaatgtattttagataaaaattctcttacaagtaaactttataaaaaagtaaaaattaaggaaaggcaccgccatcgatatgaagttaataacaatctgattcataaattaacatcgaatggattgaaggttgtggggaaatcaaaagataaaatgttagtcgaggtagttgaattacatgatcatccttggttcgtaggttgtcaatttcatccagaatttacatctgatcccaggaaaggccatcctctatttgctggttttataaaagcagctaaaaagaataaaaacaaaaaatgaa

SEQ ID NO: 315234 - DNA, 1618 bp, Unknown
  Bacterial polypeptide expressing nucleotide sequence isolated from the Sargasso Sea
gatgaataaaccaaaatatatattcgtaacaggaggtgttacttcttcattaggtaagggtataatttcagcttcattagcaaagcttcttcaatctcagggatataatgctgcaattcaaaaacttgatccatatattaatgtagacccgggtactttaaatccatatgaacatggtgaatgttatgttacggatgatggtgcagaaactgatttggatcttggacattatgagaggtttcttgggacaactacatctcaaaaaaataatattactactggtaggatatatcaaaatgtaataaataaagagaggaaaggagaattccttggtaaaactgttcaggttatacctcatataacaaatgaaattaaagagaacataagaaatctttcagataataagtctttagatattgtaataactgaaattggggggacagtaggtgatattgaatcacttccatatatagaagctgttagacaaataatctatgaagaaggatctgaaaatgcaatagtaatccatcttactctattgccttatttaaatgctactggagagctaaaaacaaagccaactcaacattcagttaaaactctaatggagcttggattaaagccagatatactagtttgtagatcagaaaagtcagttagtttagatttaagaaaaaaaattgctcttttttgtaatgttatggttgattctgttattgaatcaattgatgtagacaccatctatgatgttccacttaagatgatggaagagggactagactcaatatcattaaaaaaattaagcttaaagtctaaagaaccaaatttagataaatggaaaaactttcttcataaattaagaaatccagaaaatgaaattgaaattgggttaattggaaaatatattgagttaaatgattcttataaatctattttagaatcgttaattcatgctggaacagaaaatgatgttaaagtaaatgttaggtcaatccactcagagtacattgatgaagaaaatatgaacactaagttagatggtttgaatggaataatagttgcaccgggatttgggcaaagaggtattgatggaaaaatactaactattcattatgcaagagtcaataatattcctttttttggaatctgtttaggaatgcagatggctgttatagaatatgcaaaaaacgtgaagaaaatattcgatgccaattctactgaaatctcaaaaaaatgtaagaatccagttatcgatcttatgactaatcaaaaagaaataattaacaaaggggggacaatgagattaggtgcttgggactgtgaaataataaaagacaccaaatcatattctatatataataaaaaattaatttcagaaaggcacagacataggtatgaatttaataataattataatgataaaatttttgatgaaaactttgttaaagcaggagttaatccaaaaacagatttggttgagattattgaaaataaaagtcatccctggtttataggagtacagtttcatccagaatataaaagtagtgtttcaaatccacacccactttttgttaattttgtcgaagcaagcttaaataattatttaaataataactaa

SEQ ID NO: 315235 - DNA, 1642 bp, Unknown
  Bacterial polypeptide expressing nucleotide sequence isolated from the Sargasso Sea
atgactacaaggtatatcttcgttactggtggtgtggtttcatcactaggtaaaggcattgcagccgcttcattagccgcaattttagaggcccgtggtctcaatgtaaccatcatgaaactggacccatacattaacgttgatccaggtaccatgagcccaacgcaacatggtgaagtgtttgtgactgaggacggcgcagaaacagaccttgaccttggccactatgagcgtttcatccgtactaagatgaaccgtcgcaacaacttcactacgggtcgtatttacgaggaagtgttgcgtaaagagcgtcgcggtgactatttaggtgcgacgattcaggtgatcccacacatcactaacgcgataaaagaaaaagtgattgcaggcggtgaaggtcacgatgtggctatcgttgaaatcggcggtactgttggtgatatcgaatcactgccattccttgagtctatccgccaattaggcgttgaactgggccgcgatcgtaccctgtttatgcatttaaccttagtgccattcctaggcgctgcgggtgaagtgaaaacgaaaccgactcaacattcagtcaaagaattgcgttctatcggtattgcaccagatgtgctgatctgccgtggcgaccgcgcgattcctgccaacgagcgtgcgaagatttcgttattctgtaacgttgaagaacgtgcggttatttcattaaaagacgtcgacagcatctacaagatcccagcgctgctgcgctcacagggtttagatgacttagtggttaagcgttttggcttagaatgccgcgaagccgacttgtctgagtgggaaaacgtcatttaccaagaagccaatccaaacggcgaagtcgtgattggtatggtcggtaaatacatcgaactgccagacgcctataagtcagtcaacgaagcattaaagcatgcgggtctgaagaaccgtgtatctgtgagcatcaagtacattgactcacaaaccgttgaagcgaaaggtgatgaagttctgcaagggttagacggtatcttagttccaggtggcttcggtgagcgcggtgtggaaggtaagatcctagcggctaaatatgcccgtgaaaacgagctgccttactttggtatctgtttaggtatgcaagtggcactgattgaatttgcccgtaacgttgccggtatgaccgatgcacactcaaccgagttcaataaagcaacgccattccctgtggttggcttaatcactgaatgggttgacgaagaaggtaacgttgaacaacgccatgaagcttctgatttaggtggcactatgcgtttaggtgcgcagttatgccacctgcttgaaggttcaaaagcggcgcaagcgtacaaaggtaacacttgtgttgagcgtcaccgtcatcgttacgaagtgaataacaagtacagagaacgcttagagcaagcgggtctagtatttagtggtttatcttctgaccgtaaactggttgagatgattgagctgaaagatcatccttggtttgttgcgggtcaattccacccagaattcacttcgaccccacgcgatggtcatccattgttcgaaggtttcgttgctgccgcaagtgcacatcaaaaacgtgatctgaagaaataaa

SEQ ID NO: 315236 - DNA, 1482 bp, Unknown
  Bacterial polypeptide expressing nucleotide sequence isolated from the Sargasso Sea
gatgaagtatgtcgttgtgacgggtggagtgctctccggattgggcaaaggagtgactgctagtagcataggagtcctgctcaaaagcgctggactgagggtaaccgcagtaaaaatagatccctacctcaatgaggatgctgggacaatgagtcccttcgagcacggagaggtattcgtgctagacgatggaggtgaagtagatctagacctcggcaactacgagagattcctagatgtgtgcctaaccagagataacaacatcaccacagggaaggtatacaacaaggtgattcagaaggagaggcgaggggactaccttggaaagaccgttcaggttatcccacatatcaccaatgaaatacaggattggatagagagagtggcccatacaccgagcgatggaaacgggaaggagcccgatgcttgcgtaatcgagctaggtggaacagtcggcgacattgaaagcgccccctttgtcgaagctctgcgacagttccaattcagagtaggacaggagaatgtatgcttcgttcacgtgagcctgatccccgttatgggcccagtaggggaacagaagacgaagccgactcagcacacggttaaggaactgagagggcttggtatcaatccacatatgctggtttgcaggtccaagagcccgctaatcgacgaaactcgtaacaaaatctctgcattctgccacgtccccccagaagcggtcgtctctgcacatgatgtttccaacatctaccaggttccaataatgctcgagtcgcagggggtaacaagtatgctagcagataggtttggtttcgaaatacctgccaagaggaaagtgctcgatgattggaaggagctggcagatcacgttgacactttggatgatgcggaggaagtacacatcgcagtagcaggaaagtacacggatctggctgactcttatctgagtgtcattaaggccctccagcatgcctctttcaaggtcaataggaagcttgtgatcgactggatagagtcgtctgcactggatggggaaaccgagaagtcagattccgagtctcacaattccgcatgggaattgctcagatctgctgatggaatcctggttcctggtggattcggcatcagggggattgaggggaaaatcaaggcggctgaatatgcgagagagaacaaaatcccatacctcggtgtctgtctgggactgcaggtagctacaatcgaattctgccgcaatgtgctcggtatggagggagccaactctactgagttcgatgaggaaccagcccatgcagctgttgtattcatgcccgagatttccaagacccatatgggagggaccatgagattggggacgaagcctacccctttccttgtggatgattgcaaaattaggaggttgtatggaggggaaggacacgtcgacgagaggcacaggcacagatacgaggtgaatcctgagttgataggagatatcga

SEQ ID NO: 315237 - DNA, 1639 bp, Unknown
  Bacterial polypeptide expressing nucleotide sequence isolated from the Sargasso Sea
gctgaaagatacgaggtttattttcgttacaggtggtgttgtttcatctctagggaaaggaatcgcttcagcatctataggttcaattctagaatcaaaaggttataaagtttcagtaattaaactagacccatactttaatgtagatccaggaactatgagcccatttcagcatggtgaagtatttgttcttgaagatggaacggagacagatttagatttaggtcattacgaaagattcatagataacgtatgtagcaagaaaaataattttacagctggaaaagtctattactcagtattaagaaaagaaagaaaaggagaatatcttggtaaaacagttcagataatccctcatattacagatgaaattaagcgcaagattttaaatgcttctaaaaattgtgatatagctattgttgagataggcggaacagtcggtgacatagagggacagccatttattgaagcaattagacaattaggcctcgagttaaagagttaccaaacttcatatttgcatttgactcttgttccttatttatctaatgcaggagaattaaaaactaaacctactcagcattcagtaaaggagtatcgaacgcttggagttcagcctgatattcttatctgtcgttcagactacgctttaccacaagaaagtaaggagaaaattgctttattctgctcaatgccaaaagatggtgttatttcattacctaatctagagactatttaccaagtaccattatttttagctgaggaagggattgataaaatactcacaaagagacttcagcttgataaaacaactcctaatcttaaggattggaaaaaggttgtaaaaagaaagctaaagccttcaaatgaattaaatgtttctttcgttggcaaatatgttgatttaaaagacgcgtatttttccttgatagaagcgctagatcatgcgggaattcacaatgatacaaaaattaatataaattacgttaactctgaaaaaattgaacaatcaaattataaaaaagttttaaagaattcagatgctattcttgtgcctggaggttttggtaacaggggaattgaaggaatgattttagctgccagatttgcaagagaaaataagattccatattttggtatctgcttaggccttcaaattgcaattattgagatggccagaaatctacttaatcttaaagatgcaaatagcactgaatttaaaccaagaacaaaaaataaagttatatctcttgttacagaatggaagaataaagatggaacaattgaaagaagaaataagaaatctgataaaggaggtacgatgaggttaggtgctcaaaaagcatctttactaagcggatcattggctagaactttatataaaaagaaaactatttttgaaagacatcgacataggtatgaagttaacccagaatatatcgcaatgcttgaaagggaaggtctgattgtctcagcaagatccgaagtacataacttagtagaaatgattgagctaagagatcatccatggtttctagggtgccagtttcatcctgaatttacatctaaaccaaaaacaggacatcctttatttaacgattttattaagacagctgtaaaattaaagaagaaaaaatga

SEQ ID NO: 315238 - DNA, 1120 bp, Unknown
  Bacterial polypeptide expressing nucleotide sequence isolated from the Sargasso Sea
atggcgcgatatatatttgtgactggcggcgtggtttcatcacttggcaagggattatcgtctgcttctttagcttatttattaatttcacaaggttacaaagtaagagttcgaaaaatggatccatatttaaacgttgatccaggtacgatgagcccattccaacatggggaagtttttgtaactgatgatggtgctgaaacagatcttgatttgggtcattatgaaagatttacaaatgtttcatcaaaaaaatcagataatattaccacaggtagaatttatagagatattattttagaagaaagaaaaggaaattatcttggtaaaactgttcaggttataccccatgttactgacagaattaaaaaatttatcactaaagatattaataaagaagattttgttatatgcgaaataggtggaaccgttggagatattgaaagcttaccttttcttgaagcaattagacaattctcaaatgaaattggaaaaaataaaacacttttcatacacctaacattagtaccttatttaaaatcttcagacgaaattaaaacaaaaccaactcaacattctgttaaagaattaagatcaataggtattcaaccagatatcgttatttgtagatctcaaaaatcaatacccaaagaccagaaaaaaaaaatatccttattttgcaatgttccatacgaaaatgtaattgaaacagtagatgtgaaaactatttatgaggctccaattagtttttccaatcaaaaattagataaacaagttttaaaattttttgatattaaaccaagaaaaaaggttgatttactcccttggaaaaaagtaacgaatattgtcttaaattccccaaaaacagttaacattgctcttataggaaagtatgtaaatttaaaagatgcatacaaatctttagatgaggcattaattcatggtggtattcaaaataaaacaaaagtaaatttaatgaggatagagtctgataaaataaataaaaatcaactaaaagataaattaaaaaatatttcaggaattttaatacctggtggatttggaagcagaggtacagaaggcaagattgaagcaattaatttgctaggattaataaaat

SEQ ID NO: 315239 - DNA, 1624 bp, Unknown
  Bacterial polypeptide expressing nucleotide sequence isolated from the Sargasso Sea
atggcaaaaactaagtacattttcataaccggcggagtggtttcatcactcggaaaaggtattgcagctgcatctattggagcattactagaatcaagaggcctctcggtatctctaattaaagtcgatccatatataaatgttgacccaggaacaatgagtccttttcaacatggagaagtatttgtaactaatgatgggactgaaacagatttagatttgggccattatgagagattcgtaagatttcaagcttcaagaaaaaataattttaccgctggaaaggtatatgagaccgttatcagaaatgaaagaaagggcagttatctaggagggactgtccaagtaatacctcatattacaaacgaaattaagaaaagaattaaagaagggggtcagaataaagatattgcaattgttgaagttggcggaacagttggtgatatcgaaagtcaaccatttgttgaagctttaagacaaatggcgcttgaacttccaacttcttcttgggcttttgttcatttaactttggtaccatttatagatgcctctggggaattgaaaaccaaacctactcaacattcagtaaaagaacttagatcactaggcataagccctgatgttttaatttgtagatctactcaagagttaccaaaagatgaaaagaataaaattgctcttttttgttcagttcctaataaaagcgttatatcaatgcatgatgtagaaactgtatattctgttccgattttattaaataaacagaaagttgataaagctatattagataagttaaacatcaaaacaaataatccaaaactaaatgattggaagagagtggttcaagctaaactgcatccggaaaaagaagtaaatgtatcttttgtaggaaaatatacggagttaaaagactcatataaatctattaatgaagcattagaacatgctggaattaagaataaagccaaggtaaatattaactttgttgaagcagaaaatattactcctaagaatataagaaaaacattaaaaaatgctgatgctatcctagttcctggaggttttggtgaaagaggagtggaagggatgatattggcttgtaaatatgcaagagaaaaaaatattccatatttaggtatttgtcttggtatgcaggttgcaattattgaatatgctagaaatgttttaaatttgaagggcgctaacagtacagagtttgatcatgaaacgaattaccctgttattgggttaattactgagtggaatgatatttctggcaagaaagaaaagagagataaaaattctgatcttggaggaactatgagattaggcggacagatttgcaagcttaagaaaagttcaaattcgtataaaatgtataaaaacgtcgaaattatggaaagacatagacatcgctatgaagtaaaccctaaatttaaagatgatatgataaaaaatggccttgaagttgttggaacatcaattgatgataagcttgtcgaaatgattgaaattcctacacataaatggtttttagcttgtcaatttcatccagaatttacatctaatcctagagatggacatccaatattcaatagttatataaaaagcacaattacgtaat

SEQ ID NO: 315240 - DNA, 1627 bp, Unknown
  Bacterial polypeptide expressing nucleotide sequence isolated from the Sargasso Sea
atgtcagattatatttttgttacaggtggagttgtttcagcactcggtaaaggtgttacatctgcttcattaggcgccattttggaagccagaggtctgaaagtcgggatgatgaagcttgatccatatctgaatgttgatccagggacaatgagtccctatcagcatggcgaggtttttgtaactgaagatggaacagagacagacttggacttaggtcattacgaaagatatgtctctactgtaaccggtaagcatagtaattacactgccggtaaaatctatgaaactgttattgctaaagaaagaagaggtgattatctcggcgcaactgttcaagtgatccctcatgtcactgatgaaattagaaaaagtattgtaaaaggatcgcaaggccatgatgtaacaatcgttgaaattggtggaacagtcggagacattgaatcgcttccatttgttgaagccatcaggcaaatgggaatctataaagatggttatgaagttgcatatgttcatttaacattggtgccctatattaaggcttcctcagaaataaaaaccaaaccgactcaacattcagtgagagagcttagagcaattgggattcagcctgatgctttggtgtgtcgctccgaactacctcttccgaaagagcattttgataagattgctctttttacaaatgttgaaaagaatgctgtgatttctgcgcatgacgcagaggatatttatcagatcccattgattctaaaagagcaaggtttggatgacatcattgttgagaaattgaaactggatgtacccaaagcagatttgacgcaatgggaaaaagtatttactgcatcaaaaaacagcgattcgaaagtaaaaatagcaatggttggaaagtatgttgacttcaaggactcgtatatttctttgagtgaagcccttagacatgctggcttcagtaacaataagagtgttgagatcgtttatgtggagtcagaagatattcaagagaatggcacagattgtctctccgaaatggatgcaattttaatacctggaggatttggagatcgaggcattgaaggaatgattcagtcaattgaatttgcaagaaacaaaaatattccctttctgggtatctgtcttggaatgcaagcagctgtgattgaatatgctcgcaatgttctgggccataaggatgcgaatagcacggagtttaacccagaaacatcagcgccggttattgcaatgattagagagtggatgaatcaagatggttcaactgaaaatagagatgaaaattcagatcttggaggatcaatgagactgggtgcacaagaatgcttattccagaaaggtacaagagcgaaagatatatatgatgcagattcagttattgaaagacatcgccatcgttatgaattcaataatacatatcgcgaagagcttgagaacaatggtttggttttttcaggtttttcgaaagatggattggctgaaatgatcgagatacatgatcacccttggttcataggctgtcaatttcacccagaattcacatcttcacctcttggagggcatccattatttcattcttttataaaagctgctgtagaatactctaaaaagaattaaa

SEQ ID NO: 315241 - DNA, 880 bp, Unknown
  Bacterial polypeptide expressing nucleotide sequence isolated from the Sargasso Sea
catggcgcgatatatattcgttacgggcggcgtggtttcatctttgggtaaaggattatcttcagcttcactcgcttatttactaaaatcacaaggttataaagtaagaataagaaaaatggatccctatttaaatgttgatcctggtactatgagtccatttcaacatggagaagtgtttgtaacagacgatggtgctgagactgatttagatttaggccattatgaaagatttacaaatatatcatcaaaacaatcagataatattactactggtcgtatttatagcgatgtaattaaaaaagagagaaaaggaggatatttaggaaaaactgttcaagttatacctcatgttacaaatcgaataaaagatttcataaaaaaagatattactaatgaggattttgtaatatgtgaaattggtggcactgtaggagatattgaaagtttaccatttgtggaagctataaggcaattttctaatgaaaatggcaagtcaaaaacattatttatccatttaacatttgtaccctttttaaagtcatcagatgaaataaaaactaaaccaactcaacactcagttaaagaactaagaagcattggtatacagccggatataataatttgtagatctcaacaatctatcccattagatcaaagaaaaaaaatatctttattttgcaacgttccaattgaaaatgtaattgaaacagttgatgttagaacaatttatgaggcaccaataagtttttttaatcaaaaacttgataaacaagtattaaagtatttcaaaataaaatcaaaaaaaagagctaatttaactccatggaaaagaattactaaaaatgtcttaaacacaaaaaaaattgttaatattgct

SEQ ID NO: 315242 - DNA, 1408 bp, Unknown
  Bacterial polypeptide expressing nucleotide sequence isolated from the Sargasso Sea
gatctagatttaggtcactatgaaagatttactgatactgcaatgactaggttaaatagtgtgactacgggatctatttatcaagcagttattaataaagaaagaaaaggcaattataacggtggaactgtgcaagtaatacctcacataacgggagaaattagagaaaggattcatagagtagccgctaacagcaatgcagatattattattactgaaattggtggaacagttggtgatattgaatctctaccttttttagaggcaataagagaattcaaaaatgatgtcaataggaacgatgttgcatacatacacgtaacattacttccttacatcaaaacctctggcgaaataaaaactaaaccaacacaacattcagtgaaagaattaagatcaattggaattcagccagatttacttgtatgccgaagtgataaatctatcaatgaagctcttaaaaaaaagcttagtggtttttgcggtgtcaatatcaactctgtaattgaagctttagacgcagacagtatatattctgtacctctttctttaaaaaaagaaggtttatgcaaagaaaccttgaagtatttagaccttgaagataaaaaatgtgatttgaaaaattgggaacaactaatacacaacctaagaaatcctggagatccaataaaagttgcacttgtaggcaaatatattgaacttggagatgcatatttatccgttgttgaagctttaagacatgcatgcattgaacaaagggctttattagatttacattgggtaagtgctgaaatgatagaaaaaaattcagcagaaacttacttaaatgaagttgatgcaattgtcgtacccgggggatttggcaatagaggagtaaatggaaaaatttcggctataaaattcgcaagagaaaataaaattccctttttaggtttgtgccttggcatgcaatgtgcagttatagaatgggccaggaatgtagctaatcttccagatgcatctagttcagaattagacccaaacactccaaatccagtgatacatttattaccagaacaggaagatgtagttgatttaggtgggacaatgagacttggagtttatccatgtagactgacaaaaaatacaactggaaaaaacttatatgatgaggatgttatttatgagagacatcggcatagatacgaatttaataattactacaaacaaagttttttagattctggatacaaaattagtggtacatcaccagatggcagattagttgagttaattgagttagaaaatcatccatacttcttagcctgtcaatatcatcctgagtttttatcaagacctggcaaacctcatcctttatttaaaggattaataaaagcctctcaagataagttaactcaatcaaattaat

SEQ ID NO: 315243 - DNA, 500 bp, Unknown
  Bacterial polypeptide expressing nucleotide sequence isolated from the Sargasso Sea
aatgtcaaaatttgtatttgtcaccggaggagtagtttctagcattggtaaagggattgtagctgcaagcttaggaagattattaaagtctagaggatatagtgtttcaatattaaaactagatccatatctaaatgttgatccaggaacaatgagccctttccaacatggagaagtatttgtaacagaagatggggctgaaaccgatctagatttaggtcactatgaaagatttactgatactgcaatgactaggttaaatagtgtgactacgggatctatctatcaagcagttatcaataaagaaagaagaggtagttatgacggtggaactgtgcaagtaatacctcacataacaggagaaataagagaaagaattcatagagtagccgcaaacagtaatgcagagattataattactgaaattggtggaacagttggtgatattgaatctctaccttttttagaggcaataagagaattcaaaaatgatgtcaata

SEQ ID NO: 315244 - DNA, 1441 bp, Unknown
  Bacterial polypeptide expressing nucleotide sequence isolated from the Sargasso Sea
agaagtatttgtaacagaagatggggctgaaaccgatttagatttaggtcactatgaaagattcactgatactgcaatgactaggttaaatagtgtgactacgggatctatttatcaatcagttataaataaagaacgaagaggtagttataacggtggaactgtgcaagtaatacctcacataacgggagaaataagagaaagaattcatagagtatcggccaacagcaatgcagatattattattacagaaattggtggaacagttggtgatattgaatctttgccttttttggaggcaattagagaattcaaaaatgatgtcaataggaacgatgttgcatacatacacgtaacattactcccttacatcaagacctctggcgaaataaaaactaaaccaacacaacattcagtgaaagaattaagatcaattggaattcaaccagatttacttgtatgccgaagtgataaaccaataaatgaaggtcttaaaaagaaacttagtggtttttgcggtgtcagtatcaactctgtaattgaagcgctagatgctgatagtatttattcagtacctctttctttaaaaaaagaaggtttatgcagagaaacccttagttatttacaccttgaagataaaaaatgtgatttgaaaaattgggagcaactaatacacaaccttagaaatcctggaaatccgatcaaagttgctttagtaggtaaatacattgaacttggagatgcatatttatccgttgttgaagctttaagacatgcatgcattgaacaaaaggctttattagatttacattgggtaagtgctgaaatgatagaaaaaaattcagcagaaacttacttaaatgaagttgatgcaattgtcgtacccgggggatttgggaatagaggagtaaatggaaaaatttcggctataaaattcgcaagagaaaataaaattccctttttaggtttgtgtcttggtatgcaatgtgcagttatagaatgggccaggaatgtagctaatcttccagatgcatctagttcagaactagacccaaaaactcccaatccagtgatacatttattaccagaacaagaagacgtagttgatttaggcgggacaatgagacttggagtttatccatgtagattgacaaaaaataccactggaaaaagcttatatgatgaggatgttatttatgagagacatcgacatagatacgaatttaataattactacaaacaaagttttttagattctggatacaaaattagtggtacatctccagatggcagattagttgagttaattgagttagaaaatcatccatacttcttagcatgtcaatatcatcctgagtttttatcacgccctggcaaacctcatcctttatttaaaggtttaataaaagcctctcaagataaattaactcaatcaaattaa

SEQ ID NO: 315245 - DNA, 934 bp, Unknown
  Bacterial polypeptide expressing nucleotide sequence isolated from the Sargasso Sea
atgggaattaagaaaactaaatttatctttgttactggaggagttgtttcttcattaggtaaaggtatagcttctgcttctttaggtgctttattagaaagtagaggcctatcagtcactattcttaagctcgatccatacataaatcttgatccgggaacgatgagtccttttcagcatggcgaagtttttgtcactgaagatggatctgagactgatttagacttaggacattatgagaggtttttaacttcaaaaatgactagttcaaataatttcactacaggacaagtttatgaaactgttctaagaaacgaaagaaaaggtgaatatttaggtggtacggttcaagtgatacctcatataactgatgaaataaaaagaagaattattaaaggtgcttcaaattctgacattgcaattgtagaaataggcggaactgttggtgatatagagtctcaaccttttcttgaagctataagacaaatgaagattgagcttggtcctaagcaaaccttatacatgcatttaactttagttccatatatagctgcagctggagaaataaaaacaaaaccaactcagcgttcagctaaagaaatgctttctcatggccttcagcctgatattttagtctgtagatcagaagttgaattatcacaagaagccaaagaaaaaattgccttatttactaatgttgaaaaagatagtgttatttcaatgccagatgctaaatctatttatgagattccaattcatctaaattctcaaggtgtagataatctggttgccagaaaattcggacttaaatctaaaaaacctgaccttaaagaatgggatagagtagttaaggcacatttaaatcccactaaagaagttaaagtttcaatggtaggtaagtatatggatttaaaggatgcatataagtcgctaa

SEQ ID NO: 315246 - DNA, 1312 bp, Unknown
  Bacterial polypeptide expressing nucleotide sequence isolated from the Sargasso Sea
atggcccaaactaaatacatttttattacaggtggagtggtttcatcacttggaaaaggtatagctgctgcctcaataggagctcttcttgaatcaagaggtttatcagtatcattaattaaagtcgatccatatataaatgtagaccctggtaccatgagcccatttcagcatggagaagtatttgtaacgaatgatggaacagaaacagatctagatcttggtcattacgaaaggtttgttagatttgaggcatcaaaaaaaaataattttacagctggaaaagtgtatgaaactgtaatcagaaatgaaagaagaggtaattatttaggaggcactgttcaagttattcctcacattacaaacgaaatcaaaaaaagaattaagtcgggcggtcaaggcaaagacgtagccatagttgaagttggaggaaccgtaggtgatattgagagccaaccttttgtagaggcattaagacaaatggcattagagcttccaagttcttcttgggcatttgtacacttaactcttgttcctttcataaatgcatcaggcgaacttaaaactaagcccacacagcattcagttaaagaattaagatcacttggtattagccctgatgttcttatttgtcgatcagataaagaattaccaaaagatgaaagaaacaaaatagctttattctgctcagtccctaataagagtgttatctctatgcatgatgtagatacggtatattcaataccaattttacttaataaacaaaaagtagataaaacaattcttgaaaaattaaaaattaaatctaaaaatcctcaattaaatgattggaaaagagttgttaaggcaaaacttcttcctgaaaaagaggtaaatgttgcatttgtaggtaaatacacagaattaaaagattcatataaatctataaatgaagctttagaacatgccggcattaaaaataagactaaagtaaatataaattttgttgaagctgaaaatctcacaacaagaaatgtaaataaaattcttaaaaaagcagatgctattttggttccaggtggctttggagaaagaggaattgaaggtatgatacttgcttgtaaattttcaagagaaaagaacattccctacttaggaatttgtttgggtatgcaggttgccatcatagaatatgcaagaaatgttttaaaattaaaaggagcaaacagtactgagtttgatcaacaaacaaaacatcctgtaattggtctaataactgaatggagcgatatatcaggcaaaaaagaaacaagatcaaaaaattctgacttag

SEQ ID NO: 315247 - DNA, 717 bp, Unknown
  Bacterial polypeptide expressing nucleotide sequence isolated from the Sargasso Sea
catggcgcgatatatatttgtcacgggcggcgtggtatcatcattaggtaaaggtttatcctcagcttcacttgcgtatcttttacaatcaagaggttttaaagttaggatcagaaaacttgatccatatcttaatgtagatcctggaacaatgagcccatttcagcacggtgaagtatatgtcactgatgatggtgctgaaacagatttagaccttggtcactatgaacgattttcaggagtatcagcaaagaaatcagacaatattactacaggcaaaatatataatgatgttttaaaaaaagaacgtaaaggtgagtatcttggaaaaactgttcaagtaattccacatattacagatcgtataaaacaatttattaaaaacgactcatcaaaagaggattttgttatttgtgaaatcggagggatagttggagatatagaaagtcttccttttgtcgaagcaataagacaatttgcaaacgacattggtaagaaaaatgctttatttattcatttaaccttagttccttacttaagggcatcagatgagataaaaacaaaaccaactcaacactctgtaaaagagttaagaagtataggtattcagccagatatcatcatttgtagatctgaaagatcaatcccattagagcatagaaaaaagatttctttgttttgtaatgttaatatcaaaaatgttatagaaactattga

SEQ ID NO: 315248 - DNA, 886 bp, Unknown
  Bacterial polypeptide expressing nucleotide sequence isolated from the Sargasso Sea
atggggcaaaaaacaccaataaaatatatctttgttctgggtggagtgatatctgggcttggtaagggtattgcagctgcttctataggctacctcttgaaaagtgcaggcctaaaggtcactattcttaaattagatccatatctaaatgtagatcctggaactatgaatccataccaacatggagaggtgtttgttttggatgatggatctgaaacagatttagatcttggtcattatgagagatttattgatgtagatatggcaaagataaataatgcaactactggtcaagtctatagcactgttcttggaagagagagaaaaggagattatttaggggcaacgattcaagttattcctcatattacagatgaaatcattgcgcgaattaaggcaataaataaaccaaagaaatttgatgttgttatttgtgaagtaggaggtactgtaggagatattgaaagccttccatttatggaagcgatacgtcaactttctcttgaggttggatatcataatcataccattatgcacgttacgcttgtaccttacatccaagctagtgaagagctaaaaaccaaaccaacccaacattcagtaatgaaactacgtgaaattggtttatcacctgatatgattctttgccgtacagaatacaaactcacgaaagatgtaaaaaataagataggactttttggcaacgtaaatccagagcatgtaatagaaggatctgaggttaaaagcatctatgaagttccgcttactttatacaatcaaaaagtatctgaaattattatggatcgccttcagcttaatggtaaggctaatattgcttatttgaaaaactttatcaaaaattcaaacacccaaaacataaagtaaa

SEQ ID NO: 315249 - DNA, 1645 bp, Unknown
  Bacterial polypeptide expressing nucleotide sequence isolated from the Sargasso Sea
catgacacagtatatttttataactggtggcgtggcatcttcattaggaaaaggactcacatcagctgcattaggcgctcttcttcaatcaagaggatttagtgtaaaaattaaaaaacttgatccttatcttaatgttgatcctggaacaatgaatccttttcagcatggtgaagtttttgttactgatgatggcgctgagactgatcttgatttgggtcattatgaaagatttacgaatgttcccgcatcgattaatgataacattacgacaggtcaaatttataaaagaatcataagcaaggaaagaaaaggggattaccttgggcgaacagttcagattattcctcatgtcactgatgagataaaaaaatttattctttctaataatgaaaatattgacttttgtttatgtgaaattggaggaacagtaggcgatattgaggggctacctttctttgaagcaataagacagctaagtaatgaattaaagaaaaatatgacttgttttcttcatttgacccttgttccatatattagcgctgcgggtgaagttaaaacgaaacccacccaacattctgtaaaggaattaagatcaattggtattcaaccggatatacttgtttgtaggtgcgatagaaaaatttcaaaatctgatataagaaaaatttcagttttttgtaatgttaatgaaaattcagtaattcaagctatcgatgtagatacaatttatgccgttccaagggatttaaaaaataatggtttagatattgctgttttgaatgcgttaggaaaaaatactattcctaaatcaaatctgagaaaatggaatacagttgttgatagaattagaaaaccaattggagaggttaaaattggtgttgtaggcaaatatcttgatttaaatgatgcttacaaatcattgtttgaggctctaacgcatggaggtatatcaaataatgttagagtaaaaattaaaaatattgataccgataaattagaaaagagtaaaaataaaaaaatttttgccgatgtgaacggaatattagttcctggagggtttggcaaaagagggtcagagggtaaaatttttgcatcaaaatatgctagagaaaataatataccttttttcggtatctgttttggaatgcaaatggcagttgttgatgccgcaagaaatttaatagggtataaatctgctagctcaagtgaatttggtaaaactgaaatacccgtaatcggattgcttactgagtggataaaagataaagaaattcaaacaagagatttagaaagtgaatatggtggaacaatgcgattaggatcttatcctgcagtactttcaaaaaattcaaaagtaagagatatttatggttctaagaaaattaatgaaagacataggcatagatatgaagttaatatgtcatttgttgatgagctagaaaaagcaggattgaggtttgttggaatgtctccagatggattgctgcctgaaatagttgaattaaaaaatcatccttggtttataggtgtgcaatttcatcctgaattgaaatcaaggccatttaatcctcatccattattttcatcttttattaaagcatcagttaaaaaatcgaaaactaatggtaaaataaaaaaatga

SEQ ID NO: 315250 - DNA, 1203 bp, Unknown
  Bacterial polypeptide expressing nucleotide sequence isolated from the Sargasso Sea
aaaaacaggatgtctctatagttgagattgggggaacagttggcgacatagagagcttaccttttctagaatcaataagacaaattaggtcccagcttggtagggaaaatgcaatatttattcatttaacttatgttccatatttaacagccgcaggtgaactaaaaacaaagcctactcaacatagtgttaaggatcttcttcagataggaattcagccagatattttgctttgtagaacagatagatttttatctaatgatatcaagaagaagatagcgcttttttgtaatttaaatgtggagtcagttatcacagcaaaagatgttgatataatatatgaaatacctcttgttcttcataaagaagggctggatgatatcattctagaaaatcttaaaatctggactaaagagccagatttttccaagtgggaaaatatagtttcaaagattaagaaattaaagaaagaagttactattggcgtagttggaaaatatatagatttaaaagatgcatataaaagccttcatgaagcgctttatcatgcctcttttcataataatgtaaagcttaagattaattatattgattctgaagatttgcaaaaggatacaccaaaaaatcttctttctgattgtgatggaattctggttcctggtggatttgggaatagaggttttgaaggtaagatttctgcaatcaaatatgcgcgagagaaaaatattcctttttttggtatatgcttgggacttcaaatggctgttatagagtatgctagaaatgtttgtgatttaaaaaatgcaaactctagagaatccggaagaaaaattaaagattttgttatagatattatggaagaccaaaaaaatctcgattctaaaggggggaatatgagacttggagactatccctgtgaaattaagaagtcaactaaagttgccgaagcatatagaaaaactaaaattcttgaaagacataggcatagatatgaagttaaccccaaataccataatattttatctaaaaaggggttaattctaagtgggctttcacctgacggtaagcttgcagaaacaatagaaattaaagagcacccttggtttgttgcttgtcaatttcatcctgagtttaaatcgaagccgtttcagccacatcctttatttctgaattttataaaagcctcctctaaaaagtcttaat

SEQ ID NO: 315251 - DNA, 502 bp, Unknown
  Bacterial polypeptide expressing nucleotide sequence isolated from the Sargasso Sea
catggcgcgatatatttttgtcactggcggcgtggtatcatcacttggaaaaggtttatcatcagcatctctagcttatctacttaaatcacaaggctttaaagtaagagtaagaaaaatggatccttatttaaatgttgatccaggaacaatgagtccatttcaacatggtgaggtttttgtaacagatgatggagcagagactgatttagaccttggtcattatgaaagatttaccgatatatcatctactaaaaatgataatattacaactggaaaaatttatagtgatatcataactaaggaaaggaagggtgattaccttggtaaaactgttcaagtaattccacatgttactaatagaattaaagagtttattaagaatggaattaaaaatgaagattttgttatctgtgaaattggaggaacagttggtgatattgagagtctgccttttctagaagctataagacaatttgctaacgatataggtaaagaaaaa

SEQ ID NO: 315252 - DNA, 553 bp, Unknown
  Bacterial polypeptide expressing nucleotide sequence isolated from the Sargasso Sea
tttggaaagaggaaccgagggcaagatagcatgtataaattatgcaaggactaaaaaaattccttttttggggatttgttttggtatgcaaatggcagtaattgaatttgctagaaatgtacttaaaattaaaaatgctggctctagtgagttcgataaaaattgctacccggtaattggtcttattgaagaatggaataaaaacggtagaaaaattaaaggaactgtgaaaaatttaggtggaactatgcgattaggtctttatccagctaaattacaacacaattccttaataaaagaaatttacaagtctagtcaaattaaagaaagacatagacatagatatgaggttaatgtcaatttgagaaaaaaatttgaaatacacggattaaatttttcaggaatgtcccctgacaacaacttacctgaaatcgttgaaattaaaaatcatccttggtttattggagttcaatttcacccagaatttaaatctagacctttgcaacctcatccattattctcatcatttattgaagctgcaaaaaaaaaataa

SEQ ID NO: 315253 - DNA, 1216 bp, Unknown
  Bacterial polypeptide expressing nucleotide sequence isolated from the Sargasso Sea
catggcgcgatatatatttgtcacgggcggcgtggtttcatcattaggtaaaggattatcctcagcttcactagcatacctacttcaatcaagaggttttaaagtaaggatcagaaaacttgatccgtatctaaatgtagatcctggaacaatgagtccatttcagcatggtgaagtgtatgtaactgacgatggtgctgaaacagatttagaccttggtcattatgaacggttttcaggggtatcagcaaaaaaatcagacaatatcactacaggtaaaatatataatgatgttttaaaaaaagaacgaaagggagagtatcttggaaaaactgttcaagtaatcccacatattacagatcgcataaaacaattcattaaacacgattcatccaaagaggactttgttatttgtgaaatcggagggatagttggagatatagaaagtcttccatttgtcgaagcgataagacaatttgcaaacgatgttggtaagaaaaatgctttatttatccatttaactctagttccttacttaaaagcatcagatgagataaaaacaaaaccaacacaacattctgtaaaagagttaagaagcataggtattcagccggatattatcatttgtagatctgaaagacccataccattagagcatagaaagaagatttctttgttttgcaatgtggatattaaaaatgtaattgaaactgtcgatgtcaaaactatttacgaggcaccaataagtttttttagagaaaaattagatgttcaagttttaaattattttaaattaaaaactaagaagcctgcaaatttaaatccttggaaaaaaataacaaaaattattttacaaaataagagacaagtgaatattgctattattggaaaatatgttgagcttcaagatgcatataagtcattagatgaagccttaacacatggtggaatagataataaaattaaagttaatttagtcaggattgactctgaaaaattaaaaattacagaaataaagaaaaaactaaaaaatatttcaggaatattgatacctggtggatttggtaaaagaggtaccgatggaaaaatacaagctataaaacatgcaagaatgaataaaattcctttccttggaatatgttatggaatgcaaatggcaattattgaatttgctagaaatgaactcaatttaaaaaatgctacttcaagtgaattt

SEQ ID NO: 315254 - DNA, 1144 bp, Unknown
  Bacterial polypeptide expressing nucleotide sequence isolated from the Sargasso Sea
atggcgaaaactaagtatatttttatcactggtggagttgtttcctctctaggaaagggtattgctgcagcttcaattggggctcttcttgaggctcgcgggctaaaggtttccttattaaaattagatccctacatcaatgttgatcctggaactatgagcccatttcagcatggagaggtgtttgttaccaatgatggaacagaaacggaccttgacttgggtcactatgagcgttttgttagatttgaggcttctaaaaagaataactttactgcaggtatagtttatgaatctgttattaagaacgaaagaaagggtaaatatcttggtggtactgttcaagttatcccccatataaccgatgaaattaaaagaagaattaaggcaggagcagctggaagcgatgttgctatagtagaaattggtggaactattggtgatatagaaagtcagccatttgttgaagctattagacaaatgtctttagatcatccttcaaaatcaacatcatttgttcacttgactcttgttccttacattgatgtttcaggcgagctgaaaacaaaacctactcaacattcagttaaagagctgaggtcgctgggcattggtcccaactgtcttatttgtagatctgaaacagagcttcctaaagatgaaaaaaagaaaatagcactattttgctcagttgatatttctaatgttatatctatgcacgatgtagataccgtttactcaatacctttgttacttcataaacagaaggtagatgaaatagttttaaaagatttgggtctcaagaccaaaaaaccggacttaaatgattggaaaaaagtggttaaagctaaactaaatcctaaaaaatctattgaaattgcaatggttggaaaatatacagaattaaaagactcttataaatctcttaatgaagcgctcgatcatgcaggcatcaaaaataatgcaaaagtaaatataacttttgtagaggcagaaaaattaaccaaaagaaatattaaaactaagcttaaatttgcagatgctgttttagttccaggtgggttcggtagtaggggtattgaaggtatgatcattgcctgtgaatatgcaagggtaaaaaatataccctatttttggaatatgt

SEQ ID NO: 315255 - DNA, 1012 bp, Unknown
  Bacterial polypeptide expressing nucleotide sequence isolated from the Sargasso Sea
catggcgcgatatatatttgtcactggcggcgtggtttcatctcttggtaaaggtttagcctcagcatctttagcttatttattaaaatcacaagggtataaagtaaggataagaaaaatggatccttatctaaatgttgatccaggaacaatgagtccttttcaacatggtgaagtttttgtaacagatgacggtgctgaaacagatttagatctgggtcattacgaaagatttacaaatatttcttcaaagaaatcagataatattacaactggtagaatttatagtgatataatttacaaagaaagaaaaggtagttacttaggaaaaactgttcaagtgatacctcacgtgacagacagaattaaagaatttataaaaaaagatattactaatgaagattttgtaatatgtgaaataggaggtacagttggtgatattgaaagtcttccattcttagaggcaataagacaattttcaaatgataatggaaaaaataaaacgttatttattcatttaacactagttccatacatgaaagcctctgatgaaattaaaaccaaaccaacacaacattcagttaaagaactaagaagtttaggaatccaacccgatattgttatttgtagatctgaaagatcaataccgctggatcaaagaaaaaaaatatcgttattttgcaatgttccaatagaaaatgttatagaaactgtcgatgtaaagactatttatgaagccccaataagtttttttaaagaaaaattagataaacaagttttaaaacattttaaaattaattccaaaaggacagccaacttaaaaccatggaaaaaaataacagatataattttaaaaacaaatactcaaataaacattgctataattggtaaatatgtaaacttaaaagatgcatataaatcactagatgaagctttaactcatggtggaatagataataaggtaaaagtaaatttaattagaattgaatctgataatttaaagtcaaataaa

SEQ ID NO: 315256 - DNA, 1615 bp, Unknown
  Bacterial polypeptide expressing nucleotide sequence isolated from the Sargasso Sea
gatgaataagccaaagtatatttttgtcacaggtggtgttacatcatccttaggaaagggtataatatctgcttctctggctagacttttacaagctcaaggcctcaatgttgcaattcaaaaattagatccttacataaatgttgatcctggaactctaaatccatatgaacatggagaatgttatgtaaccgatgatggagctgaaactgatcttgaccttggccattatgaaagatttcttagtacaaatacttcacaaagaaataatgttactacaggaaaaatctatcaagatgtaattgagaaagagagaaaaggtgagtttctgggtaaaacagtacaagttatacctcatataaccaacgaaataaaagaaaatataagaaatcttgaccataagaataatttagaaataattattacagaaatagggggtacagttggagacattgaatctttaccttttatagaagcagttagacaagttatttatgaagaaggtcctgataactctatggttatccatcttacacttataccatttttatctgcaactggagaattaaaaactaaacctacacaacattcagtaaaaactttaatggaacttggtttaaaagctgatgttctagtgtgtagatccgaaagagatctctctgatgaggttaagaaaaaacttgcacttttttgcaatgttaaattagattgtgtaatccagtcaattgatgtagaaacaatttatgatgttcccatgaaaatgagagatgaaggacttgataaagtaactcttgaaaaattaaaaatcgatgaatcagaaccaaatcttgataaatggaaaaattttttacacagactaaaaaatcctactcatcaaattaatattggtttagtagggaaatatgttgagcttaacgattcttataaatcaattcttgaatctctgattcacggtggaactgaaaatgaagtaaaagtcaacgttaaatctattcactctgagtatttaaataaggaaaatattaataaggaattggttgaccttgatggaataattgttgcaccaggttttggtcaaagaggtttggatggtaaaatactagctgtcgaatattcaagaataaataaaattccttttttaggtatttgtctaggaatgcaaatggcagtaatcgagtatgcaagaaatgtaaaaaagattaggtatgctaattcaacagaaatttcagagaaatgtaaagatcctgtgattgatttaatgacatctcaaaaagaaataatcaataaaggggggacaatgaggttaggagcatgggattgtgagattttaaaggatacagtttctcgaaagatttatagtaaaaaaatgatatctgagagacatagacacaggtatgaatttaataatgaatattcaaaagaaatttttgatgaaaattttattgtcgctggtcgtaatcctgatactaacttagttgaaatagttgaaaataaagatcacccatggtttgttggtgttcaatttcatccagaatataaaagtagtgtatacaatcctcatccaatttttgtaaactttgtaaaagctagtttaaaaaactacttaaaaaaataa

SEQ ID NO: 315257 - DNA, 1226 bp, Unknown
  Bacterial polypeptide expressing nucleotide sequence isolated from the Sargasso Sea
aagatttgtaatttgcgaaataggcgggactgtaggtgatatagagagcttaccttttttagaagctataagacaattctctaatgaaataggtaagaaaaatactttatttattcacttaacgttagtcccatatatgagagcgtctgatgaaataaaaacaaaacccactcaacactctgtaaaggagcttagaagtattggaattcaacctgatataattatttgtagatcggaaagatccatccctttggatcaaagaaagaaaatttcgttattttgcaatgtttcaattgaagacgtcatagagactgttgatgtaaaaacaatttacgaggcacctataagttttaataaagaaaaactcgatgaaagagttttaaactattttaagataaaatctaaaaagaaagttaatctaacaccatggaagaagataactaaaaaagttttaaatacaaaaaataaagtaaatatagcaataattggaaaatatgtagaactaaaagatgcttacaaatctttagatgaagctttaacgcacggaggtatcgcaaatgatttaaaagtaaatctaataagagtcgagtcggattatttacaaccaaagcaaattaaaaaaagattaaataaggcgtcagggatactcatacccggagggtttggtaaaagaggaacagaaggaaaaatagcagcagttaatttcgctagaaaaaacaaaattccttttttaggaatttgttttggtatgcaaatggcagtaatagaatttgctagaaataaattaaatataaaaaaagcaacttcaagtgaatttggtccatccaaggtttcagttgtcggtttaatgagtgaatggtcaaaagatggaaaactaatgaaaggcactgataaagatttaggtggaacaatgcgattaggtagttatgaagctagacttaaaaaagacacaaagataagcaaaatttataattctttaagaatagaagaaagacatcgtcatagatatgaagttaatattaattttaaaaagaattttgaaaataaaggaatgattttttcaggtatgtctccagataataaattaccagaaattatagaattaaaagatcatccctggtttataggagttcagtttcatcctgaatttaaatctagacctttatcgccacatcctttattctcttcttttataaaagccgcaaaaaataattcgaaaaaatgaa

SEQ ID NO: 315258 - DNA, 1281 bp, Unknown
  Bacterial polypeptide expressing nucleotide sequence isolated from the Sargasso Sea
tatgtcagattatatttttgttacaggtggagttgtttcagcactcggcaagggtgttacatccgcttctctaggcgctattttagaggctagagggcttaagattggaatgatgaagcttgatccatacctcaatgttgacccaggtacgatgagcccatatcaacatggggaagtctttgtaactgaagatggaacggaaactgatttggatttaggccattatgagagatatgtttcaaccataacaggaaaacacagtaattatacagctggtaagatttacgaaactgtcatcgcgaaagaaagaagaggcgattacctaggagcaaccgttcaagtgatccctcatgttaccgatgaaatcagaaaaagcatcgtcaaaggatcacaaggttatgacgtaacaatcgttgaaattggtggaacagttggagacattgagtctcttccattcattgaagccataagacaaatggggatctataaagatgattatgaagttgcatatgttcatttaacattagtgccatatatcaaagcatcttcagaaattaaaaccaagccaactcaacattcagtgagagagcttcgagcaatcggaattcaacccgatgccctggtctgccgatctgaactacctctcccaaaagaacattttgataagattgctctttttacaaatgttgaaaagaaagctgtcatttctgctcatgatgctgaagacatctatcagatacctctgatcctaagggaacaatgcttggatgacataatagttcaaaaattgaaattggatgtgccaaaagcagatttgtctccttgggaaaatgttttcacagaatcaagaaatagtgattccaaagtaaaaatagcaatggttgggaagtatgtagactttaaggattcatacatttcattgagtgaagcacttagacatgccggttttaaaaatagtaagggtgttgagatcgtttatgtcgaatctgaagatattcaagagaatggaaccgattgtctttctgaaatggatgccattttgattcccgggggatttggagatcgaggcatagagggaatgattcaatccattgaatatgcaagaaagaatgatatcccttttctaggtatttgtcttggaatgcaagcagctgtaattgaatatgctcgaaatgttttggatcataaggatgcgaatagcactgagttttactcaagaacttctgcgcctgtaattgcaatgattacagaatggatgaatgatgacggctcaaaagagaa

SEQ ID NO: 315259 - DNA, 649 bp, Unknown
  Bacterial polypeptide expressing nucleotide sequence isolated from the Sargasso Sea
atgcagaataattttgaagtagagaacctacaagatatgaacggagttattgttccaggaggatttggatatagggggatagaaggaaagatttcagcaatagagtacattagaaaaaataacattccatttttaggtatatgtttaggattacaatgcgctgtaatcgaatttgcaagaaatgtttgtggaattgatgatgcaaactcttcagaattttcaaaaaatacaaaaaattatgtgattgatttgctaccaaatcaagatttagaaaaagatgatgtcggtgcatctatgagactaggtacatacccatgtaaattaaatgatgattcattagctgcacaaatttatagtgatgaagtaatttatgaaagacataggcatagatatgaagtgaataataaatatagagatatattagtagaaaaaggtctaaaaattgggggagtttccccagacaataatttagttgaaatgatagaaattccagaccacccattttttatagcttcgcaatttcatcctgaatttaaatcaaggccatgggacccagctcctttattcaaagaatttgtacttgcttcaattaaaaacatatcaataaaatcagaaaacattgtctcagaaacaatcaaagaaaagtaac

SEQ ID NO: 315260 - DNA, 1627 bp, Unknown
  Bacterial polypeptide expressing nucleotide sequence isolated from the Sargasso Sea
atggctcaaactaagtatattttcataactggaggagttgtttcctcgctcggaaaaggcattgctgcagcgtctataggagctcttcttgaatctagaggcctttctgtatctttaattaaagttgatccgtatataaatgttgatccaggaaccatgagtccatttcagcatggtgaggtttttgtgactaatgatggaactgaaacagatctagatcttggtcattatgaaagatttgtaagattccaagcttcaaaaaagaataattttactgctggcaaggtttatgaaacagtcattagaaatgaaagaaaaggcttataccttggaggcacagttcaagttattcctcatatcactaatgaaataaaaaaaagaatcaaagagggcggtcaaaacaaagatattgctatagtagaagttggcggcactgttggagatattgaaagtcagccatttgttgaagctttaagacaaatggcgttagaacttcctagtgcttcttgggcttttgttcatttaacacttgtgccatacataaatgcatcaggtgaacttaaaacaaaacctacacagcattcagtcaaagaattaagatcattgggtataagtcctgatgtattaatttgcaggtctgatcaagaattacctagtgatgagaaaaacaagatagcgcttttttgttcagtgcctaatgatagtgttatatctatgcatgatgttgaaactgtatattctgtgcctcttcttcttcatagccaaaaagttgataagtctattctaaagaaattaaaaattaatactaaacaagcccagttaaatgactggaaaagagttgtaaaagctaagctgcttcctgaaaaagaggtaaccgtttcttttgtaggtaaatatacagaattgaaagattcatataaatcaattaatgaagctttagagcatgcgggaataaaaaataagacgagggtcaatatcaattttgttgaagctgaaagtttaacttcaaaaaacattcataaaacattgaaaaattctgatgccattcttgttccaggaggttttggagagagaggtatagagggaatgattttagcttgcaaatatgccagagaaaaaaatatcccttatctaggaatctgtctaggaatgcaagttgcaattattgaatacgccaggaatgtacttaaattaaaaggcgctaacagcacagagtttgatcaaaatacaaaatatccagttataggtttaatcactgaatggaatgatatatctggtaagaaagaaaaaagagacaaacattctgatcttggaggaacaatgagacttggtggtcaggtatgcaaactgaagaaaaaatcaaattcgtatagaatgtataaaaatctagaaatagttgaaagacatagacatcgttatgaagttaatccaaaatttaaagacaagatgataagtgcaggcctagatgtggtaggaacatccattgatggaaaattagtagaaatgatagaaatcccaaatcataaatggtttcttgcgtgtcaatttcatcctgaatttacttcaaatccaagagatggacacccaatttttaatagttatataaaaagtactttaaaaagatagt

SEQ ID NO: 315261 - DNA, 1531 bp, Unknown
  Bacterial polypeptide expressing nucleotide sequence isolated from the Sargasso Sea
atcaagaggctttaaagtaaggatcagaaaacttgatccatacttaaatgtagacccaggaacaatgagtccatttcagcatggtgaagtttatgtgactgacgatggtgctgaaacagatttagaccttggtcattatgaacgattttcaggagtatcagcaaaaaaatcggacaacatcactacaggcaaaatatataatgatgttttaaaaaaagaacgtaaaggagagtatcttggaaaaactgttcaagtaattccacatattacagatcgcataaaacaatttattaaacacgactcatccaaagaggactttgtaatttgtgaaattggagggatagttggagatatagaaagtcttccatttgttgaagcgataagacaatttgcaaatgatatcggtaagaaaaatgctttatttattcatttaactctagttccttacctaaaagcatcggatgaaataaaaacaaaaccaactcaacactctgtaaaagagttaagaagcataggtattcagccagatattatcatttgtagatctgaaagacccatcccattagatcatagaaagaagatttctttgttttgtaatgtggatattaaaaatgtaattgaaactgttgatgtcaaaactatttacgaggcgccaataagttttttcagagaaaaattagatgttcaagttttaaattattttaaattaaaaactaagaagcctgcaaatttaaatccttggaaaaaaataacaaaaattattttacaaaataagagacaagtgaatattgctattattggaaaatatgttgagcttcaagatgcctacaagtcattagatgaagccttaacacatggtggaatagataataaaattaaagttaatttagttaggattgactctgaaaaattaaaaatttcagaaataaagaaaaaactaaaaaatatttcaggaatattaatacctggtggatttggcaaaagaggtacagatggaaaaatagaagcgataaaacatgcaagaatgaacaaaattcctttccttggaatatgttatggaatgcaaatggcaattattgaatttgcaagaaaccaactcaatttaaaaaatgctacttcaagtgaatttgataaaaaaggtcttccgattattggtttactaaacgaatggtctaaagatggtaaaactattaagggtactgataaagatcttggtgggacgatgagactaggatcttatgatgctaaattacaaaacaatacaaagatcagaaaaatttataactctaagttaattaaagagcgacatcgtcatagatacgaggttaatattgcatatagagaaaaatttgaaaaaaaaggcatgattttttcaggtttatcacctgataatcaattacctgaaattattgagcttaaaaaccacccatggtttattggggtacagttccacccagaatttaaatctagacctttatcgccccatcctttattctcttcatttatcaaggcagcaaaaaatcataaatga

SEQ ID NO: 315262 - DNA, 952 bp, Unknown
  Bacterial polypeptide expressing nucleotide sequence isolated from the Sargasso Sea
atggctcaaacaaagtacatttttatcaccggtggtgttgtttcctctcttggcaaaggtatcgcggccgcatcaattggagctctttttgaggcaagaggtttaaaagtttccttaaataagcttgatccctatatcaatgttgaccctggaaccatgagcccctttcagcatggggaagtctttgttactgatgatggaacagagactgacttagatcttgggcattacgaaagatttgttcgttttcaggcaagtaaaaaaaataattttactgctggaaaagtttacgaagaagtcatacaaaacgaaaggagaggtgactatctcggagggactgttcaggtcattccccatatcacagacgaaattaaaagaaggattaaagaaggtgcaaaaggtgctgatattgcaattatagaaataggcggaacagtaggtgatattgaaagccagccttttattgaggcaatcagacaaatgatgcttgagctcccatcacctaatactgcactggcgcatcttactttggttccctatattcaggtatctgaagagctgaaaacaaaacctactcaacattctgtaaaggaacttagatcacttgggttacaaccagattgcctaatatgcagattagaaaaagagctaccaaatgatgaaaagaaaaagatagcgttattttgctcagtagatcttaatagtgttatttcaatgcatgatgctgagacagtatattcaattcctttgctgttatattcacagggagtggataaaattcttctcaaaaaattaaacttattgaaagtaaaatctcctagattgaatgattggaaaagagtggtagatgcaaaattaaatcccaagaagaaagtcactattgccgtggtaggtaaatatgttgatctaaaagattcctacaaatcattaaacgaagcccttgatcatgctg

SEQ ID NO: 315263 - DNA, 499 bp, Unknown
  Bacterial polypeptide expressing nucleotide sequence isolated from the Sargasso Sea
tatgcaagtggcgctgattgaatttgcccgtaacgttgctggcatgaccgatgctcactcaactgaattcaataaagcaacgccattcccagtggttggtttaatcactgaatgggttgacgaagaaggtaacgttgaacaacgccatgaggcctctgatttaggtggcactatgcgtttaggtgcgcagttatgtcacctgcttgaaggttcaaaagcggcgcaagcgtacaaaggtaacacttgtgttgaacgtcaccgtcaccgttacgaagtgaacaacaagtacagagaacgtttagagcaagcgggtctggtatttagtggtttatcttctgaccgtaaactggttgagatgattgagcttaaagaccatccttggtttgtagcgggtcaattccacccagaattcacttcgaccccacgcgatggtcatccattgttcgaaggtttcgttgctgccgcaagtgcacatcaaaaacgtgatctgaagaaataa

SEQ ID NO: 315264 - DNA, 572 bp, Unknown
  Bacterial polypeptide expressing nucleotide sequence isolated from the Sargasso Sea
cagaggtatcgaagggatgattattgcctgcgaatatgctcgattaaatgcaaaaccctattttggaatttgtcttggaatgcaaattgctttgattgaatttgccaggaatgtattgaatttatctgatgcaaatagtactgaatttgatcctaaaacaaatcatcctgttgtagctttgataaccgaatggcaagatgcctctggtaaaaaagaaatcaggaatgaaaaatcagaccttggaggaacaatgagactaggaggtcaactatgtattttagataagaaatctaagtcttataaaatgtacaaaaaaacctccattgtcgaaagacatcgacaccgatatgaggtaaatccgacttacagagacagttttgatcaaaaaggaatgtcgattgtaggaacgtctgaagatggtaaattaattgaaatgattgaagtaaaaaaacatccatggtttttagggtgtcaatttcatcctgaatttacttcaaacccaagagatggacatcctatctttaatagctttatttcaagtacaataaaacaaaaaaatgaaacaaattgaa

SEQ ID NO: 315265 - DNA, 1226 bp, Unknown
  Bacterial polypeptide expressing nucleotide sequence isolated from the Sargasso Sea
aatgcaatatgtatttattacgggtggagttgcctcatctctaggtaaaggaatagcatcagcagcagttgcatctttacttcaacaaagaaattttaaggtacgaattagaaaacttgatccatatctaaatgttgatccgggcacaatgagtccatatcaacacggtgaagtttttgttacggatgatggtgctgaaactgatcttgatttaggtcattatgaaaggtttacaaatagatctgctaaaaaaactgatagtacatcttcaggaaaaatatattctaatgttttaaaaaaagaaagaaaaggagattatcttggagcaactatacaagttatccctcatgtaacagatgagataaagcttttcataaattctaattttgaagatgaggaaattataatttatgaaataggtggtactgttggggatattgaatctcttccatttttagatgcaataagacagattagaaatgataaaaaaatatcatcagctttaattcacatgacatatgttccttatttaagttcagctggtgaattaaaaacaaagcctactcaacactctgtaaaggaattactaaattcaggtattcaacctgatattataatgtgcagatgtgaaaaagaaattaatgaggagtctcttgagaagatatcacaattttgtaatgtaaaaaaagactcagtaattcctgccttaaatgccaattctatttatgaggttccatcaatttattctaaagctggacttgataaagttttacttgagcatttaggttatgatgtttctaagcaccctcttaatttagaagattgggaaaatttaacaaataaaatcaataatttaaaaaaagaagtgactatcggtgttgttgggaaatatacaaacctaaaagatagttataaatctttaatagaagctcttaatcatggaggtattgaaaataatgttaaagttaaaataaattggataaatgcagaaaaaattaaaacatcagaattagtacaagagcttaaaagtgtagatggtatattaatacctggtggttttggttatagaggtgttgaaggtaaaattttagcaataaaatatgcaagagaaaataacattcctttttttggaatttgtttaggaatgcaattaagtgtaattgaaatagcaagaaatgtttttgatttgtcagattctaattccactgaatttcaatctactaaaa

SEQ ID NO: 315266 - DNA, 562 bp, Unknown
  Bacterial polypeptide expressing nucleotide sequence isolated from the Sargasso Sea
atgtccaattcaacaaagtatgtttttgtaaccggaggagttacttcgtctcttggcaaaggcattatatctgcttcattagcaaaacttcttcaggcaaggggatacaccgcaaccatccaaaaacttgacccctatatcaatgttgatccaggaacattaaatccatatgaacatggagaatgttttgttaccgatgatggtgctgaaacagatctagatttaggacattatgagcgttttttggatgtcccaacttcacaagcgaataatgtaaccactggaaaaatataccagtcagttattgaaaaagaacgaaaaggagaatttttaggaaaaactgtacaagttattcctcatatcactgatgaaataaaacattgcattcaattattaggaaaaaatggcgattttgatattgtaatcaccgaaattggtggaaccattggagatattgaatcccttccatacgtggaagcagttagacaaatgatgtgggagtttgaaaacgattgtatagtggtacatttaactctagttccttatttatctgctgcaggag

SEQ ID NO: 315267 - DNA, 1642 bp, Unknown
  Bacterial polypeptide expressing nucleotide sequence isolated from the Sargasso Sea
atgactacaaggtatatcttcgttactggtggtgtggtttcatcactaggtaaaggcattgcagccgcttcattagccgcaattttagaggcccgtggtctcaatgtaaccatcatgaaactggacccatacattaacgttgatccaggtaccatgagcccaacgcaacatggtgaagtgtttgtgactgaggacggcgcagaaacagacctcgacctaggccactatgagcgtttcatccgcacgaagatgaatcgtcgcaacaacttcaccacaggccgtatttacgaagaaatattacgtaaagaacgtcgcggtgactatttaggcgcgacaattcaggtgatcccgcacatcactaacgcgatcaaagaaaaagtattagctggtggcgaaggtcacgatgtggctatcgttgaaatcggcggtactgtgggtgatatcgaatcactgccattccttgagtctattcgccaattaggcgttgaactgggccgcgatcgtaccctgtttatgcatttaaccttagtgccattccttggtgctgcgggcgaagtgaaaacgaaaccgactcaacattcagtgaaagagttgcgttctatcggtattgcaccagacgtattgatctgccgtggcgaccgtgcgattcctgccaacgagcgtgcgaagatttcgttattctgtaacgttgaagaacgtgcagttatttcattaaaagacgtcgacagcatctacaagatcccagcgctgctgcgctcacagggtttagatgacttagtggttaagcgttttggcttagaatgccgcgaagctgatttgtctgagtgggaaaacgtcatttaccaagaagctaatccaaacggcgaagtcgtgattggtatggtgggtaaatacatcgaactgccagacgcctataaatcagtcaacgaagcgttaaagcacgcaggtctgaaaaatcgcgtatctgtgactatcaagtatatcgactcacaaaccgtagaagccaaaggcgatgaagtcttacaaggtttagacggtatcttagtcccaggtggcttcggtgagcgcggtgtggaaggtaagattcaggcggctaaatttgcccgtgaaaacaacctgccatactttggtatctgtttaggtatgcaagtggcactgattgaatttgcccgtaacgttgctggcatggccgatgctcactcaaccgaattcaacaaagcaacgccattcccagtggttggcttaatcactgaatgggttgacgaagaaggtaatgttgaacagcgccatgaagcctctgacttaggtggcactatgcgtttaggtgcacagttatgtcatctgctggaaggctcaaaagcggcgcaagcgtacaaaggtaacacttgtgttgagcgtcaccgtcaccgttacgaagtgaacaataagtacagagaacgtttagaacaagcgggtctggtatttagtggtttatcttctgaccgtaaactggttgagatgattgagctcaaagatcatccttggtttgtagcgggtcaattccacccagaatttacttcgaccccacgcgatggtcatccattgttcgaaggtttcgttgctgccgcgagtgcacatcaaaaacgtgatctgaagaaataaa

SEQ ID NO: 315268 - DNA, 1525 bp, Unknown
  Bacterial polypeptide expressing nucleotide sequence isolated from the Sargasso Sea
ctgtctgtttctttaataaaagttgatccatatataaacgtagatccagggactatgagtccattccaacatggcgaagtatttgtcacaaatgatggaactgaaacagatcttgatttaggtcattatgaaagattcgttaggtttgaagcatcaaagaaaaataattttacagcaggtaaagtttatgagactgtaataaagaacgaaagaaaaggaaagtatttaggcggcactgttcaagttatcccacatattacaaatgaaataaaaaagagaattaaagagggaggccaaaataaagatattgcaattgtagaagttggaggtactgttggggatattgagagtcagccttttgtagaggctcttagacaaatggcactagaaatgcctaactcatcatcagcttttgttcatttaacacttgtgccatatattaatgcttcaggagaacttaagacaaaacccactcaacattcagtgaaagaattaagatcattaggcatcagtccagatgtgttaatttgtagatctgaacaagaacttcccaaagatgaaaaaaataaaatagcactattttgctctgttcctaacaatagtgttatatcaatgcatgatgttgaaacagtttattcaatcccgatattattaaacaaacaaaaagttgataaaacaattttagataaacttaatattaaatcaaaagatccaaaattaaatgattggaaaagggtggttaaagcaaaacttcttccagaaagagaagttaatattagttttgtcggaaaatatacagagcttaaagacgcatataaatcaattaatgaagctttagagcatgctggcatagtaaataaaaccaaagtaaacataaattttgttcaagccgcagatttaactgcaaagaacataagtaaaaaattaagaaaggctgatgcgattcttgtaccagggggctttggtcatagaggagtggaaggaatgattttggcttgtaagtttgcaagagaaaataatattccttatttaggaatttgtttaggaatgcaagtagccataatagaatatgctcgaaatgtcttaaaattaaaaaatgcgcatagtactgagtttgatcagcatactgaattccctgtaatcgggcttataactgaatggaatgatatttcaggcaaaaaagaaataagaaataagaattctgatttgggaggaaccatgagattaggtggccagatatgcaaacttaagaaaagttcaaattcatataaaatgtataagaatacagaaatcgttgaaaggcataggcatagatatgaagttaatcctaaatataaggaagtaatgattgaagagggtttggatgttgtaggtacttcaattgatggtaagctagttgagatgatagaaattccaaaacacaaatggtttctggcttgtcaattccatcctgaatttacatcaaacccaagagatggccatcctatttttaatagttatataaagagtacaattaaaagataaa

SEQ ID NO: 315269 - DNA, 1159 bp, Unknown
  Bacterial polypeptide expressing nucleotide sequence isolated from the Sargasso Sea
atggcgcgatatatttttgtcacgggcggcgtggtttcttcattaggaaaaggtctctcttcagcttcgttagcttatttacttcaatcacgaggatacaaagttcgtttaagaaagttagatccgtatttaaatgtagatccaggtactatgagcccatttcaacatggtgaagtatttgtaacagacgatggtgctgaaacagatttagatttaggtcattatgaaagattttcaggagtaacagctaagaaaactgataatattacaactggaaaaatttatagcgatgttcttagaaaagagagaaaaggagaatatttaggtaaaactgttcaagttattccacacatcacagatagaataaaagaatttataaaacatgatacttccaaagaagattttgtaatttgtgaaattggtggcattgttggtgatattgagagccttccgtttattgaggcaattagacaattttcaaatgatattggaaagaacaatgctttatttattcatttaacattagtaccatatcttaaagcctctgatgaaattaaaactaaaccgacacaacactcagtaaaggaattaagaagtattggtgttcaaccagatataattatatgtagatcagaaagaccgatacctttagaacatagaaaaaagatatccttgttttgtaatgtggatattaaaaatgtaattgaaacagttgatgttaaaactatttatgaagctcccatcagttttgcaaaagaaaaattagatgttcaagtcttaaattattttaaactcaaatctaaaaaatctaataatttaaaaccttggaaaaaaataactaaaattattcttaatacaaaaaaacaagttaatattgcaattattggcaaatatgttgagttaaaagatgcttataaatctttagatgaagccctaactcatggtgggcttgctaataatctaaatgtaaatctgataagaattgactctgaaaaattaaaaccttcagaaataaaaagtaaacttaaaaatgtgtcaggaattttaatcccaggaggatttggaaaaagaggtacagaaggaaaaattgaagcaatcaaatatgcaagggtaaataatgttccgttcttaggaatttgttatggaatgcaaatggcta

SEQ ID NO: 315270 - DNA, 202 bp, Unknown
  Bacterial polypeptide expressing nucleotide sequence isolated from the Sargasso Sea
atgtcgaagtttatctttattactggcggcgtggtttcttcccttggaaaaggtttagcgtcggctgctctcggtacccttctgcaatctcgagggtataaggtgcgtcttagaaaattggacccttaccttaatgttgacccggggacaatgagcccatatcagcatggagaagtttatgtaacagacgatggagccgaaa

SEQ ID NO: 315271 - DNA, 799 bp, Unknown
  Bacterial polypeptide expressing nucleotide sequence isolated from the Sargasso Sea
ctggaaaagagttgttaaagctaaattaatgccagagaaagaagtaaatgtttcatttgttggaaaatatacggagttaaaagattcttataaatcaattaatgaagctcttgaacatgctggaataaaaaataaagcaaaagtaaatattaattttgttgaagccgaaaacatttcatcaaaaaacattaaaaaaactctcaagaatgcagatgcagttttagttcctggtggatttggtgaaagaggtattgagggaatgatcttagcttgcaaatatgctagagaaaataacattccatatttaggaatttgccttggcatgcaagtagcgattatagaatatgcaagaaatgttcttaatcttaaaggcgcaaatagtactgagtttgatcaaaatacaaagcatcctgttattggccttattacagaatggaatgatatttctggtaaaaaagaaaaaagagataaaaattcagacttaggtggaacaatgcgtttaggtggtcagctctgtaaacttaagaagggatctaattcattaagaatgtataaaaatccagaaatcattgaaagacatagacatcgttatgaggtaaatccaaaatataaagatgatatgatcaaaaaaggattagatgttgtagggacatccattgatggtaagctagtagaaatgattgagattcctaaacataaatggtttttagcttgtcaatttcatcctgaatttacctccaatccaagagatggacatcctatattcaacagttatattaaaagcacgttaagaaagtaa

SEQ ID NO: 315272 - DNA, 1630 bp, Unknown
  Bacterial polypeptide expressing nucleotide sequence isolated from the Sargasso Sea
catgccaaattttatttttattactggtggcgtggtatcttccttgggaaaaggtcttgcatcagcagctttaggagcaattcttcagtcaaggggttttaaagttagactaagaaagttagacccatatttgaatgtcgatccagggacaatgagccctacacagcatggtgaggtatttgttacagatgatggagctgaaactgacttagacttagggcattacgaaagatttactggggtgtccgcaaaaaaatctgataatgttacaacaggtcaaatttactctcaagttattgctaaagaaagaaaaggtgagtacttaggggcgactattcaggttatccctcatgttacaaatgctattaaagattttataatttcagatttaaagaatgaagattttattttatgtgaaattggtggaactgttggtgacattgaatctcttccattccttgaggcaataagacaacttggtaatgagcttgggagggataaaacttgttttattcatttaactttagtgccttttattgccgctgcgggtgaattaaaaacaaaacctacccaacactcagttaaagagcttcaatcggtaggtataagaccagatgttgttttatgcagaactgaagagcatattcctgatgaccaaaaagataaaatagctcttttttgtaatataccaaaaaaatctgtgattgaggccattgatgcagatagcatttatgatgttccattagtgtatcacaagaatggattagatgcggttatttgtgatcattttgggattaagcctaaagaaccaaacttaaaaatatggttagatattaaatcagctattaaaaacccagagggtgaaatcaatattgcagttgtaggtaaatatacatctttaattgatagttataagtcacttgatgaagcgcttactcacggaggtatagctaataaaacaaaagttaaagttcactggattgattcatcagaacttgaagatgaaaataaatttaatacaatttttgaaaatatacatggtatattagtccctggtggatttggtgaaagaggctcagaagggaaaatattatctataaaatatgcgagagaaaataatataccttttcttggaatatgcttcggtatgcaaatggctgttattgaggctgctcgtaatttaactagtatacctgacccaggttcgtcagaatttggaagttttaagtcttcaattgtgggcctcctattggaatggacaaaaggaaatactgtcgaaataagatcatctgaagacgatttgggaggatcgatgcgtttaggcgcctatgaatgtcacatttcagatgggtctttagctaaagatgtctatcaaaaggatattatttttgaaaggcacaggcatcgatatgaagtaaatattaaatttaaacctgagttagagcgagctggtttgaaattttctggaatgtctccagatggtttgttaccagaaatagtagagcatgaaaatcatccatggtttttaggcgtccaatttcatcctgagttaaagtctaagccatttgagcctcatcctctctttaaagactttgtaagtgctgcttctaaattttctaggctggtgtag

SEQ ID NO: 315273 - DNA, 581 bp, Unknown
  Bacterial polypeptide expressing nucleotide sequence isolated from the Sargasso Sea
ctggatacttatccctgggggttttggtaaacgtggaactgatggaaaaattatgtctattaggtttgctagacagatgaaaattccatttttgggtatatgttttggaatgcaattagccgtaattgaatttgctaggaatgtcttaaaaattaaaaatgcaggctctagtgaactagacacgaaatgtgagcctgtagttggactaatggaagaatgggataaaaatgggtcaattataaaaggttcaaatatggatcttggtggaaccatgagattaggatcatataatgcaaaattaagacataattctttaataaaaaaaatctataaaaaatcctatatatcagagagacataggcatcgttatgaggttaattttaatattaaagaaaaatttgaaaaaaaaggtatgattttttcaggttcttcaccagataataagttaacagaaattgtcgaactaatatctcatccctggtttataggtgtgcagtttcatcctgagtttaaatctagacctttatatccacatcctttattctcatctttcattaaagcagcaaaaaaaaataaatgaa

SEQ ID NO: 315274 - DNA, 1351 bp, Unknown
  Bacterial polypeptide expressing nucleotide sequence isolated from the Sargasso Sea
actgggtcaaatatatagtgatgttttgaaaaaagagagaaaaggaaaatatttaggcaaaactgttcaagttatccctcacatcactgatcgtataaagcaatttattaagagtgatattaaaaatgaagattttgtaatttgtgaaattggtggaacagtaggagatatagaaagcttaccttttgtagaggctataagacaattttctaatgatgttgggaaaaaaaatacattatttattcacttaactttagttcctttcatgaaagcttcagatgaaatcaaaactaaaccaacacaacattctgtaaaagaactaagaagtattggtgttcaaccagatataataatatgtaggtgtgaaaaaaatatttcacttgatcaaaaaaagaaaatttcacttttttgtaatgtagatattaaaaatgttattcaaactattgatgtaaaaactatttacgaagctccaataagtttcaataaggaaaatcttgataaacaggtacttagttattttaaaataaaatcaaaaaaaaatgttaacttaaatccttggaaaaaaataaccaaaattgtcctaagtacaaaaaaaaatgtaaacattgcaataattggtaaatatgtaaatttaaaagatgcttataaatcattagacgaagcactagtacatggtggtatttataataatttgaaagttaatttggtaagaattgaatctgataatttaaaatcttcagaagttaaaaataaattaaaagatgtttcaggagtattaatacctggaggttttggaaaaagaggaactgaagggaaaattgaagcaattaaatatgcaagaaagaacaaaataccttttttaggtatttgttttggtatgcagatggctataattgaatttgctagaaatgttttaaaaattaaaaaagcttcatctagtgaactaaattctaagtgcgttccagttgtaggcttaataaatgagtggaagaaagatggaaaaactattaaaggaactgatagggaattaggtggaaccatgagacttggttcttatccggctgaattattaaataattccttaattaaaaacatatataaatccaaaataattacagagaggcacagacatcgatacgaagttaatatgaattataaaggtcaatttgaaaaaaaaggtttattattttcaggaaattcacctgacaaaagtttacctgaaattattgaattaaaaaatcacccttggtttataggtgtacaatttcatccagaatttaaatctagacctttagcgccacatcctttattctcttcttttataaaagcagcaaaaaatcataaaaaatga

SEQ ID NO: 315275 - DNA, 349 bp, Unknown
  Bacterial polypeptide expressing nucleotide sequence isolated from the Sargasso Sea
tgtaattattaaaggaacaaaaaaagaattgggtggaactatgaggcttggtctttatgaagcaagattgaaagaaaattctttaataaaaaaaatatatagttcaaattttattaaggaaaggcacagacatagatatgaagtaaatattaattataaagataaatttgagaaaaaaggtatgattttctcagccttatcaccagacaaaaaactacctgaaataattgagttaaaaaatcatccttggtttataggagttcaatttcaccctgaatttaaatctagacctttagccccacatccattattctcttcatttatcaaagctgcaaaaaatcatagatga

SEQ ID NO: 315276 - DNA, 307 bp, Unknown
  Bacterial polypeptide expressing nucleotide sequence isolated from the Sargasso Sea
catggcgcgatatatattcgtcactggcggcgtggtttcatctttaggtaagggattatcttcagcttcattggcttatcttttaaaatctcaaggttataaagttagaataagaaaaatggatccatatttaaatgtagatccagggactatgagtccatttcaacatggtgaagtttttgtaactaatgatggcgcagaaacagaccttgatcttggtcactatgaaagatttacaaatatttcagcgaaaaaatcagataatattacgactggaaaaatttatagcgatataattaaaaaagag

SEQ ID NO: 315277 - DNA, 807 bp, Unknown
  Bacterial polypeptide expressing nucleotide sequence isolated from the Sargasso Sea
taaatttaaagccttggattgatctcaaaaaaaaaattaaaaagaaaaaacataagattaaaattgcagtagttggcaaatatactaatcttaaagatagttataaatctttaaatgaagcattagttcatggaggaatagaaaattctgctgaagtaattattcaatggattaattcagaaaaagaaaacaacatcagtttaatgaaaaaattaaaaggttgtgatggaattttaattccaggtggttttggtattcgtggtattaatggaaaaattaatgctattaaatatgcgagagaaaacaatattcctttttttggaatttgtcttggaatgcaattagctgttattgaaatagcacaaaatgtactaaaaattaaaaacgctcattcttcagaatttaaaaaaactactaaatcagttgtaggattaatgacagaatgggtaaataaaaacaagatcgaaaaaagagataaaaatagcgataagggtggaacaatgcgtcttggagcatataaagctattttgaaaaaaaattcaaaaatcttttctatatataaaaataaagtaattagtgagaggcacagacatagatacgaagtaaatcagaaatttctatcaaaatttgaaaacaaaggttattattttagtggtatgtcaccagatgggttgttacctgaagtgcttgagagtaaaaaacataaatggtttataggagttcaatttcatccagagttaaaatcaagaccattagatcctcatcctcttttcgtatcatttataaaggctacaattaatgattaat

SEQ ID NO: 315278 - DNA, 419 bp, Unknown
  Bacterial polypeptide expressing nucleotide sequence isolated from the Sargasso Sea
tttgcttaaagatacgaggtttattttcgtcacaggaggtgttgtttcatccctagggaaaggaatcgcttctgcatctattggtgcaatcctagaatcaaaaggctataaagtaggagttataaagctcgatccatattttaatgtcgatcctggaactatgagtcccttccaacatggagaggtgtttgttttagaagatggcacagagacagacctagatcttggtcactatgaaagattcataaatagcacttgtaccaaaaaaaataattttacagcaggaaaaatctattattcagtactgagaaaagaaagaaagggcgaatatttaggtaagacagttcaaattattccacatattacagatgaaattaaaaggagaataattgaagcatcaaaagattgtgatattgcaa

SEQ ID NO: 315279 - DNA, 1621 bp, Unknown
  Bacterial polypeptide expressing nucleotide sequence isolated from the Sargasso Sea
tcaaactaagtatatattcataacaggtggagttgtttcttcccttggaaagggaattgcagcagcctctataggcgctcttcttgaatctagaggattatcagtttctttaataaaagttgatccatatataaatgttgacccaggaactatgagtccttttcagcatggcgaagtttttgtaaccaacgatggaacagagacagatcttgatctgggtcattacgagagatttgtaagatttcaagcatctaaaaaaaataattttactgctggtaaggtttatgaaacagtaattagaaatgaaagaaagggtgattaccttggaggtacagttcaagttatacctcatataacaaatgaaataaaaaaaagaattaaagagggaggtcaaaataaagatatcgctatagttgaagtaggcggaactgttggtgatattgaaagtcagccttttgttgaagctttgaggcaaatggcgcttgagcttcccaattcgtcttgggcgtttgttcatctaacacttgttccatatattaatgcttctggtgaactcaaaacaaaaccaacacaacattcagttaaagaattaagatctttaggaataagtcctgatgtattaatttgtagatctgatcaagaattacctaaagatgaaaaaaataaaatagcgcttttttgttcggttcctaatgatagtgtgatatctatgcacgatgtagaaactgtttattcagttccacttcttttgcatagccaaaaggttgataaaacaattttaaagaaattaaaaataagcactaaaaaagctcaattaaatgattggagaagagttgttaaggctaaactacttcctgaaaaagaaataacagtgtcgtttgttggtaaatatactgaattaaaagattcctataaatcaattaatgaagctttagagcatgcaggtattaagaataaagctagagtaaatatagattttgttgaagctgaaaatttaactccaaaaaatattagtaaaactttgaaaaactccgatgcaattcttgttcctggtggttttggagaaagaggcatagagggtatgattttggcatgcaaatacgcaagaataaataatattccctacttaggaatatgtttgggaatgcaggttgcaatcattgaatatgcaagaaacgttcttaaattgaagggcgctaacagcactgagtttgatctaaatacaaaatatccagtcataggtctaattactgaatggaatgatatatctggtaaaaaagaaaaaagagacatggattctgatcttggtggaacaatgagacttggcggacaagtatgtaaactgaagaaaaaatcaaattcatataaaatgtataaaaagcttgaaattgttgaaagacatagacatcgatatgaagttaatccaaagtataaaaacagaatgatagaagctggactagatgttgtaggaacttccgtagatggaagattagtagagatgatagaaattccaaatcataaatggtttcttgcatgtcaatttcatcctgaatttacatcaaatcctagagacggacacccaatttttaatagctatattaagagcaccttgtcaaaataa

SEQ ID NO: 315280 - DNA, 1420 bp, Unknown
  Bacterial polypeptide expressing nucleotide sequence isolated from the Sargasso Sea
catggcgcgatatatattcgtcactggcggcgtggtttcatctctaggtaagggtttatcttcagcttcattggcatatcttttaaaatctcaaggttataaagttagaataagaaaaatggatccatatctaaatgttgatcctggaacaatgagtccattccaacatggagaagtttttgtaactaatgacggagctgaaacagatttagatcttggacattatgaaagatttacaaatatatcagctaaaaaatctgacaatattacaactggaaaaatttatagcgatataattaaaaaagaacgtcaaggtaaatatttaggaaaaacagttcaagttataccacatgttaccgatagaataagagattttataaaagacgatataaccaatgaagattttgtaatttgtgaaataggtggaaccgttggagatatagaaagcttacctttcgttgaagctataaggcaattttcaaacgaagttggtagaagcaaaagtttatttattcatttaacttttgttccttttttaaaatattcagacgaaattaaaacaaaaccaacgcaacattctgtaaaagaactaaggtcaataggtattcaaccagatatcttagtttgcagatcagagaaaattataagtaatcaagataagaaaaaaattgcactatttacaaatgttgaagctaaggctgtaataaattctgttgatgtagatgacatttacgaagtacctttattgcttcatagtcaaggtttagacaatattattgttgagaagttaaatttatcatgtaaaaaaacatcattagaagcttggaaaaaatataaagacaaaagaaataatttaaaaaagaaaatatcaataaaaattattgcaaagtatggaaattattcagaatcatacaagtctttaaatgaagctgtaagacatgcaggagtaaatttgggggtaaacgttgaaatagattatgttgatgcagaaaaacttgaagagaaagataattcattattacaaaatgcttcgggggtaattgtacctggtggttttggaggaagaggtatagaaggaaaaataaatgccataaaatatgcaagagagaaaaaaataccatttcttggtatatgtttaggaatgcaagcggctgtaatagaatttgcaagaaatgtttgtaatttagataatgctaatagtacagaatttgataaaaatacggaatatccagttataggtttaattgaagaatggctagataacacagggtctgtagaataccgtgatataaattcaaatattggtggtacaatgagattaggtgagcaagtatgtatgttggaaaaagattctaatatttttaacgcatacaaaacgaagtcagttttagaaagacataggcatcgttatgaatttaat

SEQ ID NO: 315281 - DNA, 703 bp, Unknown
  Bacterial polypeptide expressing nucleotide sequence isolated from the Sargasso Sea
tctttaaatgaatcactacttcatgcttctgtttataataataattctttagaaatagattttattgactcagaagatattacaaaaaagaatattaaacgtcttaagaaccttcaagggattgttgttccaggtggttttggaaatcgtggagtggaaggcaaaatacttgctgctaactttgccagagtaaatcatattccatacttcggaatttgtcttggtatgcagatatccgttattgaatttgcaagaaatattcttggtttcaaaaatgcaaatagtacagaatttgacttgaaaacaccatttcctgttatatcacttgttacagaatgggatgattataaaaaaggtagactaaagggctcaatacatcaattgggcgggaccatgcgcctgggcgcacaatcatgcacgttagttaaaaaatcactcgctcattcactttacaaaaaaaatatcatttctgaaagacatcgacacagatatgaggtcaataataaatttgtagacgagtttaatgatacagatttactattttctggatactcaggagataaagttcttatggaaatgctggaaattaaacatcatccttggtatctggcaagtcagtttcatcctgaattcacctcatctccattgaaaggacatcctttatttaatagctttataaagactgcatatgaaacaaagtaaa

SEQ ID NO: 315282 - DNA, 1066 bp, Unknown
  Bacterial polypeptide expressing nucleotide sequence isolated from the Sargasso Sea
atggcgcgatatatattcgtaacaggcggcgtggtctcatcattaggcaaaggtttatcttctgcttctcttgcatatcttttaaaatctcaaggatataaagttagaattagaaaaatggatccatatttaaatgttgacccaggaacaatgagtccatttcaacacggagaagtttttgtaacagatgatggtgcagaaactgatttggatctcggacattacgaaagatttacaaacatttctgcgaaaaaatctgacaatattacaacaggaaaaatttatagcgatataattaagaaagaacgtaaaggtaattatttgggaaaaacagttcaagtgatacctcatgtaacagacagaataagagaatttataaaaggagatataactaatgaagattttgttatttgcgaaataggaggaacagttggcgatatagaaagtttgccttttgttgaagctataagacaattttcaaatgaagttggtagtaataaaagtttgtttatacatttaacttttgttccatttttaaaatcatcggatgaaattaaaactaaaccaacgcagcattctgttaaagaacttagaagccttggtatacagccagatataataatttgtaggtctcaaaaatctataccattagatcaaagaaaaaaaatatcacttttctgcaatgtatcgattgaaaatgtaatagagacagtcgatgtaagaacaatctatgaagctcctataagtttttataatgaaaaactagataaacaagttttgaaatattttaaattaaaaccaaagaaaaaagttaatttactaccttggaaaaaaattaccaaaactgtcttaaaaactaaaaaaatagtaaatattgcaattattggaaagtatgtaaatttaaaggatgcttacaaatcactagatgaagcattaatacatggtggaataaataataatgtaaaagttaatttagttagaattgaatctgataaattaaaacctagcgaaattagcaaagttttaaaaaatgtatctggaattttaattcctggtggatttggaa

SEQ ID NO: 315283 - DNA, 500 bp, Unknown
  Bacterial polypeptide expressing nucleotide sequence isolated from the Sargasso Sea
aaatccctttcttggggatatgttatggaatgcaaatggcaattatagaatttgcgagaaatcaattaaattaaaaaaagcaacttcgagtgaatttgacagaaatggtatacctgtaattggattaataaatgagtggattaaagatggaaaaactatcaaaggaactgataaaaatctaggtggaacaatgagattaggttcttatgatgcgaaattacaaaataattctaaaattaaaaaaatttatggaaaaaaaattatcaaagaaagacaccgacatagatatgaagttaacatcaatctaaaagataaatttgaaaaaaaaggaatgagtttttccggtttgtcgcctgatggttttttacctgagatcattgagttaaaaaatcatccttggtttattggcgtacagtttcatccagaatttaaatctagaccttttgctccacatcctttattctcatcttttatcaaagcatcaaaaaatcataaatgag

SEQ ID NO: 315284 - DNA, 748 bp, Unknown
  Bacterial polypeptide expressing nucleotide sequence isolated from the Sargasso Sea
catggcgcgatatatttttgtcacgggcggcgtggtttcatcattaggaaaaggtctttcttcagcttcgctggcatatttattaaaatcccaaggatataaagttagactgagaaaaatggatccatatttaaatgtagatccaggaacaatgagcccttttcaacatggagaggtttttgtaactgatgatggagctgaaacagatttagatttaggtcattatgaaagatttacaaatatatcatcgaaacaatctgacaatattacaaccggtcgtatttatagtgatgtaattaaaagagaaagaagaggaggatatcttggaaaaactgttcaagttatacctcacattacaaatcgaataaaagaatttataaaaaaagatattacaaatgaagattttgttatatgtgaaattggaggtactgtaggagatattgaaagtttaccatttgttgaagctataagacaattttcaaatgaacatggcaagtcaaaaacattatttattcatttaacttttgttccttttttaaaatcatctgatgaaataaaaactaaaccaacccagcattcagttaaagagttaagaagtattggtattcaaccggatataatcatttgtagatctcaacaatctataccattagatcaaagaaaaaaaatatctttattctgtaatgttccaattgaaaatgtaattgaaaccgtagatgtaagaacaatttatgaagcgcctattagt

SEQ ID NO: 315285 - DNA, 457 bp, Unknown
  Bacterial polypeptide expressing nucleotide sequence isolated from the Sargasso Sea
catggcgcgatatatattcgtcactggcggcgtggtttcatcattaggcaagggattgtcatctgcttctttagcttatcttttaaaatctcaaggttacaaagtaagaattagaaaaatggatccatatttaaatgttgatccaggaacaatgagtccatttcaacacggagaagtttttgttactaatgacggagctgaaacagatttagatcttggacactatgaaagatttacaaatatatctgctaaaaaatctgataatattacaactggaaaaatttatagtgatataattaaaaaagaacgtaagggaaattatttgggaaaaactgttcaggttattccacatgttacagacagaattagagagtttattagaggagatataactaaagaagattttgtgatttgtgaaataggaggtactgtaggtgatatagaaagtttaccattt

SEQ ID NO: 315286 - DNA, 556 bp, Unknown
  Bacterial polypeptide expressing nucleotide sequence isolated from the Sargasso Sea
atggcgcgatatatatttgtcaccggcggcgtggtttcttccttaggtaaaggtctctcttcagcatcgctagcatatttattacaatctagaggatataaagttagattaagaaaattggatccatatttaaatgttgacccaggaaccatgagtccatttcaacacggggaagtttatgtaacagatgatggcgcagaaactgatttagatctaggtcattatgaaagattttcaggggtatcagctaaaaaatcagacaatatcacaacgggtaaaatttataatgatgttcttaaaaaagaacgaaagggtgagtacttggggaaaacagttcaagtaattcctcatgttacagatcgaataaaacaatttattaaaaacgaatcttcaaaagaagattttgtaatttgtgaaatagggggaattgtaggggacattgaaagtttaccatttgttgaagctataagacaatttgcaaatgatgtgggtaaaaaaaatgcattatttattcatcttacattagtaccttatttaaaagcttccgatgaaataa

SEQ ID NO: 315287 - DNA, 316 bp, Unknown
  Bacterial polypeptide expressing nucleotide sequence isolated from the Sargasso Sea
atgagattggggctttatacagctaaattaaaaaataattctgccataaaaaagatttacaaatcaaatgaaataaaagaaagacacagacatagatatgaagttaataataaccaaaaatcaaaatttgaaaaaaaaggattaatattttccggtatgtccccagataataaattacctgaaataattgaattaaaaaatcatccctggtttatcggtgttcaatttcatccagagtttaaatcaagaccattgtcaccacatccattattcaaatcatttataaaagcttcaaaaaattatcatggaaaataga

SEQ ID NO: 315288 - DNA, 196 bp, Unknown
  Bacterial polypeptide expressing nucleotide sequence isolated from the Sargasso Sea
catggcgcgatatatatttgtcacgggcggcgtggtttcatctttaggaaaaggtttatcttctgcctcactagcatatttactaaaatctcaaggatataaagttagattaagaaaaatggatccttatttaaatgttgatcctggaacaatgagtccatttcaacatggagaagttttcgtaactgatgacgga

SEQ ID NO: 315289 - DNA, 1747 bp, Unknown
  Bacterial polypeptide expressing nucleotide sequence isolated from the Sargasso Sea
atgtcgccaggaattcactgggttgagaccctgctttacggtataatccgtttttcccgcgagcatccagcgatgaccaaatatgttttcgtcaccggcggcgtagtatcttccctcggcaagggtattgccgccgcttccctcgccgcgatcctcgaatcgcgcggtcttaaagtcaccctcctcaagctcgatccctacatcaatgtcgaccccggcacgatgagcccgtttcaacacggcgaagtgttcgtgacggaagacggagcggagactgaccttgaccttggccactatgagcgcttcatcagcacgaagatgcgcaaggccaataacttcaccacaggccagatttacgaatcggtgatccgcaaggaacgccgtggcgattatctcggcaagacggtgcaggtcattccgcacatcaccaacgaaatccaggcgttcatcgaacgcggcgcggcttccgcgacgtgcggtgagccggacgtcgccatcgtcgaagtgggcggcaccgtgggcgacatcgaatcgctgccgttcctcgaggccgcgcgtcagatgagtctgcgcatgggccgcaacagcgcgtgcttcgtgcatctcacgctggtgccctgggtcgcgacggcgggcgagctgaaaaccaagccgacccagcacagcgtgcagaaactgcgtgaaatcggtatctcgccgcacgtgctgctgtgccgcgccgaccgccgcattccggacgacgagcgcgcgaagatctcgatgttctctaacgtgccggaagacgcggtgatttccgtgtgggacgccgacagcatctacaagattccgcagatgctgcacgaccagggtctggacgcgatcatctgcgaagagctcaagctcacgccgaagcccgccgatctgtcgatgtgggcgaatctcgtcgaaaaactcgagcatccgaagcacgaagtcacgatcggcatggtcggcaagtacgtcgatctgaccgagtcgtacaagtcgctgatcgaagcgctgcgccatgcgtcgatgcatacgtcgaccaaggtcaacatcgagtacatcgattcggaagagatcgagacgcaaggcgtcgagagcctcaagcatctggatgccgtgctcgtgccgggtggcttcggccgtcgcggcactgaaggcaagattgccgcgatccgctatgcacgcgaagcgaaggtgccgtatctcggcatctgcctcggcatgcaactggccgtgatcgaattcgcccgcgacgtggtcggcctgaaagacgcgaacagcaccgagttcgatccggaaaccgagaaccgcgtggttgcgctgatcaccgagtggtacgaccgtgaaggccgggtcgagaagcgtaccgaagaatcggatctgggcggcacgatgcgcctgggttcacaacgttgcccgatcaagcccggcacgatggccgaagagatctatggcaaggatgtgaacgaacgccatcgtcaccgttatgaggtcaataaccgtttcgtgccccagctcgaagccggtggccttatcatcagcgcccgtaccccgagtgaagatctgccggaaatgatggaattgccgcgcagcatgcacccgtggtttgtcggcgtgcagttccacccggaattcacgtccacgccgcgcgacggccatcccttgttcaagtcgttcgtcgaagcggcgctcgcgcaccagcagccgcgcacgacggcggaagtcggggagaaagcatgaa

SEQ ID NO: 315290 - DNA, 1315 bp, Unknown
  Bacterial polypeptide expressing nucleotide sequence isolated from the Sargasso Sea
tctgggaggaactgttcaggttattcctcacataactgatgagattaaaaatagaatagttaaaggggcaggagattctgaagtagctatagttgaaataggcggaaccgtaggagatatagaatcgcaaccttttctggaagctattaggcagatgaaactggaactaggttcaagtaagactttatttatccacttaacattagtgccttttcttcagtcagctggtgaaacaaagaccaaacctacccaaagatcagtgaaagagatgttatctcatggattacaaccagatatattaatttgcaggtctaacggtgttttagcaaacgaagagagaaaaaaaattgctctatttactaatgtagaagagagttctgttatatcaatgcctgatgttaattctatttataaaataccagtagaattaaataaccaaaaagtagatgaaatagtagttaaaaagcttaacttaatatgccgcaaggcctctctagttgattggaagcgtgttatagatgaagatttaaatccaaaagattctgtcaccgtatccatggtaggaaaatatacagaattagcagatgcttataaatctttaaatgaagctcttaggcatgggggattgaagaacaatttaaaagtagatattagatatatagattctgaactgataaatacaagaaacgctaaatccttattaaaaggatcagatgccatccttgttcctggaggctttggagaaagggggatagaggggatgatagcagcagttaagtttgcaagaataagtaagataccttacttaggtatttgtttaggtttgcaaatagcagttattgagtttgctagaaacgtagttggcttaagaggtgctaatagcacagaatttgataaagaaactaaacacccagttataggtctaattagtgaatggatggatttagaagggattattgagaaaagagatgaaaattcagatttaggaggcactatgagacttggagcccaggaatgtatgcttgataaagattctttatctcgatcgctctataaaaaagcaaaagttttagaaagacacagacatagatatgaggtgaacaataactaccttgatatgttaatctcatcgggaatgaaagtagcaggaagatctaaagaccgttctttagtcgaggttatcgagttaaatagccatccatggtttgttggatgtcaatttcacccagaatttacatccaatcctagagcgggtcatcctcttttttcaggttttattaaagctgctaagaaatataaaagattaaagaaataa

SEQ ID NO: 315291 - DNA, 1199 bp, Unknown
  Bacterial polypeptide expressing nucleotide sequence isolated from the Sargasso Sea
aatgcattttgtttttattacgggtggagtagcatcatctcttggaaaaggtatagcctcagcttctttagcaactcttctaaaaagtagaaaattcaaagtaaggataagaaagttagatccttatttaaatgtggatccaggaacaatgagtccatatcaacatggagaagtttacgttactgatgatggtgcagaaacagatttagatcttggtcattatgaaagattcacaaatcagtccgctaaacaatcagatagtgtttcgtcaggtaagatttattctaatgttcttcttaaagaaagaaaaggagattaccttggttcaacaattcaggtaattcctcatgttactaatgaaataaaatcatttattaatagtgatttaaaaaatgaagatattgctatttatgaaataggaggaacagttggagacattgaatctcttcctttcttagaagctatacgacaaattaggaatgataaaaatatttcatcagcattaattcatatgacttatattccatatttaagttcagcaggagagttaaaaacgaaacctactcaacattcagttaaagaacttctgaatgccggtattcaaccagatattattatgtgtagatctgaacaaccaatagataaggattcaatttccaaaatatctttattttgtaatgttaaaaaagagtcggtaattcctgcattgaatgctaaatcaatttatgaagttccttcactgtattccaaatatggtttagatgaagctctactaaaacaattaggttataaacctaaaaatcataaactaaatttaaaaccttggaatgatcttcaaaaaaaaattaaaaaaagaaaacataaagtaaaaatcgcagtagtaggaaaatacacaaatctaaaagatagctataaatcacttaatgaagcattggttcatggaggaatagaaaattatgctgatgtagatattaaatggattaattctgaaaaagaaaacaacattagtttaataaaaaaattaaaaggtaatgatggaattctgattcctggtggttttggtattcgtggtatcaatggaaaaattaatgccattaaatatgcaagagagaataatattccattttttggaatatgtcttggaatgcaactagctgttattgaaatagcacaaaatgtacttaaaattaaaaatgctc

SEQ ID NO: 315292 - DNA, 907 bp, Unknown
  Bacterial polypeptide expressing nucleotide sequence isolated from the Sargasso Sea
atggcgcgatatatattcgttacaggcggcgtggtttcatctttaggtaaaggtttatcttctgcatctttagcatttcttttaaaatcacagggatttaacgtaaggttgagaaaaatggatccctatttaaatatcgatcctggcacaatgagtccatttcaacatggagaagtttttgtaacagatgatggagccgagacagacttagatttaggtcattacgaaagatttacaaatatttcagctagaaaatctgataatgttacaacaggaaaaatatatagtgatattcttaaaaaagagagaaaaggggagtatttaggtaagacagttcaggttataccacatgtcactaatcaaataaaagaattcataaaaaaagatataaccaaagaggactttgttatctgcgaaataggaggaaccgttggagacattgaaagcttaccttttttggaagcaattagacaattttcaaatgaagatggatataaaaaaagtttattcattcatttaactttagtgccatttttaaaatcttctgatgaaataaaaaccaaaccaacacaacattctgttaaagaacttcgaagcttaggtattcagccagatataattatttgtagatcagaaaagcctatacctttagatcaaagaaaaaaaatatctcttttttgcaatgtaagatataaaaatgttatagagacggttgatgtaaaaacaatttatgaagccccaaaaagcttttatgacgaaaaattagataaacaggtcctcagtttttttaaaataaaaccaaaaagaaaagttaatctcagaccttggaataaaattacaaaaacaatattaaaaagtaagaatgaggtaaatattgctttaataggtaaatatgtgaatttaaaag

SEQ ID NO: 315293 - DNA, 688 bp, Unknown
  Bacterial polypeptide expressing nucleotide sequence isolated from the Sargasso Sea
atgtcagattatatttttgttacaggtggagttgtttcagcactcggcaaaggagttacatctgcttcattaggcgccattttggaagccagaggtctgaaagtcgggatgatgaagcttgatccatatctgaatgttgatccaggtacaatgagtccctatcagcatggtgaggtttttgtaactgaagatggaacagagacagacttggacttaggtcattacgaaagatatgtttctactgtaaccagtaagcacagtaattacactgccggtaaaatctatgaaactgttattgctaaagaaagaagaggtgattatctcggtgcaactgttcaagtgatccctcatgtcactgatgaaattagaaaaagtattgtaaaaggatcacaaggccatgatgtaacaatcgttgaaatcggtggaacagtcggagatattgaatcacttccatttgttgaagccatcaggcaaatgggaatctataaagatgattatgaagttgcatatgttcatttaacattggtgccttatattaaggcttcttcagaaataaaaaccaaaccgactcaacattcagtgagagagcttagagcaattgggattcagcctgatgctttggtgtgtcgctccgaactacctcttccgaaagagcatttgacaagattgctctttttacaaatgtgaa

SEQ ID NO: 315294 - DNA, 1618 bp, Unknown
  Bacterial polypeptide expressing nucleotide sequence isolated from the Sargasso Sea
catggcgcgatatatattcgtcactggcggcgtggtttcatcattaggtaaaggattgtcatctgcatctttagcatatttgctaaaatcaagaggcttcaaagttagagttagaaaaatggatccttatttaaatgtggacccagggacaatgagcccatttcagcatggagaagtatttgttactgacgatggtgcagaaacagatttagatcttggccattatgaaagatttacagaaatttcttcaaaacaatcagacaatattacaactggaaaaatttatagcgatataattaaaaaagaacgtaaaggaaaatatttaggcaaaactgttcaggtaataccacatgtaaccgacaaaattaaagatttcattaaaggagacattaaagatgaagattttgtaatttgtgaaattggaggcacagttggagatattgaaagtttgccttttttagaagcaattagacaattttcaaacgatataggaaaaaacaaaactttatttattcatttaactttagttccatttcttaaatcatctgatgaaattaaaacaaaaccaacacaacattctgttaaagaattaagatcaataggaattcagcctgatatagttatttgtagatcacaacaatcaatcccttttgatcaaagaaaaaaaatatctttattctgcaatgtatcaattgaaaatgttatagaaactgttgatgttagaacaatttatgaagcacccataagcttttataatgaaaaattagataagcaggttttaaagtactttaagttaaaaccaaaaaaaaaagtgaatttatcaccatggaagaaaattactaaaactgttttaaatacaaaaaaaatagtgaatattgcgattataggcaagtatgtaaatttgaaagatgcatataaatcattggatgaagccttaattcatggaggaataagcaataacattaaagtaaatttagtaagaattgaatctgataaattaaaatctaatcaaattaaacaagttttaaaaaatgtatctggtattttaattcctggtggatttggcaaaagaggaacggaaggaaaaatatctgccattacatatgcaagaaaatataaaatacctttcttaggcatatgttttgggatgcaaatggcagtaattgaatttgctagaaatactttaaagatcaaaaatgctggctctagcgaacttgataaaaaatgctatcccgtaatcggtttattaaatgagtggaataaaaatggaaggttaataaaaggaacaagtatagatcttggaggaacaatgagattaggtttatatgaagctaaattaagacataattcattgatacaaaaaatttataaatcaaaatctatatttgagagacataggcatcgatacgaagtgaatagtaatttaaaagaaaaatttgaaagtaaaggtatgcttttttctggaatgtcaccagataataaattgcctgaaatagttgagcttaaaaaccatccatggtttataggagttcagtttcatccagaatttagatctagacctttaactccacatcctttattctcatcatttatcaaagctgcaaaattctacaaatga

SEQ ID NO: 315295 - DNA, 1078 bp, Unknown
  Bacterial polypeptide expressing nucleotide sequence isolated from the Sargasso Sea
gggtcactatgagagatttactgacactgcaatgactcgtttaaatagtgtcactacaggatccatctaccaagcagtcattaataaagaaagaagagggagttacaacggaggtacagttcaagttattcctcacatcacaagagaaataagagaaaggattcatagagtagcagctaacagcaatgctgatatcgtcataactgagattggtggaacagtaggagatattgaatctctaccatttttagaggcaataagagaatttaaaaatgatgttaataaaaatgatgtcgcttatattcacgtaactttacttccttatatcaaaacatctggtgagataaaaactaaacctactcaacattctgttaaggagttacgatccattggtatacaaccagatttgcttgtatgcagaagtgataaagaaattaatgaagggctaaaaagaaaactcagtggtttctgcggagttaatcttaattgtgtaattgaagcattagatgctgatagtatttattcagttcctctttcattaaagaatgaaggtttatgtaaacagactttaacttgtctagaactcgaagataaagaatgtgatttagagaattgggaaaaaataattcataatcttagaaatcctggtaaccctataaaagttgctttagttggaaaatatatagaacttggtgatgcatatctttcagtagtggaggcattaaggcatgcttgcattgaacaaaaagctttattagatttgtattgggtaagtgctgaaatgatcgaagagaaatcagccgaagagtatttaaatgatgttgatgcaattgtagttccaggaggatttgggaatagaggagtgaatggaaaaattgaagcaataaaatttgcaagagaaaagaagattcctttcctaggtttatgtttaggtatgcaatgcgcagtaatagaatgggcaagaaatctagcccaattacctgatgcatctagctcagaattaaatccagattcccaaaaccctgttactcatttattacctgaacaagaagacattgttgatctggagggactatga

SEQ ID NO: 315296 - DNA, 412 bp, Unknown
  Bacterial polypeptide expressing nucleotide sequence isolated from the Sargasso Sea
atgaaaactaaattcatatttgttcttgggggtgtaatgtccggtttaggaaaagggatttctgcctcttctattggttatcttttaaaaagcgcaggactaaaagttaatattctaaaacttgatccctatttaaatgtagaccctggcactatgaatccatatcaacacggtgaagtatttgttttggatgatggctctgagacagatttagatttaggtcattatgaaagatttattgatgagaatatgtctagtaagaataatgcaactgctggacaaatctatagtacagttttagataaggagcgttcaggaagttatttaggagagactgtacaagtaatccctcatataactgatgaaatcaaaaataggatgaacgcattatctgattctaaaaaatatgata

SEQ ID NO: 315297 - DNA, 1618 bp, Unknown
  Bacterial polypeptide expressing nucleotide sequence isolated from the Sargasso Sea
catggcgcgatatatatttgtcactggcggcgtggtttcttcccttggtaaaggtctctcttcagcatctttagcttatttattacaatcaagaggttacaaagttcgtttaagaaaattagatccttatttaaatgttgatccgggaacaatgagtccgtttcaacatggagaagtttttgtaaccgatgatggtgctgaaacagatttagatttaggtcactatgaaagattttcaggtgtaactgcaaagaaaacagataacattacaactggaaaaatttatagtgatgttcttagaaaagaaagaaaaggtcagtatttaggtaaaactgttcaagttattccacatattacagatagaattaaagaatttataaaacacgatacatctaaagaagattttgtaatttgtgaaataggaggaatagtaggggacatagaaagtttaccatttgtagaagcgataagacaattttccaatgatattggtaaaaaaaatgcattatttattcatttaactttagttccttatttaaaagcatcggatgaaataaaaacaaaaccaacccaacactcagttaaagaattaagaagcattggtattcaacctgatattattatttgtagatcagaaagacctattcctttagaccatagaaaaaaaatatctttgttttgtaatgttgatattaaaaatgtaattgaaactgttgatgttaaaactatttatgaggcaccgattagtttttttaatcaaaaattagatattcaagttttaaattattttaaattaaaatcaaaaaaacctgcaaatttgaatccttggaaaaaaataactaaaattactcttaatactaaaagacatgttaacattgcaattattggaaaatacgttgaattaaaagatgcttataaatctttagatgaagcacttactcatggaggaatatctaataatcttaaagttaatttggttagaatagattctgaaaaattaaaagtttcagaaataaaaaataaacttaaaaatgtttcaggaattctaattccaggtgggtttggtaaaaggggaactgagggtaaaattgaagcgataaggtatgcaagaataaataaaattccattccttggaatttgttatggaatgcaaatggcaataattgaatttgctagaaatcaattaaaaattaaaaaagcaacctcttctgagtttgataaaggcggtgttcatattattggcttgatgcatgaatgggagaaaagtggcagaaaagttaaaggaacagataaagacttaggaggcaccatgagacttggttcttatgatgcaattttaaaagataaatctaaaattagagatatttataaatctagattaatcaaagagagacatagacatagatatgaagtggatatttcatataaagaaaaatttgagaagaaaggattaatattttcaggtttatctccagatcataagcttccagagataatagaacttaaaaatcatccttggtttataggagttcagttccatcctgaatttaaatctagacctttgaacccacatcctttattctcttcttttatcaaagcagcaaaaaatcatagatga

SEQ ID NO: 315298 - DNA, 1032 bp, Unknown
  Bacterial polypeptide expressing nucleotide sequence isolated from the Sargasso Sea
atatactcgtttgtaggtgcgatagaaaaatttcaaaatctgatataagaaaaatttcagttttctgtaatgtggatgaagattcagtaattcaagcaattgatgtagatactatttatgcagttcctaaggatttaaagactaatggtttggatgttgctgttttaaatgcgttaggaaaaaatacttttccaaaatcaaacttgagaaaatggaataaagtagttgaaagaattcgcaaaccaattggagaagtaacaattggtgttgttggaaaatatttagatttgaatgatgcatataaatccttatttgaggcccttacacatggaggtatatcaaataatgttaaagtaaatattaaaaatattgatacagataaattagaaaagaataaaaataaaactgtttttaatggcttaagcggcatacttgttcctggtggatttggtaaaagggggtcagagggaaaaatttttgcatcaaaatatgcaagagaaaataagatacctttttttgggatttgctttggtatgcaaatggcagttgttgatgttgcaagaaatttattagaatataaatctgctagctcaagtgaatttggtaaaacagatacaccagtaatcggattgcttactgaatggataaaagatgaagaaattcaaaaaagagaccttcaaagcgaatatggtgggacaatgagattgggttcatatcctgcaatattaaaaaaaggctctaaagtaaggaatatttatggttctaaaaaagttaatgaaagacataggcatagatatgaggttaacatgtcgtttattgacgaccttgagagggtagggctaagatttgttggtatgtccccagacggattattgcctgaaatagttgagttaaaaaatcacccttggtttataggcgttcaattccatcctgaattaaaatcaagaccatttaatcctcatcccttattttcatcttttataaaagcttctgttaaaaagtctaaaatttctggtaaagtcaaaaaatgaa

SEQ ID NO: 315299 - DNA, 599 bp, Unknown
  Bacterial polypeptide expressing nucleotide sequence isolated from the Sargasso Sea
tttgtgcgattacgggggtagaaaaatagcaaggttcatttttattaccggtggtgtggtgtcttcgttaggaaagggactggcctcggcagcactaggagctttgctgcagtcgcgtggatactcagttcgattgagaaagctagatccatacttaaatgttgatccaggcacaatgagcccttttgaacacggcgaagtttttgtaactgatgatggcgcagagacagacttagacttaggccattatgaaaggttcactggtgttgcagcccgccattctgattctgtttcttcaggacgcatttactcaaatgtactagaaaaagaacgtcgtggggattacttgggaaaaaccatccaagtgatacctcatgtaactaatgagataaaagatttcattagtattggagaagacgaagttgactttatgctttgcgaaatcggcggtacgatcggtgacatagaaggcttaccttttttcgaagctattagacagttttctcaagagaaacctagaggtgagtgcatttttatgcatttgacactgctcccgtttattaaagcgagcggtgagcttaaaaccaaaccaacgcaac

SEQ ID NO: 315300 - DNA, 328 bp, Unknown
  Bacterial polypeptide expressing nucleotide sequence isolated from the Sargasso Sea
atgaaaactaaattcatatttgttcttgggggtgtaatgtccggtttaggaaaagggatttctgcctcttctataggttatcttttaaaaagtgcaggactaaaagttaatattttaaaacttgatccctatctcaatgtagaccctggtactatgaatccatatcaacatggagaagtatttgttttggacgatggctcggagacagatttagatttaggtcattatgaaagattcattgatgagaatatgtctagtaagaataatgtcactgctggacaaatctatagtacagtattagataaggagcgttcaggaagtatttagg

SEQ ID NO: 315301 - DNA, 569 bp, Unknown
  Bacterial polypeptide expressing nucleotide sequence isolated from the Sargasso Sea
aatgcaaacaaaatttatatttattactggtggtgtagtatcaggattaggaaaaggaattgccgcttcttctattggtgcacttttagaatctagaggcttaacaatcagtctaatgaagttagatccatacatcaatgttgacgcaggaacaatgaatccatttcaacatggcgaagtatttgtaacagttgatggggccgaaactgatttggatttgggtcattatgaaagatatactaatgcagttttgactcgaagacacaatcgaaccactggtcaaatttatgattccgtaattagaaaagagcgttccggtaagtttttaggtgcaactgttcaagtgattcctcatgtaatagatgaaataaaacaaactatttcagatgcagcaaaattgcttattaaagaaaatgatcaaaaaaatgctgatatttgtattgttgaaattggtggaaccgtcggtgacattgaatcgttaccttttctagaagcaattcgacaatataggcacgattttggtagagaaaacactctcttcattcaccttacattaatagtagaaacaa

SEQ ID NO: 315302 - DNA, 1624 bp, Unknown
  Bacterial polypeptide expressing nucleotide sequence isolated from the Sargasso Sea
catggcgcgatatatctttgtcactggcggcgtggtatcatcacttggaaaaggattatcatcagcatctcttgcatatttattaaagtcacaaggttataaagttaggatacgtaaaatggatccatatttaaatgttgatccaggaactatgagccctttccagcatggagaagtatttgttacagatgatggtgcagaaacagacttagatttaggacactacgaaagatttacaaatatttcctcaaaacaatcggataatattactacaggtaaaatttatagcgatgtaatcaaaaaagagagacaagggggctatctaggtaagacagttcaggttatacctcacataacagatagaattaaaaaatttattagcaaagacattagtatcgaagattttgtaatttgtgaaattggtggaactgttggtgacatagaaagtttaccatttctagaagctataagacagttctcaaacgatcatggaaggtctagaacattatttgttcacttaacattagttcctttcatgaaatcttctgatgagataaaaactaaacctacacaacatagtgttaaagaattaagaagtataggtatacaaccagatattgttatatgcagatcagagcagcatatacctttagagcaaagaaaaaaaatatctttattttgtaatgttgatattgaaaatgttattgagactgttgatgttagaacaatttatgaggctccaattagtttttataaccaaaaattagataaacaagttttaaaatattttaaaataaaatcaaaaaataaacctaatttaaatccatggaaaaatattacctctactgttctaaaaaataataaattaattaacattggaataatcggtaaatatgtaaacttaaaagatgcatataaatctttagatgaagcattaacacacggtggtatagcaaataatgttaaagttaatttggtaagaattgaatctgataaattaaaaaaaaatgaaataaccaaaaaacttaagagtgtttcaggaatattaataccaggtggatttggtaaaagaggaacagaagggaagattgcagcaattaaatatgcaagagaaaaaaaaatacccttttttggcatttgttttggaatgcaaatggcaatcatagaatttgccagaaacaaattaaatataaaaaatgcaggttctacagagcttgataaaaaatgctatcctgttattggattaatccatgaatggaacagaaatggaaaagtttttaagggcacagaaataaacttaggtgggacaatgagattaggtctttatacagctaaattaaaaaataattctgccataaaaaagatttataaattaaatgaaataaaagaaagacacagacataggtatgaagttaataataaccaaagatcaaaatttgaaaaaaaaggattaatattttcgggcatgtctccagataacaaattacctgaaataattgaattaaaaaatcatccttggtttattggtgttcaatttcatcctgagtttaaatcaagaccattatcaccacatccattatttaaatcatttataagagcttcaaaaaattaccatggaaaatag

SEQ ID NO: 315303 - DNA, 460 bp, Unknown
  Bacterial polypeptide expressing nucleotide sequence isolated from the Sargasso Sea
ctgaaagatacgaggtttattttcgttacgggtggtgttgtttcatctctagggaaaggaatcgcttcagcatctataggatcaattctagaatcaaaaggttataaggtctcagtaataaaacttgatccatattttaatgttgatccaggcaccatgagcccatttcagcatggcgaagtatttgttcttgaagatggaacagagacagatttagatttaggtcattatgagagattcattgataacgtatgcactaagaaaaataattttacagctggaaaagtttattactctgtattaagaaaagaaagaaaaggagaatatctaggaaaaacagtacaaataattcctcacattaccgatgagattaaacgtaagatattaaatgcttcaaaaaattgtgacattgctatcgttgagataggtggaacagtaggggacatagaaggtcaaccat

SEQ ID NO: 315304 - DNA, 616 bp, Unknown
  Bacterial polypeptide expressing nucleotide sequence isolated from the Sargasso Sea
atgatagaaaaaaattcagcagaaacttacttaaatgaagttgatgcaattgtcgtacccgggggatttggcaatagaggagtaaatggaaaaatttcggctataaaattcgcaagagaaaataaaattccctttttaggtttgtgccttggcatgcaatgtgcagttatagaatgggccaggaatgtagctaatcttccagatgcatctagttcagaactagacccaaacactccaaatccagtgatacatttattaccagaacaggaagatgtagttgatttaggtgggacaatgagacttggagtttatccatgtagactgacaaaaaatacaactggaaaaaacttatatgatgaggatgttatttatgagagacatcggcatagatacgaatttaataattactacaaacaaagttttttagattctggatacaaaattagtggtacatcaccagatggcagattagttgagttaattgagttagaaaatcatccatacttcttagcctgtcaatatcatcctgagtttttatcaagacctggcaaacctcatcctttatttaaaggattaataaaagcctctcaagataagttaactcaatcaaattaat

SEQ ID NO: 315305 - DNA, 1257 bp, Unknown
  Bacterial polypeptide expressing nucleotide sequence isolated from the Sargasso Sea
atagaataaaggaatttataaaaggagacataactaatgaagattttgtaatttgtgaaataggaggtacggttggtgacattgaaagcttaccttttcttgaagctataagacaattttccaatgaagtaggaaagaacaaaagtttgtttattcatttaactcttgtgccatttttaaaatcatctgacgaaataaaaacaaaacccacccaacactctgttaaggaacttagaagtttagggatacaaccagatatagtaatttgtagatcacaaaaatctatacctttagaccaaagaaaaaaaatatctttgttttgtaacgtttcaatagaaaacgtaatagaaacagtagatgttagaacaatttatgaagctccgataagtttttataatgaaaaactagataaacaagttttaaaatattttaaattaaaagctagaaaaaaagttaatttgttaccttggaaaaaaataactaaatctgtattaagcaaaaaaagaacagtaaatattgcaataattggaaaatacgtaaatttaaaagatgcttacaaatctttagacgaagcattaattcatggaggaattaacaataatgtaaaagtaaatttagttagaattgaatctgataaattgaaaccatttcaagttaaaaaattattaaaaaatgtgtctggaattttaattccaggagggtttggcaaaagagggacagaaggtaaaatatcagcaattaattatgctagaaaacaaaaaattccttttttaggcatctgttttggtatgcagatggcggttatagaattcgccagaaatgttttaaaaattaaaaaagccggatccagtgaacttgataaaaaatgttatccagttgttggccttttaaatgaatggaataaaaatggaaaattaataaaaggaacaaatatcgatctaggagggacaatgagattaggcttatacgaagctaaattaagacataattctttgatacaaaaaatatataaatccaaatctatatttgaaaggcatagacatagatacgaagtgaataatcaatttttaaatagttttgaaaagaaaggtatgcttttttctggaatgtcaccagataataagcttcctgaaataattgagcttaaaaatcatccatggtttattggagtacaatttcatccagaatttaaatctagacctttaaatcctcatcctttattctcttcatttatcaaagctgcaaaattttattaat

SEQ ID NO: 315306 - DNA, 664 bp, Unknown
  Bacterial polypeptide expressing nucleotide sequence isolated from the Sargasso Sea
aatgcattacgtttttattacgggaggtgtagcctcttcacttggaaaaggaatagcttcagcttcaatagcaacccttcttaaatctagaaattttaaagtaagaattagaaaacttgatccttatcttaatgtagatcctggcacaatgagtccatatcaacatggtgaagtatatgtgactgatgatggtgcagaaacggatttagatttagggcactatgagagatttacaaatcagtctgcaaaaaaaagtgacagtatttcttcaggtaaaatatattcaaatgttttaaataaggaaagaaaaggggattatttaggtgctaccattcaagttattccccatgtaacaaatgaaattaaaaattttattaatagcgatctaaataacgaagatattgtaatctatgaaatagggggaacagtcggtgatattgagtctcttccttttttagaagcaataagacaaattagaaatgaccgctctatttcatctgcattaatacatatgacatatgtcccatatttaagttcagctggtgaattaaaaacaaagcctacgcaacactctgtaaaagaacttctgaatgctggtattcaaccggatataataatgtgtagatccgagagatcaattgatccagattcattttcaaaaata

SEQ ID NO: 315307 - DNA, 1624 bp, Unknown
  Bacterial polypeptide expressing nucleotide sequence isolated from the Sargasso Sea
catggcgcgatacatatttgtcaccggcggcgtggtttcatcacttggaaaaggtttgtcatcagcatctcttggatatttgcttagatcacaaggctataaagtgagaataagaaaaatggatccatatttaaatgtagatccaggaacaatgagtccttttcaacatggtgaagtttttgtaactgacgatggggctgagactgatttagatttaggacattacgaaagattcacaaatatttcagccaaacaatctgacaacattactacaggtagaatttatagtgatataataaaaaaagagagaagaggaggttatctcggaaaaacagttcaagtaattccacatgttacagatagaattaaagagtttataaaaaaagatataacaaatgaagattttgtaatttgtgaaattggaggaacagttggtgacattgaaagtttaccttttttagaagccataagacagttttcaaatgataatggaagattaaaatcattatttattcatttaacatttgttccttttttaaaatcttcagatgaaattaaaacaaagccaacacaacattctgttaaagaattaagaagtataggaattcaacccgatatagtgatctgtagatctcaacagtctattcctttagaccaaagaagaaaaatatccttattttgtaatgtggatattgctaatgttatagaaacagttgatgtaaaaactatttatgaagccccaataagtttctttaatcaaaaattagataagcaagttttaaaattctttaaaataaaatctagaaaaaggccaaacttgctaccttggaaaaaaattacaaatatagttttaaaaacaaaaagaacagtaaatattgctatcataggcaaatatgtaaatttaaaagatgcttataaatcacttgatgaagcacttacgcatggaggaatttcaaataaagttaaagttaatttagtaagaatagaatcagataagcttaaatcaaaagaaattaaatctagattaaagaatgtatctggaattttgatacccggaggatttggtaagagaggaacagagggaaaaattgaggcaattaagtatgccagagaaaaaaaaatacctttcctgggtatttgttttggaatgcaaatggcaatgatagagtttgcaagaaatattttaaaaattaaaaaagctggctctagtgaactagataaaaaatgttttcccgtaataggattaattgatgaatggaacaaagatggaaaaattataaaaggaactgataaaaatcttggaggaacaatgagattaggtctatatgaggcaaaactaagaaataattctgccataaaaaatatctacaaatccaatatgattaaagagagacacagacatagatatgaggtcaatataaatttaatgcaaaaatttgaaaaaaaaggtttgatgttttcaggaatttctccggataatcaattacctgaaattattgaacttaaaaatcatccatggtttattggagttcagtttcatccagaatttaaatctagacctttgaatccccatcctctattctcatcatttattaaagctgcaaaatcttttaatggaaaataa

SEQ ID NO: 315308 - DNA, 598 bp, Unknown
  Bacterial polypeptide expressing nucleotide sequence isolated from the Sargasso Sea
atggcgaaaactaagtatatttttatcactggtggagttgtttcctctcttggaaagggtattgctgctgcctcaattggagctcttcttgaggctcgtggacttaaggtttccctattaaaattagatccttatatcaatgttgatcctgggactatgagtccatttcagcatggagaagtctttgtcactaatgatggaacagaaacggaccttgacttgggacactatgaacgttttgttagatttgaggcttctaaaaagaataattttacagcaggtatagtttatgaatctgttattaagaacgaaagaaaaggtaaatatcttggcggtactgttcaagttatcccacacataaccgatgaaattaaaagaaggattaaggctggagcagccggaagtgatgttgctatagtagaaattggtggaactattggtgatatagaaagtcagccatttgttgaagctattagacaaatgtctttagatcttccttcaaaatcaacatcatttgttcatttgactctagttccttacattaatgtttcaggcgagctaaaaactaaacctactcaacattctgtaaagagctgag

SEQ ID NO: 315309 - DNA, 1066 bp, Unknown
  Bacterial polypeptide expressing nucleotide sequence isolated from the Sargasso Sea
aacaaagcccacacaacattcagttaaagagcttagaagtattggtattcagcctgatataattatctgtaggtcagaaagatctattcctttagatcaaagaaagaaaatttcattattttgtaacgtatctatagacgatgttattgaaacagttgatgtaaaaacaatttatgaagctccaataagttttaacaaagaaaaattagatgaaagagtcttaaaattttttaaaattaagtctaaaagaaaagttaacttaactccttggaaaaaaattacgaattcagttttaaataataaaaagaaagttaacattgcaataatcggtaagtatgtagaattaaaagatgcttataaatcacttgatgaagcgttaactcatggtggtattgctaataatttaaaagttaatttagtgaggattgagtcagattatttaaaaccaaaagatgtaaaaaataagcttaaagaagtttctggtattttaattccaggtggatttggcaaaagaggaaccgaaggaaaaattgaagctattacttatgcaagaaaaaacaatataccatttttaggtatttgttttggaatgcagatggccgtaatcgaatttgcacgaaatagattaaatattaaaaatgccacttctagtgagtttggcccatctaaaggctcagttgttggtttaatgagtgagtggattaaagatggtaaattaatgaagggaacagataaggaattaggcggaacaatgagattaggcagctatgaagctaggcttaaaaaaggttccttaataaatagtatttataaatctgcaaaaatttttgagaggcatagacatagatatgaagttaatattaattttaaagataaatttgaagataagggtatgatattttctggactatcaccaaatatgaaattaccagagataattgaacttaaaaatcatccatggtttataggagttcaatttcatcctgaatttaaatctagacctttagctccacatcctttattctcctcatttattaaagccgcaaaaatcaaatcgaataaatga

SEQ ID NO: 315310 - DNA, 796 bp, Unknown
  Bacterial polypeptide expressing nucleotide sequence isolated from the Sargasso Sea
aatgtcaaaatttgtatttgtcaccggaggagtagtttctagcattggtaaaggaattgtagctgcaagcttaggaagattattaaagtctagaggatatagtgtttcaatattaaaactagatccatatctaaatgttgatccaggaacaatgagccctttccaacatggagaagtatttgtaaccgaagatggggctgaaaccgatctagatttaggtcactatgaaagatttactgatactgcaatgactaggttaaatagtgtgactacgggatctatctatcaatcagttatcaataaagaaagaagaggtagttataacggtggaactgtgcaagtaatacctcacataacgggagaaataagagaaagaattcatagagtagccgccaacagtaatgcagatattattattactgaaattggtggaacagttggtgatattgaatctctaccttttttagaggcaataagagaattcaaaaatgatgtcaataggaacgatgttgcatacatacacgtaacattacttccttacatcaaaacctctggcgaaataaaaactaaaccaacacaacattcagtgaaagaattaagatcaattggaattcagccagatttacttgtatgccgaagtgataaatctataaatgaagctcttaaaaagaagcttagtggtttttgcggtgtcagtatcaactctgtaattgaagctttagacgaagacagtatttattctgtacctctttctttaaaaaaagaaggtttatgcaaagaaaccctgaagtactta

SEQ ID NO: 315311 - DNA, 1609 bp, Unknown
  Bacterial polypeptide expressing nucleotide sequence isolated from the Sargasso Sea
atgaaaactaaattcatatttgttcttgggggtgtaatgtccggtttaggaaaagggatttctgcctcctcaattggttatcttctaaaaagtgcaggcttaagagttaatattcttaaacttgatccttatttaaatgtagatcctggcacaatgaacccatatcaacacggagaagtatttgttttagatgatggttctgagacagatttggatttaggtcactacgagagatttatcgatgaaaatatgtccaaaatgaataatgcaactgctgggcaaatttatagtacagttttagataaggagcgctctggaagttatttaggtgagacagtgcaagtaattcctcatatcactgatgaaattaaaaatagaatgaatgttttagcggatactgataaatatgatatcgtaatttgtgaagttggtggaacagttggtgatattgagagcttaccttttttagaagctattcgtcagctttcattggaattgggttatcacaattcattaataattcatctaacattattaccatttatagatgcaagtggagaattgaaaacaaaaccaacccaacattcagtgatgaagttaagagaaattggattatctcctgactttattttttgtagaactgataacgaaattagccaagagattaaagataaattggctttattctgtaatgttaaacctgaacatgttattgaaaacaaagatgtttcaagtatttatgaggtcccactacttcttgaaaatcaaaatattacaaaaatgatttgtgatcgtttgaatcttaaaaacaagccttcaataaagaaactgcaaaactttattaagacatataagaatcctaatagttcaattaaaattgctatgtgtggcaaatacactgaattacatgatgcttataaaagtataacagagtcttttatacatgcaggggtagaaaatagcacaaaagttcaagtcatatgggtaaatacagagaaaatcaaaaatgataaagatgcctttaaagcatttgaaggaattgatggtatattattgccaggaggctttggctcaagaggttcagaaggaaaaattttaacatcaaaatatgcaagagaaaataatattccttttcttggaatatgtcttggattacaatgcgctattatagactatgcaagaaatgtatgcggaattaatgatgcaaatagttcagagtttaattctaaatccaaaaataaagtaattgatttaatggaatctcagaaagcaattaaattaaaaggtggtacaatgagattagggtcttatgattgtgagattgatactggtactaaagcattttcaatttatcgtaagaaaaaaattagtgaaaggcatagacacagatttgaagtaaataataaatatgtctccaaaatgaaaaaaaatgggttaattttttcaggtattaataaaaaactaggagttgttgaaataattgaattaaaaaatcatccatggtttattggatgtcaatttcaccctgaattaaaaagtagggtagataaagcgcatcctctttttagagagtttgtaaaagcatctcttaaaaatagtaaaatataga

SEQ ID NO: 315312 - DNA, 874 bp, Unknown
  Bacterial polypeptide expressing nucleotide sequence isolated from the Sargasso Sea
atactcaaaacacggtttagatgaagcgttacttaaacaattaggatataatccaaaaaatcataaactaaatctaaaaccttggattaatcttcaaaaaaaaattaagaataaaaaacatgaggttaaaattgcagtagtaggtaagtatacaaaccttaaagatagttataagtcactcaatgaagcattaatacatggaggaatagaaaatttttctgaggtaaatattcaatggattaattcagagaaagaaagtaaattaagtttaattaaaaaattaaaaggttgtaatggaattcttgttcctggcggttttggtttcaggggtattaatggaaaaataaatgctatcaaatttgcaagagaaaataatattcctttttttggtatatgtcttggaatgcagctagctgtgattgaaatagctcaaaatgttctaaaaattaaaaacgctcattcatcggaatttaagaaaactaacaaatcagttgttggtttaatgacagagtgggtcaataataataagattgaaaaaagagataaaaatagcaataaaggtgggactatgcgtctaggggcttataaagctattttgaaaaaaaattctaaaatcttttcaatatataaaaataaattaattagtgagagacatagacatagatatgaagtaaatcagaaatttctatcaaaatttgaaaacaaaggttattattttagcggtatgtcaccagatggattattacctgaagtattggagagcaaaaatcataaatggtttataggagtacaatttcatccagaattaaaatctagaccattagatccgcaccctctttttgtttcttttataaaggctacaattaatgattaa

SEQ ID NO: 315313 - DNA, 625 bp, Unknown
  Bacterial polypeptide expressing nucleotide sequence isolated from the Sargasso Sea
aatgcattatgtttttattacgggaggagtggcctcatcacttgggaaaggtatagcttcagcttctttagctgcattgctaaaatctagaaattttagagttagattaagaaaacttgacccttatttgaatgttgatcctggcacaatgagtccctatcaacatggggaagtgtacgtaactgatgatggtgcagaaactgatttagacttgggtcattatgagagatttacaaatcaatcagcaaaaaaaagtgatagtatttcatcaggcaaaatttattcaaatgttttaaataaagaacgaaaaggagattatcttggagctacaattcaagttattcctcatgtaacaaatgaaattaaaaattttataaatagtgatctaaaaaaagaagatattgtaatttatgaaattggaggaacagtcggtgatattgagtctctgccctttttagaagctattaggcaaataagaaataatcgtaatatttcttctgcattaattcatatgacttatattccatacttaacatcagctggtgagttaaaaacaaaaccaactcaacactctgtgaaagaacttctaaatgcgggcattcaacccagatataattatgtgccg

SEQ ID NO: 315314 - DNA, 1636 bp, Unknown
  Bacterial polypeptide expressing nucleotide sequence isolated from the Sargasso Sea
ttgcttaaagatacgcgatttatttttgttactggtggagttgtttcttctctagggaaaggaatcgcttcagcatctataggttcattgcttgaatcaaaaggatatacagtaactgttattaagcttgacccttattttaatgttgatcctggaactatgagcccctttcagcatggcgaagtgtttgtaactgaagatgggacagaaactgatcttgatcttggacattatgaaagattcatcaatcataaatgtacaaaagaaaataattttactgcgggaaaaatttactattctgttttaagaaaagaaagaaaaggtgaatatttaggtaaaactgttcaagtcataccacacatcaccgatgaaataaaaagaaaaattatcaagggttctaaaggatatgatattgctattgttgaaataggagggacagttggcgacatagagagtcagccatttattgaagctatcagacagcttggtcttgaattaaaaaattatcagacatcatttatacacttaactcttgttccatttttaaaaaatgctggagaattaaaaactaaacctacacaacattcggttaaagaatataggtcgctaggcgttcagcctgatattcttatttgcagatcagacataaaattaccgcaagaaagtaaagaaaaaatagctttattttgctcaatgccatcaaatgctgttatatctttacctgatttagagacaatttacgaagtaccattagctcttgatgaggaagggatagataaaattattacagacaaactgcagcttgaaaaaaataaaccaaatctgtcagcatggaaaaaagtggttaaaagaaaaatcaaaccttctaagtcagttaatgtttcatttgttgggaagtatgtagatcttaaagatgcttatttctctttaactgaagctcttgatcatgctggaattaataatgatacaaaggtaaatattaattttgtaagttctgatgagctcaataataaaaattactcctccaaattaaagaaatcagatgctattttggtacctggtggatttgggggaagaggaatcgagggaatgattcttgcagcaaaatatgcaagagaaaaaaaagttccatactttggtatatgccttgggcttcaaatagcaataattgaaattgccagaaatctctgcggattgaaagatgcaaatagtactgagtttaaacctaggacaaagcataaagttatttcattaataactgagtggaaaaatgaagatggctcaatagaaaaaagagataaaaactctgataaaggaggcactatgcgtttgggagctcaaaaggcaaaattgaaaaaaaattcacttgctcataagctttataagaaaacaaatatatttgaaagacatcgtcacagatatgaggtaaaccctgaatatatttcagaacttgagaaaaaaggtttgcttatatctgcaagatcagaaattcacaacttagttgaaattattggtatcaaaaatcacccttggtatcttggttgtcaattccatccagaatttacgtcaaaacctaaaacaggacatccattatttaatgatttcattaaaacagcggtaaaattgaagagatgat

SEQ ID NO: 315315 - DNA, 595 bp, Unknown
  Bacterial polypeptide expressing nucleotide sequence isolated from the Sargasso Sea
gatggtatcttgatacctggcggatttggaaaaagaggcatcgaaggaatgattatcgccgcaaattatgcaagaagaaaaaatgtgccatactttggtatatgcctaggtatgcaaattgcaattattgagtttgccagatatgaggctaaattaaatcaagcgaatagtactgaattcaataaattaacacctcatccagttattgcacttgttacagagtggaaagataaatctggtaaattggagcaaagaaatcctaattctgatttgggaggaacgatgagattgggtggtcaaaaatgcaagctcaaaaaatcatctttatcacatagactttataaaaaagataacattattgagagacataggcatagatatgaagttaatccaaactataaagataaactaattgagcatggacttgagataactggcatgtctagcgacaataaacttgttgaaatgattgaaattaaacaacataaatggtttatcggctgccaatttcaccctgaatttacttcaaatcccagagatggacatccactttttaacaactttattttaaaagcattaaaatctacaaaatgag

SEQ ID NO: 315316 - DNA, 1621 bp, Unknown
  Bacterial polypeptide expressing nucleotide sequence isolated from the Sargasso Sea
atgacaagatacgtttttatcactggcggcgttgtatcttccctgggcaagggtatagccgcagcctcccttggttctttgttcaaacttcgtggttttaaggtatctcttcaaaaacttgacccatatattaatcttgacccaggaacgatgagtcctattcagcatggcgaggtatttgttacaaaagatggcgcagaaacagatttagatttaggacattatgagcgatttgttggaatagagatgtcacaagacagtaacgttacggcaggaagagtctactctaatgtaatcaataaagagagaagaggcgattatctaggtagcacagttcaagttataccacatattactgatgagattaaaaaattaataaaaagaggctctagaggtgcagatatagcatttgttgaagtaggtggtactgtaggtgatatagagtcacttccttttcttgaagctattagacaattctcattagaagtaggtagcaacatgtcgctttttgtacacttaactctattaccttatatagatgttacgaaagagattaaaaccaagcctactcaacactctgtgaaagaattaagatcaattggtatacaaccagacattctcttgtgtcgtggtaagaatgagatagataatagaattaaaaagaaactcgcattatttacaaatgtatcaaaagatgcggttttttccgctatagacgctgagacaatatatgatatcccggtattattgcaaaaacaaaatattgacacatatattactaagagtttgaagctgaaaaataaaaaattaaatttaaaaccgtggacagattacagaaaaaaacttaatagatgtaaaaggagtacaacaattgcaatgatagggaagtatgttgatttagaagattcttataaatcacttaacgaagctctttatcatgctggaatcattaatggtgcaagagtaaatattgagtatatagattcagaaaaaattaataaaacataccttaaaaatcttaaaaaggttaatggtattttagtgcctggcggctttggaaatagaggtatagagggaaaaattcttgctgctatgtatgcgagaaaaaatgatattccatattttggtatatgtctaggtatgcaaatctctgtgattgagtatgcaagaaatgttataaacttgacaagagcaaatagtacagagtttgatttgaaaacaaaaaatccagttattgcacttgttgaggaatggaaaaactcatctggaaaaaatattttagttgataaaaaaaatctgggcgggacaatgcgcttaggatctcaaaaatgtgacattattaagaattctctagcatttaaaatgtataactctcttgtaattaatgagagacaccgtcatcgatacgaggttaatagtaattttttggatttttttgataatagtaatatgatatttagcggaagatctcattcggataatttgatggaaattattgaattaaataatcacccctggtatcttggttgtcaatttcatccagagttcacttcttccccagtgaacggacatccgttatttaacgggtttattaaggcagctattaaaaataaaatataag

SEQ ID NO: 315317 - DNA, 1453 bp, Unknown
  Bacterial polypeptide expressing nucleotide sequence isolated from the Sargasso Sea
atggcgcgatacatattcgttactggcggcgtggtttcatcactaggaaaaggcttatcttcagcatctttagcatatttattaaaatctcaaggatataatgttagattaagaaaaatggatccttatttgaatgtagatccaggtacaatgagtccatttcaacatggtgaagtttttgtaacagatgatggagcagaaacagatttagatcttggtcactatgaaagatttacaaatatatcatcaaaacaatcagacaatattacaactggtcgtatttatagtgatgtgattaaaagagaaagaaaaggaggatatcttggaaaaactgttcaagttatacctcatattacaaatcgaataaaagaatttataaaaaaagatattaccaatgaagattttgttatatgtgaaattggtggcactgtaggagatattgaaagcttaccttttgttgaagctataagacaattttcaaatgaacatggtaagtcaaaaactttattcattcacttaacttttgttccttttttaaaatcatcagatgaaataaaaactaaaccaactcagcattcagttaaagagttaagaagtattggcattcaaccagatataattatttgcagatctcaacaatctataccattagatcaaagaaaaaaaatatccttattttgcaatgttccaattgataacgtaattgaaacagtagatgtaagaacaatttatgaggcacctattagtttttttaaacaaaaacttgataaacaagttttgaagtattttaaaattaaatccaaaaaaagagcaaatttaaatccttggaaaaaaataactaagatagtgttgaatacaaaaagaatagttgatattgcaataattggtaaatatgtaaatttaaaagatgcttataaatctttggatgaagctttaatacatggaggtatttcaaataaagtaaaagttaatttaattaggatagagtctgacaatttaaaaactaatgaaataaagaaaaaacttaaaaatgtttctggattattaataccgggtggttttggtaaaagagggactgaaggtaaaatttctgcgataaaatatgctagagaaaacaaaatacctttccttggtatttgttttggaatgcagatggccattattgaatttgcaagaaacaaattgaatataaaaaaggccggatcgagtgaactcgataaaaaatgttaccctgtaataggcttaatcgatgaatgggacaagaatggaaaaataattaagggaacagataaagatttaggtggcacaatgagactgggtttgtatgaagctaaattacgaaataattctgccataaataggatctataattcaaagactattaaagaaagacatagacatagatatgaagttaataataatcttaaaaatcaattgaaaaaaaggggttagt

SEQ ID NO: 315318 - DNA, 190 bp, Unknown
  Bacterial polypeptide expressing nucleotide sequence isolated from the Sargasso Sea
catggcgcgatatatatttgtcacgggcggcgtggtttcatctttaggtaaaggtctctcctcagcttcattagcatatttgttaaaatctcagggatacaaagtaagattaagaaaaatggatccatatctaaatgtagatccaggaacaatgagcccatttcagcacggagaagtttttgtaacagac

SEQ ID NO: 315319 - DNA, 764 bp, Unknown
  Bacterial polypeptide expressing nucleotide sequence isolated from the Sargasso Sea
aaaggaagtaaatgtttcatttgttggaaaatatacggagttaaaagattcttataaatcaattaatgaagctcttgagcacgccggaataaaaaataaagcaaaagtaaacattaattttgttgaagccgaaaacatttcttcaaaaaacatcaaaaaaactcttaagaatgcagatgcagtcttagttcctggtggatttggtgaaagaggtattgagggaatgatcttagcttgcaaatatgctagagagaataacattccatatttaggaatttgccttggcatgcaagtagcgattatagaatatgcaagaaatgttcttaatctaaaaggtgcaaatagtactgagtttgatcaaaatacaaagcatcctgttattggccttattacagaatggaatgatatttcaggcaaaaaagaaaaaagagataaaaattcagacttaggtggaacaatgcgtttaggcgggcagctatgtaaactcaaaaagggatctaattcattaagaatgtataaaaattcagaaatcattgaaagacatagacatcgttatgaggtaaatccaaaatataaagatgatatgatcaaaaaaggattagatgttgtagggacatccattgatggtaagctagtagaaatgattgagattcctaaacataaatggtttttagcttgtcaatttcatcctgaatttacctccaatccaagagatggacatcctattttcaacagttatattaaaagtacgttaagaaagtaaa

SEQ ID NO: 315320 - DNA, 505 bp, Unknown
  Bacterial polypeptide expressing nucleotide sequence isolated from the Sargasso Sea
atggcaaaaactaaatacatttttataactggtggagtagtgtcatcactaggtaaaggtattgctgctgcatcaatcggagctttattagagtcaagaggactttcagtatcacttataaaagttgacccatacattaatgttgatcctggaacaatgagtccctttcaacatggtgaggtatttgtaactaacgatggaacagaaaccgaccttgatttaggacattacgaacgttttgtaaggtttgaagcttctaaaaaaaataatttcactgctggaaagatttatgaaactgttattcgtaatgaaagaaaaggtaaatatttagggggaactgttcaagtaattcctcatataactaatgaaattaaaaaaagaattaaggaaggtggccttaataaagacattgcaatagtcgaaattggaggaactgttggtgatattgaaagccaacccttcgtagaggcaattaggcagatggcacttgagcttccaagttcgt

SEQ ID NO: 315321 - DNA, 1627 bp, Unknown
  Bacterial polypeptide expressing nucleotide sequence isolated from the Sargasso Sea
gatggcaaaaactaagtacatttttattaccggaggagtggtctcatcactcggaaagggaatagcggcagcttcaattggcgcattattagaatcaagaggactttctgtctctttaataaaagttgatccatatattaacgtagatccaggaactatgagtccatttcagcatggagaggtatttgttacaaatgatggaacagaaacagatcttgatttaggtcattatgaaagattcgttaggtttgaagcatcaaagaaaaataactttacagctggtaaagtttacgagactgtaataaagaacgaaagaaaaggaaaatatttaggtggtacggttcaagttataccgcatattacaaatgaaataaaaaagagaattaaagagggaggccaaaataaagatattgcaatcgtagaagttggaggtacagtgggagatattgagagtcagccttttgtagagtctctgagacaaatggcactcgaaatgcctaattcatcatcagcttttgtacatttaactcttgtgccatatataaatgcttcaggagagctaaagacaaaacctactcaacattcagtaaaagaattaagatcattaggcattagtccagatgtcctaatttgtaggtctgagcaagaacttcctaaagatgaaaaaaataaaatagcactattttgctctgttccaaataaaagtgttatatcaatgcatgatgtcgaaacagtttattcaataccggcattattaaacaaacaaaaagttgataaaacaatcttagataaacttaatattaaatcaaaagatccaaaattaaatgattggaaaagggtagttaaagcaaaacttcttccagatatagaagttaatgttagctttgttggcaaatatactgagctaaaggatgcatataaatcaattaatgaagctttagagcatgctggaatagtaaataaagccaaagtaaatataaattttgtacaggcagcagatttaactacaaagaacataagaaaaaaattaagaaaagctgatgcaatacttgtgccaggcggctttggtcataggggtgtggaaggaatgattctagcttgtaagtttgcaagagaaaataatattccttatctaggaatttgtttaggaatgcaagtagccataattgaatatgctcgaaatgtcttaaaattaaaaaatgcaaatagtactgagtttgatcagcataccgaattccctgtaatcggtcttataactgaatggaatgatatttcaggaaaaaaagaaataagaaataagaattctgatttgggaggaactatgagattaggtggtcagatatgtaaacttaagaaaagttcaaattcatataaaatgtataagaatttagaaatcgtggaaaggcataggcatagatatgaagttaatcctaaatttaaggaagcaatgattaaagagggattggatgttgtaggcacttcaattgatggtaagctagttgagatgatagaaattcctaaacacaaatggtttttggcttgtcaattccatcctgaatttacatcaaatccaagagatggccatcctatttttaatagttatataaagagtacaattagaaaataa

SEQ ID NO: 315322 - DNA, 1147 bp, Unknown
  Bacterial polypeptide expressing nucleotide sequence isolated from the Sargasso Sea
gaggctataagagaattcaaaaatgatgtcaataggaacgatgttgcatacatacacgtaacattacttccttacatcaaaacctctggcgaaataaaaactaaaccaacacaacattctgtgaaagaattaagatcaatcggtattcagccagatttacttgtttgccgaagtgataaatctatcaatgaagctcttaaaaagaagcttagtggtttttgcggtgtcagtatcaactctgtaattgaagctttagacgcagacagtatttattcagtacctctttctttaaaaaaagaaggtttatgcaaagaaaccctgaagtatttagaccttgaagataaaaaatgtgatttgaaaaattgggagcaactaatacacaacctaagaaatcctggagctccaatcaaagttgctttagtaggtaaatacattgaacttggagatgcatatttatccgttgttgaagctttaagacatgcatgcattgaacaaaaggctttattagatttacattgggtaagtgctgaaatgatagaaaaaaattcatcagaaacttacttaaatgaagttgatgcaattgtcgtaccggggggatttggcaatagaggagtaaatggaaaaatttcggctataaaattcgcaagagaaaataaaattccatttttaggtttgtgccttggtatgcaatgtgcagttatagaatgggctaggaatgtagctaatcttccagatgcatctagttcagaactagacccaaatactcccaatccagtgatacatttattaccagaacaggaagatgtagttgatttaggtgggacaatgagacttggagtttatccatgtagattgacaaaaaatacaactggtaaaaacttatatgatgaggatgttatttatgagagacatcgacatagatacgaatttaataattactacaaacaaagttttttaaattctggatataaaattagtggtacatcaccagatggcagattagttgagttaattgagttagaaaatcatccatacttcttagcatgtcaatatcatcctgagtttttatcacgacctggcaaacctcatccttattttaaaggtttaataaaagcctctcaagataaattaaatcaatcaaattaat

SEQ ID NO: 315323 - DNA, 1426 bp, Unknown
  Bacterial polypeptide expressing nucleotide sequence isolated from the Sargasso Sea
cgaaagcataatcgtacacccggtcaaatatatgacacagttattcgaaaagagcgcgccggcgattatcttggtgcgactgtgcaggtgattccgcatgttatcgatgaaatcaaaaatactattacagaagcttccagaatttttgacaaagaaacaaaatctttcaacgctcccaacgccgacatttgtattgtagaaatcggtggaactgtaggagacattgaatcgcttccttttctggaagctattcgtcagtttagacacgatcatggaaaagaacacacgttgtttgcccacctgacactaatcgtacagactgcagaaatgaaaaccaagcctacccaacatagtgttggaaaactaagggaaattggtatacaacctgatattctcatatgtcgtacgcctgaaatgctttcagaaaaagttagaagtaaaatttccctattcactaatgttccagaagactcggttgttaacggtcttgatgtagaatcagtctatgaagttcctcttatgtttcaccagcagaatctggacaaaaccataatggcttatttgcagatgtggacaggaagtccaaaacttcagccttggattgatttgattgaaaaatataaaaatcctcaagacgaggtagaaatagcctttattggtaaatatgttgcgcatcttgactcttatgaaagtcttaaagaagcactactgcatggaggtattgcaaatcgactaaaagtaaagctgcattacattgattctgaactcttaaccactgaaaatgctcttgaacttcttgaaaaaatggatggtgtgctggttgctcccggatttggcgaacgtggaatggaaggaaaaattactgctattcagattgcccgtacagcaaatattcccttcttcgggatctgtcttggcatgcagatggctatagttgagttttcccgcaatgttttaggcatttcgggagctaattcaggagaatccagacctgatcacactgaaaatgtgatcgatttgatgccggaacaggaaggacatatagaaacaggaggtaccatgcgcctaggaagccagattacagtcctaaaaaagggatcaagaattgccaagatgtataataaaactactatttcagaacgccatagacaccgatatgaggtaatgaatgaatttgttcccaagcttgaagaggcaggattaatgatttctggacgtcatcctgaaagaaatttagtagagacaattgaacttcatgaacatccctggtttataggatgtcaatttcatcctgaacttcagtcaaagccgcttaaaccacatcctatgttttcttctttcatcaaagcagcatatgctaaccgacagtcacgcctgagacaagtacaaacttcattaaaaaaagcaaaagcccctgttgcatagg

SEQ ID NO: 315324 - DNA, 1615 bp, Unknown
  Bacterial polypeptide expressing nucleotide sequence isolated from the Sargasso Sea
tttgactaaaaccccaaaatatatatttgttactggtggagttagctcctcactaggtaaaggaattatctccgcatctttagcaaaactattacaatccaaaggcttaaaagttacaattcaaaagtttgatccatatataaatattgacccaggaacattaaatccttatgagcatggcgaatgctacgtaactaaagatggtacagaaactgatttagatcttggtcattatgaaagatttctaagtattcaaacaacaaagactaacaatacaactactggaaaaatttatcagtctgttatcaatagagaaagaagaggtgattttttaggtaaaactgttcaagttattccacatatcacaaatgaaattaaaagaagaatacaattaattagcactgaagattcctatgacataataattactgagttaggaggaacggttggtgatatagaatcatatccttttatcgaagctgttcgtcagttccgatgggatgttggagagaaaaacagtttagttatacatttgacattattgccttttttatcagctgctggtgagcttaaaacaaaaccaacccaacactccgtaaaaaaattaatggagagcggtgttaatgcagatatcattgtatgtagaactgaaagaagtattggtcaggatcttcgctcaaaaattgccctgttttgtaatgttgatattaactctgtaatagaatcaattgatgcaaaaactatatatgaggtacccttactcatgcagcaagaaaaattagatcaagttgttttaaataaattaaatcttccaaatactaaatctgatttaaaagactggaaaaattttgtaaaaaaacttaaaaatcccaaacaaaatataaaaattggtttgataggtaaatatgttgaattgcaagactcttataaatcaattttagaatcatttgttcatgctggtgctattaatgaggtaaaaattgatgttgttcctattcattctgaaagtattgaaagtactaatgtagctgtagaattatcaaaattagatggaattttagttgctccgggttttggagaaagaggtattgaaggaaaaatttcatccattaagtatgctcgtgaaaataatttaccatttcttggtatatgcttaggtatgcaaatggctgtaattgaatttgcaagaaatgttcttagtcttagcagtgctaattcaacagagatggatgattcaactaaacatccagttataagtttgatggatgatcaggttgaggttcaagacaaaggaggaacaatgaggctaggatcctggaagtgtaaaattgttaaagaatcattagcatataaaatttataatgaagaaacaatttcagaaaggcacagacacagatatgaattaaattttgattatatggataaattggctgattctggaatggttttctctggacttaatccaaaaactgggcttgtagaaattattgaaatccctaatcatgattggtttttaggtgttcaatttcacccagagtaccaaagtacggttgaaaaccctcatcccgtctttgtttcctttgttaaggcatgtaaaaataaaagtaaaaaatag

SEQ ID NO: 315325 - DNA, 1142 bp, Unknown
  Bacterial polypeptide expressing nucleotide sequence isolated from the Sargasso Sea
aatgtcaaaatttgtttttgtcaccgggggagtagtttctagcattggcaaaggaattgtagctgcaagcttaggtagattattaaagtctagaggatatagtgtttcaatattaaaacttgatccatatctaaatgttgatccaggcacaatgagcccttttcaacatggagaagtgtttgtaaccgaagatggggctgaaaccgatctagatttaggtcactacgaaagatttactgatactgcaatgactaggttgaatagtgtaacaacgggatctatttatcaagctgttattaataaagaaagaagaggtaattataacggtggaactgtgcaagtaatacctcacataacgggagagattagagaaagaattcatagagtagccgctaacagcaatgcagatattattattactgaaattggtggaacagttggtgatattgaatctctaccttttttagaggcaataagagaattcaaaaatgatgtcaataggaacgatgttgcatacatacacgtaacattacttccctacatcaaaacctctggcgaaataaaaactaagccaacacaacattcagtgaaagaattaagatcaattggaatacagccagatttacttgtatgccgaagtgataaatcaataaatgagggtcttaaaaagaaacttagtggattttgtggagtaaatattaagtcagtaatagaagcattagacgcagatagtatttactctgtgcctcttgctttaaaaaaagagggtttgtgcaaagaaactcttaagtatcttgaactagaggataaagaatgtgatttgaaaaattgggaagcactaattcacaatctaagaaatcctggggatccaataaaagttgctcttgtaggcaaatatattgaacttggagatgcatatttatctgtagttgaagctttaagacatgcatgcattgagaacaaggctttattggatttacaatgggtaagcgctgaaatgatagaaaaagattcagcagagacttacttaaatgaagttgatgcaattgtcgtacctggaggatttggaaatagaggagtgaatggcaaaatttcagcgataaaattcgcaagggaaaagaaaataccatttttaggactgt

SEQ ID NO: 315326 - DNA, 532 bp, Unknown
  Bacterial polypeptide expressing nucleotide sequence isolated from the Sargasso Sea
ttgagtaaatttattttcgttacaggtggagttgtaagttccctaggtaagggaatagctgttgcttctattggtaaaatgctaaaaagtagaggcctgactgtatctgttatgaagcttgatccctatctaaacgtagacccgggtaccatgtcgccttatcagcacggagaagtttttgttacagatgacggaagcgaaacagatcttgatttaggtcactatgaaagatttatagatgttgaattaacccacaattccaatatcacagcggggcaaatttattcagaggttatttctaaagaaaggtctggtgagtaccttgggggaacaattcaaacaataccccatgtcactaatcttataagagataaaataataaacctatcgaaagattcagatgtagatattgtaatagtggaagttggaggcaccgttggagatatcgaagggcagccatttttagaggctattcgccaggtaagaaatagtgttggtagagatgatacattttatgtacatttgactttgc

SEQ ID NO: 315327 - DNA, 1366 bp, Unknown
  Bacterial polypeptide expressing nucleotide sequence isolated from the Sargasso Sea
tgacaacattactacgggtagaatttatagtgatattataaaaaaagagagaagaggaggttatctcggaaaaacagtccaagtaattccacatgttacaaatagaattaaagagtttataaaaaaagatataacaaatgaagattttgtaatttgtgaaattggaggaacagtcggtgatattgagagtttaccatttttagaagctataagacagttttcaaatgataatggaagatctaaatcattatttattcatttaacatttgttccttttttaaaatcttcagatgaaattaaaacaaagccaacacaacattctgttaaagaattaaggagtataggaattcaacctgatatagttatctgtagatctcaacagtctattcctttagatcaaagaagaaaaatatccttattttgtaatgtggacattgctaatgttatagaaacagttgatgtaaaaactatttatgaagccccaataagcttctttaatcaaaaattagataagcaagttttaaaattttttaaaataaaatctagaaaaagaccaaacttgctaccttggaaaaaaattacaaatatagttttaaaaacaaaaagaacagtaaatattgctatcataggcaaatatgtaaacttaaaagatgcttataaatcacttgatgaagctcttacgcatgggggaatttcaaataaagttaaagttaatttagtaagaattgagtcagataaacttagatcaaaagaaattaaatcaaaattaaagaatgtatcaggaattttgataccaggaggatttggtaaaagaggaacagaaggaaaaattgtatcaattagatatgccagagagagaaaaataccttttctaggtatttgttttggaatgcaaatggcaatgattgaatttgcaagaaatagattaaaaattaaaaaagctggctctagtgaattagataacaattgttttccagtaataggattaattgatgaatggaacaaagatggaaaagttataaaaggaactgataaaaacctgggaggaacaatgagattaggtttttatgaggcaaaactaagaaataattccgccataaaaaatatctataaatctaatatgattaaagagagacacagacatagatatgaggtcaatataaatttaatgcaaaaatttgaaaaaaaaggcttgatgttttcaggaatttctcctgacaatcaattacctgaaattattgaacttaaaaatcatccatggtttattggagtccaatttcatccagaatttaaatctagacctttaaatcctcatcctttattctcttcatttattaaatctgcaaaatcttttaatggaaaataa

SEQ ID NO: 315328 - DNA, 1100 bp, Unknown
  Bacterial polypeptide expressing nucleotide sequence isolated from the Sargasso Sea
catggcgcgatttatatttgttactggcggcgtggtttcttcacttggtaaaggtttagcttcagcatcactcgcttcattattgcaacatcacggatacaaggtcagaattagaaaattagatccatatctaaatgtagacccaggtacaatgagtccatatcagcatggtgaagtttatgtaacggatgatggtgcggaaacagatttagatttaggtcactatgagaggttcacaggagtcacatctaaaaaatcagataatattacatcgggaaaagtctatcaaaaaattatagcaaaagagagaaaaggcgaatacttgggtgccacagtacaagtgattcctcatgtcacaaatgaaattatagaatttatttctaaagatcttgattatgaagattttgtaatttgtgaaataggaggaacaataggtgacatagaaagtttgccgtttatagaagctataaggcaatttcacaatgataatggacatgaaaattctttgtttatgcatgtaacattagtcccatacattgctagttctggagagctaaaaactaaaccaacacagcactctgttaaagagttgaggagcttgggcatacagccaaatattttactatgcagagctgatagagaaattccagaggatgaaagaagaaaaattggtttattttgtaatgtgaaaggtgactgtgtcattccagcaattaatgcaaactcaatttatgaagttcctattaattttttaaatgagggtcttgataagagagttcttgagtactttagattagagtctaaaaaagaaattgatttaaaaatgtggtcacaagtatcaaaaagaatattggaaccagagggcagtatagaaattggtattgttggtaaatatactggtttggctgacgcatacaaatcccttaatgaagcattatcgcatggtggcatttataataatgttaaagttaaattgaattggattgagtcagaagaactgaacggttccaatattgaaaatatgcttaataattgtcatggtatcttagtacccggaagatttggtgagagaggagctgaaggtaaaatagcagcaatta

SEQ ID NO: 315329 - DNA, 350 bp, Unknown
  Bacterial polypeptide expressing nucleotide sequence isolated from the Sargasso Sea
cggtagaaaaattaaaggaacgttaaaaaatttaggtggaactatgcgattaggtctttatccagctaaattacaacacaattccctaataaaagaaatttataagtctagtcaaattagagaaagacatagacataggtatgaggttaatgtcagtttgagaaaaaaatttgaaacacacgggttaaatttttcaggaatgtctcctgacaataacttacctgaaattgttgagattaaagatcatccttggtttattggagttcaattccacccggaatttaagtctagacctttacaacctcatccattattctcatcctttattggggctgcaaaaaataaataat

SEQ ID NO: 315330 - DNA, 1325 bp, Unknown
  Bacterial polypeptide expressing nucleotide sequence isolated from the Sargasso Sea
gatggccaaaactaagtacattttcattactggaggagtggtttcatcactcggtaagggtatcgcagcagcttcaattggtgctcttcttgaagcgaggagcttgtcagtatcacttataaaagtcgatccatatataaacgtagatcctggaaccatgagtccttttcaacacggagaggtttttgtaacaaatgatggaactgaaactgatttagaccttggtcattatgaaagatttgtaagattccaagcctcaaagaaaaataattttaccgcaggtaaagtatatgaagccgttattcgtaatgaaagaaaaggtaaatatcttggagggactgttcaagtaattcctcatatcacaaatgaaataaaaaaaagaataaaagagggcggtcagaataaagacgttgctattgttgaaattggtggaactgttggagatattgaaagccaaccttttgtagaggcaataaggcagatggccttagagcttccaaattcttcttgggcttttgtacatcttactttagttccttttattaatgcttctggagaacttaaaacaaaacctacccaacattctgttaaagaacttagatcattaggaatcagtcctgacgtattagtttgtagatctgaacaggagttaccaaaagatgaaaaaaagaagatcgcacttttttgttctgtacccaatgaaagcgttatatcaatgcatgatgttgacacagtatattcagtaccgattttactaaataaacaaaaagttgataaaaccattattgaaaaactaaaaattaaggctaaacagccaaatctaaatgactggaaaagagttgttaaagctaaattaatgccagagaaggaagtaaatgtttcatttgttggaaaatatacggagttaaaagattcttataaatcaattaatgaagctcttgaacatgccggaataaaaaataaagcaaaagtaaatattaattttgttgaagccgaaaacatttcttcaaaaaacatcaaaaaaactcttaagaatgcagatgcagtcttagttcctggtggatttggtgaaagaggtattgagggaatgatcttagcttgcaaatatgctagagaaaataacattccatatttaggaatttgccttggcatgcaagtagcgattatagaatatgcaagaaatgttcttaatcttaaaggtgcaaacagtactgagtttgatcaaaacacaaagcatcctgttattggtcttattacagaatggaatgatatttctggcaaaaaagaaaaaagagataaaaattcagacttgggggaacaatgcg

SEQ ID NO: 315331 - DNA, 778 bp, Unknown
  Bacterial polypeptide expressing nucleotide sequence isolated from the Sargasso Sea
ttggcaaaagcaaaaccagtaaaatatatttttgttttgggtggtgttatatccgggcttggtaagggtattgccgctgcttcaataggctacctattaaaaagtgccggattaaaagttaccattttaaaattagatccatatttgaatgttgatcctggaactatgaacccatatcagcatggcgaagtttttgttttggacgacggttctgagaccgatttagaccttggccactatgagaggtttattgatgtagatatgggaaagataaataacacaaccaccggtcaagtttatagcacagttttagaaaaagagaggcgtggcgattatttaggcgctacaattcaagtaattccgcatattacagatgaaattatttccagaatcaaggcgataaataaaccaaagaaatttgatgttgttatttgtgaggttggtggaactgtcggcgatattgagagtttgccatttatggaggcgattcgacaactctctcttgaagtgggataccacaaccatacgatgatgcatgtaacgctcgtaccatacattcaagcaagtgaagaattaaagaccaagcccacacagcactcagtcatgaagttgcgcgagataggtttatctccagatatgatcttatgtagaactgatcacaaacttacaaaagatgtgaggaataagattggtttgtttggaaatttaaacccagaccatgtaattgaaggttcggaggtaaaaagtatttatgaagtcccacttaaccctatataat

SEQ ID NO: 315332 - DNA, 751 bp, Unknown
  Bacterial polypeptide expressing nucleotide sequence isolated from the Sargasso Sea
atgaagtcccacttaaccctatataatcaaaatgtatcagaaataataatggatcgccttcaacttccaggtaaagctgatgtatcatacttgaaaacctttattaaaaagtataaagaccctaagcataatgtaaatattgcgatgtgtggtaaatacactgaacttccagacgcatataaaagcgtacttgaatcgtttatacattctggtgttgaaaataatgcacgcgtcaatgttcattgggttgctactgaagaaataaaaaatgatttagatgctgaaaaagcttttaataagatggatggaattctacttctgccaggctttggatcaagaggatcagaaggaaaaataatttcatgtaagtatgcgagagagaataatgttccttttcttggaatttgtttagggctacaatgtgcggttattgagttcgctcgaaatgtttgcggcctcaatggcgcaaacagcaccgagttcaataaaaacacaccataccccgtaattgaccttatggaatcacaaaaagcaattaaggcaaaaggtggaaccatgaggcttggagcatattcatgcaaaataaaaaaaggtaccaaggcgttttctgcgtatcgaagaaaaaccatttctgaacgccatcgtcatagatgggaagtcaataatagatttcgtgacagattaacaaagaaaggattggttatatctggagaaaactctgacctaaatcttgttgagattgttgagcttg

SEQ ID NO: 315333 - DNA, 1236 bp, Unknown
  Bacterial polypeptide expressing nucleotide sequence isolated from the Sargasso Sea
catgactacaagatacatcttcgtgacgggtggggttgtctcatccttaggtaaaggcattgctgctgcatcgttagcagctattttagaagcccgtggcctgaaagtgaccatccttaaactggatccgtacatcaacctggatccgggcaccatgagcccaattcagcacggtgaagtgtacgtcacagaagacggcgcagaaaccgacctcgatttaggtcactatgagcggtttatccgcactaaaatgaccaaacgtaataacttcacccaaggccgtatttattcagacgtcttacgtcgtgagcgccgtggtgattatttaggtgccactattcaggtcatccctcatatcaccaatgaaatcaaaagccgtgtgattgcaggcgccgaagggtatgacattgccatagtggaaattggtggcactgttggtgatatcgaatccctgccattcttagaagcaattcgtcagttaggcactgaaattggccgtgaacgtgccatgtttatgcatctgactttagtgccatacctgggcacggccggtgaaatcaaaaccaaaccgactcagcattcggtcaaagagctgcgttctattggtattcagccggatattctggtctgccgttctgaccgcgctatcccatcgaacgagcgcgctaaaattgcactgttcaccaatgtggaagaacgtgctgttatttcgttaaaagacgtgtccagcatttaccaaattcctgccctgttaaaatcacaaggcctggatgaattagtggtgcgtcgtttccatatgacttgtcctgaagctgacctgaccgaatgggaacaggtgctgtatcaggaatcaaaccctacaggtgaaattaccgtaggtatggtaggcaagtatgttgagctgccggatgcctataaatcagtcaacgaagccttaaaccatgcaggtttaaaaaatcgtttaactgtgcatatcaaatacattgactcgcaagacgtagaaagcaaaggcactgatgtgttggccggtgtggatgcgattctggtgccaggtggttttggtgagcgtggtgtggaaggtaaaattatggccgcccgttatgcccgtgaaaacaaagtgccttacctgggtatttgtttaggtatgcaagtcgcgctgattgaatatgcccgtaatgtagccggcatgaaagatgcgcattcaactgaatttaataagaaaacaccttaccctgt

SEQ ID NO: 315334 - DNA, 475 bp, Unknown
  Bacterial polypeptide expressing nucleotide sequence isolated from the Sargasso Sea
tttgtgccttggtatgcaatgtgcagttatagaatgggctaggaatgtagctaatcttccagatgcatctagttcagaactaaacccaaacactcccaatccagtgatacatttattaccagaacaggaagatgtagttgatttaggtgggacaatgagacttggagtgtatccatgtagattgacaaaaaatacaactggaaaaaacttatatgatgaggatgttatttatgagagacatcgacatagatacgaatttaataattactacaaacaaagttttttagattctggatacaaaattagtggtacatcaccagatggcagattagttgagttaattgagttagaaaatcatccatacttcttagcatgtcaatatcatcctgagtttttatcacgacctggcaaacctcatcctttatttaaaggtttaataaaagcctctcaagataagttaactcaatcaaattaa

SEQ ID NO: 315335 - DNA, 351 bp, Unknown
  Bacterial polypeptide expressing nucleotide sequence isolated from the Sargasso Sea
tatggcaaaagcaaaaccaataaaatatatttttgttttgggaggcgttatatctggacttggcaagggtattgccgctgcttcaataggttacctattaaaaagtgccggattaaaagttaccattttaaaattagatccatatttaaatgttgaccctggaactatgaacccataccagcatggtgaagtttttgttttggatgacggctcagagaccgatttagaccttgggcattatgaaagatttattgatgtagatatgggaaagataaataacacaactacaggtcaagtgtatagcacagttttagaaaaagaaaggcgtggcgattatttaggtgcaacaat

SEQ ID NO: 315336 - DNA, 874 bp, Unknown
  Bacterial polypeptide expressing nucleotide sequence isolated from the Sargasso Sea
atggcgcgatatatatttgtcactggcggcgtggtctcctcattaggaaaaggtctttcatctgcatcattagcctatttactaaaatctcagggatacaaggttagattaagaaaaatggatccatatttaaatgtagatcctggaacaatgagcccatttcaacatggtgaagtttttgttactgatgatggagctgaaactgatttagatttaggtcattatgaaagatttacaaacatatcatctaaacaatcagacaatataacaactggtcgtatttatagtgatgttattaaaaaagaaagaaagggagggtatcttggaaaaacagttcaggttataccccatattacaaatcgaataaaagaatttattaaaaaagatattacaaatgaggattttgtaatatgtgaaattggtggaacagttggagacattgaaagtttgccatttgtggaagctataagacaattttcaaatgaacatggaaaatcaaaaactttatttattcacttaacatttgtaccatttttaaaatcatcagatgaaatcaaaaccaaaccaactcagcattcagtcaaagaattaagaagcataggaatacaacctgatattattatctgtagatctcaacaatctataccattagaccaaagaaaaaaaatatcattattttgcaatgtcccaattgatagtgttattgaaacagtagatgtgagaacaatatatgaagcaccgattagtttttttaatcaaaaactggataaacaagttctaaaattctttaaacttaaaccaaaaaaaagacctaacctaaatccatggaaaaaaataactaaaattgtattgaatacaaaaaaatcggttaaca

SEQ ID NO: 315337 - DNA, 222 bp, Unknown
  Bacterial polypeptide expressing nucleotide sequence isolated from the Sargasso Sea
catggcgcgatatatatttgtcacgggcggcgtggtttcatcattaggtaaaggtttatcctcagcttcactagcatacctacttcaatcacgaggttttaaagtaaggattagaaaacttgatccatatttaaatgtagaccctggaacaatgagtccttttcagcatggtgaagtttatgtaactgacgatggcgctgaaacagatttagatctcggtca

SEQ ID NO: 315338 - DNA, 700 bp, Unknown
  Bacterial polypeptide expressing nucleotide sequence isolated from the Sargasso Sea
catggcgcgatatatatttgtcacgggcggcgtggtttcatcattaggtaaaggtttatcctcagcttcactagcatacttacttcaatcaagaggctttaaagtaaggatcagaaaacttgatccatatttaaatgtagacccaggaacaatgagtccatttcagcatggtgaagtttatgtgactgacgatggtgctgaaacagatttagaccttggtcattatgaacgattttcaggagtatcagcaaaaaaatcagacaacatcactacaggcaaaatatataatgatgtattaaaaaaagaacgtaaaggagagtatcttggaaaaactgttcaagtaattccacatattacagatcgcataaaacaatttattaaacacgattcatccaaagaggactttgtaatttgtgaaatcggagggatagttggagatatagaaagtcttccatttgttgaagcgataagacaatttgcaaacgatgtcggtaagaaaaatgctttatttattcatttaactctagttccttacctaaaagcatcagatgagataaaaacaaaaccaactcaacactctgtaaaagagttgagaagcataggtattcagccagatattatcatttgtagatctgaaagacccatcccattagagcatagaaagaagatttctttgttttgtaatgtggatattaaaaat

SEQ ID NO: 315339 - DNA, 1006 bp, Unknown
  Bacterial polypeptide expressing nucleotide sequence isolated from the Sargasso Sea
catggcgcgatacatattcgtaactggcggcgtggtttcatcactaggaaaagggctttcttccgcttctttagcatcattacttcaattaagaggttttaaagtaagggttaggaaattagatccgtatttaaacgtggatcccggaacaatgaatccgtttcaacatggagaagtttttgtaactgatgacggagccgaaacagacttagatataggtcattatgaaaggtttacaggaatctctgcaactcagtctgacaatattacaacaggaggtatttatagtgacattattaaaaaagagagaaagggagattatcttggcggtacagttcaagtagttccacatgttacagatcgtataaaaaaatttatatctcataatgtaaaaaatgaagattttataatttgtgaaatcggtggaacagttggcgacatagaaagtttaccttttcttgaagcaataagacaattttcaaacgatcaaggtaaaaagaacagtttgtttgttcacttaactttagttccctttcttaaggcttcaggagagcttaaaactaaacctacacagcattcagttaaagaacttagaagcttgggtatacaaccagacataattatctgtagatcagaaaaaaaaattccaatagcagaaagaaagaaaatctctctattctgcaatgtttctgcagacaatgttatagaaaccgtagatgttagaacaatatatgaagcgcctatcagttttcatagagaaaaatttgatgaaagagttctctctttttttaatgttaagagcaaaaaattaccaaacctttcaaaatggaaaaacattacttctaaagttttaagttcaaggaaaaatgtaaatataggtataataggaaaatatgttaatcttaaagatgcctataagtcactggacgaagctttgacacatggaggcatatcaaatgatcttaaagtaaatcttaaaagaatagactcagaaaatttaagaaca

SEQ ID NO: 315340 - DNA, 904 bp, Unknown
  Bacterial polypeptide expressing nucleotide sequence isolated from the Sargasso Sea
aaaactatttatgaagctccaataagtttctttaatcaaaaattggataagcaagttttaaaattctttaaaataaaatctagaaaaaaaccaaacttgctaccttggaaaaaaattacaaatatagttttaaaaacaaaaagaacagtaaatattgctatcataggtaaatatgtaaacttaaaagatgcatataaatcacttgatgaggctcttactcatggtggaatttcaaataaagttaaagttaaattagtaagaattgagtcagataaacttagatcaaaagaaattaaatcaaaattaaagaatgtatcgggaatattgataccaggagggtttggtaaaagaggaacagagggaaaaattgaagcaattagatatgccagagagagaaaaataccttttctaggtatttgttttggaatgcaaatggcaatgattgagtttgcaagaaatattttaaaaattaaaaaagctggctctagtgaattagataaaaattgttttcccgtaataggattaattgatgaatggaacaaagatggaaaaattataaaaggaaccgacaaaaaccttggaggaacaatgaggttaggtctatatgaggcaaaactaagaaataattctgccataaaaaatatctataaatctaatatgattaaggagagacacagacatagatatgaagtcaatataaatttaatgcaaaaatttgaaaaaaaaggtttgatgttttcaggaatttctcctgacaatcaattacctgaaattattgaacttaaaaatcatccatggtttattggagtccagtttcatccagaatttaaatctagacctttaaatcctcatcctttattctcatcatttattaaagctgcaaaatcttttaatggaaaataaa

SEQ ID NO: 315341 - DNA, 472 bp, Unknown
  Bacterial polypeptide expressing nucleotide sequence isolated from the Sargasso Sea
aatgcaaatggcaatgatagaatttgcaagaaatgtacttaaaattactaatgccggatcatctgaattaaataaaaattgttatccagttgtaggtctaattaatgaatggaataaaaatggtaaaataattaagggtactgacaaaaatttaggtggaacaatgagacttggtctttataaggcaaatcttaaaaaaaatacaaaaataagaaatatttataaaaatcaatctatccaagaaagacacaggcacagatatgaagtaaatattaatcttaaacataaatttgaaaaaaagggtttaattttctcaggtatttcacctgataataaactaccagaaataattgaattaaaagatcatccttggtttataggagttcaatttcatcctgaatttaaatctagacctttgtcaccacatcctttattctcatcttttatcaaagctgcaaaaatctataaatga

SEQ ID NO: 315342 - DNA, 1247 bp, Unknown
  Bacterial polypeptide expressing nucleotide sequence isolated from the Sargasso Sea
aatgcagacaaagttcatttttgttacaggcggagttatgtccggcttaggaaaaggggtagtttcatcatcaatttgtaaattattacagttatcggatcagaaagtttcgtgtatcaaaattgatccatatcttaactatgatgcaggaacaatgaatccaattgcccatggtgaagtctttgtcacagatgatggaggtgaatgtgatatggatataggaaattatgagcgatttttgaatcaagatataccaaaatcacataatattacaacagcccaaatttattcaagtgttatagaatccgaaagaaaaggagagtatttgggagcatgtgttcaaatcataccacatgttacagatgcaataaaaaatagaattaaaaaaattgccgcagatgaagagttagagatactggtagttgaatgtggaggaacggtaggagatattgaaagtttgccatttttagaagcattaaggcagattagagttgaagaaggttcagaaaatgtaatttttgttcatgttacattagcaccatcattagatgttgtaggcgaacaaaaaacaaaacctactcagcatagcgttcaagaactaagaagaatcggtatacagccagatttgctatgtgtaagatgttctatgccattacaagataaaacaagaaataaaatttcaatgtttacaaatgtgacaaataatgatgtattttcatgtcatgatgttgattcgattttccaagtacctgaaattctatatgatcaagggttggtagatgttattttcaagaaattcaataaaatgggatatgtcaatgcatcacaaaactgggatacctggaataagatagtcaactcattacataacgaaggagacccaatcaatattgcaatggttggaaaatatgtaacacttgcagatagttatgtcagtgtaaatcacgcattaaaacatgcagctgcatcaattggaaaaaaaattacaattgattggattgattcagaaaacattaacggaaatgttgatacattatcaaaatataatgggatattggtgccaggaggttttggtacacgaggctctgaaggaataataaaaactgcaaactttgcaagagaacaaaatatcccatatcttggaatttgttttggatttcaattagccgcagtatcatttgcaagaaatgtatgtagtcatacagatgcaaattcaacagaaattgaacaaaataccaacaatccaa

SEQ ID NO: 315343 - DNA, 1147 bp, Unknown
  Bacterial polypeptide expressing nucleotide sequence isolated from the Sargasso Sea
tctagatcttccatcaaaatcaacatcatttgttcatttgactcttgttccatacattaatgtttcaggcgagctgaaaacaaaacctactcaacattcagtcaaagagcttaggtcgttaggcattggtccaaattgtcttatttgtagatctgaaacagaacttcctaaagatgaaaaaaagaaaatagcactattttgttcagttgacatgtctaatgttatatctatgcatgatgtagataccgtttactcaatacctttattacttcataaacagaaggtagatgaaatagttttaaaagatttgggcctcaagaccaaaaaaccaaatctaaatgattggaaaaaagtagttaaagctaaattaaatcctaaaaaatctgttgaagttgcaatggttggaaaatataccgaattaaaagactcttataaatctctcaatgaagcactcgatcatgcaggcatcaaaaataatgcaaaagtaaatataacttttatagaagcagaaaaattaaccaaaagaaatgtaaaaacaaagcttaaatttgcagatgctgtattagtacctggaggatttggtagtaggggtattgagggaatgatcatagcctgtgaatatgcaagaataaagaaaatgccttattttgggatatgtcttggaatgcaaattgctctcattgagtttgcaagaaatatgttaggccttaaaggagctaatagcactgaatttgatttgaaaacaaattatcctgttgttgcgcttattactgaatggaaagataaaaccggtaaaactgaaaggagaacagctgactcagatttaggaggaacaatgaggctgggtggacagacctgtatcttaaaaaagaactctaatgtttttaaaatgtataaaaagaataagattattgaaagacatagacatagatatgaagttaacccagaatttcgagatggatttaatactaaaggaatgaatatagttggaacttctgtggatgatatgttggttgaaatgatcgagataaaaaatcatccctggtttcttggatgccagtttcatcccgaatttacttcaaatccaagagatggacatcctatctttaatagcttcatttcaagtacaataaagacaaaaaaatga

SEQ ID NO: 315344 - DNA, 903 bp, Unknown
  Bacterial polypeptide expressing nucleotide sequence isolated from the Sargasso Sea
ccgtttacacaatacctttattgcttcataaacagaaggtagatgaaatagttttaaaagatttgggccttaagactaaaaaaccaaacttaaatgattggaaaaaagtacttaaagctaaattaaatcctaaaaaatctgttcaagttgcaatggttggaaaatatacggaattaaaagactcttataaatctctcaatgaagcactcgatcatgcaggcatcaaaaataatgcaaaagtaaatataacttttgtagaggcagaaaaattaaccaaaagaaatgtaaaatctaagcttaaatttgcagacgctgtattagtgcctggaggatttggtagtaggggtattgagggaatgatcatagcctgtgaatatgcaagaataaagaatataccttattttgggatatgtcttggaatgcaaattgctctcattgagttcgcaagaaatatgttaggcctcaaaggagctaatagcactgaatttaattcaaaaacaaattatcctgttgttgcacttattactgaatggaaagataaaaccggtaaaactgaaaggagaacagctgactcagatttaggaggaacaatgaggctgggtggacagacctgcattttaaaaaagggctctaatgtttttaaaatgtataaaaagaaaaagattgttgaaagacatagacacagatatgaggttaacccagaatttagagatggatttaacactaaaggaatgaatgtagttggtacttctgtggatgatatgttggttgaaatgatcgagataaaaaatcatccctggtttcttggttgccagtttcatcccgaatttacttcaaatccaagagatggacatcctatctttaatagcttcatttcaagtacaataaaaactaaaaaatgaa

SEQ ID NO: 315345 - DNA, 1639 bp, Unknown
  Bacterial polypeptide expressing nucleotide sequence isolated from the Sargasso Sea
ctgaaagatacgaggtttattttcgttacgggtggtgttgtttcatctctagggaaaggaatcgcttcagcatctataggatcaattctagaatcaaaaggttataaggtctcagtaataaaacttgatccatattttaatgttgatccaggtaccatgagcccatttcagcatggcgaagtatttgttcttgaagatggaacagagacagatttagatttaggtcattatgagagattcattgataacgtatgcactaagaaaaataattttacagctggaaaagtttattactctgtattaagaaaagaaagaaaaggagaatatctaggaaaaacagtacaaataattcctcatattaccgatgagattaaacgtaagatattaaatgcttcaaaaaattgtgacattgctatcgttgagataggtggaacagtaggggacatagaaggtcaaccattcattgaagcaattagacaattaggtcttgaattaaagagttatcaaacttcatatttacatttaacacttgttccgtacctatcaaatgcgggagaattaaaaactaaaccaacacaacactcagtaaaagagtatagaaccttgggagtccagcccgatattcttatttgccgatccgactatgctcttccacaagagagtaaagagaaaattgctttattctgttctatgccaaaagatggagtaatatctttacctaatttagatactatttatgaagcgccattattcttagctgaagaaggaattgacaaaatactcacgaagagattgcagcttgataagacagttcctaatcttaaagattggaagaaagttgttaaaagaaagttgaagccttcaaaagatctgaatgtttcttttgttggaaaatatgttgatttaaaagatgcatatttttctctgattgaggcattagatcatgcaggaatccacaatgacactagagttaatataaattatgttaattcagaaaaaattgaactctccaattataaaagagtcttaaagaattcagatgccattcttgtaccaggaggatttggtaacagaggaattgaaggcatgattttagctgcaagatttgcaagagaaaacaaggttccatatttcggcatctgtttaggtcttcaaatagcaattattgaaatgactaggaatctacttaatttaaaagatgcaaatagtacggagtttaaaccacgaacaagtaataaagttatatctcttgttacagaatggaaaaacaaagatgggacaatcgagaaaagaaacaaagattctgataaaggtggaaccatgagattaggtgctcagaatgcaagtttgttaaaagaatctttagctagatctttatataaaaagaaaactatatttgaaagacatagacataggtatgaagttaatccagattatgttccaatgttagaaaataaaggtttagttgtctcagcaagatcagaagttcacaatcttgttgaaatgattgaattaaaagatcatccatggtttttagggtgtcaatttcatcctgaatttacatctaaacctaaaactggacaccctttatttaacgatttcattaagacagctgtaaaattaaagaataagaaatgaa

SEQ ID NO: 315346 - DNA, 1618 bp, Unknown
  Bacterial polypeptide expressing nucleotide sequence isolated from the Sargasso Sea
atggcttctaaacctaaatttctcttcgtcactggcggtgttgtttcttccctaggtaagggaattttatccgcatccttaggatctctactagagagcaaaaaattaaaggtaactatcatgaagcttgatccttatataaatttggatccaggtacaatgagtccttttcagcatggtgaagtttttgttaccgaagatggagcagaaacagatcttgatcttggccactatgaaagatttttagatgagaaaatgtcacagaataataatttcacagctggccaagtgtatgacagtgtcttaaaaaaagagagaaaaggtgaatttttaggagcaacagttcaagtgattcctcacataactgatgagataaaaaagagaattatgaaaggtgccaagggatatgatttagcaattgtagaaattggaggaactgtaggagacatagaatcgcaacctttcttggaggctataagacaattgaaaatagaactaggagatcaaagaactctttttctccatcttaccttagtaccatttctatctacatccggagagactaaaaccaaaccaactcaacactctgtcaaaaatcttctttcctatggtcttcagcctgacatcctgatttgtagatcagagaaagaacttcaaagctccgacaaaagaaagattgccttgttcacaaatgttggtttggactctgttttctcacttccagaccttccttcaatttatgctattccagtctttttatctaaagaaaagcttgatgaagttgttacgagaaaaatgggtattaaatctaaaaaagcagacttaagtgattggaggaaagttaatagactagaaaaagcatcaaacaaaaaaattacagtttcaatggttggtaaatatactgagctagcagatgcatatatgtcattaaatgaagcattaaggcacggaggtcttcaaaataaggttgatgtaaacattaattatattgattcagaaaatttgaaatctaacagtcaattaaagggttcagatgcaatattgattcctggaggatttgggcatagaggaattaatggaatgataatggctacaaaatatgcaagagagaaaaagatacctttttttggaatttgtcttggaatgcaagttgcagttatagagtttgcaagaaacgtgctaaatctaaaagctaacagtacagaatttgataaaaaaacaaaccatcctgttattgctcttatgcatgagtggaaagatcctgaaggatcaattcaaaagagaaacgcaagttctgatatgggaggcacgatgcgactaggtgcacaaaagtgcatactgagtaacaacagtaagttaaaaaaaatgtataaaaaaagtgaaatttttgaaagacatcggcatagatttgaattcaatggtaattatgaaaatgcaatgattgaaaagggcatgaagatagttggaagatctagagataagaaacttgttgaggctattgaactcgatgatcatccatggtttttaggctgtcaatttcatccagagttaacttcaaatcccaaagaagggcatcctatttttaatgattttataaaagctgcatctaaaaaataaa

SEQ ID NO: 315347 - DNA, 255 bp, Unknown
  Bacterial polypeptide expressing nucleotide sequence isolated from the Sargasso Sea
catggcgcgatatatattcgttactggcggcgtggtttcatcactaggcaaaggtttatcatctgcatctttagcttatcttttaaaatctcaaggctataaagtaagaattagaaaaatggatccatatttaaatgttgatcctggaacaatgagtccatttcaacatggtgaagtctttgtgaccaacgacggagcggagacagatttggatcttggtcattatgaaagatttacaaatatatctgctaaaaa

SEQ ID NO: 315348 - DNA, 151 bp, Unknown
  Bacterial polypeptide expressing nucleotide sequence isolated from the Sargasso Sea
catggcgcgatatatatttgtcactggcggcgtggtttcatcccttggtaaaggtctctcttctgcatcacttgcttatttattacaatcaagaggctacaaagttcgtttaagaaaattagatccttatttaaatgtggatccaggaaca

SEQ ID NO: 315349 - DNA, 1012 bp, Unknown
  Bacterial polypeptide expressing nucleotide sequence isolated from the Sargasso Sea
tattttagtatgtcgctcagaacacgaactaccagacgagcaaagaaaaaagatagcgctattcactaatgtcaatgaggaagctgtaatttcagcttacgatgttgatgatctctacaagattcctgagatgatgcatcaacagtctttagacagtatcgtgatcaaaaaactaaaactcaagacacctgacgctaatctaaatgaatggaagtccattgttagagcaaaaacttccgctaagaaagaaattaatatcgcgatggttgggaaatatatggatctgagagatgcatatatttctcttactgaggcacttttgcatggaggtattaagaatctagttaaggtaaatattagttatattgaatctcaagatattgaaaaagaaggcacgaagttacttgaaagtgtggatggaatagtagttccaggaggctttggagacagaggcattgaaggtaagattgaaactgtaaggtatgctagagaaaaagatgtaccttatcttgggatctgtcttggtatgcaggttgcaattatcgaaacagcaaggaatcttgccaatttaaagggtgcccacagtactgagtttaataaagacaccaaatatcctgtaatcgcacttattacagaatggcaaaaagcatcaggagaaattgaagagagggatgaggattctgaaatgggtggcacaatgcgattaggagctcaagagatatatttacaaaaaaatacatttgctcgctctctatacaaaaaagaagtcataaaagaacgtcatcgtcatcgctatgagttcaataacaactttaaggattctttagaaaatgcaggcatccaattttcaggtttatcagtcgataatttagtagagatgattgaaattccagaccatccatggtttgtggccagtcaatttcatccagaatttacatctaatccaagagatgggcatccgcttttcagtggttttattgaggcagttttaaaatataaggaaaaaggctaa

SEQ ID NO: 315350 - DNA, 1280 bp, Unknown
  Bacterial polypeptide expressing nucleotide sequence isolated from the Sargasso Sea
catggcgcgatatatttttgtcactggcggcgtggtttcatcacttgggaaaggtctttcttcagcatccttagcgtatcttttaaaatcacaaggttacaaagttagaattagaaaaatggatccgtatttaaatgttgatccaggaacaatgagcccgttccaacatggagaagtttttgtaactgatgatggagcagaaacagatttagatcttggtcactacgaaagatttacaaatataacagcaaaaaaatcagataacataactacaggaagaatttacagcgacataattaagaaagaacgtaaaggtaaatatttaggaaaaactgttcaggttatacctcatgtcacggatagaattaaagaatttataaaaggagatataaaaaatgaggactttgtaatttgtgaaataggtggaacagtaggcgacattgaaagtttaccttttgtagaagctataaggcaattttcaaatgaagttggtaggcaaaaaagtttgtttatacatctaacgcttgtaccttttttaaaatcatcagatgaaattaaaaccaaacccacacagcactcagttaaagaattaagaagccttggaattcaaccagatatagttatttgtagatctcaaaaacctataccattagaccaaagaaaaaaaatctcactattttgcaatgtttcaattgataatgttattgagacagttgacgttagaactatatatgaagctccaataagtttttacaatgaaaaaattgataaacaggtattaaaattttttaaattaaaaccgagaaaaaaagttaatttaataccatggaaaaaaataactaagtccgttttaaacaataaaaaaattgttaatattgcaataatagggaaatatgtaaatttaaaggatgcatataaatctttggatgaagcattaattcatggcggtatatccaataatgtaaaaattaacttgataagaattgaatctgataatttgaaatcaaatcaagttaaaaaacttttaaaaaatatatcaggtattttaatacccggtggatttggcaaaagaggtactgaaggtaaaatatcggcaataaactttgctaggaaaaagaaaattcctttttttggtatatgttttggtatgcaaatggccgtaatagaatttgcaagaaatgttcttaaaataaaaaaagctggttctagtgaacttgataagaaatgttatcctgtaattggtttattaaatgaatggaacaaagatggaaaattaataa

SEQ ID NO: 315351 - DNA, 358 bp, Unknown
  Bacterial polypeptide expressing nucleotide sequence isolated from the Sargasso Sea
catggcgcgatatatctttgtcactggcggcgtggtatcatcacttggaaaaggattatcctcagcatcacttgcatatttattaaagtcacaaggttataaagtcaggatacgtaaaatggatccatatttaaatgttgatccaggaacaatgagtccttttcaacacggagaggtatttgtaactgatgatggcgcagaaactgatttagatttaggacattacgaaagatttacaaatatttcatcaaaacaatcggataatattactacaggtaaaatttatagcgatgtaatcaaaaaagagagacaagggggctatctaggtaagacagttcaggttatacctcacataaca

SEQ ID NO: 315352 - DNA, 1533 bp, Unknown
  Bacterial polypeptide expressing nucleotide sequence isolated from the Sargasso Sea
gatggcaaaaactaagtatatttttatcactggtggagttgtttcctccctaggtaaaggtattgctgcagcttcaattggagctcttcttgaggctcgtgggctaaaggtttccttattaaaattagatccttatatcaatgttgatcctgggactatgagtccatttcagcatggagaagtctttgttactaatgatggaacagaaacggaccttgacttgggtcattatgagcgttttgttagatttgaggcttctaagaagaataactttacagcaggcatagtttatgaatctgttattaagaacgaaagaaaaggtaaatatcttggtggtactgttcaagttatcccacatataaccgatgaaattaaaagaagaattaaggcaggatcagcaggaagtgatgttgctattgtagaaattggaggaactattggtgatatagaaagtcagccatttgttgaagctattagacaaatgtctttagatcttccttcaaaatcaacatcatttgttcatttgactcttgttccgtacattaatgtttctggcgagctaaaaactaaacctactcaacattctgttaaagagctgagatcgctgggcattggccccaactgtcttatttgtagatctgaaacagaacttcctaaagatgaaaaaaagaaaatagcactattttgctcagttgacatgtctaatgttatatctatgcatgatgtagataccgtttactcaatacctttgttacttcataaacagaaggtagatgaaatagttctaaaagatttgggcctcaagaccaaaaaaccaaacctaaatgattggaaaaaagtagttaaagctaaattaaatcctaaaaaatctgttgaagttgcaatggttggaaaatatacagaattaaaagattcttataaatctctcaatgaagcgctcgatcatgcaggcattaaaaataatgcaaaagtaaatataactttcgtagaggcagaaaaattaaccaaaagaaatgtaaaaactaagcttaaatttgcagatgctgtattagtgcctggcggatttggtagtaggggtattgagggaatgatcatagcttgtgaatattcaagactaaaaaatataccttattttgggatatgtcttggaatgcaaattgctctcattgagtttgcaagaaatatgttaggcctcaaaggagctaatagcactgaatttgattcaaaaacaaattatcctgttgttgcacttattgctgaatggaaagataaaaccggtaaaactgaaaggagaacagctgactcggatttaggaggaacaatgaggctgggtggacagacctgcattttaaaaaagggctctaatgtttttaaaatgtataaaaagaaagagattgttgaaaggcatagacacagatatgaggttaacccagaatttagagatggatttaatactaaaggaatgaatatagttggtacttctgtagatgatatgttggttgaaatgatcgagataaaaaatcatccctggtt

SEQ ID NO: 315353 - DNA, 1074 bp, Unknown
  Bacterial polypeptide expressing nucleotide sequence isolated from the Sargasso Sea
catgacacagtatatttttataactggtggcgtggcatcttcattaggaaaaggactcacatcagctgcgttaggcgctcttttgcaatcaagaggttttaatgtaaaaattaaaaaacttgatccatatcttaatgttgatccaggtacaatgaatccattccagcacggtgaagtttttgttactgatgatggtgcagaaactgatcttgatttaggacattatgagagatttactaatgttccctcatcaattaacgataacattacaacgggccaaatttacaagagaattattaacaaggaaagaaaaggcgattatctaggaagaacagttcaaattattcctcatgttactgatgaaataaaaaaatttatactttctaataatgataatatagatttttgtttatgtgaaattggtggaacagttggtgatattgaggggctacctttttttgaagcgataagacagttaagtaatgagttaaaaaaaaatatgacctgtttccttcatttaactcttgtcccatatattagtgccgctggcgaagttaaaacgaaacccactcaacattctgttaaagaattaagatcaattggtattcaacctgatatactcgtttgtaggtgtgatagagaaatttcaaaatctgatataagaaaaatttcagttttctgtaatgtgaatgaagattcagtaattcaagcaattgatgtagatactatttatgcagttcctaaggatttaaagactaatggtttggatgttgctgttttaaatgcgttaggaaaaaattcttttccaaaatcaaatttgagaaaatggaataaagtagttgaaagaatccgtaaaccaattggagaagtaacaattggtgttgttggaaaatatttagatttgaatgatgcgtataaatccttatttgaggcccttacacatggaggtatatcaaataatgttaaagtaaatattaaaaatattgatacagataaattagaaaagaataaaaataaaactgtttttaatggcttaagcggcatacttgttcctggtggatttggtaaaagggg

SEQ ID NO: 315354 - DNA, 472 bp, Unknown
  Bacterial polypeptide expressing nucleotide sequence isolated from the Sargasso Sea
tatgggtaaaggtaatccaacaaaattcatttttgtactaggtggagtgatgtctggcctaggtaagggtattgctgcgtcttcaataggctacctgctgaaaaattctggtctaaaagttacaattttgaaattagatccatatttgaatgtagacccagggactatgaatccttatcagcatggtgaggtttttgttttggatgatggatctgagacggaccttgatctcggccactatgagcgatttattgatgtgagtatgaccaaaaataataacgcaaccgcagggcagatttatagtaccgttttggataaagagaggaaaggtgaatatttgggagagaccgtacaagtgattcctcatgttaccgatgaaatcataaatagaattaaaaatatcaataaaccaaaaagaaatgatgttgtcatctgcgaagttggtggcacggttggcgatatagagagcttg

SEQ ID NO: 315355 - DNA, 619 bp, Unknown
  Bacterial polypeptide expressing nucleotide sequence isolated from the Sargasso Sea
catggcgcgatatatatttgtgactggcggcgtggtctcatctcttggtaaaggtttatcatctgcatcattaggatatttattaagatcacaaggatttaaggtaaggataagaaaaatggatccttatttaaatgttgatccaggtacaatgagtccttttcaacatggagaagtttttgtaaccgatgatggtgctgaaacagatttagacttaggacactatgaaagatttacaaatatatcagcaaaacaatctgacaatattaccacaggaagagtttatagtgatattttaaaaaaagagcgaagaggaggatatcttggaaaaaccgttcaagttattcctcatgttaccgatagaattaaggagtttattaaaaaagatatcaccaatgaagactttgtaatatgtgaaattggtggaactgtgggtgatattgaaagtttaccttttttagaagccataagacaattttctaatgataatggcagatcaaaatcgttatttatacatttaacatttgttccttttctaaaatcatctgatgaaattaaaacaaaaccaactcaacattctgttaaagagctaagaagcataggaattcagccagacata

SEQ ID NO: 315356 - DNA, 1648 bp, Unknown
  Bacterial polypeptide expressing nucleotide sequence isolated from the Sargasso Sea
gatgggaaaagttcaaacttgttttatttttgttaccggaggagttgtatcctctctaggtaagggcatagcatctgcatcaattggcgctttacttgaaagcagaggcttaaccgtaacaattttaaagttggatccctatatcaatttagaccctggaacaatgagcccgtttcagcatggtgaagtttttgttactgaagacgggtctgaaacggatttagacttaggccattacgaaagatttcttaaaactaagatgactaaggacaacaattttaccactgggcaggtctatgaagaagttttacgaaaagaaagaaaaggagattatcttggaggaactgttcaggttattcctcacattaccgacgagataaaaaataaaataaaaaaaggtgcgggtaattctgaggtagccattgttgaaattggcggaacagttggagatatagaatcacaacctttcctggaagctattagacagatgaaattggaactaggctcgagtcagacacttttcattcacttaactttagttcccttcctaaaatctgctggcgaaacgaagactaaaccgactcagaggtcagtaaaagagatgttatctcatggacttcagccagatatattaatttgtaggtcggatggtgttttggctgatgaagaaagaagtaagattgctttatttacaaacgtagaagaaagttctgttatctcaatgccagatgttaattcaatatataaaataccagtagaattaaataggcagaaagttgatgaaatagtagtaaataaactcaacttagaatgcaagaaggcttctttaaccgattggagaagggttattgatgaagacttaaatccaaaaaattctgtaactatatctatagttggaaaatatacagaattagctgatgcttataagtcattaaatgaagccttgagacatggaggtcttaagaatgatctaaaaattaatatccaatatatcgattctgaattgattaatacaagaaatgcaaaatctttattgaaagggtctcacgcaattcttgttcctggaggatttggcgaaagaggtatagaggggatgatatctgctgttaaattcgcgaggctaaataaggttccgtacttaggaatatgtttaggtttacaaatagcagttattgaatatgcgagaaatgttgttggtttaaggggagcaaacagtacagaatttaatcaagaaactaaatatccagttattggtctaataagtgaatggatggattcagggggtaaaattgaaaaaagagatgaaaattcagacttgggaggcacgatgaggttaggtgctcaagaatgtttcttggataaggactctttatcaagatctctttacaagaaagcaagaatcttggaaagacatagacacagatatgaagtaaacaataattaccttgatatgttaatctcctctgggatgaaggtagcaggtaggtctaaagataaatctctagtagaggttattgagctaaagaatcatccttggtttgtaggttgtcaattccatccagaatttacatctaatcctagagaaggccatcctcttttttcgggctttataaaagcagctaaaaaatataaaagattaaagagataa

SEQ ID NO: 315357 - DNA, 510 bp, Unknown
  Bacterial polypeptide expressing nucleotide sequence isolated from the Sargasso Sea
catgacacagtatatttttataactggtggcgtggcatcttctttaggaaaaggactcacatcagctgcattaggtgctcttttgcaatcaagaggttttaatgtaaaaattaaaaaacttgatccatatcttaatgttgatccaggtacaatgaatccattccagcacggtgaagtttttgttactgatgatggtgcagaaactgatcttgatttagggcattatgagagatttactaatgttccctcatcaattaacgataacattacaactggtcaaatttacaagagaattattagcaaggaaagaaaaggcgattacctaggaagaacagttcaaattattcctcatgttactgatgaaatcaaagaatttatactttccaataatgataatatagatttttgtttatgtgaaattggtggaacagttggtgatattgaggggttacctttttttgaagcgataagacagttaagtaatgagttaaaaaaaaatatgacatgttc

SEQ ID NO: 315358 - DNA, 1050 bp, Unknown
  Bacterial polypeptide expressing nucleotide sequence isolated from the Sargasso Sea
aacatggtgaagtatttgtaactgatgatggtgcagaaacagatttagatttaggacactatgaaagatttacagatatttcttcaaaaaagtcagacaatataacaacaggaagaatttattctgacataataaaaaaagaacgtaaaggtggatatcttggaaaaactgtgcaagttatccctcatgtaactgataggattaaagaatttatcaagaaggatattacaaatgaggattttgtaatatgtgaaattggtggaactgttggtgatatagaaagcttaccttttttagaagctattagacaattttcaaatgagaatggaaaacttaaatctttatttattcacttaactctagttccatttatgaaatcctcagacgaaataaagaccaaacccacacaacattctgtaaaagagttaagaagcataggtattcaacctgatattgttatatgcagatcagaacaatctatcccaattgatcaaaagagaaaaatatcactgttttgcaatatgcaaatagaaaacgtaatagagactgtagatgtcaaaactatttatgaagctcctataagtttttttaatcagaaattagataaacaagttcttaaatactttaatttaaaatctaaaagaaaaccaaaccttaaaccttggaaaaaaattacaaatacagttttaaatacaagaaaaactgttaatattgcaataattggcaagtatgtgaatttaaaagatgcatacaaatctttagatgaagctttaacacatggtggaattcagaataaagttaaaattaatttaataagaattgagtcagataaattaaaatcaaataatataagaaaaaaattaaaaaatgtatctggtatattgatacctggaggttttggaaagcgaggtacagaaggtaagatagcctgtattaagtatgcacgtgaaaaaaaaataccttttttaggtatttgctttgggatgcaaatggcagttatagaatttgctagaaatgtacttaaaatcaaaaaaagcaggatcaactgaa

SEQ ID NO: 315359 - DNA, 565 bp, Unknown
  Bacterial polypeptide expressing nucleotide sequence isolated from the Sargasso Sea
catggcgcgatttatttttgtcacgggcggcgtggtttcatcattaggaaaaggtctctcttctgcatctctagcttatttacttcaatcgagagggtataaagttagattaaggaaattagatccttatttaaatgtagatcctggaacaatgagcccatttcaacacggagaggtttttgtaactgatgatggtgccgaaacagatttagatcttgggcattatgagagatttaccggagtatctgcaaagaagtctgataatattacaacaggtaaaatttataacgatgtattaaaaaaagaacgtgaaggaaaatatctcggaagtacagttcaagttattccacatataacggatagaataaaagagtttataaagaatgactcattaaaagaggattttgttatttgtgaaattggtggaattgttggtgatattgaaagtctaccatttattgaggctataagacaatttgcaaatgatataggaaaaaaaaatgcattatttatccatcttaccttggtgccttatttaaagtcctcagatgaaattaaaactaaa

SEQ ID NO: 315360 - DNA, 1334 bp, Unknown
  Bacterial polypeptide expressing nucleotide sequence isolated from the Sargasso Sea
ggatattggtcattatgaaagatttacagatatctcagcaacaaagtctgacaatattacaactggcggaatttacagcgacataattaaaaaagaaagaaaaggtgattttttaggaggcactgttcaagtagttccacatgtaactgatcgaataaaaaaattcatatcgcatgacgtaaaaaatgaagattttataatttgcgaaattggaggaactgttggtgatatagaaagcttaccttttttagaagcaattagacaatttgctaatgatataggtaaaaaaaatagtttgtttattcatttaactctagttccttttttaaaagcttctggtgagctaaaaactaaacctacgcaacattcagttaaagaactaagaagcttaggtattcaaccagatataattatttgtcgatcagaaaaacaaatacccaaaacagaaagaaaaaaaatatctttattttgcaatgtttctatagaaaacgttattgaaaccgttgatgttaaaacaatatatgaagcaccaattagttttcataaagaaaaattagatgatagagttctttcatactttaatatcaaaaacaaaaaatcacctgatcttagtaaatggaaaaatattacttccaaggttcttaacccaaaaaaagacgtaaatataggtatcataggtaagtatgttaatctaaaagacgcttataaatctttagacgaggctttaattcacggcggtatatcaaacaatgttaaagtcaatctaaagagaattgattcagaaaatttaaagccagaaaagataaaacctttattaaaagacgtatcaggtgttctaattccaggtggttttggaaagagaggtagcgaaggcaaaattgctgccataaaatatgcaagattgaataatatacctttctttggaatttgctttggtatgcaaatggcgataattgaagctgcaagaaatctattaaatattaaaaatgcctctactagtgaattcggtaataattgcacaccagtcgtaggtttgttagaggaatggcaaaaaggaaaaaaaagaattaaaggaagcgaaaaaaatttaggtggaacaatgagactaggtttatatgatgcggttttaaaaaataattctttaatatcaaaaatatattcggaaagaaaaattaaagaaagacatagacatagatatgaagtaaatattaaatacagaggagattttgaaaaaaaaggactaattttttctgctttatcaccagacggtatgcttccagaaataatagaattaaagaaccatccctggtttgttggagtccaatttcatcggg

SEQ ID NO: 315361 - DNA, 1132 bp, Unknown
  Bacterial polypeptide expressing nucleotide sequence isolated from the Sargasso Sea
atttgcaaacgatgtcggtaagaaaaatgctttatttattcatttaactctagttccttacttaaaagcatcggatgaaataaaaacaaaaccaactcaacactctgtaaaagagttaagaagcataggtattcagccagatattatcatttgtagatctgaaagacccatcccattagagcatagaaagaagatttctttgttttgtaatgtggatattaaaaatgtaattgaaactgttgatgtcaaaactatttatgaggcaccaataagtttttttagagaaaaattagatgttcaagttttaaattattttaaattaaaaacaaagaagcctgtaaatttaaatccttggaaaaaaataactaaaattattttacaaaataagagacaagtgaatattgctattattggaaaatatgttgagcttcaagatgcttataagtctttggatgaagccttaacacatggtggaatagataataaaattaaagttaatttagtcaggattgactctgagaaattaaaaatttcagaaataaagaaaaaactaaaaaatatctctggaatattaatacctggtggatttggtaaaagaggtactgatggaaaaatagaagccataaaacatgcaagaatgaacaaaattcctttccttggaatatgttatggaatgcaaatggcaattattgaatttgctcgaaatcaactaaacttaaaaaatgccacttcaagtgaatttgataaaaaaggtattcccattatcggattaataaacgaatggtctaaagatggtaaaactattaagggcacagataaagatcttggtggcactatgagactagggtcttatgatgctagattacaaaacaactcaaaaataagaaaaatttataagtcaaaattaattaaagaacgacatcgtcatagatacgaggttaatattacttatagagaaaaatttgaaaaaaaaggtatgattttttcaggtttatcacctgataatcaattacctgaaattattgagcttaaaaatcacccttggtttattggggttcagttccacccagaatttaaatctagacctttatcgccccatcctttattctcttcatttatcaaggcagcaaaa

SEQ ID NO: 315362 - DNA, 1204 bp, Unknown
  Bacterial polypeptide expressing nucleotide sequence isolated from the Sargasso Sea
atgcagacaaagtttatttttgttacaggcggagttatgtctggcttaggaaaaggcgtagtttcatcatcaatttgtaaattattacagttgtcagatcaaaaagtttcatgtatcaaaattgatccatatctcaactatgatgcaggaacaatgaatccgattgcacatggagaggtctttgtcacagatgatggaggagaatgtgatatggacattggaaattatgagagatttctaaatcaagacataccaaaatcacacaatattacaactgcccaaatttattcaagtgttatagaatctgaacgaaaaggggagtatttgggagcatgtgttcaaatcatcccacatgtaacagatgcaatcaaaaacagaattaaaaaaattgccacggatgaagaattagaaatactagttgtagaatgcggagggacagtaggagatattgagagtttaccatttttagaagcattaagacagattagagttgaagaaggttcagaaaatgtaatttttgtacatgttacattagcaccatcattagatgtagtaggcgaacaaaaaacaaagcctacgcaacacagtgtacaggaactaagaagaattggaattcagccagatatgttaatggttagatgttcaagtccattacaagataaaacaagaaataaaatttcaatgtttacaaatgtgacaaataatgatgtgttttcatgtcatgacgttgattcaatttttcaagtaccggaaattctatacgaccaaggattagtcgatgttatttttaagaaatttaacaaaatgggatatgtaaacgcgtcacaaaactgggacacatggaataagatagttaattctctacataacgaaggagagccaattaatattgcaatggtaggaaagtatgtgacacttgcagatagttatgttagtgtaaatcatgcattaaaacatgcagcagcttcaattggtaagaaaattacaattgattggattgattcagaaaacataaacggtaatgtagatacgctatcaaaatacaatggaatattggtaccaggaggttttggtacacgaggctctgaaggaataataaaaactgcaaactttgcaagagagagaaatattccatatcttggaatttgttttggatttcaattagctgcagtatcatttgcaaggaatgtatgcaaccatacag

SEQ ID NO: 315363 - DNA, 607 bp, Unknown
  Bacterial polypeptide expressing nucleotide sequence isolated from the Sargasso Sea
gatggcaaaaactaagtacattttcataacaggtggagttgtttcatctctaggtaaaggaatcgcagcagcttctatcggagctttattagaagcaagaggacttacagtatcactaattaaagtagacccatacataaatgtagacccaggtactatgagcccctttcagcatggtgaagtatttgttacggatgatggaactgaaacagatttagatttgggtcattatgaaagatttgtaagatttcaggcttcaaaaaaaaataattttactgcaggtaaggtatatgaggctgttattcgaaatgaaagaaaaggaaagtaccttggtggaactgtgcaggtaattcctcatattacaaatgaaattaaaaaaagaatcaaagagggtggtcaaaataaagatgtagcaattgttgaaattggaggaactgtaggagatattgaaagccaaccttttgttgaggcaataaggcaaatggccttagagcttcccaactcttcttgggcatttgtacatcttactttggtgccttttataaatgcttcaggcgaacttaaaacaaaacctacccaacactctttaaagaacttagatcattag

SEQ ID NO: 315364 - DNA, 1627 bp, Unknown
  Bacterial polypeptide expressing nucleotide sequence isolated from the Sargasso Sea
aatgagaaagaaaaaatctgtaaaatacatttttgttgttggtggagtaatttctggattaggcaagggcattgctgcttcttcaattggatatttattaaaaagtgccggtttaaaagtgactattttaaaattagatccttatttaaatgttgatccaggtacaatgaacccatatcaacatggggaggtgtttgttttagatgatggatctgaaactgatcttgacttagggcattatgagcgattcatagatgtgaatatgagcaaatataataatgctacaactggacaagtttatagtacagttctaaatagagaaagaaagggtgattatctaggagcaactattcaagtaattcctcacattactgatgaaattaaaaaaagaataaaactagtaaatgataaaaataaatatgatgttgttatttgtgaagtgggtggtacagttggtgatattgaaagtttaccatttatggaatctattaggcaaatgtctgtagaagtaggttaccataaccatttaattgttcatgtaacacttgttccttatatacaagcaagtgaagaactaaagactaaacctactcaacattcagtaatgaaattaagagaaataggtttgagtccagatataattatgtgtagatcaaactacactttaactgaatctgttgcagaaaaaattgctttattttgtaatgttccaaaaagccatgtaatagaagggaaagaagttaagagcatatatgaagtgccacttgtttttgataaacaaaagatggggcaaataattatgaatagattagaattagatggtcaaccacaagttaccaaattaaataattttatttccaaatataaaaatccttcaaaagaagtgaatattgcaatgtgtggtaagtatactgaattaccagatgcatataaaagtgttttagaggcatttatacatgcaggtgttgaaaatgataccagagttaaagttagctggatttctactgaaaagataaaagatgataaaagtgctaaaaatcagtttgataattgtgatggaattctacttttgccgggatttgggtctagaggatctgagggtaaaattttatcttgtaagtattccagagaaaataatattccttttttaggtctttgcttaggtttgcaatgtgctgtaatagagtttgctagaaatgtttgtaggttaaatggagctaatagcactgaatttgataagaaaacttctcatccagttattgatcttatggagtctcaaagagcgataagaagaaagggtgggacaatgcgactaggtgcatattcttgtgaattattacccaatacgaaagcatataaagagtataagaagaaaaatatttctgaacgtcaccgtcatagatgggaggtaaataatcgttatagaagtagattagaaaaaggtgggttagttatatctgggataaataaagaattgaatctcgttgaaattattgagaaccccgatcatccttggtttatagcaagtcaatttcatccagaattaaagagtcgacttaataaagcgcacccattatttagaggttttattggcgcatctcttaaatacaagctatcaaaagtttaa

SEQ ID NO: 315365 - DNA, 475 bp, Unknown
  Bacterial polypeptide expressing nucleotide sequence isolated from the Sargasso Sea
gctgaaagatacgaggtttattttcgttacgggtggtgttgtttcatctctagggaaaggaatcgcttcagcatctataggatcaattctagaatcaaaaggttataaggtctcagtaataaaacttgatccatattttaatgttgatccaggtaccatgagcccatttcagcatggcgaagtatttgttcttgaagatggaacagagacagatttagatttaggtcattatgagagattcattgataacgtatgcactaagaaaaataattttacagctggaaaagtttattactctgtattaagaaaagaaagaaaaggagaatatctaggaaaaacagtacaaataattcctcatattaccgatgagattaaacgtaagatattaaatgcttcaaaaaattgtgacattgctatcgttgagataggtggaacagtaggggatatagaaggtcaaccattcattgaagcaatt

SEQ ID NO: 315366 - DNA, 1281 bp, Unknown
  Bacterial polypeptide expressing nucleotide sequence isolated from the Sargasso Sea
ttcaagtaattcctcatgtaactaatgaaataaaaaatttcatgaatagtgatttaaacaatgaagatataattatttatgaaattggaggaacagttggagatatagaatctcttccttttttagaagcaattagacaaattagaaacgataagaatatttcgtctgcgttaattcatatgacttacattccttatctaagctcagcgggagaattgaaaaccaaaccgacacaacattctgtaaaagaacttttaaacgcaggtattcaaccggatataataatgtgccgttctgaaagagcaattgataaagactctatttctaaaatttctttattttgtaatgtaaaaaaagactctgttattccagcactaaacgcaaaatctatttatgaagttccatcattgtattcaaaatataaattagatgaaactttattaaaacatctaaactataatccaagaaaatatccattaaacttaaagccttggaataaattaattttaaaaataaactctttaaaaaaagttgtgaatattggagttgttggaaaatacacaaacttaaaggacagttacaaatcacttaatgaagctctaattcatggaggcattgaaaatttatctaaagttgaaattaaatggataaatgctgaaaaaataaataaaaaaaatatcaaagataaactttataattgtgatggtgtattagtacctggaggttttggggtaaggggcataggtggaaaaattgaagctataagatatgcaagagaaaataatttaccttacttcggcatttgcttaggaatgcaattggctgttatagaaattgcaagaaatgttttaagaattaaaaatgcaaactcttctgaattcaactcaaaatcaaaatctgttgtcggcctaatgactgaatgggttaaaaacaatactataatcaaaagaaatatgaatagtgataaaggaggaactatgaggcttggttcttatcaagcaaaactgaagaaaaattctaaagttttctctatttataagaaaaatattatttctgaaagacatcgtcatagatatgaggtcaatgaaaaatttatatctaaatttagtaagaaaggatacattttttcaggaatgtctcctgatggtatattgccagaagtattagaaagtaataatcatccatggtttattggagtgcaatttcatcctgaattaaaatctagacccttgactccacatccattatttgtttcatttataaaaagttgcttaaaatgat

SEQ ID NO: 315367 - DNA, 1612 bp, Unknown
  Bacterial polypeptide expressing nucleotide sequence isolated from the Sargasso Sea
aatgcaatatgtatttattacgggtggggtcgcttcttctttgggaaaaggtatcgcttctgcagcagtagcctctttacttcagcaaagaaattttaaagttagaataagaaagctcgatccttatctaaatgtagatccaggaacaatgagcccttaccaacatggagaggtatttgttactgatgatggtgcagaaactgatcttgacttgggacactatgagagatttacaaatagatcagctaaaaaaacagatagcacatcatcaggaaaaatatattcaaatgttttaaaaaaagagaggaagggtgattatttaggtgctacaatacaagttattcctcatgttactgatgaaataaaactttttattaattctaattttgaagatgaagatatcattatttatgaaataggtggtacagtaggtgatattgagtctcttccttttcttgaagcgattaggcagatcagaaatgataaaaatattaattcagctttaatccatatgacttatgttccttatttgagctcggcaggggagttaaaaacaaagccaactcaacattcagttaaagaacttctaaattcaggaattcaacctgatataataatgtgcagatgtgaaaaagaaattaatactgagtctcttgagaaaatatcacagttttgcaatgttaaaaaagactctgttatacctgccttaaacgcaaaatcaatttatgaagtgccctcaatttattctaaagctggtcttgataaagtcttgcttgagcatttaggttatgattcttctaaataccctcttaatttaaaggcttgggaaaatttaacaaaaaaaattaacaatttaaaagaagaagtaaccataggtgtggttggaaaatatacaaatctaaaagacagttataaatctctaatagaagcccttacccatggaggtattgaaaacaatactaatgttaagattcattggataaatgcagaaaaaactaaaactaatgaattaattaaggagcttgaaagtgttgatggaattttaataccaggtggatttgggtatagaggtgttgagggtaaaatatcagctattaaatttgcaagagaaaataatattcctttttttggaatttgtttaggaatgcaattaagcgtagtagaaatagctagaaatgtttttggtttagcagactctaattctacagaatttcaatcgagtaaaaatcctgtagtcagtcttatgacagaatggaataataaaaataaaattgaaaaaagagatcatactagcgaaaaaggtggcactatgaggcttggagcttataaagctattctaaaaaagaactctaaagtaagtgaaatttataatacaaatgaaattacggaaaggcatcgtcatagatacgaagttgatttatctttaacgaaagattttgaaaaaaaaggttttgttttttctggtatgtcccctgataatgtgttgcctgaaatattagaaagtatgaatcataaatggtttattggtgttcagtatcatccagaattaaaatctagacctttagcaccacatcctctattttcctcttttattaaacattgcataaaatga

SEQ ID NO: 315368 - DNA, 589 bp, Unknown
  Bacterial polypeptide expressing nucleotide sequence isolated from the Sargasso Sea
tctgattcctgggggatttggagatcgaggcatagagggaatgattcaatccattgaatatgcaagaaagaatgatatcccttttcttggtatctgtcttggaatgcaagcagctgtaattgaatatgctcgaaatgttttggatcataaggatgcaaatagcactgagtttaactctagtacttctgcacctgtcattgcaatgattacagagtggatgaatgatgacggctcaaaagagaatagagacgaaaactcagatcttggagggactatgagacttggtgcacaagagtgtttgtttacaaaaggaaccaaggcaaaagatatatatggcgcagattccgttgttgaaagacatcgacatcgctatgaatttaataatagatatcgcgaagagcttgaaaaaaatggtttggtattttctgggttctcaaaggatggcttggctgaaatgattgagattaaagatcatccctggtttattggctgtcaattccacccagaattcacatcttcaccccttgcaggccatccattattttattcttttatcaaagctgctgtagaatactctaaaaaggactaa

SEQ ID NO: 315369 - DNA, 1618 bp, Unknown
  Bacterial polypeptide expressing nucleotide sequence isolated from the Sargasso Sea
catggcgcgatatatatttgtcactggcggcgtggtttcttcccttggaaaaggtctttcatcagcatcactagcttatcttttacaatcacgtggttataaagttagacttagaaaattagatccttatttaaacgttgaccctggaacaatgagtccatttcaacatggagaagtttttgtaacggatgatggagctgaaacagatttagatttaggtcattacgaaagattttcaggagttaccgcaaagaaaacagataatattactacagggaaaatttatagtgatgttctgagaaaagaacgaaaaggagaatatcttggaaagacagttcaagttatccctcacattacagatagaattaaagaatttattaaattcgatacatcaaaagaagattttataatttgtgaaataggtggaattgtaggtgatattgaaagtttaccattcgttgaggctataagacaattttcaaatgatattggaaaaaaaaatgcattatttattcatttaactctagttccatatttaaaagcatcagatgaaataaaaactaaaccgacacaacactcagttaaagaattgagaagtattggtattcaacctgatataattatttgtagatcagaaagaccaatacctttagagcatagaaaaaaaatatctcttttctgtaatgttgatattaaaaatgtaattgaaacggttgatgtaaaaacaatttatgaagcaccaattagttttgctagagaaaagttggatgttcaagttttagattactttaaaataaaatctaaaaaatcaaataacttaaatccttggaagaaaattactaaaattactcttaatacaaaaaaacaagttaatattgcgataataggtaaatatgttgaattaaaagatgcatataaatcactagatgaggccttaactcatggagggatcacaaataaacttaaggtaaatttagttagaattgactcagaaaaattaaaagtttctgaaattcgaaataaactaaaaaatgtttcaggtatactaataccaggtggatttggaaaaagaggaaccgagggtaaaatagaagcgatcaaacatgctagagttaacaaaataccatttcttggtatttgttatggtatgcaaatggcaataatagaatttgctagacataaattaaaaattaaaaaagcaacttcttctgagtttgataaagttggagttcatataattggtttaatgaatgaatgggaaaaaagtggaaaaaaagttaaaggcacagacaaaaatctaggtggaacaatgagacttggttcttatgatgcaattctaaaagataaatctaaaattagagatatctataaatcaagactaatcaaagaaagacatagacacagatatgaagtggatgtttcgtataaagaaaaatttgagaaaaatggactagtattttctggtttatcaccagacaataaacttcctgagataattgaactcaaaaatcatccttggtttattggagttcagttccatcctgaatttaaatctagacctttgtctcctcatcctttattctcttcatttatcaaagcagcaaaaaatcataaatga

SEQ ID NO: 315370 - DNA, 1618 bp, Unknown
  Bacterial polypeptide expressing nucleotide sequence isolated from the Sargasso Sea
atgaaaaagacaaaggacacaaaatatatttttgttttgggtggtgtgatgtctggcctaggtaaaggaatagcggcatcttccataggatatcttttaaaacaagcagatgtaagtgttacgatcatgaagctagatccatatctaaatgtagaccctgggacaatgaacccttatcaacatggtgaggtatttgtcttggatgacggatcggagacggatcttgatcttgggcattatgaacggttcattgatgtgaatatgacaaaaaataataatgcaaccgctggtcagatatatagcaaagtattggaacaagaaagaaagggtgaatatttaggggaaacagtacaggtcatacctcatgttaccgatgagattaaaaatcggatcagagctcttaatatccccaaaaaatatgatgttgtcatatgtgaagttgggggaacagtgggggatatcgaaagtctaccatttatggaagcaataagacaattatctcttgaggttggttaccataaccatatgttcgtccatgtaacactgttgccatttgtcaaggcaagtggagaattgaaatcaaaaccaactcaacactcagtcatgaaacttagagagattggcctagctcctgatatgatattatgtagatctgaacatccaattgatcaatcagtcagagataagatcgcccttttttgcaatgttccttcagaccacgttattgaaggaagggatgtgtcgagcatatatgaagtaccgctcactatgtataagcaaaatgcagggcagttgatcaaagagcgtctaaaaatagaaaaaacaccacaattgggagcattaaaaagatttataaataattataataatcctaagcatgaggtcaccattgccatgtgtggtaagtatactgaactcattgattcttacaagagtgttttagaggcttttgtacatgctggtgttgaaaataatgcacgtgtaaatattaaatgggttcaaactgacaacataaaaaataaagtatcagcacgaaaggcattctctgatgttaatggtatattgatattgcctggctttggctctagaggaggagaaggaaagattcggtcatcacaatacgcacgtgaaaataaaataccttttttagggatttgcctaggacttcaatgcgcagtaattgattttgcaagaaatgtatgtggattaaaaaatgctaactctacagagttcaataagaatacaaaatatcctgtgattgacctaatggagtcccagcgtgcaattaaaattaaaggtggcactatgcgtctaggtgcatatgattgtgagatcaagccaggaactaaaacatatgctgcatatcgaaaaaagaatatatctgaacgacatcgtcatagatatgaagtaaataatcgttttaggaatagactagaaaaatatgggctcatattttctggtgtaaattcagacttgggggttatagaggcgattgaaattaaagatcatccctggtttgttgctggtcaatttcatccagaattaaaaagtagagtaaataaagcacatcctctttttagagaatttattagagcttccaaagagaatatattatgaa

SEQ ID NO: 315371 - DNA, 781 bp, Unknown
  Bacterial polypeptide expressing nucleotide sequence isolated from the Sargasso Sea
aaaaaatagcgattccaaggtaacaatagcaatggttgggaaatatgtagactttaaggattcatacatttcattgagtgaagcccttagacatgccggctttaaaaatagcatgggagttgagatcgtttatgtcgaatccgaagatattcaagagaatggcaccgattgtctttctgaaatggatgccattctgattcctgggggatttggagatcgaggcatagagggaatgattcaatccattgaatatgcaagaaagaatgatatcccttttcttggtatctgtcttggaatgcaagcagctgtaattgaatatgcacgaaatgttttggatcataaggatgcaaatagcactgagtttaactctagtacttctgcacctgtcattgcaatgattacagagtggatgaatgatgacggctcaaaagagaatagagatgaaaactcagatcttggagggactatgagacttggtgcgcaagagtgtttgtttataaaaggaactaaggcaaaagatatatatggcgcagattccgttgttgaaagacatcgacatcgctatgaatttaataatagatatcgcgaagagcttgaaaaaaatggtttggtattttcagggttctcaaaggatggtttagctgaaatgattgagatcaaagatcatccctggtttattggctgtcaattccacccagaattcacatcttcaccccttgcaggtcatccattattttattcttttatcgaagctgctgtagaatactctaaaaagaattaa

SEQ ID NO: 315372 - DNA, 1432 bp, Unknown
  Bacterial polypeptide expressing nucleotide sequence isolated from the Sargasso Sea
gatggcgaaaactaagtatatttttatcactggtggagttgtttcctctcttggaaagggtattgctgctgcctcaattggagctcttcttgaggctcgtggacttaaggtttccctattaaaattagatccttacatcaatgttgatcctgggactatgagtccatttcagcatggagaagtctttgtcactaatgatggaacagaaacggaccttgacttgggacactatgaacgttttgttagatttgaggcttctaaaaagaataattttacagcaggtatagtctatgaatctgttattaagaacgaaagaaaaggtaaatatcttggcggtactgttcaagttatcccacacataaccgatgaaattaaaagaaggattaaggcaggagcagccggaagtgatgttgccatagtagaaattggtggaactattggtgatatagaaagtcagccatttgttgaagctattagacaaatgtctttagatcttccttcaaaatcaacatcatttgttcatttgactctagttccttacattaatgtttcaggcgagctaaaaactaaacctactcaacattctgttaaagagctgaggtcactgggcattggtcctaactgtcttatttgtagatctgaaacagaacttcctaaagatgaaaaaaagaaaatagcactattttgctcagttgacatgtctaatgttatatctatgcatgacgtagataccgtttactcaatacctttgttacttcataaacagaaagtagatgaaatagttttaaaagatttgggcctcaagaccaaaaaaccaaatcttaatgattggaaaaaagtagttagagctaaattaaatcctaaaaaatctgttgaagttgcaatggttgggaaatatacagaattaaaagattcttataaatctctcaatgaagcgctggatcatgcaggcataaaaaataatgcaaaagtaaatataacttttgtagaggcagaaaaattaaccaaaagaaatgtaaaaaccaagcttaaatttgcggatgctgtattagtgcctggcggatttggaagtaggggtattgagggaatgatcatagcctgcgaatatgcaagactaaaaaatataccttattttggaatatgtcttggaatgcaaattgctcttattgagtttgcaagaaatatgttaggcctcaaaggagctaatagcactgaatttgattcaaaaacaaattatcctgttgttgcacttattacggaatggaaggataaaaccggtaaaactgaaaggagaacagctgactcggatttaggtggaacaatgaggctgggtggacagacctgcattttaaaaaagggctccaatgtttttagaatgtacaaaaagaacgagattgttgaaaggcataggcacagatatgaggtaaacccc

SEQ ID NO: 315373 - DNA, 413 bp, Unknown
  Bacterial polypeptide expressing nucleotide sequence isolated from the Sargasso Sea
catgaccaaatttgtcttcgtcaccggcggtgtggtgtcttccctcggtaagggaatcgcctcagcctcccttgccgcgatcctcgaatcgcggggactcaaagtcaccctcatcaagcttgacccctacatcaacgtagacccgggcactatgtcgccgttccagcacggcgaggtgttcgtgaccgatgacggcgcagaaaccgacctcgatctgggccactacgagcgtttcatcgaaacgcgcatgaagaaaaccaacaacttcaccacgggcaagatctaccagtccgtgctggagaaagagcgtcgcggcgactacctgggcaagaccgtgcaggtcatcccccacgtcaccaacgaaatccaggagttcatcaagcgcggcgcgggcatcggcacgcccgatgccg

SEQ ID NO: 315374 - DNA, 688 bp, Unknown
  Bacterial polypeptide expressing nucleotide sequence isolated from the Sargasso Sea
aatgaaaaagaaaaaacaagtaaaatatatttttgttgttggtggagttatttctggcttaggaaaaggaattgctgcctcttctattggttatctattgaaaagcgcaggattaaaagttactatattaaaattagatccatatctaaatgtggatcctggtacaatgaatccataccagcatggtgaagtttttgtattggatgatggatcagagactgatcttgatttggggcattatgaacgttttattgatgttgatatgagtaaaaataataatgcaacaactggacaagtgtatagtactgtattggatagggaaagaaaaggtgattatctaggggacactattcaggttattcctcatattactgatgaaattaaaagaagagtaaagttagtaaatgataagaacaaatatgatattgttatttgtgaagttggtggcacggtaggtgatatagaaagcctgcctttcatggaatcaattaggcaattgtctgtagagctaggttaccataatcatcttattgtacatgtaacacttgttccatatatacaggcaagtgaagaattgaaaacaaaaccaacacaacattctgtcatgaaactgcgggaaataggtttaagccctgatataattatgtgtagatcaagctattctctatctgattctgtagctgaaaag

SEQ ID NO: 315375 - DNA, 449 bp, Unknown
  Bacterial polypeptide expressing nucleotide sequence isolated from the Sargasso Sea
catggcgcgatatatatttgtcactggcggcgtggtctcttctttaggtaaaggtttatcatcagcatccttagcttatttgttaaaatctcaaggatataaagtaagattaagaaaaatggatccatatctgaatgtagatcctggcacaatgagtccattccagcatggagaagtgtttgtaacagacgatggtgctgaaacagatctagacttaggtcattatgaaagatttacaaacatatcttcaaaaaaatcagataatattacaactggtagaatttatagtgacataattaaaaaagaaagaagaggagggtaccttggtaaaactgttcaggtaatacctcacataactgatagaattaaagaatttataaaaaaagatatttcagatgaagattttgtaatatgtgaaattggtggaactgtaggtgacatcgagagcc

SEQ ID NO: 315376 - DNA, 562 bp, Unknown
  Bacterial polypeptide expressing nucleotide sequence isolated from the Sargasso Sea
gtggttttgtaaaagaggcactgaaggtaaaattgctgccataaaatacgcaagattgaacaatatacccttctttggcatttgctttggtatgcaaatggccgttatagaagccgcaagaaacttattgaatattaagaatgcttctacgagtgaatttggaaacaattgtactcccgttgtgggactacttgaggaatggcaaaaaggtaagaaaaaaataaaaggaactgaaaaaaatttaggtggaacgatgagattaggtttatatgatgctgtattaaaaaataactctcttatatctaaaatctattctgagagaagaatcaaggaaagacatagacacaggtacgaggtgaatattaaatataaaaatgattttgaaaaaaaaggtttaattttttcagcattgtctcctgacggaacccttcctgagataattgaattaagagaccacccttggtttgtcggcgtccagtttcatccagagtttaaatcaagaccttttacaccccatccattattttcatcttttatcaaagctgcaggagttaaagattaa

SEQ ID NO: 315377 - DNA, 548 bp, Unknown
  Bacterial polypeptide expressing nucleotide sequence isolated from the Sargasso Sea
tattcaatacttaagagaagagaaggtaccatttcttggtatttgtcttggactccaatgtgctgttatagaatatgctaggaacgtttgtggtattagtgatgcaaactcttctgaattttcaaaaaataccagtaattatgttattgatttattacctaatcaaaatttagaaaaagatgatgtcggagcatcaatgagattaggcacttacccatgcaagattaaagaaggaacgctcacttctaaaatttacaaagaagaagtaatatacgaaagacatagacatagatatgaagtaaataataaatttaaagatgaattagaaaatcatggtttagttataagtggtatgtctcctgataataatttaattgagatgattgaaattaaggaccatccttattttgtagcttctcaatttcatccagaatttaaatctaggccatgggatccagcaccaatgtttaaatattttattgaagctgcttcaaaaagaaataattccacaaaaaaaacaatagaaactcaaaaggtaaaagattaat

SEQ ID NO: 315378 - DNA, 706 bp, Unknown
  Bacterial polypeptide expressing nucleotide sequence isolated from the Sargasso Sea
cttaaaccatgcaggtttaaaaaaccgtttaactgtgcatatcaaatacatcgactcacaagacgtcgaaagcaaaggcacagatattctgtctactgtagatgcgattctggtgcctggtggctttggtgagcgtggcgtggaaggcaaaattatggccgcccgttatgcccgtgaaaacaaagtgccttaccttggtatttgtttaggtatgcaagtagcactgattgaatatgcccgcaacgtcgctggtatgaaagacgcacactctacagaatttaatatgaacacgccttaccctgtggtgggtctcatcacagaatggctggactctgatggtaatgttgaacagcggaccgacaggtctgatatgggcggcactatgcgtttgggcagccaaaactgtaaccttaaagccaatacaaaggcccgcgagatctatggcagcgacatcgtcagcgaacgtcatcgtcacagatacgaagtgaacaacaactatgttgctcagctcgaagaggctggcttaaagatctctggtttgtcggcggacaaccagttggttgaaatgattgaaatacctacacacccatggtttgtggcgggtcagttccatccggaatttaactcaacaccacgtgacggacatccgttattccagggcttcgtggccgccgcttataaatatcagaaacagcaactcgtttaa

SEQ ID NO: 315379 - DNA, 1007 bp, Unknown
  Bacterial polypeptide expressing nucleotide sequence isolated from the Sargasso Sea
tgggcttgctccggatatgattctatgccgctcagaatacagtattgagaagtctgtaagagaaaagattgcattattttgcaatgttcgctcggatcatgtttttgaaggaagagatgttcaaagtatctatgaggtccccttggtgttagatgagcagaatatggggactttaattaatgaaagattacaattggataaacgcccagatttatcgcccttaaaaaaattcgttcacagttacaagaatcctgattctgaagtgctaattgcaatgtgtgggaagtacactgagttgattgattcatacaaaagtgttcttgagtcatttgtccatgctggagtggaaaataatacacgggtaaatattaaatgggtgaaaactgaaaaaattattgatgataaaactgcaagcaggcaatttaaaaatgtagatggaatattgatcttgccagggtttggatctcgaggtggagaaggtaaaatcatgtcctctaaatttgctcgtgagaataacataccatttttaggaatatgccttggaatgcagtgtgctatcattgattttgccagaaatgtttgcggtcttgaaggtgcaaattcgactgagtttaacaaaagaacaaaacacccagtgatagacctgatggagtcacaaagagcaatcaaaataaaaggtggtacaatgagactcggggcgtatgattgcaatattaagccgggtacaaaggcatttgccgcatatcgatcaaagaatgtatcagagagacatcgtcatcgatttgaggtaaataatcgctacagaaaaaagcttcaaaaaggaggccttatcatttccggtgtcaatgaagaccttggtgttgtggaaacaatcgagatagccggtcatccttggtttgtagcaggccaatttcatccagaattaaagagcagagtgaataaatcccatcctctttttagagaatttattaaagcatcaaaaaaatacaataaacgcaggagctaga

SEQ ID NO: 315380 - DNA, 1126 bp, Unknown
  Bacterial polypeptide expressing nucleotide sequence isolated from the Sargasso Sea
atgactcgttttatatttgtaactggtggagttgtatcatcactcggaaagggtattgcctcggcttctctaggtgccgttttggaggcaagagggcttaatcttgcgatggtaaagatggatccctatataaacgttgatcctggcacaatgagtccgtttcagcatggtgaagtttttgtaaccgaagacggcgcggaaacggatcttgatctcggacattatgagagatttgttcggtgcggaatttcttccgatagcaactatacagcaggacaaatttatgagaacgtcattcaaaaagaacgcagaggagattatttaggcgctactgtgcaggttatacctcatgtaacagatgaaattataaggtgtatcaagagaggggcggccgatgcggaggtcgctctggtggaaatcggtggcaccgtgggcgatattgagtctttgccttttcttgaagcgattagacaaatgcgggttgaattaggaagtgaaaacaccttatttattcatctaactttagttccatacatagcctcagcaggcgaggtaaaaacaaaacctactcaacactctgttaaggaattacgatccattggaattcagcccgacatcctcctgtgtagagctcaggaggcaatatcgtcgtcagagcgaagaaaaattgcgttatttaccaatgtaggtgaaaaagcagtaatttctgctctggatgcgtctaatatatatcaaatacctgaaaatctacatgctgagggattagatgatattgtggtagaaaaattaaatttaacggtccctccagctaatttgaccaactggaagaaggtagtatctgcccttaagaaccccagtaatcatgtttccatagcgatggtaggtaaatatgtagatcttaccgaagcttataaatctctgtctgagtctcttgtgcatgctgggattcataccgatacaagagttgaaatccgctatgttgatgccgaagcgattgaaaaaaatggtaccaatattctggaaaaagttgacggaattttagttcctggtgggtttggggaacggggaatagatggaaaggtaatggctgtaacttttgccagagaaaggcaaattccattctcgg

SEQ ID NO: 315381 - DNA, 1510 bp, Unknown
  Bacterial polypeptide expressing nucleotide sequence isolated from the Sargasso Sea
ccttatataaacgtcgatcctggaacgatgagcccttttcagcatggagaggtttttgtgacagcagatggagcagaaacggacctggatcttggtcattacgagcggttttcaaccgtcaaaatgaccaaagaaaacaactttacgacaggtagtatttacgcggaggttattcgaaaagaaagaagaggagagtacctaggggctaccgtccaggtaattccccacataacagacgagataaagcgaaggatatttgaggtcggtgaaggctttgacattctaatagttgaaacaggtggtaccgcgggagacatagaatctcaaccttttcttgaagccatcaggcaaatgcgaatggaggtaggaaaggagaggtctttatttatccatttgagctatgtgcctactatacggagtgcaggagaggttaagacaaagccgactcagcattctgtaaaagagttgagatcgataggtttgcaacccgatattctggtttgtcggtctgaagtgcccattccagcttcagcaaaacaaaaaatagccttgttcacgaacgttgaagaaacggcagtagtttcaatggtggattataagacaacttaccaagcgcctctggttctgcacgaagaaggtctggatgaaatcgtaactcgaaaaatgtcattagatgctccaacggccgatctaagtgattgggttgaggtaatagacaaggagttaaacccagaaaatcagattaatcttgcgtttgtgggcaagtatttggatttgcttgacgcatacaagtcgttaattgaagcgataaaacacgcgggcatccacacttcgactagagttaatttacagtttttggacgcagaagaattggagcaaggtaattttgatttattaaagtcagcggacgccatattagtgcccggtggttttgggagtagagggttcgagggcaaaatagcggctgctcgatatgctcgagaaaaccggattccttatcttggaatctgttatggattgcatgccgtggtcatagatatcgcaagaaattgtgtcggtttggcaggtgctcacagtgctgagatttctgaagagcctgagcacccagttatcgctttgatcactgagtggacagatgaagaaggaactcaagagaaacgaggagaagattcagaccttggtggcaccatgcgtttaggcgaacaggcgtgcgttattaatcaaggatcattggctgagagagtttatgggacaacagtcgtgagagaacgtcataggcatcgttatgaggttaacaataattacattgcggaccttgaaaaagccggattgaaaattggtgggcgttctgaagatggcgaattggtggagatggtagagattgaagaccatccctggtttttagcatgtcagttccatccagagttcacgtctacacctcgtcaaggtcacccgttgtttattggtttcgttgaagctggtttacaaaagtctcgagtggaaaaataaa

SEQ ID NO: 315382 - DNA, 1627 bp, Unknown
  Bacterial polypeptide expressing nucleotide sequence isolated from the Sargasso Sea
gatggctaatactaagtatatcttcataactggcggtgtagtttcctctttaggaaagggtatagcagccgcttcaattggcgcactattagaatcaagaggcctttctgtttctttaatcaaagttgatccatacattaacgtagaccctggaacaatgagtccttttcagcatggtgaagtttttgtaacagaagatggaacagaaacggatctagacttaggacactatgaaagatttgttagatttaaagcatctaaaaaaaataatttcacagctggaaaagtatatgaaacagtaattagaaacgaaagaaagggtaattatttgggaggtacagtccaagtaatacctcatataacaaacgaaattaaaaaaagaattaaaaaaggtggtcaaaacaaagatattgcaattgttgaagtgggaggaactgttggagacatagagagccaaccttttgtagaggcactaagacaaatggcacttgaactacctaattcttcgtgggcatttgttcacctgacactagttccatttataaacgcatcaggagaattaaaaacaaagccgactcaacattcagtgaaggaattaagatcattgggtattagtcctgatgtcttggtttgcagatctgaacaagagcttccaaaagatgaaaaaaataaaattgcgttattttgttctgtgccagctaaaagcgttatttcaatgcatgatgtcgacacagtttattcgattcctattttgcttaacaaacaaaaagtcgatgacacaattcttaaaaaattaaatttaaaaataaaaaaaccaaacttgaatgattggaaaagagttgtcaaagcaaagttacttcctgaaaaagaagtaaatgtttcttttgtaggaaaatatacggagttaaaagattcttataagtcaattaatgaagctttagagcatgctggaattcaaaataaagcaaaagtaaatattaattttgtagaagctgaacaaattacttcacaaaacgttagaaaagttttgaaaaaatctgatgctattttagttcctggtggatttggagaaagggggatagaaggaatgatcttggcttgtaaatatgccagagaaaataatgttccttaccttggcatttgtcttggaatgcagattgctataattgagtatgcgagaaatgtactcaagctaaaatctgcaaatagtacagaatttgattcaagtactaaatttccagtcattggactgatcacagaatggagtgatatatcaggtaagaaagaaaaacgtactaaaaattctgatcttggaggcacgatgcggttaggcggtcaggtttgtaaattaaagaaaaaatcaaattcatataaaatgtataaaaaaagtgaaattattgagagacatagacatagatacgaagttaatccaaactacaaagataaaatgattgagcagggtttagacgtagttggcacgtcaattgatggtaagttagtagagatgattgaattacccagccataaatggttcttagcatgccaattccatccagaatttacttccaatcctcgagatggacatccaatatttaatagctatattaaaagcaccattacaaaataa

SEQ ID NO: 315383 - DNA, 1639 bp, Unknown
  Bacterial polypeptide expressing nucleotide sequence isolated from the Sargasso Sea
catgacgacaaaatatatttttgtaactggtggcgttgtttcatccctcggcaaaggcattgccgcagcttctctggcagccattctggaagcccgtggtctggatgtgaccatcatgaaactggacccctatatcaacgtggatccgggcaccatgagcccgacccagcacggtgaagtgttcgtaaccgaggacggggccgagaccgatctggacttgggccactacgagcgtttcatccgcaccaagatgacccgccgcaacaacttcaccaccggtcgcatctatgcagacgtgctgcgcaaggagcgccgtggtgactatctgggcgccaccattcaggtgatcccgcacatcaccaacgccatcaaggagcgggtgattgccggtgccgaaggccatcaggttgccatcgtcgaagtgggcggtaccgtaggtgacatcgagtccctgccgttcctcgaggccattcgtcagctggctgccgaagtgggccgcaacaatgccatgttcatgcacctgacgctggttccttacctggctgccgccggtgaagtgaagaccaagccgacccagcactccgtcaaagagctgctctccatcggtatccagccagacgtgctgatctgccgctccgaccgtgccattccggccgttgagcgcgccaagatcgccctgttctgcaacgtgccggagcgcgccgtcatctccatgaaagacgtcgactccatctacaagatcccggcactgctcaagtcccagaatctggactcctacttcaccgagcgtttcggtctggagtgcaaggaggccgatctggccgagtgggaacaggtcatctatgaagaggccaacccgactgcagaagtgaccatcggcatggtcggcaagtacgtatccctgccggatgcctacaagtccgtcaacgaggcgctcaagcacggtggcctgaagacccgtctgtccgtcaacatcaagtacatcgattcccaggacatcgagacccgtggcgccgagctgctggaaggtctggacgcgatcctggtgccgggtggcttcggtgagcgcggcgtggaaggcaaaattcaggcagcccagtatgctcgcgagaacaagatcccctacctgggtatctgcctcggcatgcaggtcgccatgatcgaattcgcccgcaacgtggcaggcatggaaggggctcactcttccgagttcaagaaggattgtgcctatccggtggtgggtctcatcaccgagtgggtggatgacgaaggcaacgtcgagacccgtaccgagaagtccgatctgggcggtaccatgcgtctgggttcccagctctgccacctggtggaaggttccaaggtacgccagatgtacggcagcccgaccatttacgagcgccaccgtcaccgttatgaagtgaacaacaagttgctgccgcagattgaagcagcaggcctgaaagtgaccggtctctccgccgacaagaagttggtggaaattatcgagatcccggatcacccttggttcgtggccgcgcagttccacccggagttcacctcgactccccgtgatggccacgccctgttcgccggttttgtgaaggcggcaggcgagtatcagaagcgtaatctgaagtaa

SEQ ID NO: 315384 - DNA, 736 bp, Unknown
  Bacterial polypeptide expressing nucleotide sequence isolated from the Sargasso Sea
atcgcacttgttggcaaatatgcggaacatcgtgatgcctacaaaagcatctacgaggcgttggatcatggtggcattgctcacaagactcaagttcgcgtacagccgataaaaagtgaagatatcgaacgagagggagctgaacgactccttggaggtttcgatggcctcattgttcctggtggttttggagaacgtggtattgaaggaaaggtagaagccatttcttttgcacgagaacatggcattcctttcttaggcatctgccttggcatgcagtgtgcggtcattgatattgctcggaatctggctggattaggagaagctcactcgaccgagtttgtaaaagacacaccgtatccggtcatagcgctcatggaagaacagcatggggttgtggcaaagggcggcacaatgcgacttggcagccaaccgtgcatcctctctaaaaatacaaaatcctcgactgcttatgggactgaacaaataaccgaacgccatcgtcaccgttacgaattcaattcacattttcgaaaacaactcgaagcggcaggacttgttgtggcaggaacgagtcccgatgatgcgcttgtagaaatcattgaggttgtaaatcacccatggtttgttgctgtacaatttcatccagaatttaagagcaagccaacctcagcacaccctttattttcaggacttgtggctgcagctgtggaacggcatgctgggaatgcatgag

SEQ ID NO: 315385 - DNA, 511 bp, Unknown
  Bacterial polypeptide expressing nucleotide sequence isolated from the Sargasso Sea
aaaagacatacctttttttggaatatgtctcggtatgcaagttgcagtaattgaatttgcaagaaatgttttgaaaatacctgcaaatagtacggagtttgaaaaaaatacaaaaaatcctgttatagctttaataactgagtggatggacgagaagggtctaaaacaaagaagaaatgaatattctgacaaaggaggaactatgagacttggaagtcaaatttgttttttagaaaaaaatagtaatatgtcgaaaatgtataaatccttgaagatttctgaaagacacagacacagatacgaatttaataataattatttagagaaaattaaaggaaaagggatgaaaatagcggggcgctcaaaagataaaagtttagtagaggcaattgaattaaaaggacataagtggtttgtgggttgtcaattccacccagaatttacttctgatccaagatctggacatcctttatttaatggttttgtaagagctgctaagctaaaaaaatga

SEQ ID NO: 315386 - DNA, 601 bp, Unknown
  Bacterial polypeptide expressing nucleotide sequence isolated from the Sargasso Sea
aataaacttaaaaatgtttcaggaattttaattccaggtggttttggtaaaagaggaactaaaggcaaaattgaagcgataaagtatgcaagagtgaataaaattccattccttggaatttgttatggtatgcaaatggcaataattgaatttgctagaaatcaattaaagattagaaaagcaacttcttctgagtttgataaaggtggtgttcatattattggcttgatgcatgaatgggagaaaagtggcagaaaagttaaaggaacagataaagatttagggggcaccatgagacttggttcttatgatgcaatcctaaaagataaatctaaaattagagatatttataaatctaggttaattaaggagagacatagacatagatatgaagttgatatttcatataaagaaaaatttgaggagaaaggattaattttttcaggtttatctccagatcataggcttcctgagataattgaacttaaaaatcatccttggtttgtaggagttcagtttcatcctgaatttaaatctagacctttgaacccacatcctttattctcttcatttatcaaagcagcaaaaaatcatagatgag

SEQ ID NO: 315387 - DNA, 801 bp, Unknown
  Bacterial polypeptide expressing nucleotide sequence isolated from the Sargasso Sea
ataaaccatcaattaaacagctacaaaactttattaggacttacaaaaacccagatagtgaaattaaaattgccatgtgcggtaagtatactgaattgcatgatgcatataaaagtattacagaatcattcattcatgctggcgttgaaaataatacaaaggttaaagttatatgggttaatactgaaaaaatcaaaagtgataaagatgcagaaaaatcctttcaaggtattgatggtatcctactacctggagggtttggatctagaggtgctgaaggaaaaattttaacttcaaaatttgcaagagaaaataacattcctttccttggaatatgcttaggattacaatgtgctgttattgactatgcgcgaaatgtttgcaaaatagatgatgctaacagttctgaatttaaaccaaaatctaaaaataaggttattgatctcatggaatctcaacaggcaattaagttgaagggaggaacaatgcgattgggctcttatgattgtgaaatttcaacaggtactaaagcatattctatttatcgtaaaaagactattagtgaaagacatagacatagatttgaagtaaataataaatatgtctccaaaatgaaaaaaaatgggttaattttctcaggtataaataaaaaattaggagtggtagaaataattgaattaaaaaatcatccatggtttatcggatgtcaatttcacccagaattaaaaagtagagttgataaagcacatcctctttttagagagtttgtaaaagcttcactcaaaaatagtaagaattaaa

SEQ ID NO: 315388 - DNA, 1081 bp, Unknown
  Bacterial polypeptide expressing nucleotide sequence isolated from the Sargasso Sea
tctaattgagcaaaaaactaaacctactcagcattctgttaaagagttaagagaaataggaatacaacctaatattttactatgtagatgtgatagatctattgaggctaacgaagtagataaaattgcattattttgtaatgtaaaatcagaagatgttattcaagctctagatgtaaaaaatatttataatgtgcctatagtttatcatagtgaaaaattagatgtacaagttttaaggcatttcaatattagacctaataaaataaatttaataaaatggaaaaaaattgttctatctgcaaataaagtcaaaagaaatattaatgttggtattgttggaaaatatactgatttacctgatgcttataaatccttaaatgaagctttagttcatggagggttaataaataatgtaggtattaatattcattggatcaattcagaaaatttaaatgataaatctattaaaaataaatttaaaaacatacatggtattattgtgccaggagggttcggagaaagaggtatctcaggaaaaatcaaggcaataaaatatgctcgcttaaataaagttccgtttttaggtatttgccttggtcttcagcttgcagtaattgagttttctaaaaatgtattaaatattagaaatgctaattcttcagaatttactaatactgaaaataatgtaattggtttactaacagagtggtataaagatggcaaaaaagaagttagatccaaagcatcagatgtaggaggcactatgaggttaggttcctatccttgtaagcttaaaaaaggttcattagcatttaaaatatataaaaaatctattattcatgaaaggcatagacatcgctatgaagtaaattctatttatgagaataagctaatgaataaaggtatgatattttcaggtaagtcgccagattctatgttgcctgaaattatagaggttagctctcatccatggtttttaggtgttcaatttcatcctgagctaaaatcgagaccatttatgcctcatccaatatttaaatcttttatatacgcagtaaaaaaagtaagtaaaaaataa

SEQ ID NO: 315389 - DNA, 1054 bp, Unknown
  Bacterial polypeptide expressing nucleotide sequence isolated from the Sargasso Sea
tgttgtaggcgaacaaaaaacaaaacctactcagcatagcgttcaagaactaagaagaatcggcatacagccagatttgctatgtgtaagatgttctatgccattacaagataaaacaagaaataaaatttcaatgtttacaaatgtgacaaataatgatgtattttcatgtcatgatgttgattcgattttccaagtacctgaaattctatacgatcaagggttggtagatgttattttcaagaaattcaataaaatgggatatgtcaatgcatcacaaaactgggatacctggaataagatagtcaactcattacataacgaaggagacccaatcaatattgcaatggttggaaaatatgtaacacttgcagatagctatgtcagtgtaaatcatgcattaaaacatgcagctgcatcaattggaaaaaaaattacaattgattggattgattcagaaaacattaatggaaatgttgacacattatcaaaatataatgggatattggtgccaggaggttttggtacacgaggctctgaaggaataataaaaactgcaaactttgcaagagaacagaatatcccatatcttggaatttgttttggatttcaattagccgcagtatcgtttgcaagaaatgtatgtagtcatacagatgcaaattcaacagaaattgaacaaaataccaataatccaataatagatttactcccagaacaggacggaattacagatatgggaggatcattaagattaggtgcaaacgagattaatgtcaaaccagatacaatagcaaacaaaatttacggtcaagacaaaatttcaaaaagacatagacatcgatatgaatttaatacaaaatatttagaggaatttgcacaaaaaggaatgatcttctcaggagaaagtgacgaaggacgaagaatggaaattttagagataccatctcataaattctttgtaggagttcaattccatccagaatttaatagcagacctggctatccagagcatgtattcaaagcattcactactgctgcaaatcagaattaa

SEQ ID NO: 315390 - DNA, 1054 bp, Unknown
  Bacterial polypeptide expressing nucleotide sequence isolated from the Sargasso Sea
aagaagaggagattacctaggagcaaccgttcaagtgatccctcatgttaccgatgaaatcagaaaaagcattgtcaaaggatcgcaaggttatgacgtaacaattgttgaaattggcggaacggttggagacattgaatctcttccattcattgaagccataagacagatggggatctataaagatggttatgaagttgcatatgttcatttaacattggtgccatatatcaaagcatcttcagaaattaaaaccaaaccaactcaacattcagtcagagaacttcgagcaatcggaattcaacccgatgctttggtctgccgctctgaactacctctcccaaaagaacattttgataagattgctctttttacaaatgttgaaaagaaagctgtcatttctgcacatgatgctgaagacatctatcagataccactcatcctaagggagcaatgcttggatgacatcattgttgagaaattgaaactggatgtaccaaaagcagatttgacaccttgggaaaatgtctttaaagaatcaaaaaatagcgattccaatgtaacaatagcaatggttgggaaatatgtagactttaaggattcatacatttcattgagtgaagcccttagacatgccggctttaaaaatagcaagggagttgagatcgtatatgtcgaatccgaagatattcaagagaatggcaccgattgtctttctgaaatggatgccattctgattcctgggggatttggagatcgaggcatagagggaatgattcaatccattgaatatgcaagaaagaaagatattccttttctgggtatctgtcttggaatgcaagcagctgtaattgaatatgcacgaaatgttttggatcataaggatgcaaatagcactgagtttaactctagtacttctgcacctgtcattgcaatgattacagagtggatgaataatgacggctcaaaagagaatagagatgaaaactcagatcttggagggactatgaggcttggggcacaagagtgtttgtttgcaaaaggaaccaaggca

SEQ ID NO: 315391 - DNA, 892 bp, Unknown
  Bacterial polypeptide expressing nucleotide sequence isolated from the Sargasso Sea
atgtccaaaagtgatatccaaatagcaagagaagcaaagatggatccaattaacaaggtcctagctaaaatcaatgtacctgatgaaccaagtacattcagtcccatgggaagacatattgcaaaaataaatttcgattaccttaaaacattagaaaataaaaaaaatggaaaacttattctagtaactgcaattactccaacaccagctggagaaggtaaaaccactgtttcagttggtctctcagatggaataaataaaattggtaaaaaatcaattgtatgtttaagagaacctagtttaggtccatcattcggaatgaaaggtggtgcagctggaggaggttatgcgcaagtagttccaatggaacaaattaatttgcattttacaggagattttcatgcaattacatctgcacacaatcttttatcagcactgatagacaaccatatttattggggaaacaaacttaatattgatgacaaaaaaatagtatggaaaagagtaatggatatgaacgatagagctttaaggactataaatataaatacaaaaggagcttcaaaagattttccaagagaagatggttttgatattacagttgcttctgaagttatggctatattttgtttatcaaataacctggaagatttagagaaaaagattggaaatatcacgatagcttataataaagaaggaaagccaatttatgcaaaagacttaaatgctcaaggtccaatgacagtgttacttaaagaagcaattagacctaatgttactcagactttagaaaataatcctgccttaatacatgggggtccttttgcaaacattgcacatggatgcaattctgtaattgctacaaaagctgctttaaaactttcagattatg

SEQ ID NO: 315392 - DNA, 1042 bp, Unknown
  Bacterial polypeptide expressing nucleotide sequence isolated from the Sargasso Sea
ttgtatggaaaatataaagcaaaaattgaagacaaagtttggggaaaaattaaaaaacaaatctgacggaaaactgattttagtaacggccataacacctactcccgcaggagaaggaaaaacttgtacatcaataggaatagctcaagcctttggtaaattaggagttaagcatgccctagcaatacgcgaacctagtatggggccaacatttggtataaagggtggtgcagctggaggaggatattctcaagttcttccaatggaagatatcaatatacattttacaggtgatttacacgcaatttcagctgcccataatttattatcagccgtactggacaattcgatacattttgataatcctttaaatattgatattaacaaagttacatggcgtagaacaattgacctttgcgatagacaactccgtaacggagaaattggtcttggctcaaaattcgatggtttccctcataaaacaggttttgatattgtagcagcttcggaaatcatgacaattatggctttagcagaagatattagtgacttaagagatagactaggcagaattgttgttgcatacagtacatctggtaaaccgatatttgctaaagaacttgattgtataggtgctttatgtgtcattttaaaagatgcattaaaacctaatctagtccagacatgtgaacacacgcccgtatttgttcattgtggtccatttggaaatattgcacatggttcaaacagtgttagggcaactagattagctttaaaattagcaccttatgttgttactgaagcagggtttgctgcagatttaggtgctgaaaaatttgtgaacatcaaatgtcgtcaagctggattaaaaccaaatggggcagtattagtagcaactgttagagctttaaaattccacggaggagaggagaaagaaaacttaaagatagaaaatttagaagctttaaaaaaaggctgtgataatctaaagactcatgcagaaaatatcggcaaatatggattaccattagtagtagccata

SEQ ID NO: 315393 - DNA, 811 bp, Unknown
  Bacterial polypeptide expressing nucleotide sequence isolated from the Sargasso Sea
aatgggcaaagtaaaatctgatattgaaatagcaagagaagcaaaaatgaagcccattcaagaagtgcttaatggactaaatgtacctgacaaagctgaagtctatagcccaataggaagatacatcgccaaaattaaaactgagtatttagagactttaaaaaataaaaaagatggaaaattaattttagttactgcaattactccaactcctgctggagaaggaaaaacaacaacatcagttggtctaaatgatggtttaaataaaattggaaaaaaatcaatagtatgtcttcgagaacctagcttaggaccttcttttggaatgaaaggtggcgctgctggaggtggttatgcacaagtagttcctatggaacaaataaatttacattttacaggagactttcatgcaataacctcggctcataatcttctttctgctttaatagataatcatatttattggggtaataaattaaacattgatgtcagaagaattgtttggaaaagagttatggatatgaatgatcgttcattgagatcaattgtggtagatctaggaggtgtagcgaatggatatcctagacaagatggttttgatattacagttgcttctgaaataatggccatcttttgcttatcaaatgatttaaaagatttagaaaatagaattggaaatattacagttgcgtacactagagataaaaaaccaatttatgctaaagatttaaatgctcatggaccaatgactgttttattaaaagatgcaattagacctaatgtgacacaaacattagaaaacaacccagca

SEQ ID NO: 315394 - DNA, 541 bp, Unknown
  Bacterial polypeptide expressing nucleotide sequence isolated from the Sargasso Sea
tatggccgaccaaggttccgacatcgaaatcgcgcgtgccgcgaccctgcaaccgattactgagatcgggaccaagctggatattccggccgatgccctgcatctttacggggccaacaaggccaagatcgattacgaatttctgaacgacattgcggaacggccccgcggcaaactgatccttgtcaccgcgatcacgccgacaccagcaggcgaaggcaagacaacgacgacggtggggctcggcgacgggttgaaccggatcggcaagaacgcgatgatctgcattcgagaaccgtcgcttggcccctgcttcggcctcaagggtggagcggcgggcgggggatacgcgcaggtggtgcccatggaagacatcaacctgcattttaccggcgacatgcacgccatcggtgctgctcacaatctcctgtcggcaatgatcgacaaccacatgtactgggacaacaacctttgcatggattcacgccgagtatcctggcggcgtgtggtcgatatcaatgaccgcgcgctgcgagatatc

SEQ ID NO: 315395 - DNA, 448 bp, Unknown
  Bacterial polypeptide expressing nucleotide sequence isolated from the Sargasso Sea
atgaaaacagatatagaaatagcaagagaagcagagcccaaaacgattgataaaattgcagatcaattaggtattggagaagagtatcttgagcgctatggtaaatttaagtccaagattgacctatcaatcaatcaggaacaattaaaggattctaagaacggtaaactaatcttggttaccgctatctcacccacgcctgcaggagaaggcaagaccactacaagtgttggcctcgtcgatgggctatgtcacatcggaaaaaaagcaatgatttgcctcagagaaccgagcctaggaccttgctttggtatgaaaggtggtgcagctggaggaggtcatgctcaagtgatccccatgacagacattaatctacattttacaggtgattttcatgccattggagcagctcataatcttctttctgcattaattgataatcacatac

SEQ ID NO: 315396 - DNA, 799 bp, Unknown
  Bacterial polypeptide expressing nucleotide sequence isolated from the Sargasso Sea
atggctaaaactgatatagaaatagcaagagaagcaaaaatgaaacctatccaggaaatactggatggtattaatgtccctgacaaagctgaagtttacagccctattggaagatatattgcaaaaattaaaacagaatatttagagtctttaaaaaacaaaaaaaatggaaaattaattttagttacagccataacacctacccctgctggtgaaggaaaaacaacaacttcagttggtctatgcgatggattaaataaaattggaaaaaaatcaattgtatgtttaagagaaccaagtctcggtccttcttttggcatgaaaggaggagcagctggaggtggttacgcccaagttgttcctatggaacaaataaatttacattttactggagacttccacgcaataacttctgctcacaatttactttctgctttaattgataatcatatttattggggtaataaattaaatatagatgttagaagaattgtttggaagagagttatggacatgaacgatagatctttaagatctattgtagttaatttaggtggaattgcgaatggatatcctagacaagatggatttgatattacagtagcttcagaaataatggcaatcttttgtttggcaaaagatttgaaagatttagaaaatagaattggaaatattactattggatatactagggataaaaatccaatttatgccaaagatctaaatgcccaaggtccaatgacggttcttttaaaagatgcaattagaccaaaatataactcaaactttagaaaataat

SEQ ID NO: 315397 - DNA, 751 bp, Unknown
  Bacterial polypeptide expressing nucleotide sequence isolated from the Sargasso Sea
gatgagcgacataaaatcagacattcaaattgctcgtgaagctaaaatgcttccaattaaagatattttagcaaaggtaaatgttccagatgaaagttcggcttttagtccaatggggaggcatattgcaaaaataaacttagaatatttggatacattaaaaaataaaccagatggtaaattaattttagttacggcaataactccaactcctgctggagaaggtaaaacaactacttcagttggattaaatgatggattaaacaaaattggaaaaaaatctattgtatgcttaagggaaccaagtctgggtccatcttttggaatgaaaggtggcgctgcaggaggtggatatgcacaagtagttcctatggaacaaattaatcttcacttcactggagattttcatgcaataacatctgctcataatcttttgtcagcattaattgataatcatatctactggggaaataaattaaatatagatgttagaagagttgtttggaaaagagttatggatatgaacgacagagcattaagatcaattaatattaatcttggtggtgttgctaatggttttccaagagaagatggttttgatattacggttgcttctgaaataatggctatcttttgtcttgctaataatcttgaggatttagaaaataggattggaaatattacagtagcatacactcgagagaaaaaaccgatttatgctaaagatttaaatgctcatggaccaatgact

SEQ ID NO: 315398 - DNA, 238 bp, Unknown
  Bacterial polypeptide expressing nucleotide sequence isolated from the Sargasso Sea
tatgaaaaatttccagtgtgtgtagcaaaaactcaatattcattttctacagatccatccaaacgtggagcacccactgatcatgagataccaattagagaggtaagactgtctgcaggagctgaatttatcgtcatggtgtgtggagatataatgacaatgcctggattaccaaaagtaccagctgccgagagaatcgatattgatgacgatggaaatattgtaggattattctaaa

SEQ ID NO: 315399 - DNA, 346 bp, Unknown
  Bacterial polypeptide expressing nucleotide sequence isolated from the Sargasso Sea
tcctttatttaaaaaaatagaaaaaatagctcaggagatttatcgtgcaagcgaagtggttgcagatacaaaaataagagaacaacttaaagatttcgaaagtaaaggatttggtaatttaccaatatgtgttgcaaaaacacaatacagtttttcaaccgaccctaatttaaaaggggctcccaatgggcatgttttaccggtaagagaagtcatgttgtcatcaggtgcgcagtttatagttgttgtttgcgggtcaattatgacaatgcctggattaccaaaagtaccagctgctgaatctatcaaaatcaataaagatggtgaagtagaagggctattttag

SEQ ID NO: 315400 - DNA, 661 bp, Unknown
  Bacterial polypeptide expressing nucleotide sequence isolated from the Sargasso Sea
catgggtggagtaaaaaaagacgaattgaaaaatgaaaatgtcgatgcagttaaaaaaggattggttaacttagaaagacatatagaaaatattcaaaaatttggattacctgtaacagtagcaataaatcactttgttttagatacagataaagaagttgatgaagttaccaggttttgtgaacaaaaaggtattaaagcctctatatcaaagcattgggaaaaaggtggagaaggtgcaatagatttagcaaatgatgtagttgaactatgtgaaaaagatagtgattttaaatttttatatgatgataaaacttcattatttaaaaaaatagaaacaattgctaaggaactttatagagcaagcgaagtagttgcagatactaaaataagagaccaattaaaagcttttgaagaaagaggttaccaatcattaccaatttgtattgcaaaaactcaatatagtttttccactgacccaaatctaaagggagcaccttcaggtcatgtattaccaataagagaagtaagactatcatcaggagcagaatttatcgttgttgtatgcggtgcaataatgacaatgccaggattgccaaaagtgccagcagctgactcaattcgtattaatgaaaaaggtgaaacagagggtctattttaa

SEQ ID NO: 315401 - DNA, 226 bp, Unknown
  Bacterial polypeptide expressing nucleotide sequence isolated from the Sargasso Sea
ccagtatgtatagctaaaactcaatatagtttttcaactgatccaaaacttaaaggggctccatcaaaccatgaaattccaattagagaggtgagattatcatctggtgctgaatttattgttgtagtttgtggatcaataatgacaatgcctggattacccaaagttcctgcagctgacaagattaaattaaataaaaaaggtgagattgagggattattttaaa

SEQ ID NO: 315402 - DNA, 712 bp, Unknown
  Bacterial polypeptide expressing nucleotide sequence isolated from the Sargasso Sea
ttaaaaccaaatgcagttgtattagttgcaactattcgtgcattaaaaatgcatggtggtgtagataaaaaaaatcttgaacctgaaaatatttctgctgttattaaaggtgtatctaacttaaaaagacatatagaaaatattcataaatttggtttacctgcaattgttgcagtaaatcattttgttaacgacacagaaaaagaaattgaagctttaaaagaagaatgcttaaagatgaatgtagaagtaattttatgtgaacattgggctaaaggaggagaaggaacaattcaacttgcaaaaaaaattgttgaacttacagataaggaaaataaatttgattatttatataaagatgatgaatcgcttattgataaaattaaaaaaattacttctgagatttatagagctgaggaagtaataataagcaaaaaaataaaagatcaattgaagcaatatgaaaatcaaggatatggaaattttcctatttgcattgcaaaaacacaatatagtttttctacagatccatcaaaaataggcgctccagaaagtcattctattccaataagagaagtcagactttcaagtggagcagaatttatagttgtggtgtgtggagaaattatgactatgcctggtttaccgagtgtaccagctgccaactcaataaagttagattctaatggacaaatcgaaggtctgttttaaa

SEQ ID NO: 315403 - DNA, 741 bp, Unknown
  Bacterial polypeptide expressing nucleotide sequence isolated from the Sargasso Sea
ttttagatataaaatgcagaaaatcaaatttaaaacctgattgtgtagttattgttgcaaccataagagctttaaaaatgcatggtggtgtatctaaagatgatcttaaaaatgagaatgttaaagctttaaataaaggattagtaaatcttgaaagacatattaataatgttagaaaatttggtttaccagttgcggtagccgttaaccactttatcacagataccgataaagaagttagtgcacttatggacttttgtaaaacacaaggtgtaaaatcgtctatttgtaaacactggtcagatggaggagagggtacaaaagatctagcgaatattgttgtagatatatgtaataataaaaatacttttaaatttttgtatgaagataaaatacctctatttaaaaaaatagaaacaatcgctcaagaaatttatcatgcgagtgaagtagtggccgatacaaaaataagagatcaacttaaagattttgagtcaaaaggatatggaaatcttccgatatgtattgctaaaacacagtacagtttttcaacagacccaagtttaaaaggtgctccttcaggtcatgtggtaccaataagagaagtaagattgtcttcaggagcagaatttattgtagttgtatgtggggcaataatgacaatgccaggtctcccaagagtccctgctgccgattcaattaaattaaatgaaaaaggtgatatagaaggtttgttttaat

SEQ ID NO: 315404 - DNA, 725 bp, Unknown
  Bacterial polypeptide expressing nucleotide sequence isolated from the Sargasso Sea
aatgagtgatgttaaatcagatatccaaatagctcgagaagcaaaaatgcaccctataaatgaggtattagcaaagataaatgttccagatgagagtactgctttcagtccaatgggacgacacattgcaaaaattaacctggagtatttagaaaccttaaatgataaaccagatgggaaattaattttagttactgcaattacacctacacctgctggtgaaggtaaaaccactacttcagttggtttaaatgatggattaaataaaattggaaaaaaatctatagtttgtttaagggagccaagtcttgggccttcctttggaatgaaaggaggtgctgctggaggaggttatgctcaagttgttcctatggaacaaattaatttacattttactggagattttcatgcgattacttcagctcataatttattatcagcattaatcgacaatcatatatattggggtaacaaattagatatagatgtaagacggattgtttggaaaagagttatggatatgaatgaccgttcattaagatcaataaatataaatttaggtggagtagcaaatggtttccctagggaagatggatttgatattactgttgcttcagaaatcatggcaattttctgcttatcaaatgatttggaagatttagaaaaaagaattggtaaatatacaattgcttatacgagagataagaaaccagtttatgcgaaag

SEQ ID NO: 315405 - DNA, 586 bp, Unknown
  Bacterial polypeptide expressing nucleotide sequence isolated from the Sargasso Sea
tatgaccgcttatccaactgatttagagatagccaatgctgctaacaaaaaacctatcaatgaaatagctaaactaatagatattgatgaaaaaggattaatcaaatttggtgacgataaagcaaaattaaattcagattttattaattctatttctaaaaatgaaaatggaaaattaattttagtaacagctatttctccaacaccagcaggagaaggtaaaaccacaacaagtgttggattggtcgatggtttatgtcacataggcaaaaaagctatgatttgtcttagagaaccaagcttgggtccgtgttttggcatgaagggaggtgcagccgggggtggatatgctcaagtcattccaatgactgatatcaatcttcactttacaggagattttcacgcaattggggcagctcataatcttctatccgcgttaattgataatcatattcattgggataatgaattagatattgatcctagaagaataacttggaaacgagttgtagatatgaatgatagatcattaagagatattacatgtggtctgggtggcacgggtaatgggataccacgacaaagt

SEQ ID NO: 315406 - DNA, 736 bp, Unknown
  Bacterial polypeptide expressing nucleotide sequence isolated from the Sargasso Sea
taaatgtcgtaaagcaaatattaaaccaagctgtgttgttctagtagcaactatcagagcattaaaaatgcatggtggagtaaaaaaagaagatttaaaaaaagaaaatcttgaatcattaaaaaaaggtttacctaaccttgaaagacacattcaaaatataaagaaatttggtttagatgttatcgtagcaataaatcattttattactgatacagacgaagaaattaaagtggtagaaggttattgtgaaaaacttggtgtaaaagcaagtctttgcaagcattgggaaaaaggaggagaaggtacaagagatcttgctaataatgttgtcgaaatgtgcaataaagcaaaaaaaaatggatttaaatttttatattcaggagaaatgccacttttggacaaaattcaagctatcgcaaaagaaatctatggggccagcaaaatagaagctgatgatgaaataaaaaaacaaattaaaaaaattgaagaagctggatttaataaatttcctatttgtatagcaaaaactcaatatagtttttcaactgatcctaatttaaaaggcgcgccatctggacatactttgccaattagagaagtgagactttctagtggtgctgaatttgtagttgttgtatgcggatcaataatgacaatgccaggacttcctaaaattccagcggcaaataatataaaactaaacgataaagatgaaattgaaggtttgttttaa

SEQ ID NO: 315407 - DNA, 685 bp, Unknown
  Bacterial polypeptide expressing nucleotide sequence isolated from the Sargasso Sea
acaattagagctctaaaaatgcatggtggcgttctaaaagatgaactaaagaatgaaaatgtaaaagcattaaaaaaaggattagttaatttagagagacatataaataatacaagaaagtttggtataccagttacgatagcagtaaaccactttattacagatacagagaaagaaatgaaaacattattggatttttgtaaaactcagggagttaaagcttctaaatgtactcactggtccaatggaagcgaaggcacaaaggaactagcagaaaatgttgtggctatttgtgaagataatcaagatacattcaaattcttatatgaagataagttgcctttatttaaaaaaattgaaaaaattgcacaagaaatttatcatgcaagtgaggttgttgctgatacaaaagttagacaacaactaaaagattttgaagaaaaaggttatggaaatcttccagtgtgtattgctaaaactcaatatagtttttctacagatccaaatttaaaaggtgcaccaactggacatgtattgccaataagggaagtaagattgtcttcaggtgctgaatttgtagttgttgtttgcggagaaataatgactatgccaggattaccaagagttccagcagcggactcaataaaattgaataataatggtgaaattgaaggtttattttaaa

SEQ ID NO: 315408 - DNA, 393 bp, Unknown
  Bacterial polypeptide expressing nucleotide sequence isolated from the Sargasso Sea
aaaagtctaaaccaaaaaattttaaatatttgtatgaagaaaaattgcctttatggaaaaaaattgaaacgatatcaaaagaaatttatagggcgaaaggtattactgcctcagataatgtaaaagaacaaataaaaaattttgaaattagtggctacggcaatttaccaatatgtattgcaaaaactcaatatagtttttctgtagatcctaagttaaagggtgctcctgaaaatcatgaaataccaattagagaagtaaggctctcttctggagcaaattttatagtggttgtttgtggttcaataatgacaatgccaggattaccgaaagtacctgcggccgataatattaaattaaataaaaatggagaaactgaggggctattttaat

SEQ ID NO: 315409 - DNA, 488 bp, Unknown
  Bacterial polypeptide expressing nucleotide sequence isolated from the Sargasso Sea
tatgaaatcagatatagaaatagcgcaagctgcaaaactagaaaaaatatcagaaattgcaagtaaattagacataccagaggattcgcttgagccgtttgggcattacaaagcaaaaatatctctagaatatcttaactcactaaactcaaatccagatggtaaattaattctcgtcacagcaattagtcctacgccagcaggtgagggtaaaactacaacatctgtcggacttggagatgcactaaatcatataggtaagaaagcgcttgtaacaattcgtgagccttctttaggtccagtttttggtatgaaaggtggtgctgcaggcggaggtatgtcgcaagttatcccaatggaagatattaatcttcattttactggtgactttaacgcaatccagctggcaaataatcttctagcagcaatgcttgataatcatattcatcatggcaattcacttggcatagacgtaagaagagtttcct

SEQ ID NO: 315410 - DNA, 724 bp, Unknown
  Bacterial polypeptide expressing nucleotide sequence isolated from the Sargasso Sea
tataaagtgcagaaaatctaacttaaaaccgagttgtgtagtcattgttgcaaccattagagctttaaaaatgcatggtggcgttgcaaaagatgacttaaaaaatgaaaatgttgaggccttaaaaaaaggcctagtcaatcttgagcgacacatagaaaatgttaaaaaatttggattacctgtagcaattgcggtaaatcattttattaaagatacagacagcgaagttaaagctttaattgatttttgtgacagcttaggggttaaagcaagtttatgcactcactgggcaaatggtggtgaaggaacaaaagaattagcagcacatgttgctgatttgtgtgaaaaaaaagatgctaagtttaattttctttatgaaagtaaaacacctctgtttaaaaaaatagagacaattgctaaagaaatatacagagctgatgaagtaattgccgatacaaaaataagagatcaattaaaaagttttgaagaagctggatacggagaactacctatttgtgtagcgaaaacacaatacagtttttcaactgatccaaatttgaaaggcgcaccaattggtcacgttttacctgtaagagaaataagattatcgtcaggtgcagaatttattgtagttgtttgtggagcaattatgactatgccaggacttccacgtgttcctgcagcagactctataaagctaaatgaaaaaggtgaaatagaa

SEQ ID NO: 315411 - DNA, 766 bp, Unknown
  Bacterial polypeptide expressing nucleotide sequence isolated from the Sargasso Sea
agggaagcaaagatggaaccaataaatgatgtactttcaaaaattaatgtaccagacgaaccaaatgcattcagcccaatgggtagacatatagcaaaaataaactttgaatatcttgaaactttaaaagataaaaaagatggaaaacttattctagttactgccattacccccacgcccgctggtgaaggaaaaacaactgtttcagttggtctatcagatggaataaataaaattggaaaaaaatcaattgtatgcttaagagaacctagcctaggaccttcttttggaatgaaaggtggtgctgcaggaggtggctatgctcaagtagttccaatggaacaaattaatttacattttactggtgactttcacgcaattacttcagctcacaatcttttatcagctcttatagacaaccatatttactggggaaacaaacttaatattgatgacaaaaaaattgtttggaaaagagttatggatatgaatgatagagctttaagagcaattaatattaatactaaaggtgtagcaaaagattttccaagagaagaaggtttcgatataacggttgcttctgaaattatggctatcttttgtctatcaaataatttacaagatttagaaaaaagaattggcaatattacaattgcatataataaaagtaacaagccaatttatgctaaagatttaaaagcccaaggtccaatgactgttttgctaaaagaagcaattagacctaacgttactcaaaccttagaaa

SEQ ID NO: 315412 - DNA, 520 bp, Unknown
  Bacterial polypeptide expressing nucleotide sequence isolated from the Sargasso Sea
gataataataaagaaattgatgaagttactaagttttgtgaacaaaaaggtatcaaagcctctatatcaaagcattgggaaaaaggtggagaaggtgcaactgatttagcaaatgatgtagttgaactatgtaaaaaaaatagtgattttaaatttttatatgatgataaaacttcattatttaaaaaaatagaaacaattgctaaagaactttacagagcaagcgaagtagttgcagatactaaaataagagaccaattaaaagcttttgaagaaataggttaccaatcattaccaatttgtattgcaaaaactcaatatagtttttccactgacccaaatctaaagggggctccttcaggtcatgtattaccaataagagaggtaagactgtcatcaggggcagaatttatcgttgttgtgtgcggtgcaataatgacgatgcctggattaccaaaagtgccagctgcagaggcaattcgtattaatgaaaaaggtgaaacggaaggtctattttaaa

SEQ ID NO: 315413 - DNA, 532 bp, Unknown
  Bacterial polypeptide expressing nucleotide sequence isolated from the Sargasso Sea
aatgagtacttatccaagtgacttagagattgcaagtgctgctaataaaatttcaattgacaaagttgctgcaactattgacataactgataaggatttaattaaatttggagatgataaggctaaaatctctcgatcattgattgaaaaactcaaaaaaaatgaagatggaaagctaatattagttactgcaatatctccaacaccagcaggtgagggtaaaactactacaagtgtagggttggtagacggcctatgtcacattggaaaaaaagcaatgatatgtttgagggagcctagcttgggcccatgttttggaatgaaaggaggagcagcaggcggtggttatgcacaagtaattcctatgacagatataaatcttcatttcacaggtgattttcacgcgataggtgcagcacataatcttctatctgctttaatagataaccatattcattgggataatcaattaaatattgatccaagaagaatcacatggaaaagggtcgttgatatgaatgatagatcttaa

SEQ ID NO: 315414 - DNA, 625 bp, Unknown
  Bacterial polypeptide expressing nucleotide sequence isolated from the Sargasso Sea
atgagtgatgttaaatcagatatccaaatagctagagaagcaaaaatgcagcctataaatgaggtattagcaaagataaatattccagatgagagtactgctttcagtccaatgggacgacacattgcaaaaattaacctggagtatttagacacattaaatgataaaccagaagggaaactaattttagtaactgcaattacacccacacctgctggtgaaggtaaaactactacttcagttggtttaaatgatggattaaataaaattggaaaaaaatctatagtttgcttaagagaaccaagtcttgggccttcatttgggatgaaaggtggtgctgctggaggaggttatgctcaagttgttccaatggagcaaattaatttacattttactggagattttcatgcaattacatcagctcataatttattatctgcattaatcgacaatcatatctattggggtaacaaattagatatagatgtaagacggattgtttggaaaagagttatggatatgaatgaccgttcattaagatcaataaatataaatttaggaggagtagcaaatggttttcctagggaagatggatttgatattaccgttgcttcagaaatcatgg

SEQ ID NO: 315415 - DNA, 496 bp, Unknown
  Bacterial polypeptide expressing nucleotide sequence isolated from the Sargasso Sea
aatggatttttgtaaaaatcttggagtagatatttctttgtgcactcattggtccaacggaggagaaggaacaaaagatttggcaaatactgttgtgcaaatatgcgaaaaaagtaagagcacatttaaatttttatatgaagataaaactccattgtttaagaaagttgaaacaattgcacaagaaatctatcatgctagagaagttgttgctgatacaaaaataagaagtcaattaaaagattttgaaagtaaaggatatgcggatcttccaatttgtgtagcaaaaacacaatatagtttctctacagatcctagtttaaaaggagctccaacaggacatgtacttcctataagagaagtaaaactttcatctggagcagagttcatcgtggttatttgtggagaaataatgactatgcccggactacccaaagtgccagcagctgactcaataaaaataaatgacaaaggtgaaacagaaggcttattttaa

SEQ ID NO: 315416 - DNA, 633 bp, Unknown
  Bacterial polypeptide expressing nucleotide sequence isolated from the Sargasso Sea
aatgagcacagtaaaatctgatattgaaatagctagaggtgcaaaaatgaagcccatacaagaagttcttaatgggttaaatgtacctgataaagcagaagtttatagtccaatgggaagatatattgcaaaaattaaacctgaatacctagacactctaaaaaataaaaaagatggaaaattaattttagttacagcgatcactccaactcctgctggggaaggaaaaacaacaacttctgttggtctctgcgatggcctaaataaaattggaaaaaaatcaatagtttgtcttagagaacctagtttgggtccttcttttggaatgaaaggaggtgctgcaggaggcggatatgcacaagtagttcctatggaacaaataaatttacattttactggggattttcatgcaattacttcagctcataatcttctttcagctttaattgataatcatatttattggggtaacaaactaaatatagatgtaagaagagttgtttggaaaagagtaatggatatgaatgatcgttcgttaagatctataaatattaatttaggaggtgtagcaaacggttaccctcgtgaagatggttttgatattacagtagcctcagaaataatggcaatctt

SEQ ID NO: 315417 - DNA, 167 bp, Unknown
  Bacterial polypeptide expressing nucleotide sequence isolated from the Sargasso Sea
taatgcaattcttgcaacgaaaacggctttaaaattatctgaatacgttgttacagaagctggttttggggctgaccttggtgctgaaaagtttttagacatcaagggtcgtaaagcagggatccaacctagctgcgtagttctggttgcaacaataagagctttaa

SEQ ID NO: 315418 - DNA, 511 bp, Unknown
  Bacterial polypeptide expressing nucleotide sequence isolated from the Sargasso Sea
atgactgcttatccaagtgatttagagatagcaaatgctgcacataaaaaatcaattgatgaaatagcttcagtactaaatattaatgaaaaaaatttaattaagtttggtgatgataaggctaaattaaattctgattttatagattctgtttcaaaaaatgaaaatggaaagttaattttggttacagcaatatctccaacaccagcaggagaaggaaaaactactacaagtgttggattagttgatggattatgtcacattggtaaaaaagcaatgatttgtttgagagaaccaagcttgggaccatgttttggtatgaagggaggtgcagccgggggtggatatgctcaagttattcctatgactgatatcaaccttcacttcacaggagattttcatgcaatagggacagctcataatcttctatctgcattgatcgataatcatattcattgggataacgaactaaatattgaccctagaagaataacctggaaacgcgttgttg

SEQ ID NO: 315419 - DNA, 739 bp, Unknown
  Bacterial polypeptide expressing nucleotide sequence isolated from the Sargasso Sea
ataaagtgtcgtaaagctggaatacaaccgaagtgcgtagttcttgttgcgactataagagctttaaaaatgcatggtggcgtagaaaaagataatcttaaattagaaaatttagatgcactcaaaaaaggtcttccaaacttaaagaggcatattgaaaatataaaaaaatttggcttagatcttgtggtcgctattaatcattttaaaacagatactgaagaagaagtaaaaattattgagaaatattgcaatgatttaaatgtacaagtaagcctttgcacccactgggctaatggtggaaaaggaacaaaagatttagcaaataaggttgttaagctttgcaatgaggcaaaaaaagcgaaatttaattttatttatgatgataaaatctcattattagagaagattgaaacagttgcgaataaaatttatagagcaagttcagttgaaataagtgatacaattaaagaacaattgtctaaacttgaacaagctggatattcaaaattcccaatatgtattgccaaaacacagtatagtttttctgttgacccaaaattaaaaggagcaccaactgattataagttggaagtgagagaaatcaggttatcaagtggagctgaatttatagtcgtggtatgtggttcggtaatgactatgcctgggttacctagagcgccagctgcagataagataagattaaatacaaaaggtgatgttgaaggactgttttaat

SEQ ID NO: 315420 - DNA, 766 bp, Unknown
  Bacterial polypeptide expressing nucleotide sequence isolated from the Sargasso Sea
gctgatttaggagctgaaaaatttttagatattaagtgtagaaaatctaatctaaaaccagattgcgtggttattgtagcaacaataagagcactaaaaatgcatggaggcgttgctaaagaagatttaaaaaaagaaaatgtatccgcactaaaagatggaatggtaaatttacgtagacatataaataatattagaaaatttggattacctgttactgttgcagttaatcattttattactgatacagaagatgaaatgaaaaacttattagatttttgtgaaacgcaaggagtgaaagcttctaaatgtacccattggtcaaatggaagtgaaggaactgttgaactagctaaaaatgttacagaaatttgtgaagataaaaaagatacatttaaatttttatatgaggatgatcttccgttattcaaaaaaatagaaaaaattgcacaagaaatttatagcgcctctgaagtggtagcggatacaaaagtgagacagcaattaaaagattttgaagaaaagggttacggtaagttacctgtttgtattgcaaaaacacaatatagtttttcaacagatccaaatttaaaaggtgcacccacaggtcatgttttgcctgtaagagaagtaagactttcttctggtgctgaatttatagttgttgtgtgtggagaaattatgacaatgccaggccttccaagagttcctgcagccgactctataaaattaaatgacaaaggtgaaatagaaggtttattctaaa

SEQ ID NO: 315421 - DNA, 759 bp, Unknown
  Bacterial polypeptide expressing nucleotide sequence isolated from the Sargasso Sea
accttggcgcagagaagttctttaatatcaaatgccgaaaggcaggcctcaagccggatgcggtggtgctggtggcaactgcccgcgccttaaagatgcacggtggggtcgccaaggccgatctcaacaccgagaacgtgggtgcgctggtagacggtcttgagaatcttggccgccaccttcgcaacatcgggcagttcggggtccccgctgtcgtggcgatcaacaagtttgtctcggacacgcccgctgagattgacgcgatccgcacctactgcaaggagtttggtgtcgaagtgttcgagtgcagtcactgggcggacggcggtgccgggacagaagagctcgcccagcatgtcgctactctcgctgattcctccaattcccagttccggccgctctatgacgatcatttgtcgttatgggagaaagtccggactgtggcgagatccatctacggcgccgaagacattattgcggacaaaaaagtccggagccagtttgaagacttcgaggagcgctacagccatttccccgtctgcatggcgaaaacgcagtacagcttctcaacggatccgaacctgctgggcgcaccaagcgggcatgtggtcccgatccgcgaactgcgactctctgcgggcgcggagttcgtggtcgcgatctgcggcgaaatcatgaccatgccagggctgcctcgagtgccggcggccaacagcattttcgtcaacgacgaaggtgagatagaaggattgttctagc

SEQ ID NO: 315422 - DNA, 903 bp, Unknown
  Bacterial polypeptide expressing nucleotide sequence isolated from the Sargasso Sea
tatggccgaagtaaaatctgacattcaaatagctcgagaagctaagatgcaacccataaaagacattctatctaaagttggtgtaccagatgaaaattttgcttttagtccaatgggtagacatatagctaaaataaatcttgaatatttaaatactcttaaaaaagaaaacggcaaactaattttagttactgctattacccccactccagctggtgaaggtaaaactacaacttcagttggtttaaatgacggtttaaataagattggaaaaaaatctattgtttgtttgagagagccaagtcttggtccatcttttggaatgaaaggaggggctgctggaggtggctacgcacaagtagtaccgatggaacaaatcaatcttcatttcactggtgactttcatgctattacatctgcacataacttattatctgcattaattgataatcatatctattggggcaacaagcttaacattgatgttagaagagttgtttggagaagagtaatggatatgaacgatagatccttaagatctattattgttgatctaggaggagtagctaatggttatccaagacaagatagttttgatatcactgttgcatctgaattaatggctattttttgtttagctacagacttaaaagatttagaaaatagaattggtaatattacgattggatataccagagataaacaatcgatttacgcaaaggatttaaatgcacaaggtccaatgactgttttgcttaaagaagcaataaggccaaatgtaactcaaactttggaaaataatccagcaataatccatggtggaccttttgcaaatatagctcatggatgtaattccgttattgcaacaaaagcgggtctaaaattatctgactatgttgtaac

SEQ ID NO: 315423 - DNA, 841 bp, Unknown
  Bacterial polypeptide expressing nucleotide sequence isolated from the Sargasso Sea
ttcatgtgccgattatgtggttaccgaggctggatttggagcagaaatgggtgctgagaaggctcttcagattaaagcgcaagctgctggaaaaataccagattgtctgattctaaatgtcacagtacgtgcgatgaagttgcatggaggtggattttctactggaggcggaaaaagaccgccaaaggaggaattagaaggagagaatgtcgaagccaccaggagcggagctacgacgaacctacgccggcatgtcctcaacctatcctcgactaatgttcccgtgatcgtgtccatcaatcgtttttccagcgacacagatgccgaattagaggctatacgcgaggaggcaattgccgctggtgcgagagatgtagtaatctttgaagggcatgcaaaaggcggagaaggtgcagtcaacctggctgatgctgtagtcgaggcttgtgcttctcatgatgccgcaggtcgtccttatgatccgattgtagagcctggaatgccagccgatcagacaattcttcgaattgcgactaaagtatacggcgcccatactgttgacttttcgcccgaagctatcaagaccctcgaatcattgcgagaatggggccttgagaatctgccagtatgcatggcgaaaactcagtattcattcagtcacaaacccacggagttgggtgctccaattggattcaccctgccaattcgtgagttgagactaaattcgggtgcaggattcatcgtcgcagtttgcggttccatgatgacaatgcctggtttaccggttcgtcctgcggcaatagacatggacatggacgatgacggccggctaactggcgta

SEQ ID NO: 315424 - DNA, 718 bp, Unknown
  Bacterial polypeptide expressing nucleotide sequence isolated from the Sargasso Sea
aaatttaaaaccgagttgtgttgttatagttgcaactataagagctttaaagatgcatggtggtgttgcaaaagatgatttaaaaaatgaaaatgttgaggcacttaagaaaggattgataaaccttgaaagacatattgaaaacgtaaaaaaatttggtttaccagtggccgtagccataaatcactttataaaagacacagataaagaggtaaatgctttagttgagttctgtaaaaagctaaaagtaaatgctagtatttgtaaacattgggctgatggtggtgagggaacaaaagatttagcaaaacatgtaacagatttatgtgagaagaatgaagctaaatttaaatttttatatgaaagtaaaactccccttttcaaaaagatagaaactatagcaaaagaaatttacagagcagatgaggttattgcagatacaaaaataagagatcaattaaaaaactttgaagaagctggatatggtgaattacccatatgtgttgcgaaaactcaatatagtttttcaacagatcctagtctaaaaggtgctccgacaggtcattctttgccaattagagagattagactttcatcaggtgcagaatttattgttgttgtctgtggagcaatcatgacaatgccaggacttccaagggtgcctgcggctgactccattaagcttaataaagatggtgatatagaaggtctattttaa

SEQ ID NO: 315425 - DNA, 772 bp, Unknown
  Bacterial polypeptide expressing nucleotide sequence isolated from the Sargasso Sea
tggagctgatcttggcgcagaaaaattcatggacatcaaatgcagaaagtcaaatttaaaacctagttgcatagttatagttgctacaatcagagcattaaaaatgcatggcggcgtagaaaaagaagatttaaaaaaagaaaatatagaagctttaaaaaaaggtttagtaaatttagaaagacatattaataatgtaaaaaagtttggtgtagaaactgtagtagcaataaatcattttgttatggacacagaaagcgaaataaaagttttaaaagaatattgtgatagtatcggtgtaaaagtaagcaaatgtacgcattggtctgatggtggagaaggaactaaagatttagcaaaaaaagttgttgaaattgctgaaaattcaaaacctgaaaattttaaatttttgtatgatgaaaacgatactttatggaaaaaaattgagaagattgctaaagaaatttataaagcaagcaacattgctgctgatgacaatattaaagagcagcttaaaacttttgaaaagaatggttacggtaaattacccgtttgtattgcaaaaacacaatatagtttttcagttgatccaaaacttaaaggagctccttctgatcatgaaattccaattagagaagtgagactttcttctggagcagaatttatagtagttgtctgtggatcaataatgacaatgccgggattacctagagtaccagccgccgattcaattaaattaaataataaaggtgaaatagaaggtttgttttaa

SEQ ID NO: 315426 - DNA, 310 bp, Unknown
  Bacterial polypeptide expressing nucleotide sequence isolated from the Sargasso Sea
atgccaagcatcccttcagatattgaaatttcacaaaatgcatcaatgaaacaaattccagaaattgcttcaatgctcgatattgaccttgatggacttgatctgtatgggaaatataaagcaaaaattgaaaatagtgtctgggagctagttaaagacaatccagacgggaaattaattttagttacagcaatcacacccacacctgcaggagaaggtaaaacatgcacttcaataggtttggcacaggcatttggtaagctcgggatcaagcacgcattggctctgccaatccagacgggaaattaat

SEQ ID NO: 315427 - DNA, 703 bp, Unknown
  Bacterial polypeptide expressing nucleotide sequence isolated from the Sargasso Sea
aatgggcaaaataaaatcagatattgaaatagctagagaagcaaaaatgaagcccattcaagaagtgcttaatgggctaaacgtacctgataaagcagaagtttatagtccaataggaagatacatagctaaaattaaaactgagtacttagatactttaaaaaataataaagatggaaaattaattttagttactgcaattacaccaactcctgcgggtgaaggaaaaacaacaacatcagttggtctaaatgatggtttaaataaaattggaaaaaaatcagttgtttgtctgagagaacctagcttaggaccttcttttggaatgaaaggtggagctgcaggtgggggatatgcacaagtggttccaatggaacaaataaatttacattttacaggagactttcatgcaataacatctgctcacaatcttctttctgctttaatagataatcatatctattggggtaataaattaaatattgatgttagaagaatagtttggaaaagagttatggatatgaatgatcgttcattgagatcaattgttgtagatcttgggggtgtggccaatggatatcctagacaggatggctttgatattacagtagcttctgaaataatggctatcttctgcttagcaaatgatttaacagatttagaaaatagaattggaaatattactatagcctatactagagat

SEQ ID NO: 315428 - DNA, 541 bp, Unknown
  Bacterial polypeptide expressing nucleotide sequence isolated from the Sargasso Sea
gattatcattttgcacttgatacatctaaagaagtaaagaccgttttaaatttttgtaaagataaaaaagttgaggtaagtgaatgtaaacactgggctaaaggtggaaagggcgcaagcgatctagcaaaaaaagttgtaaaaatttgtaaaaagaaaaaaagtaaatttaatttcttgtataaagataatcttaaattatgggataaaattgaattgattgcaaaaaaaatttacaaagctgataaaattactgcaagtaatgaggttatagatgaattggataaatttgaaaataatggacacgggcatttacctgtttgtatagctaagactcaatatagtttttctactgacccaaaacttaaaggtgctccatcaaatcatgaaataccaattagagaagtaagactatcatcaggagcagaatttgttgttatcatctgtgggtcagtaatgacaatgccaggactgccaaaagtacccgcagctaataaaattaaattaaataaaaaaggtgagatagaggggttgttttaat

SEQ ID NO: 315429 - DNA, 744 bp, Unknown
  Bacterial polypeptide expressing nucleotide sequence isolated from the Sargasso Sea
tcaaaaacagatatccaaattgcaagagaagcaaatatgaaaccaattcaagagattttggatggagttggtgttccagataatgctgaggcatatagtccaataagtagatacatagctaagatcaaactggaatatcttgaaacatttaaaaataaaaaagacggaaaattaatattagtcacagcaattactcctactccagctggagaaggaaaaacaaccacttcagtgggattgtcagatggattaaataaaataggtaaaaaatctattgtttgtttaagagagccaagcttaggtccttcatttggaatgaaaggtggtgcggctggtggtggttatgcacaagttgttcctatggaacaaataaatcttcatttcacaggtgactttcatgcaatcacttctgctcacaatcttttatctgctttaatagataaccatatttattggggtaataaattaaatattgatgtaagaagaatagtttggaaaagagtgcttgatatgaatgatagagcattaagatctatcaatattaatcttggtggtgttgcaaatggtttcccaagagaagatggttttgacattacggttgcatctgagataatggcgatcttttgtttatcaaatgatttacatgatcttgaaaatagaattggaaatataactgttgcttacactagagataaaaaaccaatttatgcaaaagatttaaatgcacatggtccaatgactgtt

SEQ ID NO: 315430 - DNA, 640 bp, Unknown
  Bacterial polypeptide expressing nucleotide sequence isolated from the Sargasso Sea
atgtcaaaatcagatatccaaattgcacgagaagcaaaaatgaaacccataaatgagattttgggtaaaattaatgttccagatgaaccaagtgcttttagccctatgggacgtcatattgctaaaataaatttagaatatttggatagtttaaaagataaacaaaatggaaaattaattttagttactgctattacaccaactcctgcaggtgagggaaaaaccactacgtcagttggtttaaatgatggattaaataaaatcggtaaaaattctatagtgtgtttacgtgaacctagtttaggtccttcgtttggaatgaaaggcggagcagcaggcggtggatatgctcaagttgttccaatggaacaaatcaatttacattttacgggggacttccatgcaattacatctgcacacaatttattgtcagcgttaattgataatcatatttattggggaaataaattaaacatagatgtaagacgagtagtttggagaagagttatggatatgaatgataggtctttaagatctatcaatattaatttaggtggagttgcaaatggttttccaagagaagatggttttgatattacagtagcatcagagataatggcaatcttttgtttagctaatg

SEQ ID NO: 315431 - DNA, 630 bp, Unknown
  Bacterial polypeptide expressing nucleotide sequence isolated from the Sargasso Sea
aatgggcaaaataaaatctgatattgaaatagctagagaagcaaaaatgaagcctgttcaagaagtgcttaatggactaaatgtacctgacaaacctgaggtctatagtccaataggaagatatattgctaaaattaaaactgagtacttagatactttaaaaaataaaaaagatggaaaattaattttagttactgcaataactccaactcctgctggtgaaggaaaaacaactacatctgttggcctaaacgatggtttaaataaaattggaaaaaaatcaattgtttgtcttcgtgagcctagtttaggaccttcttttggaatgaaaggtggagccgctggaggaggttatgctcaagtagttcccatggaacaaataaatttacattttacaggagattttcatgcaataacatcagctcataatcttctttctgctttaatagataatcatatctattggggtaataaattaaatattgatgtcagaagaattgtttggaaaagagttatggatatgaatgatcgctcattaagatcaattgttgtagatcttggtggagtggcaaatggatatcctagacaagacggctttgatattacagtagcttctgaaataatggcaat

SEQ ID NO: 315432 - DNA, 406 bp, Unknown
  Bacterial polypeptide expressing nucleotide sequence isolated from the Sargasso Sea
gatgttgttgaattatgtgaagaaaagagtgaatttaaatttctatacagcgatgatactcctttatttaaaaaaatagaggcaattgcaaaagaattatatggtgctagcgatgttgttgcggacactaaaattagagaacagcttaaaaattttcaggataatggatacaaaaaattaccaatctgtattgctaagacacaatatagtttttcaactgatccaaacataaaaggagctccatcaggacacgttcttccaattagagaagttagattatcatcgggtgcggaatttatagtagttgtatgtggagctataatgacaatgcctggtttacccaaagttccagcagcagattcaataagaataaatgaaaagggtgaaaccgaaggtttgttttaat

SEQ ID NO: 315433 - DNA, 881 bp, Unknown
  Bacterial polypeptide expressing nucleotide sequence isolated from the Sargasso Sea
aatgactgaagtaaaatcagatattcagatagcacgagaagctaaaatgcacccaataaaagacatattatcaaagataggtgtgcctgatgagaattttgcttttagtcccatgggtagacatattgcaaaaataaatctggaatatctagatactcttaaaaatgaaaacggtaaattaattttagttacagcaataacccctaccccagctggcgaaggtaaaacgacaacctcagttggtttaaatgatggtttaaataaaattggaaaaaaatctattgtttgcttaagagaaccaagtctgggaccttctttcggaatgaagggtggagctgctggtggtggttatgcacaagtagtaccaatggaacaaatcaatcttcattttactggagactttcatgctattacatctgcccacaatttattatccgctttaatagataatcatatttactggggtaacaaacttaatattgatgtaagaagagttgtttggagaagagtaatggatatgaatgatagatctttaagatctatcattgttgatttgggaggagtagctaatggttatccaagacaagatagtttcgatatcactgttgcgtctgaattaatggctattttctgtctagcaacagatctaaaagatttagaaaatagaattggtaatattacaattggttatacgagagacaaacaggcaatttatgcaaaagatttaaatgctcaaggtccaatgacagttttgcttaaagaggcaataagacctaatataactcaaactttagaaaacaatcctgcaataattcatggtggaccttttgcaaatattgcacatggttgtaactctgtgattgcaactaaggcaggattaa

SEQ ID NO: 315434 - DNA, 592 bp, Unknown
  Bacterial polypeptide expressing nucleotide sequence isolated from the Sargasso Sea
agaaagacatattaataatacgagaaaatttggtatacctgttacaattgctgtaaatcattttataacagatacagataaagagatgaaaacactgctggacttctgtaaaacacaaggtgtcaaagcatcaaaatgtacccattggtcaaatggaggagaaggtacaaaagagcttgctgaaaacgttgtagaaatttgtaaagataatcaatcaacatttaaatatttatatgaagacagtttaagtttattcaaaaaaatcgaaaaaatagctcaggaaatttatcatgccagtgaagtagttgctgatacaaaagtaagacaacagcttaaagattttgaggaaaaaggttatggaaaacttcctgtatgtattgcaaaaactcaatatagtttctctactgatccaagtttgaaaggtgctccaactggtcatgtgttaccagtgagggaagttcgtttatcatcaggagctgaatttgttgttgttgtatgtggagaaataatgacaatgccaggactgccaaaagtgcctgcagctgactctatcaagctcaacgataagggtgaaatagaaggtcttttttaa

SEQ ID NO: 315435 - DNA, 1101 bp, Unknown
  Bacterial polypeptide expressing nucleotide sequence isolated from the Sargasso Sea
tcgccatgaccacgtccctcgcggacatggagcaacgactcggcaacatggttgtcggtcccgatcgcgcgggcggtccggtgacgtgcgacgacttgggcgtcaccggcgcgctgatggcgctcatgcgcgacgccctcaagccgacgctcatgcaaacgctcgaggcgacgccggttctcgtgcacgcgggtccgttcgcgaacatcgcgagcggtaactcgtccatcatcgccgatcaaatcggtctctccatggtgggcaagggcggtttcgtcgtcaccgaagccggcttcggcgccgacatcggtctcgaaaagtttgtcaacttgaagtgccgcaagtctggcctgaagccgaactgcgccgtgatcgtcgccaccgtgcgcgcgctcaagtgtcacggcggaggtccgcccgtgaaggctggtcaacccctcgaccactcgtacacgacggaaaacgtcgacatggttcgcgagggcatgtgcaacttggtgcgacacattgaaaacaccaaggcgttcggtattccggtcgtcgtcgccatcaacgcgttcccgaccgatacggaggctgaacacgccgccatccgcgaattgtctctcgccgccggcgccgaggacgccgtcttgtgcacgcaccacgcgcgcggcggcgcgggcgccgtcgacctcgccgcggccgtcaaggcggcgtgcgagaagaacgaagactgcaaggacttcaagtttggttacgatctctctgccgacatcaagagcaagatcgaagccgtcgcgaagaatgtgtacaaggctggcgcggtagaattctccgagcaagccgaggaaaaaatcaagctctacaccgagcaaggtttcggtgaattgccgatttgcatggccaagacgcaatattctttctcccacgacctcaacttgaagggcgcgccgagtggattcacgttaccgatcggcgacgttcgcctgagcgcgggtgccggattcctcgtgccgctcgtcggcgcgttcccgaccattccgggtctcccgactcggccggcgtactacgagatctccgtcgacacggagtcggaacaaatcttgggtttgagctaga

SEQ ID NO: 315436 - DNA, 796 bp, Unknown
  Bacterial polypeptide expressing nucleotide sequence isolated from the Sargasso Sea
atgggcaaaataaaatccgatattgaaatagcaagagctgcaaaaatgaagcccattcaagatgtgcttaatgggctaaacgtaccagataaagctgaagtatatagtccaattggaaggtatatcgcaaaaattaaaactgaatatttagatactttaaaaaacaaaaaagatggaaagttaattttggttactgcaattactccaactcctgctggtgaaggaaaaacaacaacatcagttggtctaaacgatggtctaaataaaattggaaaaaaatcaattgtttgtcttcgagaacctagcttaggaccttcttttggaatgaaaggtggtgctgctggaggtggtttcgcacaagttgttcctatggaacaaataaatttgcattttactggggactttcacgcaataacatctgctcacaatcttctttctgctttaatagataatcatatctactggggtaacaaattaaatattgatgtcagaagaattgtttggaaaagagttatggacatgaatgatcgttctttaagatcaattgttgtagatcttggaggtgtggctaatggatatccaaggcaagatggttttgatattacagttgcttctgaaataatggctatcttctgcttagcaaatgatttaacagatttagaaaatagaattggaaatattactgtagcctatactagagataaaaaaccaatttatgcaaaagacttaaatgctcatgggccaatgactgttttactaaaagatgcaattagacctaatagacacaaacattaga

SEQ ID NO: 315437 - DNA, 700 bp, Unknown
  Bacterial polypeptide expressing nucleotide sequence isolated from the Sargasso Sea
tatgagtgcaataaaatcagacattcaaattgcaagagaagctaaaatgcaaccaatcaaagacattttagcaaaaataaatgttcctgatgaaagttctgccttcagccccatggggcgtcacatcgcaaaaataaatttagaataccttgatagtctcaagaataaaaaagagggaaaattaattttagttaccgcaataactcctactccagcaggggaaggaaagaccacaacttctgtaggtctcaatgatggtctcaataaaattggaaaaaaatctatcgtctgtttaagagaaccaagtttaggtccatcttttggaatgaaaggtggagctgctggtggtggctatgctcaagttgttcctatggaacaaattaatcttcatttcacaggtgactttcatgcaattacatctgcacataatcttttatctgcattgatagacaatcatatctattggggaaataaacttaatatagatgtaagaagaattgtttggaaaagagttctagatatgaatgatagagcattaagatcaattaatattaatcttggtggtgtcgctaatggattcccaagagaagatggttttgatattacagttgcttcagaaataatggctatcttttgcttagctaataatttggaagatttagaaaatagaattggaaatattactgttgcttacacatag

SEQ ID NO: 315438 - DNA, 658 bp, Unknown
  Bacterial polypeptide expressing nucleotide sequence isolated from the Sargasso Sea
aatgagtaaaataaagtcagatattcagatagcaagagaagctaaaatgcaaccaatcaaagatattttagctaaaattaatgttcccgacgaaagttctgcatttagcccgatggggcgtcatatagcaaaaatcaatttagaatatttagatagtttaaaaactaaaaaagatggaaagttaattcttgttacagcaataacgcctactccagcaggagaaggaaagacaacaacgtctgttggattgaacgatggtataaataaaattggaaaaaaatctatagtttgtttgagagaaccaagtttaggcccatcctttggaatgaaaggtggagcggctggaggaggttatgctcaagttgttccaatggaacaaattaatttacattttactggcgactttcatgcgattacatcagcacataatttactttcatcattgatagataaccatatttactggggaaataaacttaacatagatgttcgaagagtggtttggaaaagagtaatggatatgaatgatagatctttaagatcaataattgttgatcttggtggtgtagctaatggttatcctagacaagatggattcgatattacagttgcctctgaaataatggctatattttgcttagccacagatttaaatgat

SEQ ID NO: 315439 - DNA, 1372 bp, Unknown
  Bacterial polypeptide expressing nucleotide sequence isolated from the Sargasso Sea
gatgaacctgcacctcaccggcgattttcacgctctcaccgccgcccacaacctggcggcggcggccctcgatgcccgtctgttccatgagcgcaaactcggtgaccagttcagcgccagaaccggtttgcagcgcctcgatatcgatgcagacaacatcctctggccgcgcaccctcgacatgaacgaccgcgccctgcgccacctcacgattggacaggggggcgccgccgatggcgtcgagcgccaggatcgcttcgtcatcaccgccgcctccgagctgatggccattctggcgctggcgagcgatctgaaagacctgcgccagcgcatcggccgcatccagctggcccgcgacctgcgcggcaagcccatcaccgccgagcagctggaagtggcgggggccatgacggtgctgctcaaagaggccctgcagccgaccctgatgcagaccaccgagcagaccccggtactggtgcacgccggcccctttgccaacatcgcccacggcaactcctcggtgatcgccgatcgcatggccctcggcctcaccgattacgtggtgaccgaggcgggctttggctccgacatggggctggagaagttcttcaacatcaagcatcgccagtccggcatcacgccggcctgcgtggtgctggtagcgacggtgcgcggcctcaaggccaacagtggcctgctcgacattcgaccgggccagccgctgccggagagcctgctgcgcgaggatctgccgaccctcgagcagggctgtgccaacctcggctggcacatcgccaatgctcgccgctacggggtgccggtggtggtcgccatcaaccgcttccccaccgacagcgaagccgagctggccctgctggcccgcgaggcggcgcgagccggcgcttgtggcagcgccatctccagcgcctttgcccagggcggggccggtgccagcgagctggcccaggcggtggtggccgcctgtgagcagccaggcaaagtcaaactgctctaccccgacgagatgagcctcgacgccaagctggcaactctggtggagtgcggttatggtggccgcggggtgacgctgtcggacaaagcgcgccggcagctggcacaactctctgccgaggggtgggatcacttgccagtctgcgtggccaagacgccgctctccattagccatgatcccgccctcaagggggtgccaacggacttcgaggtgcccatcgaggaggtgaagctctgcgccggtgccggtttcgtctatgccctggcgggccccattatgaccatgccgggccttggcagcctgcctgcctaccgtcatatcgatatcgatgatgatggcgaaatagtcggcctgagctga

SEQ ID NO: 315440 - DNA, 625 bp, Unknown
  Bacterial polypeptide expressing nucleotide sequence isolated from the Sargasso Sea
atgctcaaagtaaaatctgatattgaaatagcaagagaagcgaaaatgaagcccattcaagaagtccttaatggactagatgtgcctgacaaagctgaagtctatagcccaataggaagatatatcgccaaaattaaaactgagtacttagatactttaaaaaataaaaaagacggaaaattaattttagttactgcaattactccaactcctgctggtgaaggaaaaacaactacatcagttggtctaaatgatggtttaaataaaattggaaaaaaatcaattgtatgtctacgagaacctagcttaggaccttcttttggaatgaaaggtggagctgctggaggtggttatgcacaagtagttcctatggaacaaataaatttacattttacaggagactttcatgcaataacctcagctcataatcttctttctgctttgatagataatcatatctattggggtaataaattaaacattgatgtcagaagaattgtttggaaaagagttatggacatgaatgatcgttcactgcgatcaattgtagtagatctaggaggtgtagcgaatggatatcctagacaggatggctttgatattacagtagcttctgaaataatgg

SEQ ID NO: 315441 - DNA, 817 bp, Unknown
  Bacterial polypeptide expressing nucleotide sequence isolated from the Sargasso Sea
atgtctgaatataaaacagatttagaaatagctagagaggctaacaaaaagccaataattgagctggctaaagaaaaattgtcaattagtgatcaggatttaattccttatggtcattacaaagcaaaaattagttctaattttttagataaagttgaaaacgaaaaagatggcaaattgattcttgttacagccatgacaccaactacagctggtgagggcaaaacaacaacctctgtgggactgaatgatggtttaaattatattggaaaaaaatcaatggttgccttgagggaaccaagtttaggaccatgttttggtatgaaaggtggtgccgctggaggaggatatgctcaggttgttccgatggaggatattaaccttcactttactggtgattttcatgccataacctctgctcatatgcttttatctgctatgatagataatcatgtttattggaatcttgaaccaaaaatagatcctagaagaataacatggagaagagtagtagatatgaatgatagagctcttcgatcaattattaattctcttggaggagttccaaatggttacccacgagaagatggttttgatattactgtcgcctcggaaataatggctattctttgtctctcaaaaaattttgaagatttaactcacagacttggaaagataattattggttacacaagagaactccaaccagtttattgtaaggatataaaagcagatggtgctatgtctgtacttttaaaagatgcccttcaacccaatttagtccaaactcttgagaataacccggcatttattcatg

SEQ ID NO: 315442 - DNA, 421 bp, Unknown
  Bacterial polypeptide expressing nucleotide sequence isolated from the Sargasso Sea
agaattagcagagacagttgtgaaagttatagatgaatctgagaacaattttaaatttttatatgaagatgatctagatttatggtcaaaaatggagacaattgctcaaaaaatttatggcgctaaaaacattacagctacttcagcagttaaaaaacaaattgatgagctacaaaagaatggatatgggaaatatcccgtatgtgtagctaaaacccaatattcattttcaacagatccgtccttaagaggagcgccttctgggcatgaaatttctattcgtgaagtcagattggccgctggtgcggaattcattgttatggtttgtggcgatattatgactatgcctggtctaccaaaagtacctgctgctgaaaagattgacttagatgacaaaggtaatgttactggattgttctaa

SEQ ID NO: 315443 - DNA, 790 bp, Unknown
  Bacterial polypeptide expressing nucleotide sequence isolated from the Sargasso Sea
acctgtttatgcaaaagacttgaaagcacacggtccaatgactgtattattaaaagatgcaatcagaccaaatgtaactcaaacattagaaaataatcctgcaattattcatggtggtccttttgcaaatattgcacatggatgtaactcggttatagcaactaaaactggattaaaactcgcagattatgttgtaacagaagctggttttggtgcagaccttggagcagaaaagtttttagatataaagtgcagaaaatctaacttaaaaccgagttgtgtagtcattgttgcaaccattagagctttaaaaatgcatggtggcgttgcaaaagatgacttaaaaaatgaaaatgttgaggctttaaaaaaaggcctagtcaatcttgagcgacacatagaaaatgttaaaaaatttggattacctgtagcaattgcggtaaatcattttattaaagatacagacagtgaagttaaagctttaattgatttttgtgatagcctaggagttaaagcaagtttatgcactcactgggcaaatggtggtgaaggaacaaaagaactagcagcacatgttgctgatttgtgtgaaaaaaaagatgctaagtttaattttctttatgaaagtaaaacgcctttgtttaaaaaaatagagacaattgctaaagaaatatacagagctgatgaagtaattgctgatacaaaaataagagatcaattaaaaagttttgaagaagctggatacggagaactacctatttgtgtagcaaaaacacaatacagttttcaa

SEQ ID NO: 315444 - DNA, 898 bp, Unknown
  Bacterial polypeptide expressing nucleotide sequence isolated from the Sargasso Sea
gtaattccaatggaagatattaatctacatttttctggtgacttcaatgcgatacagttagctaacaatctattagctgctatggttgataatcacatacaccatgggaactctcttaatatcgatgttagaagggttacttggaaacgtgtattagatatgaatgatagagctctcagaaaaacagtttgttctcttggatcaataggtaatggctatcctagagaggatggatttgatattgtggttgcatctgaagtaatggcaatattttgtcttgcgacatctttatcagatttaaagaaaagacttggtgatatagtcataggctacacaagagataaagagcctatattagctaaacagattaatgctcatggagctatgacagtactattgaaagatgcagtaatgcctaacttagtacaaacattagaaaataatccagcgatcatacatggaggaccatttgcaaatattgctcatggttgtaattccgttattgcaactaaagcgtcactaaaattagctgattatgttgtaactgaagctggttttggtgcagacttaggtgccgaaaaatttttagatataaaatgtagaaaggcaaacctaaagccttctgtcgtagtgctagttgcaactattagagcacttaaatatcatggaggttgtcctaaagaagactttagcaaagaagggtgcgattatcttaaaaaaggtttggttaatctagaaaaacacgttgaaaatttaaaagaccactatggtttaccagttgttgtaggtattaatggttttgcctcagatactgatgctgaaagaaaaatactacaagataaatcaagcgagttaaatgttccaatagtatcttcaacccatcatgcaaacggaggag

SEQ ID NO: 315445 - DNA, 861 bp, Unknown
  Bacterial polypeptide expressing nucleotide sequence isolated from the Sargasso Sea
attcgcaatattgcacatgggctgtaatacaagttgttgcaactaagcttgcattaaaacttgctgattatgttgttactgaagccggatttggagcagacctgggtgctgagaaattttttgatatcaagtgcagaaaatcaggtctcaaaccagacgcagttgttctggttgcaaccacaaaagctttaaaaatgcatggtggcgtgacaaaggataagcttggagcagagaatgtagatgcagttactaaaggttgtaagaatctcaaaagacacattgaaaatatcaagaagtttggtgttcctgtcatggttgcgatcaatgactatgtgaccgattcaaaagatgaacatgccgcgataattcaatattgtaaagaaattggtgttgagtgcagaatttcatctcactgggaaaaaggaggcaaaggtgcatcagaactagcagaagaggttgttaaaattgctgattctaattcttctgatttcaaacctttgtatgacaataaaatgtctctatgggataagacccaattcattgcaaaaaacatatatggtgcctcagaaatcattgcagataaaaaggtaagaaatcagtttaagaaattagaagatgatggatttggtgagtacccaatttgcatggcaaaaactcagtacagcttttcaacggacccattactgattggtgctccatcaggtcatgacgtcccagttcgagaagtaagactatctgctggcgctgagtttattgtggttgtttgcggtgaaattatgacaatgccaggcttgccaaggatacctgcatcagagggtatcgatgtagatgatgagggattgattcaaggacttttctaat

SEQ ID NO: 315446 - DNA, 817 bp, Unknown
  Bacterial polypeptide expressing nucleotide sequence isolated from the Sargasso Sea
aaaactggattaaaactcgcagactatgttgtaacagaagctggttttggtgcagaccttggagcagaaaagtttttagatataaagtgcagaaaatctaacttaaaaccgaattgtgtagtcattgttgcaaccattagagctttaaaaatgcatggtggcgttgcaaaagatgacttaaaaaatgaaaatgttgaggctttaaaaaaaggcctagtcaatcttgagcgacacatagaaaatgttaaaaaatttggattacctgtagcaattgcggtaaatcattttattaaagatacagacagtgaagttaaagctttaattgatttttgtgacagcctagaagttaaagcaagtttatgcactcactgggcaaatggtggtgaaggaacaaaagaactagcagcacatgttgctgatttgtgtgaaaaaaaagatgctaagtttaattttctttatgaaagtaaaacgcctttgtttaaaaaaatagagacaattgctaaagaaatatacagagctgatgaagtaattgccgatacaaaaataagagatcaattaaaaagttttgaagaagctggatacggagaactacctatttgtgtagcaaaaacacaatacagtttttcaactgatccaaatttgaaaggcgcaccaattggtcacgttttacctgtgagagaaataaaattatcgtcaggtgcagaatttattgttgttgtttgtggagcaattatgactatgccaggacttccacgtgttcctgcagcagactctataaagctaaatgaaaaaggtgaaatcgaaggattattctagg

SEQ ID NO: 315447 - DNA, 358 bp, Unknown
  Bacterial polypeptide expressing nucleotide sequence isolated from the Sargasso Sea
atctgaagtcatggcaattttttgtttggcaaatgatcttaaagatttggagcgacgtctaggaaatataaccattggctatactagaaataaaaaaccaattttcgcaaaagatctcaaagctgaagggcccatgactgtattattaaaacaagctcttatgcctaatctagttcaaactcttgaaaacaaccccgcgataatacatggcggaccatttgctaatattgctcatggttgtaatagtgtaattgcgacaaaaacaagtcttaaaattgcagattatgtagttactgaagctggtttcggagcagatctaggagcagaaaagtttcttgatattaaatgtagaaaagca

SEQ ID NO: 315448 - DNA, 844 bp, Unknown
  Bacterial polypeptide expressing nucleotide sequence isolated from the Sargasso Sea
attagagaagcctctttagggccatgttttggaatgaagggtggagctgctggcggtggttatgctcaagttattcctatggaagacatgaatttgcattttactggagactttcacgctatcacctcagctcacaatcttttatcagcaatgattgataaccatatctactggggaaacaaagagaatattgaccctagacgaataacttggagaagagttatcgatatgaatgatagagccttaagaaaagttattacctctttgggtggtgttcctaatgggtatccaagagaatctagttttgatattgttgctgcatcagaagtaatggcaatactatgtctttcaacaaattttaatgatttaaaatttagacttggaaacataattattggctatagatatgataaatcaccagtttttagtagggacatacatgcaaatgaggctatgtcagttctacttaaggatgctatattacctaaccttgtccagactctagaaaataatccagtcttcgtacatggtggtccttttgcgaatatagcacatggttgtaattcaatatcagctaccatcacagctcttcaaaattcagaatttgttgtaacagaagcaggttttggcgctgaccttggtgcagaaaagtttcttaacattaaatgtaggctagcaaatctacaaccagactgtgtggttattgtagccacggtaagagctttaaaaatgaatggtggagttaataaagaaaacttattaaatgaaaacctttctgcagttaaggaagggtgtcaaaacataaaaaggcatatagaaaatataaaaatttttggagttactc

SEQ ID NO: 315449 - DNA, 775 bp, Unknown
  Bacterial polypeptide expressing nucleotide sequence isolated from the Sargasso Sea
ttgtcttgcaactgatgctgatgatctgaagaaaagaattggaaatatagttataggttattcaagatctaatgaacccataagagcaaaacaattaaaggctgatggtgccttaagtgttttgcttcaagacgcatttcaaccaaatttggttcaaactctcgagaataatccagcatttattcatggaggtccttttgcaaacattgcacacggatgtaattctgtcgttgcaactaaaactgctcttaaacttgctgattatgttgtaacagaagcaggatttggtgcagatttgggggctgagaagttttttgacattaaatgtagaaaatctgacctaaaacctgatgctgtagttttagttgcaacaactaaagcgttaaaaatgcatggtggtgttaaaaaagaggatcttgcttcagagaatgttgacgcagtaataggtggttgtaagaatcttgagagacatgtaaaaaatattagaaaatttggggttcccgttatagttgggataaatgattatgtaactgatacagaaaatgagcatgctgccatcattgatttttgtaaaaatatgggagtggcttgcaaaatttcttcccattgggaaaagggcggcgaaggagcatcagatcttgcgaaagaggttgcaaaattggccgactcaggaacttctgaatttaagactttgtatgataatgagatgtctctatgggataaaactgaatatattgcccagaatatatatggagcctctgagataattgcagat

SEQ ID NO: 315450 - DNA, 1060 bp, Unknown
  Bacterial polypeptide expressing nucleotide sequence isolated from the Sargasso Sea
ttgggcccctcttttggaatgaaaggtggagctgctggaggaggatatgctcaagttgttcctatggagcaaattaacttacactttactggagactttcatgctattacatcagctcacaatttgttgtccgcgctcattgataatcatatatattggggtaataaactggaaattgatcctgaaaatattgtttggaaaagagtagtcgatttgaatgatagaagtttaagaaaaataaaaataaatttagaacaactgaaagctaatactccaagagatgatagttttgacattacagtcgcatcagaggtaatggctattttttgtttatctaatgatattaatgaattagaaagaaaaatcggaaatataacagttgcatatacaaaaagtaaaaaaccaatctacgcaaaagatttaaatgctcatggaccaatgactgtattattaaaagaggccataagacctaatgcagttcaaactttggaaaataatcttgcaattattcacggtggtccattcgctaatattgctcatggttgtaactcaattttagcgactaaaactgcattaaaattatctgagtatgtaattactgaagcagggttcggagcagatttgggtgctgaaaaatttttgaatataaagtgtcgtaaagctggaatacaaccgaaatgcgtggttcttgttgcgactataagagctttaaaaatgcatggaggtgtagaaaaagataatcttaaattagaaaatttagatgcacttaaaaaaggtcttccaaacttaaaaaggcatattgaaaatgtaaaaaaatttggtttagatcttgtggtcgcaattaatcattttaaaactgatactgaaaaagaagtgcaaattattgagaaatattgcaatgatttaaatgtgcaagttagcctttgcacccactgggctaatggaggaaaaggaacaaaagatttagcaaacaaggttgtcaagctttgcaatgaggcaaaaaaagcaaaatttaattttatttatgatgataaaatctcattattagagaagatgaaac

SEQ ID NO: 315451 - DNA, 943 bp, Unknown
  Bacterial polypeptide expressing nucleotide sequence isolated from the Sargasso Sea
aatgcctaaatctgatattgaaatagcaagagcggcaaatatgaaacctattaaggaaatccttgaggtattaaatgttccagatgatccgaaagcttttagcccaatgggcagacacattgccaaaattaatttagagtatcttgatcaacaaaaaagtacaaaagatggaaaattaattcttgttactgcaattacacctacgccagctggagaaggaaaaacaactacgtctgtaggtttaaatgacggtttaaataaaattggaaaaaaatcaattgtttgtctaagagaaccaagtttaggaccttcttttggaatgaaaggtggtgcagcaggtggtggatatgcacaagtagttcctatggaacaaattaatttacattttactggagactttcatgctattacgtctgctcacaatttattgtctgcgttaattgataatcatatttactggggcaacaaacttaatattgacgtgagaagagtagtttggaaaagagtaatggatatgaatgataggtcgcttagatcaatagttgttgatttaggaggtgttgcaaatggatatcctagacaagatgggtttgacataactgtggcgtctgagataatggcaatattttgccttgctaatgatttaaaagatttggaaaatcgaattggaaatataacaatagcttatactagagataaaaaacctatttatgcaaaagatttaaatgcccaaggtccaatgactgttcttttaaaagatgcaattagaccaaatgtaactcagacattagagaataatcctgcgattattcatggaggtccttttgcgaatattgctcatggatgtaattcggtaattgcaactaaagcaggtttaaaattagcagattttgttgttactgaagcaggttttggtgccgatcttggtgctgaaagtttttaa

SEQ ID NO: 315452 - DNA, 784 bp, Unknown
  Bacterial polypeptide expressing nucleotide sequence isolated from the Sargasso Sea
tgagcagggttcggtgcagaccttgggtgctgaaaaatttttagatattaaatgtagaaaggcaggattaaaacctagctgtgttgtaattgttgcaactataagagcattaaagatgcatggaggtgtagaaaaagaaaatcttaagaaagaagacaccaacgctttaataaaaggtttagtaaatttagaaagacatattttaaatattaaaaaatttggactaaaaccaatcgtagcaattaaccattttgccttagatacaaaaaaagagatagatgttgttcttaatttttgtaaaaatatgaatgtccaagttagtgaatgtaaacactgggcaatgggaggaaaagggacaactgaccttgctaaaaaggtagtcaaaacatgtaaagattcaaaaaaaagtaattttaaattattgtatgaagataatttaaatctttgggataaaattgaaaaaatcgttaaagaaatttatagaggcaatggaattattgcaaatgaagatataaaagaacagctaaaagtttttgagaataacggctacaagagtttacctgtttgtatagctaaaactcaatatagtttttcaacagatccaaagttaaaaggagctccatcaaatcatgaaattccaataagagaagtgagattgtcatctggagctgagtttgttgtagttgtttgtggatctattatgacaatgcctggtctacccaaagttcctgcggctaataatattaagctaaataaaaaaggtgaagttgagggacttttttaa

SEQ ID NO: 315453 - DNA, 731 bp, Unknown
  Bacterial polypeptide expressing nucleotide sequence isolated from the Sargasso Sea
tatgttaaaatcagacattgaaatcgcaagaaaagcaaaaactatttctattcaaaaagtaggaagcaaacttggtttaaaggaagagcatttgcttccgtatggaaatgataaagctaaaattagcgaaaaattcataaaatctgttcagaaaaataaaaatggaaaattaattctagtaacagcgattaatcctactccagcaggtgaagggaaaactacaactacagttgggcttggagatggacttaatgcactgggtaaaaaaacctcggtttgtattcgtgaagcttcccttggaccatgttttggtatgaaaggtggagctgctggtggtggtttatctcaagtaataccaatggaagatatgaatcttcattttacaggagattttcacgccattacaagtgctcacaatttactatcggctatgattgataatcatatatattggggtaataaggaaaaaatagacttaagaagagttgtttggagaagagttgtagatatgaatgatagagctcttcgtgatatagttactagtttaggaggagtttcaaatggagtacctaaacaaacaggatacgatattactgtagcctcagaggtgatggctatcttatgtttagcaaacgatttgcaagacttacaaagaagattaggagatataatagttgcttatagaagtgacaagagtccagtctactgtagagatattaaagctgatggtg

SEQ ID NO: 315454 - DNA, 859 bp, Unknown
  Bacterial polypeptide expressing nucleotide sequence isolated from the Sargasso Sea
tttactggtgattttaatgccattcagctagcaaataacttacttgctgctatgttagataatcacattcatcatggaaataaattaggaatagatgttcgaagagttacatggaaaagagttttggatatgaatgatcgagcattaagaaaaactgtctgttcacttggttctgttggtaatggttatcccagagaggatggctttgatattgtggtagcgtcagaaattatggctatattctgtttgtctacatcaattatggatttgaaagagaggctgggaaaaattgtcattgcatatacaagagacaaaaaacctatacttgcgaaagatattaatgcccatggagcaatgacagttcttctaaaggatgcattgatgcctaatcttgttcaaacacttgaaaataaccccgcaatgattcatggcggaccatttgctaatattgcacatggatgtaattcggtgattgcgacaaaagcatcactaaaacttgctgattatgtcgttacagaagccggttttggggctgacttaggtgcagagaagtttttagatattaaatgtagaaaagctaacctcaagccatctgtggtggtgcttgtagccacaataagagctctgaaatatcatggaggttgtgatttaaaagaactcaacaaagaaagtttagactatttagaaaaaggattagagaatctagaaagacatattcataatcttaagaataattttggtttgccagttgtagttgggattaatggtttttcttttgacacagaaaatgaaaaagatctattacaaaaaaaatctaaaggatatcgagtgccaattatatcatctacacattgggctg

SEQ ID NO: 315455 - DNA, 779 bp, Unknown
  Bacterial polypeptide expressing nucleotide sequence isolated from the Sargasso Sea
agaagctggttttggtgctgatctaggtgctgaaaaatttttcaatattaagtgtcgtaaatcaggtttgaagcctgatgcggttgtgcttgttgcaacaacaagagctttaaagatgcatggtgggctcagcaaagatgatctgaatacagaaaatcttaatgctctagataaaggtttatgtaacttagaacggcatattagaaatataaaactttttggagtaaatgttgtagttgcaattaacaaatttcattcagacacccaaaaagaatttgatttaataaagaattcttgttcaaaaaataatgtaaatgtatttgaatgtaatcattgggctgaaggaggagaaggaacagtagatcttgcaaatcatgttgttgaagtaactagtaaaaatgattcaggatttgtaactttatatcaagataaaatgagtttagttgataaagtaagaaaaatttgtaggaagatatattctgcagaagatattgtttttgatcagaaagttgagaaacaattcaaaaggttccaagaattgtatggtaatttcccaatttgcatggcaaaaactcaatacagtttttcaactgataataatcttctaggagctccagtaaaccataatatacctataagagaactaagactttctgctggagcagagtttatagtcgttgtttgtggagaaataatgaccatgcctggactaccaagaagtcctgcggctaatcaaatattcgttaatgatgaaggcaacattgaaggccttttctaat

SEQ ID NO: 315456 - DNA, 909 bp, Unknown
  Bacterial polypeptide expressing nucleotide sequence isolated from the Sargasso Sea
gaaccaagtcttggtccatcattcggaatgaagggtggagctgctggtggtggttatgcccaggtagtaccaatggaacaaatcaatcttcattttacaggtgactttcatgctatcacatccgcacacaatttgctttctgcattaattgataatcatatttattggggtaacaaacttaatatagacgtaagaagagttgtttggagaagagtaatggatatgaatgatagatctttgagatctattattgttgatcttggtggagtagccaatggttacccaagacaagatagttttgatattaccgttgcatctgaactaatggctattttttgcttagcaacagatttaaaggatttagaaaatagaattggtaatattacaattgggtatactagagataaacaatcgatttatgcaaaagatttgaacgcacaaggcccgatgactgttttgcttaaagaggcaataagaccaaatgtaactcaaactttagaaaataatccagcaataatacatggtggaccttttgcaaacatagctcatggatgtaattctgtgattgcaacaaaagcaggtctaaaattgtctgactatgttgtaacggaggctggatttggagctgatttaggagctgaaaaatttttaaatataaaatgtagaaaatcaggacttaaaccagactgtgtagttattgtagcaactattagagcacttaaaatgcatgggggagttaataaagaagatttaaaaaaagaaaatgtatctgcattaaaagatggattggtaaatttacgtagacatataaataatattagaaaatttggattacctgttaccgttgctgtaaatcattttattactgactcagaagatgaaatgaaaactttgttagatttttgtgaa

SEQ ID NO: 315457 - DNA, 721 bp, Unknown
  Bacterial polypeptide expressing nucleotide sequence isolated from the Sargasso Sea
atgagtaattatccaactgatttagaaatagcaaatgctgctcatataaaaccgattgaggaaattgcaaattcgttagatattaaccctgatgatctaataaggtacggaaatgataaggctaaattatcttctaagcttattaattctctatcaaaaaaagaaaatggtaagttaattttggtaactgctatatctccaacaccagctggagagggcaaaactaccacaagtgtaggcttggtagatggtctatgtcacattggaaaaaaagcaatgatttgcttaagagaaccaagtcttggcccttgttttgggatgaagggtggcgctgcgggtgggggtcatgctcaagtcatacctatgacagatataaaccttcatttcactggtgattttcatgctataggtgcagcccataaccttttatcagctttaattgataatcatattcattgggaaaataaattgaatattgatcctcgacgcatcacttggaaaagagttgttgatatgaatgataggtctcttagagatattacttgtggtttaggagggattggaaatggcattcctagacaaagcggctatgacatcactgttgcatctgaaataatggctgtattttgtcttgcttcagacattgatgatcttcaagaaagaattggaaatattgttattgggtatacaagagataaagaacctgtcagagccaagcaat

SEQ ID NO: 315458 - DNA, 907 bp, Unknown
  Bacterial polypeptide expressing nucleotide sequence isolated from the Sargasso Sea
aactgatatgaaaatagcaagagaagcaaaaatgaaccccatccagaaatttctggatggtattaatgtcccagacaaagctgaagtttatagtcctatgggaagatatattgcaaaaattaaaactgaatatttagagtctttaaaaaataaaaaaaatggaaaattaattttagttacagctataacacctacacctgctggggaaggaaaaactactacttcagttggtctgtgtgatggattaaataaaattggaaaaaaatcaattgtatgcttaagagaaccgagtttaggaccttcttttggaatgaaaggtggagcggctggaggtggttatgctcaagtagttccaatggaacaaattaatttacattttacaggtgattttcatgcaattacttcttcgcacaatttactgtctgctttaattgataatcatatttactggggaaataaattaaatattgacgttagaagaattgcttggaaaagagttatggatatgaatgatagatcattaagatctatagttgttgatctaggcggtattgcaaatggatatcctagacaagatggttttgatattacagtagcttctgaaataatggctattttttgcttagcaaaagatttaaaagatttagaaaatagaattggaaatattactataggatatactagagataaaaaaccaatttttgcaaaagatctaaatgcacaaggtccaatgacggttcttttaaaagatgcaattagaccaaatgtaactcaaactttagaaaataatccagcaataattcatggtggtccatttgcaaatattgctcatggatgcaattcagttatcgcaactaaaacagcattaaaactatccgattatgttatcactgaagctggatttgga

SEQ ID NO: 315459 - DNA, 772 bp, Unknown
  Bacterial polypeptide expressing nucleotide sequence isolated from the Sargasso Sea
aaacttaagaacaatataccaagggatgacaattttgatattacagttgcttctgaagtgatggctattttctgtttatcaaaaaatattaaagatttagaaaaaaaaattggtaatatcacagtcgcatatacaaaaaaaaatgaacctatttatgcaaaagatttaagagctgagggtcctatgtcagttttgttaaaagaagcaataagacctaatgcagtacaaacacttgaaaataatcttgctataattcacggaggtccttttgcaaatattgcacacggatgtaattctattcttgcaacaaaaactgctttgaagctatctgattatgtagttacagaagcaggatttggtgcggatcttggtgcagaaaaatttttaaacattaaatgccgtaaagcaaaaattcaaccaagttgtgttgtacttgttgctacaataagagcattgaaaatgcatggaggtctagaaaaagatgatctaaaaaaagaaaatttagaagcacttaaaaaaggtttgcctaatttagaaagacatatagaaaatataaaaaaatttggtttagaagttttggttgcaattaatcactttgttagtgataccgataaagaagttcagctaattaaagaatattgcaagaaactgggtgtcaaagttaatctttgtaagcattgggctgagggaagtagtggagcaaaaggtttagctgaaaacgtaatagaaatatgtaaaaatagtaacaaagaaaaatttaaatacttgtatg

SEQ ID NO: 315460 - DNA, 718 bp, Unknown
  Bacterial polypeptide expressing nucleotide sequence isolated from the Sargasso Sea
ggcttccctcgcgaggcaggctttgacatcacagttgcctcagaagttatggcaattctttgtttagccaaggatctgaatgatttgcagacaaaattgggcaatatgatagttgcctacaggcgtaatcgttctcctgttttttgccgtgatataaaagcagacggagcgatgacagtattgcttaaagatgccatcaaacctaatttggtgcagactttagaaaataatccagcttttgtgcatggagggccttttgccaatattgcgcatggatgcaattccttaatagcaactcaaacagcgcttaagttatctgactatgttgtaactgaggcaggatttggagccgacttaggcgctgagaaatttttgaatattaaatgtcgtaaggcgggtttgtcgccagcggttattgtactcgttgctactattcgtgctatgaaaatgaacggcggagtcgcaaaagaagatttagggcaagaaaatgtcagtgctgtaaagtctggctgtacaaatttaggttgtcatatagagaatttgaaaagttttggcgtaccggtaatcgtagccatcaatcatttcgtaaaagatactcagaacgaaattgacgcagtgatgcagtttgttacaagtcagggttcggaggctattgtttcgaaacattgggaatttggatcagagggttcaatagacttagccaatcgcgtctcagaaa

SEQ ID NO: 315461 - DNA, 772 bp, Unknown
  Bacterial polypeptide expressing nucleotide sequence isolated from the Sargasso Sea
gataatcatatctattggggaaataaattgaatatagatccagaaaatatcgtatggaaacgtgtagtagatttaaatgatcgtgctttaagatcagttaaaattaatttggataaattaaaaaataacattccaagaaacgatggttttgatattacagtagcatcagaagtaatggccattttttgtttatcaaataatcttgaagatttagaaaataaaataggtaatattacaattgcttatacaaaagataaaaaacctatttatgcgaaagacttaaaagcacaaggtccaatgacagtattattgaaagaggcgatcagaccaaatgtaactcagacattagaaaacaatcctgctataattcatggaggtccatttgctaatattgctcatggttgcaattcaataatagcaactaaaactgcattaaaattatctgaatatgttgtaactgaagctggttttggagctgatctcggtgcagaaaaatttttagatataaaatgtagaaaagcaggaattcaaccaaactgtgttgtgatagtagcaactataagagcgctgaaaatgcatggaggtgttgaaaaagaagatttgaaaaaagaaaatttagaagctcttaaaaaaggatttccaaacttagaaaaacatatcaataacgtaaaaaaatttggtttagaattagttgtagcaattaatcattttataactgatagccacaaagaagttaaactaattcaagaatattttcaaaacttggggtaaa

SEQ ID NO: 315462 - DNA, 865 bp, Unknown
  Bacterial polypeptide expressing nucleotide sequence isolated from the Sargasso Sea
gaaaagagtagtcgatatgaatgatagatcattgcgtgaaattacatgtgggcttggaggaaccggtaacggaataccaagacaaagtggatttgatattacggttgcatctgaaattatggctgtattttgtcttgcatctgatgctgacgatcttaagaaaagaataggcaatatagttataggttatacaagatctaatcaacctgtaaaagcaaaacagttaaaagctgatggggctataagtgcattgcttcaagacgcattccaaccaaatttagttcaaactctggagaataatccagcatttattcatgggggcccttttgcaaatattgctcacggttgtaattcagttgttgccacgaagacagctttaaaactagctgattatgttgtgacagaggcaggttttggtgcagatttgggagctgagaaattctttgatatcaaatgtagaaaatctggtttaaaacctgatgctgttgttttagttgcaacaactaaagcactaaaaatgcatggtggtattaaaaaagaggatctcggttcagagaatgttgatgcggtaaaaagcggttgtaagaatcttgagagacatataaaaaatattagaaaatttggagtgcccgtaatcgtaggaataaacgattatgtttctgatacagaaaatgaacataaggcaataattgatttttgtataaatatgggagtagcgtgcaaactttcttcacattgggaaaagggtggcgagggtgcagctgatcttgctaaagaggttgcaaaattggctgactcaggaatctctgaatttaagactctatatgataatcagatgtcgctttgggataaacagagtatatag

SEQ ID NO: 315463 - DNA, 877 bp, Unknown
  Bacterial polypeptide expressing nucleotide sequence isolated from the Sargasso Sea
ccggcacttatcatggtgggccgtttgcaatattgctcatggttgcaattcagtagttgctactaaaacagccctgaaacttgctgattacgttgtaacagaagctggttttggtgctgatctaggtgctgaaaagtttttcaatattaagtgtcgtaaatcaggtttgaggcctgatgcagttgtgcttgttgcaacaacaagagctttaaagatgcatggtggtctcagcaaagatgatctgaatacagaaaatcttaatgctcttgataaaggtttatgtaaccttgaacgacatattagaaatataaaactttttggagtaaatgttgtagttgcaattaacaaatttcatttagatacccaaaaagaatttgaattaataatgaattcctgttcaaaaaataatgtaaatgtatttgaatgtaatcattgggctgaaggaggagaaggaacaatagatcttgcaaatcatgttgttgaagtaactagtaaaaatgattcaggatttgtaactttgtatgaagataaaataagtttagttgaaaaagtaagaaaaatttgtagggaaatatattctgcagaagatattgtttttgatcagaaagttgagaaacaattcaaaagtttccaagaattatatggtgatttcccaatttgcatggcaaaaactcaatacagtttttcaactgataataatcttctaggagctccagtaaatcataatatacctataagagaactgagactttctgctggagcagagtttatagtcgttgtttgtggagaaataatgaccatgcctggactaccaagaagtcctgcggctaatcaaattttcgttaatgatgaaggcaacattgaaggccttttctaa

SEQ ID NO: 315464 - DNA, 883 bp, Unknown
  Bacterial polypeptide expressing nucleotide sequence isolated from the Sargasso Sea
agagacattacatgtggtctgggtggcactggtaatgggataccacgagagagtggtttcgacataacggtggcatcagaaataatggctgttttttgcttggcctccgatattaaggatcttcagaagagaattggcaatattgttataggctatacaaaatcaaatgaaccggtaagagctaatcaacttaaagcagatggcgccatcacagcattacttaaagacgcttttcaaccaaatttagtacaaactttagaaaataatccagcgttcatgcatggtggcccatttgcaaacatagctcatggttgtaattcagttgtttcaacaaagactgcattaaaacttgcagattatgtagtcactgaagctggatttggtgcagacctaggcgcagagaaattttttaatattaaatgcagaaaatcaggccttcaacctgatgcagttgttcttgttgcgaccacaaaagcacttaaaatgcatgggggtgtgaagaaagaagatttaggagaagaaaatgtcgatgcagttacattaggctgtaaaaatttagaaaagcatgttgaaaatataaataaatttggagttcctgttattgttgctatcaatgattatgtttctgatactaaaagggaacataatacgataataaatttctgtaaaaatcttggtattcaatgcaaaatttcttcacattgggaaaaaggtggcaaaggagcatcagagcttgctgaggaagttgctaaattagttgactcaaacatatctgagtttaagactttgtatgaagatgcaatgtctttatgggataagactaaatatgtcgctcaaaatatttatggagctcaagacattattgctgacaaacagagttaga

SEQ ID NO: 315465 - DNA, 700 bp, Unknown
  Bacterial polypeptide expressing nucleotide sequence isolated from the Sargasso Sea
atgagtgattattcaactgatttagaaatagctaatgctgctcacaaaaaacctattgaagaaatagcagatttattagatatcgactctgatgatctaataagatatggaaatgataaggctaaattatctacaaaggcagttaattctttatcaaaaaaagaaaatggtaagttaatcttagtaactgccatatctccaacgcctgctggagagggtaaaacaaccaccagcgtaggtttagtagatggcctatgtcacattggaaaaaaagcaatgatatgtctaagagaaccaagcctaggaccatgttttggtatgaaaggcggtgctgcaggtggtggtcatgctcaggtgatacctatgactgatattaaccttcatttcacaggtgattttcatgccataggtgcagctcataatcttttatctgcattaattgataaccatattcattgggaaaacaaattaaatattgatcctcgacgtataacttggaagagagttgttgatatgaatgatagatctttaagagatattacatgtggtttgggaggaattggaaatggtattcccagacaaagtggttatgatataactgttgcatctgaaataatggctgtattttgtcttgcttcagatatcgatgatcttcagaaaagaattggaaatattgttattgggtataccagagacagag

SEQ ID NO: 315466 - DNA, 872 bp, Unknown
  Bacterial polypeptide expressing nucleotide sequence isolated from the Sargasso Sea
atattggggcaatgagctagatattgacacacgtcgcgtcgtttggcggagagttgtcgatatgaatgatcgagcgctgcgccaaattaccgcgtcactcggtggtgtctctaatggattcccgcgtgaggctggttttgacatcactgtggcatctgaggtcatggcaatattgtgtttggcagaagatcttgctgacttgcaaaagcgccttggtgatatgattgtcgcatatcgtcgtgaccggtcccccgtcttctgccgcgatataaaggctgacggcgcgatgactgtgttattgaaagatgcaattcagcctaatctgttgcaaacccttgaaaataatcccgcatttgttcacggtggcccttttgccaatattgctcacggctgtaactccgtaattgctactaaaacagcgttgaagctcgcggagtatgttgtgacagaggcaggttttggagcggatttaggagcggaaaagttcctaaacatcaaatgccgaaaggcgggcttgtctccatcggctgtcgttctagtcgccacagtgcgtgcgatgaagatgaatggcggcgtcgaaaaaaatgatttgaacaacgaaaatgttgcggctgttaaagctggttgcccaaatcttggccgacacatagagaacttgagattatttggcgtgcctgtactggttgcgattaaccactttgttaaagataccgacgctgaggttcaggccatacaaaattattgcagtaaaatgggcgcagaggcaattgtctcaaagcactggtctgatgggtctgctggttctgaaaatttggcgaaaagagtagctgaagttgctgatgcgggtgaagctaatttctcaccaatttatc

SEQ ID NO: 315467 - DNA, 415 bp, Unknown
  Bacterial polypeptide expressing nucleotide sequence isolated from the Sargasso Sea
aatgagcagtgatattgaaatagcaagaaaagcaaacatggaaccaattttggatattggagctaagttagatattcctttcaaagcacttagaccatttgggcattttaaggcaaaattatcaccaacatggctacaaaacaaatcaaagaaaaaaaatgctaaattaattttagttaccgcaattaatcccacaccggcaggagagggcaaaaccaccacttcagttggtttgaatgatggtttaaatgcaattggaaaaaaatctatagtttgtcttagagagccatctcttggcccttgttttggtatgaaaggaggtgcagctgggggaggatatgctcaagttgtacctatggaagacattaacctacatttcacgggtgattttcacgctattacatcagcacataat

SEQ ID NO: 315468 - DNA, 961 bp, Unknown
  Bacterial polypeptide expressing nucleotide sequence isolated from the Sargasso Sea
agaggggcacaggcgggtggttattcccagtttcttcccatggaagatattaatttgcattcaccaggggatttttcagcaattgaaaaagcacataatttactgtcagcaattgtagacaataacattcagtcaaaaacaaattcattgggaattgactctagaacagtaacatggaaaagggtgatggacatgaatgatcgttcgcttagaaatattgtcgttggtcttggggggcctacatctggagtcccaagagaaacaggatttgatattactgctgcctctgaaataatggccattttatgtttgtcaaatgatttggctgacttaaaaacaagacttggaaatatttttattggttatacctttaaaaaagagccaatttattgcagagatttaaaggtggaaggagcaatggctgcacttcttaaagatgctgttaagccaaacctcgttcaaaccatagaaggaaatccagcaataattcatggaggaccatttgcaaatattgctcagggaaccaattctgttttggcaactaaaatggggatgactctttcagattatacggttacggaagcaggctttggtgctgatttgggagcagaaaagtttttagacattaaatgtcaaagcgcaggattaactcctaaagcagttgtggtaaccacaacaattagagctcttaaataccatggtggcgctgatttaaaatcattaaccaccgaaaatgtagatgccttaaaaaagggcattcctaatttggaaaaacaccttgaaaacatccagcaatttaatttggttccaattatttctatcaataggtttgtttctgattcagatgaggaaattgaaactataattcaatttgccaaagacaataacattagagtttccttagctgaggtatgggcaaaaggcggaaagggctctgttgatcttgctaaacaagtagtga

SEQ ID NO: 315469 - DNA, 928 bp, Unknown
  Bacterial polypeptide expressing nucleotide sequence isolated from the Sargasso Sea
aaagttgcttcaaaacttgatttaaaagaagaaaatcttagaccttatggtcaccatatcgcaaaaattgatatgtcttcaattaataaactgcaagaaaaaaaatcaaaactaattttggttacagctataactccaacccctgcaggagaaggtaagacaacaacctctgttggacttagtgatggattgtgtaaaattggaaaaaagagtcttgtatgtttaagggagccaagcttaggtcctagttttgggatgaaaggtggtgctgcaggtggtggacatgcacaggttatacctatggagcatattaatttacattttactggcgactttcacgcaataacatcagctaataacttacttgcttcattaattgacaatcatatttattggggaaataaactgggaatagatacaagaagagttttatggaaaagatgcttagacctaaatgatagagctcttagggaaataactgccaatttaggaggtatatcaaatggatatccaagattagatggcttcaatataacagttgcttctgaagtaatggcaatattttgtttagcgaaagatttgaaagatctagaaagaagattaggtaatataactattgcatatactagagataaaaaaccaatttatgcaaaagacttgaaagcacaaggtccaatgacagttcttctaaagcaagctttaatgccaaacttggtccaaaccttagaaaataatccagcaataattcatggtggaccttttgcaaatattgctcatggttgtaatagtgttattgctacaaaagctagtcttaaaatatctgactatgttgttacagaagctggatttggtgccgatcttggtgctgagaaatttttaaatattaaatgtcgaaaagcaggttggaaccaaatgcggttgttttagt

SEQ ID NO: 315470 - DNA, 763 bp, Unknown
  Bacterial polypeptide expressing nucleotide sequence isolated from the Sargasso Sea
caggtcgttccgatggaggaaatgaacctgcactttacgggggatttccacgcgatcaccacggcgcacaacctgctgagcgcgatgatcgacaaccatatctactggggcaacgaactggcgatcgacgaacgtcgcgttgtctggcgtcgtgttctggacatgaacgaccgcgctctgcgcgataccgtcacgtcgcttggcggtgtggccaacggtttcccgcgccagaccgggttcgatattaccgtcgcctccgaggtcatggcgatcctgtgcctcgcaaccgatctggacgatcttcagcgccgtttgggcgatatcatcgttgcctatacgcgcaagaaagagccgatcacctgccgcgatattcaggccgatggtgcaatgacggtgctgctcaaagatgcgatgcagcccaacctggtgcagacgctggaaaacaaccctgccttcgtccacggtggcccgttcgccaacatcgcgcatggctgcaactcggtcatggcgacgactacggcgctgaaaatcgctgactacgtcgtgaccgaagcaggtttcggggccgatctgggcgccgagaagttcatgaacatcaagtgtcgcaaggccggccttgccccctcggtggtggtagtcgtggccacggtgcgtgcgatgaagatgaacggtggcgtcgccaaggccgatctgggtggagagaatgtcgacgcggtcaagaaggggtgcccgaacctgggccgtcatatcgagaacgtcaaat

SEQ ID NO: 315471 - DNA, 718 bp, Unknown
  Bacterial polypeptide expressing nucleotide sequence isolated from the Sargasso Sea
atgactgtctatttaagtgatttagagatagcaaatgctgcacataaaaaaccaattaatgagatagcttcaatactagatattgatgaaaaaaatttaattaaatttggtgacgataaagcaaaattaaattctgattttatagattctgtttcaaaaaatgaaaatggaaaattaattttggttacagcaatatctccaacaccagcaggagaaggtaaaactactacaagtgttggactagttgatggattatgccacattggtaaaaaagcaatgatttgtctgagagaaccaagcttgggaccatgttttggtatgaagggtggggcagctggaggtggttatgctcaagttattccgatgactgatattaatcttcacttcacaggagattttcatgcaatcggggcagcccataaccttttatctgcattaatcgataatcatattcattgggacaatgagctaaatattgatcctagaagaataacctggaaacgtgttgtggatatgaatgataggtctttaagggatattacatgtggtcttggaggcacaggtaatggaataccccgacaaagtggatttgatatcactgttgcatcagagataatggcggtattttgcttagcctctgatattgaggatcttcaaaagagaattggtaatattgttattggctatacaaagtcaaatgaaccggttagagcaagcc

SEQ ID NO: 315472 - DNA, 772 bp, Unknown
  Bacterial polypeptide expressing nucleotide sequence isolated from the Sargasso Sea
gacgaaccaagtgcttttagccctatgggacgtcatattgcaaaaataaatttagaatatttagatagtttgaaagacaaacaaaatggaaaattaattttagttactgctattacaccaactcctgctggtgagggaaagacaactacgtcagttggtttaaatgatggattaaataaaattggtaaaaattctatagtgtgtttacgtgaacctagtttaggtccttcatttggaatgaaaggtggagcagcaggtggtggatatgctcaagttgttccaatggaacaaatcaatttacattttacaggagacttccatgcaattacatctgctcacaatttattgtcagcgttaattgataatcatatttattggggaaataaattcaacatagatgtgagaagagtagtttggagaagagttatggatatgaatgatagatctttaagatctataaatattaatttaggtggagtagctaatggttttccaagagaagatggttttgatattacagtagcatctgagataatggctatcttttgtttagcaaatgatcttgaagatttggaaaagagaataggtaatattacagttgcttatactagagatagaaagcctatttttgcaaaagatttaaatgctcatggaccaatgactgttttgttaaaagaagcaatcaggcctaatgtaactcaaacgttagaaaataatcctgccattattcatggtggtccttttgcaaacattgcgcacggttgtaactctg

SEQ ID NO: 315473 - DNA, 835 bp, Unknown
  Bacterial polypeptide expressing nucleotide sequence isolated from the Sargasso Sea
catttaaatgtacctgacagtccagaagcctacagtcctatgggaaggcatattgcaaaaattaatttggagtatcttgaaaaacataaggataaaaaagatggaaaactaattcttgtaacagcaatcactccaactcctgcaggcgaaggtaaaactacaacttctgttggattaaatgatggattaagtaaaattggaaaaaaatcgatagtatgtctaagggaaccaagtttaggtccttcctttgggatgaaaggtggtgcagctggtggtgggtatgcacaagttgttccaatggagcaaatcaatttacattttactggagattttcatgcgatcacgtcagcgcataatttattatctgcacttatagacaaccatatttattggggaaacaaacttaatatagatgttaggagaattacctggagaagagttgtagacatgaatgacagagctttaagatcaattaatgttaaccttggaggtatcgcaaatggatttccaagagaagacggttttgacataacagttgcgtctgaaattatggctatcttttgtctagcaaatgatcttgatgacttagaaaaaagaattggaaatattacaattggatatactagagataaaaaaccaatatatgcaaaagatctaaatgcacatggtgcaatgtctgttttattaaaagaagctattagaccaaatatcactcaaactttggaaaataatccagcaattattcatggaggaccatttgcaaatattgctcatggttgtaattcagttattgcaactaaggcaggattaaaattagctgattatgtgttacgga

SEQ ID NO: 315474 - DNA, 883 bp, Unknown
  Bacterial polypeptide expressing nucleotide sequence isolated from the Sargasso Sea
gccgatggcgcaatcactgctttgttaaaagacgcattccaaccaaatttagtacaaacacttgaaaataatccagcatttatacacggtggaccattcgcaaatattgcacatggttgcaatacagttgttgcaactaagcttgcattaaaactcgctgattatgttgttaccgaagccggatttggagcagacctgggtgctgagaaattttttgatatcaagtgcagaaaatcaggtctcaaaccagacgcagttgttctggttgcaaccacaaaagctttaaaaatgcatggtggtgtgacaaaggataaccttagagcagagaatgtagatgcagtaaccaaaggctgcaagaacctcaaaagacacattgaaaatatcaagaagtttggagtccctgtcatggttgcgattaatgactatgtgaccgatacaaaagatgaacatgctgcgataattcaatattgcaaagaaattggtattgagtgcagaatctcatctcactgggaaaaaggaggtaaaggtgcttcagatctagcagaagaggttgttaaaattgctgattctaattcttctgatttcaagcctttatatgacaataaaatgtctctgtgggataagacccaattcattgctcaaaacatatatggtgcctcagaaatcattgcggataaaaaagtaagaaatcagtttaaaaaattagaagacgatggatttggtgagtacccaatttgcatggcaaaaactcagtatagcttttcaacagacccattactgatgggtgctccatcaggtcatgacgtcccagttcgagaagtaagactatctgctggtgctgaatttattgtggttgtttgcggtgagattatgacaatgcctg

SEQ ID NO: 315475 - DNA, 859 bp, Unknown
  Bacterial polypeptide expressing nucleotide sequence isolated from the Sargasso Sea
aaactaaaaaataatattccaagaaatgatggttttgatatcaccgttgcatcagaagttatggcaattttctgtttatcaaataatcttgaagatttagaaaataaaatagctaatattacaattgcttatacaaaagatagaaaacctatatatgcaaaagatctgaatgcacaaggtcctatgactgttttgcttaaagaagcaataagaccaaatgtaactcaaactttagaaaataatcccgctataattcatggtggcccattcgctaatattgcccatggatgtaattcaataattgcaactaaaactgcattaaaactttctgattatgttgtaacagaagcaggttttggcgcagacctgggagccgaaaaatttttagatataaaatgcagaaaagcaggaattcaaccaaactgtgttgtaatcgtagctactattagagcattaaaaatgcatggaggtgttgaaaaagatgatttaaaaaaagaaaatttagatgctcttaaaaagggattaccaaacttagagaggcacattaataacgtaaaaaaatttggtatagaattggttgttgcaattaatcattttattacagacacaaataaagaagttaaattaattcaagaatattgttccaagcttggtgtaaaggtaagtctttgcacacactggtctgatggtggtaaaggtactgaagatttggcaaaaaatgtcgtggagtcttgtaaaaaaaataataaagataaatttaaatatatatataaggatgatatgccaattttaaaaaaagttgaaaccattgcaaaagaagtttacggagcaagcggaatagagatcgatgataaagctc

SEQ ID NO: 315476 - DNA, 785 bp, Unknown
  Bacterial polypeptide expressing nucleotide sequence isolated from the Sargasso Sea
tgaagcagggttcggtgcagatcttggtgctgaaaaatttttagatattaaatgtagaaaggctggattaaaaccaagttgtgttgtaattgttgcaactattagagcattaaagatgcatggaggtgtggaaaaagaaaatcttaaaaaagaagactccgactctttaaaaaaaggtttagtcaatttagaaaggcatattttaaatattaagaaatttggattagaaccaattgtagcaattaaccattttgctttagatacaaaaaaagagataaacggtgttcttaatttttgtaagaatatgaatgtccaggttagtgaatgtaaacactgggcaatgggaggaaaaggtacaactgacctagctaaaaaggtagttaaaacatgtaaagattcaaaaaaaagtagtttcaaacttttgtacgaagatgatttaaatctttgggataaaattgaaaaaatcgtcaaagaaatttacagaggcaatggaattactgcaaacgaagatgtaaaagaacaacttaaggtttttgaaaataacggctacaaaagtttacctgtttgtatagctaaaacccaatatagtttttcaacagatcctaaattaaaaggggctccgtcaaatcatgaaattccaataagagaagtaagactatcatcaggggctgagtttattgttgtagtttgtggatctattatgactatgcctggcctccccaaagttcctgcagctaataatattaagttgaacaaaaaaggcgacgtcgagggactattttagt

SEQ ID NO: 315477 - DNA, 898 bp, Unknown
  Bacterial polypeptide expressing nucleotide sequence isolated from the Sargasso Sea
actaagagttccagataaaccagaagcgtttagccccatgggtagacatattgccaaaataaattttgaatatcttaaaagattaaaaaataaaaaagaaggtaaattaattttagtcactgcaatttcaccaactccagctggtgaaggaaaaacaactacttctgtaggtttatcagatggcataaataaaattggaaaaaaaagtatagtatgtttaagagagcctagcttgggaccatctttcggaatgaaaggaggtgcggcaggaggtggttatgcgcaagtagttccaatggaacaaatcaatcttcattttacaggagattttcatgcaataacttctgcacataatttattatctgctcttatagataatcatatttattggggtaataaattaaatattgatgaaaaccgtattgtttggaaaagagtattagatatgaatgatagagctttacgatttataaatattaatacaaaaggtgtggccaaaaattacttaagacaagatggttttgatattacagtggcctctgaagttatggcaatcttttgtttggcaaatgatttaaaagatttagaaaatagaattgggaatataacaattgcatacaataagcaaaataagccaatttatgcaaaagatttaaatgctcatggacccatgaccgtacttttaaaagaagctctcagacctaatgtaactcaaactctagaacataaccctgctataattcacggtggtccatttgcaaatattgctcatggttgtaattctgtgatagctaccaaaaccgctttgaagttatcagattatgtagtcacagaggctggttttggagctgatttaggggctgaaaaatttttaaatataaaatgtagaaaatcaaaa

SEQ ID NO: 315478 - DNA, 337 bp, Unknown
  Bacterial polypeptide expressing nucleotide sequence isolated from the Sargasso Sea
atgagtgacattgaaattgcacgtgcggcgcaaaaaaagccgatttttgaaattggtgatgttcttggcataccgtcatcggaacttgttccgtttggccatgacaaagccaaaataagtcaaaattttattaactctgttcagaaaaatgcagaaggaaagcttatattagtaaccgctattaatccgacaccagccggcgaaggtaagactacgacaactgtcggtcttggtgatggcttgaataggattggcaagaaggcaatgatttgtatacgtgaggcgtctttggggccaaactttggtatgaagggtggtgctgctggcggtgggtatg

SEQ ID NO: 315479 - DNA, 916 bp, Unknown
  Bacterial polypeptide expressing nucleotide sequence isolated from the Sargasso Sea
catgacagttcttttgaaggaggcactccagcccaatttagtacaaactttagaaaataatccagctttcattcacggtggtccttttgcaaatatcgctcatggatgtaattctgttgttgcaacacgtgcaggtctagaattaggtgattatgtaatcactgaagctggttttggtgctgatttaggggcagagaaatttttaaatataaaatgcaggaaagccaatctgaagcctgatgcagttgtaattgtcgctacaataagggcattaaaaatgaatggtggcattccaaaagatcagctatcaaaagaaaacgtaggtgcacttgaaaaaggttctatcaatcttcttaggcatatagaaaatattaagaaatttaatttacccgtgattgtcggcattaaccactttgtctcagatactaacaatgaggttgaaaaactacttgatatagtgtcttcatctggatcagaagctatagtatgtaagcattggtctgatggatcagaaggaacaaaacagttagcacaaaaagtagttggaatatgtgactcaaattctgcagactttcaacccctttatagagatgatctccctcttatcgataaaataaaatgtgtagctacagagatatacagggccgcagatatttctgctgataaaaaaataattaatcaattaaatgactgggaaaaagcaggctatggaaatcttccaatatgtatggctaaaacacaatattcattctctgctgacccaaatttacttggtgctccagaagggcacattataccaataagagaagttaggctatctgctggtgctggttttatagttgtgatatgtggcgatataatgactatgccaggattaccaagtgtaccagcagctgagaaaattcatattgataaa

SEQ ID NO: 315480 - DNA, 895 bp, Unknown
  Bacterial polypeptide expressing nucleotide sequence isolated from the Sargasso Sea
ttgcttcagaaaaactttcccattgatgagagtaacttggttccatttggacattacaaggcaaagcttagctcagaatacgtcaataaattagaatcaaaggatgacggaaagttaattttagtaacggcgatgaccccaaccacagctggagaagggaaaacaacaacttctgttggacttactgatggattgaattatataggaaaaaaagccatggttgctcttagagaaccgagtttaggtccttgttttggaatgaaaggtggagctgcaggaggaggatatgctcaggttgttcctatggaagacattaatcttcactttacaggtgattttcacgcaattacttctgctcatatgcttctatcggcaatggttgataatcatatttactggaacttagaaccaagaatagacagtagaagggtcacgtggagaagagttgtggatatgaacgacagggcattgcgctcaatcacaaattctcttggaggtatatctaatggtttttcgagagaagatggctttgatattacagttgcttctgaagttatggcaatcttatgtttatccaaaaattttgatgatttaacctctagattaggaaaaataatagttggatattctagagatcttgagccgatattatgtaaagatgttaaagcggatggagccatgtcagttttgctaaaagatgcgttgcaacccaatcttgttcagactcttgaaaataaccccgcttttattcacggtggtccatttgcaaatatagctcatggttgtaatactgtgattgcaactaagacagctcttaaactaactgattatgttgttactgaggcaggttttggagcagatcttggtgcagaaaaatttttaaacattaagtgca

SEQ ID NO: 315481 - DNA, 871 bp, Unknown
  Bacterial polypeptide expressing nucleotide sequence isolated from the Sargasso Sea
gctcgagaagcaaaaatgcagcatataaatgaggtattagcaaagataaatgttccagatgagagtactgctttcagtccaatgggacgacacattgcaaaaattaatctggagtatttagacacattaaaagataaaccagaaggaaaactaattttagtcactgcaattacacctacacctgctggtgaaggaaaaaccactacttcagttggtttaaatgatggattaaataaaattggaaaaaaatctatagtctgtttaagagaaccaagtcttggtccttcatttgggatgaagggtggtgctgctggaggaggttatgctcaagttgttccaatggaacaaattaatttacattttactggagattttcatgcaattacttcagctcataatttattatcagcattaatcgacaatcatatctattggggaaacaaattagatatagatgtaagacggattgtttggaaaagagtaatggatatgaacgaccgttccttaagatcaataaatataaatttagggggagtagcaaatggttttcctagagaggacggatttgatattactgttgcttcagaaatcatggcaattttctgcttatcaaatgatttggaggatctagaaaaaagaattggtaatataacaattgcttataccagagataagaaaccagtttacgcgaaagacttgaaagcacacggtccaatgactgtattattaaaagatgcaatcagaccaaatgtaactcaaacattagaaaataatcctgcaattattcatggtggcccatttgcaaatatcgcacatggatgtaactcagttatagcaaccaaaactggattaaaacttgcagactatgttg

SEQ ID NO: 315482 - DNA, 531 bp, Unknown
  Bacterial polypeptide expressing nucleotide sequence isolated from the Sargasso Sea
ggaaagagttgtcgatttaaatgatcgagcattaaggtcgattaaaattaatcttggtaaattaaaaaataatataccaagagacgatggttttgatattacggttgcatctgaagttatggcaatcttttgtttgtcaaacaatcttgaagatttagaagataagatagctaatattacgattgcttatacaaaagataaaaaacctatatatgcaaaagatctaaatgcacaaggtcctatgactgtattgcttaaagaagcaataagaccaaatgtaactcaaactttagaaaataatccggctataattcacggtggtccattcgctaatattgctcatggatgtaattcaataattgcaactaagacagctttaaaactttccgattatgttgtgacggaggcaggttttggtgcggacttaggagcagaaaaatttttagatataaaatgtagaaaagcgaagattcaaccaaactgtgttgtaatagtagcaactataagggctttaaaaatgcatggtggtgt

SEQ ID NO: 315483 - DNA, 831 bp, Unknown
  Bacterial polypeptide expressing nucleotide sequence isolated from the Sargasso Sea
taaaaaagaaaatggtaaactaattttagttactgcaattacccctactccagcaggtgagggtaaaactacaacctcagttggtttaaatgacggtttgaataaagttggaaaaaaatcaattgtctgtttaagagagccaagcctaggaccttcttttggaatgaagggtggagctgctggcggtggttatgcacaagtagtaccgatggaacaaatcaatcttcattttactggtgactttcatgctattacatccgctcataatttattgtctgcattaattgataatcatatctattggggcaacaaacttaatattgacgttagaagagttgtttggagaagagtaatggatatgaatgatagatccttaagatcaataattgttgatcttggaggagtagccaatggttatccaagacaagatagttttgatatcactgttgcatctgaattaatggctattttttgtttagccacagacttaaaagatttagaaaatagaattggcaatattacaatcggatatacaagagataaaaaatcgatttatgcaaaagatttaaatgcacaaggtccaatgactgttttgcttaaagaagcaataagaccaaatgtaactcaaactttagaaaataacccagcaataatccacggtggcccttttgcaaatatagctcatggatgtaattctgttatcgcaactaaagcaggacttaaattagctgactatgttgtaacagaggcgggattcggagctgatttgggagctgaaaaatttctgaatattaagtgcagaaaatctggtctcaaaccagattgcgttgt

SEQ ID NO: 315484 - DNA, 244 bp, Unknown
  Bacterial polypeptide expressing nucleotide sequence isolated from the Sargasso Sea
atgagctataaaagtgatattgaaattgctcgaagtgcagaaaaaaaggcaattcaagatgttggtgctcaccttggaattcctgtagaacatttgttaccgtatggccatgataaagccaaagtaagtcaagaatttataaatggtgttcaagataaagaaaatggaaaattaattcttgtaacggccattaatcctacacctgccggtgaaggcaaaacaactacaacagtgggctggcgat

SEQ ID NO: 315485 - DNA, 800 bp, Unknown
  Bacterial polypeptide expressing nucleotide sequence isolated from the Sargasso Sea
tgtttagcgtcagacattgatgatttaaaaaagagaatttgtaatatcgttataggctatacgaaatccaacgaacctgtaagagcaaagcagctgaatgctgatggtgcaatcacagcattattgaaagatgcatttcaacccaacttagttcaaacacttgagaataatcctgcattcatacatggaggtccttttgccaatatagcccacggttgtaactcagttgtctctactaagttagctttaaagcttgctgattatgtggttacggaagctggatttggagctgatctaggtgccgagaagttttttgatatcaagtgcaggaaatctggacttaaacctgatgcagttgttttggtagcaaccactaaagcgttaaaaatgcatggcggtgtagaaaaagaaaatcttggttctgagaatatagatgcagtgaataaaggctgcaagaacctagaaagacatattgaaaatataagaaaatttggagtaccagttattgttgccataaatgactatgtaactgataccgaaaaagagcacgatgaaattcttaatttttgtaaaaagataggcgttcaatgcaaaatttcttctcattgggaaaaaggtggtgaaggtgcagctgatcttgctgaagaggttgcaaaaattgctgattcgggttcttccgaatttaaaactttatatgataataagatgtctctttgggataaaactcaatacatagcacaaaatatttatggtgctgcagatataattgctgataagaaagtaagaaatcaatttaaaaa

SEQ ID NO: 315486 - DNA, 556 bp, Unknown
  Bacterial polypeptide expressing nucleotide sequence isolated from the Sargasso Sea
aatgagtagtgatattgaaattgcaagaaatgcacgtcttgaaccaattatggatgttggagcaaagttggacattccttttaaagctcttaggccttatggacattttaaagctaaattatcttcaagttggttagaaaataaactagaaaataaaaattctaaattaattttagtgactgcaatcaatcctactccagctggtgagggaaaaaccactacatcggtagggttgaatgatagtcttaacaaaataggaaagaaatctattgtttgtctaagggagccatcacttggaccatgttttggaatgaaaggcggagcagctggaggtggttacgcccaagtagttccaatggaagatattaatttacattttacaggtgatttccacgctataacatcagctcataatttattgtctgcaatgatagataatcatatttattgggggaacaaacaagaaatagatccaagaagagtttcttggaaaagagtggtggatatgaatgacagagctctgagaaatattgtggtttcacttggtggagtaagt

SEQ ID NO: 315487 - DNA, 915 bp, Unknown
  Bacterial polypeptide expressing nucleotide sequence isolated from the Sargasso Sea
gcccaaatttagtacaaacacttgaaaataatccagcatttatacacggtggaccattcgcaaatattgctcatggttgtaatacagtcgttgcaactaagcttgcattaaaactggctgattatgttgttaccgaagccggatttggagcagacctgggcgctgagaaattttttgatatcaaatgcagaaaatcaggtctcaaaccagacgcagttgttctggttgcaaccacaaaagctttaaaaatgcatggtggcgtgacaaaggataaccttggagtagagaatgtagatgcagtaaccaaaggttgtaagaatctcaaaagacatattgaaaatatcaagaagtttggagtccctgtcatggttgcgatcaatgactatgtgaccgatacaaaagatgaacatgctgcgataattcaatattgtaaagaaattggtgttgagtgcagaatttcatctcactgggaaaaaggaggcaaaggtgcatcagaactagcagaagaggttgttaaaattgctgattctaattcatctgatttcaaacctttgtatgacaataagatgtctctatgggataagacccaattcattgcacaaaacatatatggtgcctcagaaatcattgcagataaaaaggtaagaaatcagtttaagaaattagaagatgatggatttggtgagtacccaatttgcatggcaaaaactcagtacagcttttcaacggacccattactaatgggtgcaccatcaggtcatgacgttccagttcgagaagtaagattatctgcgggagctgaatttgttgtggttgtttgcggtgaaattatgacaatgccaggcttgccaagggtacctgcatcagagggtatcgatgtagatgatgagggactgattcaaggacttttttaat

SEQ ID NO: 315488 - DNA, 859 bp, Unknown
  Bacterial polypeptide expressing nucleotide sequence isolated from the Sargasso Sea
tagacagagtggttacgacattacagttgcttcagaaatcatggctgttttttgtcttgcatcagacattgatgacctaaaaaagagaattggcaatatggtcataggctactcaagatccaacgaacccataagagcaaaacaactgaatgccgatggagcgatcactgctttactaaaagacgcattccaaccaaacttagtgcaaactcttgaaaataatcccgcgtttatacacggtggacctttcgccaatatcgcgcatggatgcaattcagttgtttcaactaagctcgcactaaaacttgccgattatgtggtcacagaggctggttttggagccgatttaggcgctgagaaatttttcgatatcaaatgcagaaaatcaggtctaaagccagacgcagttgttctagtcgcgaccacaaaggctctaaaaatgcatggaggcattgccaaggataatctgggtggcgagaacgtggatgcagtaaccaagggttgtaagaacctcgaaaggcacattgaaaacatcacaaaatttggagtccctgtcattgttgcaatcaatgactatgtgactgatacaaaagatgaacatgacgcaataataaattactgcaaagaaattggtgtcgagtgcagaatttcctcgcattgggaaaaaggcggtaagggcgcatcagatctagcagaagaggtggtcaaaattgctgactccgattcttctgaatttaaacctttatacgacaataaaatgtctctgtgggataaaaccgaatacatagcaaaaaacatttacggtgcatcagaaatcattgcagataagaaagtaagaaatcaattaagaaatagaaga

SEQ ID NO: 315489 - DNA, 844 bp, Unknown
  Bacterial polypeptide expressing nucleotide sequence isolated from the Sargasso Sea
tcgcccacggctgcactcggtgcgcgctaccaagatggcgctcaagctctccgactacgttgtgacggaggcgggtttcggggcggatctgggcgcagagaaattcttcaatatcaaatgccgaaaagcaggcctcaagccggatgccgtggtgctggtagcaacagcccgggctctcaagatgcacggcggagtcgccaaagcggatctcaatgcggagaacgttaccgcgctggtagatggtcttgagaatcttggtcgccaccttcgtaacattgagcagttcggggttccggctgtagtggcgatcaacaagtttgtatcggacaccccggctgagattgacgcgattcgtgcctactgcagggagtttggtgccgaggtgttcgaatgcagtcattgggcggatggcggtgccgggacggagcaactcgcagagcacgtcgccgccctggccgattcctccaactcacagttccgaccactctatgacgatcagctgtcgttatgggagaaagtccgaactgtagcgcgatccatctacggcgctgaagacattattgctgacaaaaaggtcctgagtcagtttgaggactttgaggagcgttacagccacttccctgtctgcatggcgaaaacgcagtacagcttctcaacggatccgagcctgctgggtgcacccagtggacatgtggtcccgatccgcgaactgcgactttctgcgggcgccgaatttgtggtcgcgatctgtggcgagatcatgaccatgccaggactgcccagagtgccggcagccaacagcattttcgtcaatgacgagggcgagatagaagggctgttctga

SEQ ID NO: 315490 - DNA, 811 bp, Unknown
  Bacterial polypeptide expressing nucleotide sequence isolated from the Sargasso Sea
tgcactaaaattatcagactacgtagtcacagaagcaggttttggtgcagatttaggagcagaaaaatttttaaatataaaatgtagaaaatcaggtttagctccaagctgtgtagttatagtcgcaactataagagctttaaagatgcacgggggtgtcgaaaaggatgatttaaaaaaagagaatgtagacgcattaaaaaaagggctagttaacctagaaagacacatttcgaatataaagaaattcgggttagaaccaattgtagcaataaaccattttgtactcgatactaatctagagataagaactgttttagatttttgtaaagaaagaaaagttgaagtaagtgagtgcaaacactgggctaagggtggaaaaggcgcaatggatctagctaaaaaagttgttaaaatttgtaaaaagaaaaaaaataaatttgatttcttatataaagatgacctcaaattatgggataaaattgaattgatagcaaaacaaatttataaagctgataagataactgcaaatagtgatgttatcaaagaattagataaatttgaaaaaaatggtcatagaaatttaccagtttgtatagctaaaacacaatatagtttttccactgacccgaaacttaagggcgctccatcaaatcatgaaataccaattagagaagtaagactatcatcaggagcggaatttgtggttgttatctgtgggtcagtaatgacaatgcctggattaccaaaaatacctgcggctgatagtattaaattaaataaaaaaggtgagattgagggattgttttaa

SEQ ID NO: 315491 - DNA, 851 bp, Unknown
  Bacterial polypeptide expressing nucleotide sequence isolated from the Sargasso Sea
ctactggggaaataaattagatatagatccagaaaatattgtatggaaaagagttgtagacttaaatgatcgcgctttgagatcaattaaaattaatcttggtaaattaaaaaacaacataccaagaaatgacgggtttgatattacagttgcttcagaagtaatggctattttttgtttatcaaacaatctcgaagatctagaaaataaaataggtaatattacaattgcctatacaaaagataaaaaacctgtttatgcaaaaagtttaaaagcacaaggtcctatgactgtgttattaaaagaagcaatcagaccaaatgtaactcaaactctagaaaataatcctgctataattcatggtgggccgtttgccaatattgcgcatggttgtaattcaataatagcaactaaaacagcattaaaattgtctgaatatatcgtaactgaagctggttttggtgcggaccttggtgcagaaaaatttttagatataaaatgcagaaaggcaggaattcaaccaaattgtgttgtgttagttgcaactataagagctttaaaaatgcatggcggagttgaaaaagaagatttaaaaaaagaaaatatagaagctcttaaaaaaggtcttccaaacttagaaaaacacattaacaacgtcaaaaaatttggtttagagttagttgttgctataaatcactttattactgacacagacaatgaagttaaactaattcaagattattgtttaaaacttggcgtaaaggtaagtctctgcactcattggtctgatggtggtagaggaactgaagatttagcaaaaaatgttgttgaaacatgcaaaaaaaataata

SEQ ID NO: 315492 - DNA, 787 bp, Unknown
  Bacterial polypeptide expressing nucleotide sequence isolated from the Sargasso Sea
acaaaagataaaaaacctatttatgcaaaagatttaaaagcacagggccctatgacagtattattaaaagaagcaattagacctaatgtaactcaaacattggaaaataatcccgctataattcatggtggaccatttgctaatattgctcatggttgtaattcaataatagctacgaaaactgcactaaaattatctgagtatgtagtaaccgaagctggttttggagcagaccttggtgccgaaaaatttttagatataaaatgtagaaaggcaggaattcaaccgaattgtgttgttgtggtagcaaccataagagctttaaaaatgcatggaggagttgagaaagaagatttaaaaaaagaaaatttagatgcccttaaaaaaggacttccaaacttagaaaggcacattaataacgtaaaaaaatttggtttagatttagttgtcgcaattaatcattttattacagatactgacaaagaagttaatctcattaaagagtattgtttaaaacttggagtaaaagtaagtctttgtactcattggtctgatggaagcaaaggaactgaggatctagcaaaaaatgttgtggaagtatgcaaaaaaaacaataaaggaagttttaaatatttgtataaagatgaaacgtcaattttaaaaaaagttgaaattattgcaaaagaaatttatggagcaaacggaataaactatgatgataaagttaaagaacaagtaaatataattgaaaaatctggttttggtaaatttccagtatgtatagcaa

SEQ ID NO: 315493 - DNA, 796 bp, Unknown
  Bacterial polypeptide expressing nucleotide sequence isolated from the Sargasso Sea
tggttttgacataaccgtagcatcagagataatggcaattttttgcttatcaaaaaatttaagagatcttgagaatagaataggaaatataactataggatacacaagagataaaaaacctatttatgcaaaagatttaaaagcccaaggtcctatgactgtgcttttgtatagagcttttagaccgaatgttgttcaaactttagaaaataatccagcaataattcacggtggtccatttgcaaatattgctcatggatgtaactcaattctagctacacaaacagctttaaaattatcagactatgttgtgacagaggctggatttggtgcagacttaggtgcagaaaaatttattgacattaagtgtaggaaatcaggattaaaaccttcttgtgttgtaatcgtagcaactatcagaggtttaaaaatgcatggtggacttgataaaaatcaattaaaaaaagaaaatatgtccgcgttaatcaaaggaatgattaacttagaaagacatattaataatatgaaaaaatttggtgtgcctgttacggttgcaatcaataaatttgtaaatgatactcgtaaagaagaaaatgctgtaatcgatttttgtaaaagtatgggtataaaagctaatttgtgtactcactggtctgatggaggaaaaggtacaaaagatttagcaaaaacagttgtgaagctatcatcaaaaaagaatagtaagtttaaatatctttatgacagtaaacttcctttgttcaaaaaaattgagaagatcgcaatagaattgtataaa

SEQ ID NO: 315494 - DNA, 802 bp, Unknown
  Bacterial polypeptide expressing nucleotide sequence isolated from the Sargasso Sea
aattggttatacgagagacagaaagccgatctatgctaaagacttaaaggcgcagggaccaatgactgttttattaaaagacgcctttagacctaacatggttcaaactttagaaaataatccagctattatacatggtggaccttttgcaaacatagcgcatggttgtaattctgttatcgctactaaagcaggtttaaaactaggtgaatatgtaattactgaggctggttttggtgctgatttaggagctgagaaattcatagatatcaaatgtagaaaatcaggattaaaacctgattgtgttgtaatcgtcgcgaccattagagctttaaaaatgcatggtgggataaataaagatgatcttaagcaagaaaatttaaaagcacttaaaaaaggattagttaatttggaaagacatattaataatgttaggaaatttggattgcctgtgacagttgcaattaatcactttgttactgatacaaaaaaagaagtaaatgcagttgtagatttcggtaaaactcttggagttaaaacatctgtgtgtacacattggtctgatggcggtgaaggagctaaggatttagctaaaactgtagatgaaatttgtagagaagaaaaaaatacattcaaatttttatatgatgataaaatgccattatttaaaaaaattcaaacaattgcccaagagctttatcatgctagtgaagttgttgctgatacaaagattagagctcaaattaaaacatttcaagaagatggttatggaaatttaccgattagtatggcaaaaacacaa

SEQ ID NO: 315495 - DNA, 763 bp, Unknown
  Bacterial polypeptide expressing nucleotide sequence isolated from the Sargasso Sea
ttgaaaacagacattgaaatagctagagaagctaaaccaaaaagaattgaagaaattgctagcagtattggtattagcggcgaatatcttgagcattatggtaaatttaaaggcaaagttaacctttcaattaatgatgaaaaattaaaagatcaagataatggcaaactgattttagttacggcaatatctcctactcccgctggggagggtaagaccactacaagtgttggtttggttgatgggctttgtcatattggcaagaaagcaatgatttgcctgagagagccaagccttggtccatgttttggaatgaaaggtggtgctgcaggtggaggccatgctcaagttatacccatggcagatattaatcttcattttacaggcgattttcatgctattagcgcggctcacaatttgctttctgcgctcgtagataatcatattcattggagcaatgatcttgatattgatccaagaagaattacttggaaaagagtagttgatatgaatgatagatcattgcgtgaagttacatgtgggctaggcgggacaggaaatggaatacctagacaaagtggatttgacataactgttgcttctgaaattatggctgtattttgtcttgcaactgatgctgatgatctgaagaaaagaataggaaatatagttataggttattcaagatctaatgaacccataagagcaaaacaattaaaggctgatggtgccttaagtgtttgcttcaagacgcattcaacca

SEQ ID NO: 315496 - DNA, 848 bp, Unknown
  Bacterial polypeptide expressing nucleotide sequence isolated from the Sargasso Sea
aaggttcataaatataaatacaaaaggtgttgcaaaggaatttcctagagaagatggttttgatattacagttgcatcagaggttatggcaattttttgtttatcaaatgatttaaaagatttagaaaaaagaattggaaacataacaattgcatacaataccgatggcaaacctgtttatgcaaaagatctaaaagcccaaggaccaatgacagttcttttaaaagatgcattaagaccgaatgtaactcaaactttagaaaataatcctgcattgatccatggaggtccttttgcaaatattgcgcatggatgtaattcagtaattgcaacaaagtctgctttaaaacttgctgactatgttgttactgaagcgggatttggtgcagatttaggtgctgaaaaatttttagatattaaatgtagaaaatcaaacataaaaccaagttgtgttgttatagttgcaacaataagagcattgaaaatgcatggaggtgtagaaaaagaaaatctaaaaaatgaaaacgttgttgcacttaaaaaaggattggtaaatttggaaagacacataagtaatataaaaaaatttggattaacaccaattgtagctattaatagtttcattttagatacaaaaaaagaaatatcttccataaaagatttttgtaaaaataaaaaagttgaagtaagtgagtctacacactgggctgatggtggaaaaggtgcaaaagatttagctaaaaaagttgttaagatatgcaatgcttcaaaaaagaaagactttaaatttttatatgatgataatcaatcattgtggagcaaagtagaaactatttctaaagaaatat

SEQ ID NO: 315497 - DNA, 357 bp, Unknown
  Bacterial polypeptide expressing nucleotide sequence isolated from the Sargasso Sea
tgatgacttacagaaaagaattggaaatattgttataggttatacaaaagataatgagcctgtaagagcaaagcaacttaaagcagatggagcaataactgctcttttgaaagatgcttttaaaccaaatcttgtacaaactttagaaaataatcctgcttttatgcatggtggcccatttgcgaatattgcacacggatgtaattcagttgtttctactaagactgccctcaagctagcagattatgttgttactgaagctggatttggtgccgatcttggtgcagaaaagttttttaatatcaagtgtagaaaatctgatttaaaaccagatgctgttgttttagttgctacaac

SEQ ID NO: 315498 - DNA, 617 bp, Unknown
  Bacterial polypeptide expressing nucleotide sequence isolated from the Sargasso Sea
tatgaaatcagatatagaaatcgcacaggctgcaaaacttgaaaaaatttccgatatagcagctaaattagacatccccgaggaatctttagaaccatttggtcactacaaagcaaaaatctccctagactatctaaattcaatcgattcaaatcctgacggtaaattaatactagttacagcgatcagcccgacacctgcgggtgagggtaaaacaacaacgtctgttgggctgggtgacgcattaaatcatattggaaaaaaagcgctggtaactatacgtgaaccatcgctgggacccgtatttggcatgaagggaggtgcggctggtggcggtatgtctcaagttataccaatggaagacattaatcttcactttacaggcgacttcaatgctatacagctcgcaaataatctcttagcggcaatgcttgataatcatatccatcatggtaataaattaggaattgatgttagaagagttgcatggaaaagagttcttgatatgaatgatcgtgctcttagaagtaccgtatgctctctaggctcagttggtaatggtttcccaagacaagatggttttgatattgtggtcgcatctgaaataatggcaattt

SEQ ID NO: 315499 - DNA, 816 bp, Unknown
  Bacterial polypeptide expressing nucleotide sequence isolated from the Sargasso Sea
tatgagtacttatccaagtgacctagagattgcaagtgctgcaaataaaatttcaattgacaaagtagccgcaactatcgatataactaatgaggatttaattaaattcggagatgataaggctaaaatctcttcatcattaatcgaaaaactcaaaaaaaatgaagatggtaagctaatattagttactgcaatatctccaacacctgcaggtgagggtaaaactactacaagtgtagggttggtagacggcctatgtcacataggaaaaaaagcaatgatatgtctaagagaacctagcttgggtccatgttttggaatgaaaggtggagcagcaggcggtggctatgctcaagtaattcctatgacagatataaatcttcatttcacaggtgattttcatgcgataggtgctgcacataatctcctatctgccctattagataaccacatacattgggataatcaattaaatattgatccaagaagaattacgtggaagagggttgttgatatgaacgatagatccctaagagatatcacatgtggattaggtggaacaggaaatggaataccaagacaaagcggttttgatattacggttgcatctgaaattatggctgttttttgtcttgcctctgatattgatgacttacagaaaagaattggaaatattgtcattggatattcaaaggataatgagcctatccgagcaaaacaattgaaagcagatggagcaatttgtgctcttttaaaagatgcatttaaaaccaatcttgtgcaaactttagaaaataatcctgcatttatgcatgg

SEQ ID NO: 315500 - DNA, 477 bp, Unknown
  Bacterial polypeptide expressing nucleotide sequence isolated from the Sargasso Sea
atattactattcggatacacaagagataaaaaaccgatttatgcaaaagacttaaatgcacatggtgcaatggctgttttattaaaagaagccattagaccaaatgtgactcaaactttagaaaataatccagcaattatacatggtggaccatttgcaaatattgctcatggttgtaattcagttattgcaacaaaagcaggtttaaaactagctgattatgtcgttactgaagcaggttttggtgcatatttaggtgcagaaaaatttttagatattaaatgtagaaaatcaggtttgaaaccaagttgtgtagttattgttgcaactattagagccctaaagatgcatggcggtttatcaaaagatgaactcaaaaatgaaaatattagtgctttaaaaaaagggattgttaatcttgaaagacatattgaaaatgtaaaaaaatttggtcttcctgttgctgttgctgtaaat

SEQ ID NO: 315501 - DNA, 854 bp, Unknown
  Bacterial polypeptide expressing nucleotide sequence isolated from the Sargasso Sea
actgggagattttcatgcaattacctctgcacataatttattgtctgcgcttattgataaccatatttattggggtaacaaactaaatattgatgtgagaagagtttcttggagaagagtaatggatatgaatgataggtctttgagatcaatcatagtagatctaggtggtgtagcaaatggatatccacgtcaagatagttttgatattacagttgcatcagagctaatggcaatcttctgtctagctacagatttaaaagatttagaaaatagaattgcaaatattacaattggatatactagagataagaaacctatacatgcaaaagatttaaatgcgcaaggtccaatgactgttctacttaaagaggcaataagaccaaatgtaactcaaactttagaaaataatcccgctattattcatggaggtccttttgcaaatattgctcacggttgtaattctgtaatagctacaaaagcaggtctcaaattggcagattacgttgtcactgaagctggatttggtgcagatcttggtgcagagaaatttttaaatatcaaatgtagaaaatcaggattaaagcctgattgtgttgttattgttgcaactattagagctcttaaaatgcatggtggtgtgtcaaaagatgaattaaaaaacgaaaatgtaaaagcattaaagaaaggtttggttaatttagaaagacatataaataatactcgaaaatttggattaccagttacgattgcagtaaaccactttgttacagactcagataaagaaatgaaaacattattagatttttgtaaaacccagggtgttaaggcttcaaagtgcactcattggtcta

SEQ ID NO: 315502 - DNA, 819 bp, Unknown
  Bacterial polypeptide expressing nucleotide sequence isolated from the Sargasso Sea
tttgcatgataagaaagagggtaatttgattttggtctcagcaatcagtcccactccagccggtgagggaaagacaactacgactgttggtttaggagatggtctaaatagaataggaaaaaaaacgcttatttgtttgagggagccctcgcttggtcctgttttcggggttaaaggaggagcggctggtggcggatacgcacaaattgtcccaatggaggacataaatttgcattttaccggcgatttttctgcgattgcactagctaataatcttttggctgcaataatcgataatcatattcatcacggcaacgcattacaaattgactctagaagagtaacttggaaaagagttgttgatatgaatgaccgcgcattacgggacatagcggttggcctgggtggtccaggtaatggttacacgagacaagatggtttcgatattgtggttgcatctgaagtgatggcaattttctgcttggctgaatctgttgacgacttaaaaaccagattagggcaaattgttatcggctcaacgcgggaaggaaagcttattacagcgaaagatttaaatgcgcacggggcgatgacagttttgctcaaagatgcgttgcagcctaaccttgtacaaacgttagagaataaccctgcttttgttcatggcggtccttttgcgaatattgctcatggctgcaattctgtaattgctactaaaactgcactaaggcttgctgactatgttgttacagaagccggttttggtgccgatctgggcgccgaaaaatttattgatataaagtgtcgtaaaactggact

SEQ ID NO: 315503 - DNA, 874 bp, Unknown
  Bacterial polypeptide expressing nucleotide sequence isolated from the Sargasso Sea
aatgagtacagtaaaatctgacattgaaatagctagagcagcaaaaatgaaacccatacaagaaattcttgatggaattgatgtcccagacaaagcagaggtctatagtccaatgggaaggtacatagcaaaaattaaacctgaatacttggatactttaaaaaataaaaaaaatggaaagttaatattagttacagcgatcactccaacgcctgctggagaaggaaaaaccacaacatcagttggtttatgcgatggccttaacaaaataggaaaaaaatcaatagtttgtttaagagaaccaagcctaggtccttcttttggaatgaaaggaggcgcagctggtggaggttatgctcaagtagttccaatggaacaaataaatttacatttcacaggtgattttcatgcaattacttcagctcataatcttctttcagctttaattgataatcatatttattggggaaataaattaaatattgatgttagaagaattacttggaaaagagtaatagatatgaacgatcgttcattaagatctataaacataaatttaggtggtgtaacaaacggttatcctagagaagacgggtttgatattactgtagcatcagaaatcatggcaatcttttgcttatcaaatgatttaaaagatttagagaatagaattggtaatattactatcggatatactcgagacaaaaaaccgatctatgcaaaagatttaaaagcagaaggcccaatgacagttcttttaaaagatgcaataagaccaaatgtaactcaaactttagaaaacaatcctgctattatacatggaggtccatttgcgaatattgcacatggttgtaattctgtcattgctacaaaa

SEQ ID NO: 315504 - DNA, 880 bp, Unknown
  Bacterial polypeptide expressing nucleotide sequence isolated from the Sargasso Sea
tttggaaatattaccaattggatatacaagagataaaaatccaatttttgcaaaagatctgaatgctcaagggccaatgacagttcttttaaaagatgcaatcagaccaaatgtaactcaaacattggagaataatcctgcaataatacatggtggcccttttgctaatattgctcatggatgcaattcagttatcgcaaccaaaacagctttaaaactttctgactatgtaataactgaagctggttttggtgcagatcttggagcagaaaaatttataaatattaaatgcagaaaatcaaatttgaaacctgattgtgtagtaattgttgcaacaataagagctttaaaaatgcatagcggggttggtaaagatgaacttacaaaagaaaatgtagaagcattaaaaaaaggtgttgtaaacttagaaagacatataaataatgtaagaaaatttggcctgccagttgctgtagcaattaatcactttgttactgactctgaagaagaagtaaattttctgatgaatttctgtaaaaatcttggtgtagatatatcgttatgtacgcactggtctaacggaggagaaggaacaaaagatttagcgaacactgttgtaaatatatgcgaaaaaaatgagagtacatttaaatttttgtatgaagataaaatcccactatttaagaaaattgaaacaattgctcaagaaatctaccatgctagtgaagtagttgcagatacaaaaataagaactcaattaaaagattttgaaagcaaaggatacgcgcatcttcctatttgtgttgcaaaaacgcagtatagtttttctactgatcctagtttgaaaggagcgccaactggacatgtgttacctgtaagg

SEQ ID NO: 315505 - DNA, 643 bp, Unknown
  Bacterial polypeptide expressing nucleotide sequence isolated from the Sargasso Sea
tatggcatatactaatgatatagacatcgcaagaagtgcaaatttattaccaatagaaaaagttgggagcaaaattggagtatatgcagatgacgttaatttgtatggaaaaaataaagcaaaaataacatataaatttttaaaaaacttagatactaagaaaagtggtaaattaattttagttactgcaattagtcctacaccagctggcgaaggcaagactactacaaccgtcggtcttggtgatgcattaaataaaaaaaataagaaaacaattatttgcctcagagagccctccttaggaccctgttttggaatgaaaggcggtgctgcaggtggtggattttcacaagttgttcctatggaagatattaaccttcattttactggggatatgcatgctataactagtgcacataatctactagcagcaatgattgataaccatatttactggggaaataaattaaatattgatactagaagaatttcatacaaaagagtattagatatgaacgacagagctctaagaaaaatagtgtctagtttaggtggtataagcaatggtttttcaagagaagatgggtttgatataactgtagcttctgaaatatgggcattttctgtttatcaaatcacttga

SEQ ID NO: 315506 - DNA, 867 bp, Unknown
  Bacterial polypeptide expressing nucleotide sequence isolated from the Sargasso Sea
atttggatatacaaggtctaatgagccagtgagagcaaaacaacttaatgcagatggcgctattactgcattattaaaagatgctttccaaccaaatttagttcaaacattagaaaataatcctgcattcatgcatggagggccatttgcaaatattgctcatggttgcaactcagtagtatctacaaaaactgcattaaagcttgcagattatgttgtaacagaagcaggttttggtgcagatttaggagcagaaaaattttttgatattaaatgtagaaaatctggactaaagcctgatgcagtagttttggtggctactaccaaagccttaaaaatgcatggtggtgtaaaaaaagatgaactaagctctgaaaatattgatgctgttttaaaaggttgtgagaatcttggaaagcatatagaaaatattggtaaatttggtgttccggtgattgtaggcattaacgattatgtaactgatactaaaaatgaacatgagcaaataattaatttctgtaagaatttaggagtacagtgcaagatttcatcacattgggaaaaaggtggcgaaggtgctgcagatcttgctgaagaagtagccaagattgctgattcaaataccgctgattttaaaactttatatgataatgaaatgaccttgtgggataagacagaacatatcgctaaaaatatatatggagcttcagaaattattgcggataagaaagtaagaaatcagtttaagaaacttgaagatgacggtttcggcgattatccgatttgtatggcaaagacacaatatagcttttcaactgatccattgttaatgggtgccccaattggccatgatgttcctataagaga

SEQ ID NO: 315507 - DNA, 639 bp, Unknown
  Bacterial polypeptide expressing nucleotide sequence isolated from the Sargasso Sea
catggtaggaccatttgcaaatatcgcccatggatgtaattcgattatcgctactaaaacagcattaaaactatcagaatatgtaattactgaggctggttttggagcagatcttggagctgaaaaatttttagatatcaaatgtcgtaaagcaggcattataccaagctgtgtagttcttgttgcaacaattagagctttaaaaatgcatggaggtgttgaaaaagatgatcttaaaaatgaagatcttgatgcccttaaaaaaggtatgtcaaatttagaaaggcatattcaaaatataaaaaagtttggtttggatgtagttgtcgcgattaatcattttattaccgatacagaaaaggaagttaaaatcattcaggagcaatgctataaacttgggatcaaagcaagtctctgtacacattggtctgatggtggagaaggaatgagagatttagctaataacgtagtagaattatgtaaaaaaagcgatacatctaaatttaaatacttatactcagataagatatcaattttagaaaaggtcgaaaaaattgctaaagaaatttacagtgcaaaaggaatagaagtagacgaaaaaattaaggaacaagttaaaaaaatagagcaagccggatt

SEQ ID NO: 315508 - DNA, 820 bp, Unknown
  Bacterial polypeptide expressing nucleotide sequence isolated from the Sargasso Sea
ttaaataaacttaaaaagaaaaaagatggtcatctaatactagtaacagctatcactccaacgccggcaggagaaggtaaaacaactacttctgttggtctaaatgatggtttaaataaaataggaaaaagatctattgtttgtttaagagaaccaagtcttggaccttcttttggcatgaaaggaggggcggccggtggtggatatgctcaagtagttcctatggaacagataaatcttcatttcactggagattttcatgcgattacatcagcacataatttgttgtctgcaatgattgacaatcatatttactggggaaacaaacttaatattgatgaaaaaaaaatagtttggaaaagagtgatagatatgaacgatcgtgctctaagatttatagatatcaatacaaatggtgtagcaaaagattttaaaagaatagacggatttgatataactgttgcatcggaagtcatggctattttttgtttggctaaagatttgagtgatttagaaaaaaaaattggaaatataactatagcttacaataaagatggtcagccaatttttgcaaaagatttaaacgcccacggaccaatgactgttcttttgaaagaagcaataagacctaatgttacccaaaccttagaacataacccggctattattcatggaggtccattcgctaatattgctcatggctgtaattctgttatagctacaactgcagctctcaagctatctgactatgttgttactgaagcagggttcggtgcagaccttggtgctgaaaaatttttagatattaaatgtagaaagg

SEQ ID NO: 315509 - DNA, 904 bp, Unknown
  Bacterial polypeptide expressing nucleotide sequence isolated from the Sargasso Sea
attggcctctgagcttaatgcacatggggcgatgactgctctattgaaagatgctttgaatcccaatatcgtccagactttagagaataatttagcttttattcatggaggtccttttgcaaatattgcacacggatgtaattccataattgctactaagactgcgttgggtctggcagattatgtggttacggaggcaggcttcggcgcagatttgggggcggaaaaatttgttgatattaagtgtagaatcggaaagctgaagccagccatagtcgtgctggtagcgacaatcagagccttaaaataccacggcggtttggaaataaaggatttaggcgaagaaaacttatcggcactggaaaaagggttcgtaaatttagagcgtcatattgataatgtgaaaaataaacttggtctcaattgcattgtggctataaatcatttttcggcagactcagaagcggaaattaatctgttaaaagacaaggtgttatcaatgggggtagaagtttcggtggcgcaccactgggctgatggcggtttaggggctgaagacctggcagcaaaggttgttgaatcgattggttcttcttcttcaaaacaccgttatttgtacacagatgatgtgcctatatggggtaaaatcgaagcggtagctaaaaacatttatcgtgcttcagggatcactgctgataggaaagtgagagacaaaatagagactttgcaaaaagatcatggcgagatgcctatttgtattgctaagactcaaatgtctttttcgacagatccctcacttagaggagcgccttctggccacgttttagatgttagagaggttaaggtagccgctggggcgggatttataattgtaattgcaagtaatataatgactatgcctggg

SEQ ID NO: 315510 - DNA, 907 bp, Unknown
  Bacterial polypeptide expressing nucleotide sequence isolated from the Sargasso Sea
aaaagttatcttattttagttagtgcgattacaccaacgccagcgggtgaaggaaaaactactacttcagtaggtttaaatgatgcattaaataaaattggtaaaaaatcaattgtatgtttaagagaaccaagtttaggtccctcttttggaatgaaaggcggtgctgcgggaggtggttatgctcaagtagttcccatggaacaaattaatttacatttcaccggagatttccatgcaattacatctgctcacaatcttttgtcagcattaatagataatcatatttattgggggaataaattaaatatagatcctgataatatagtttggaaaagagtagttgatttaaatgatcgaagcttaagaaaaattaaaattaatcttgaaaaacttaagaacaatataccgagggatgataattttgatattacggttgcttctgaagtgatggctattttctgtttatcaaaaaatattaaagatttagaaaaaaaaattggtaatatcacagtcgcatatacaaaaaaaaatgaacctgtttatgcaaaagatttaagagctgagggtcccatgtcagttttgttaaaagaagcaataagacctaatgcagtacaaacacttgaaaacaatcttgctataattcacggaggtccttttgcaaatattgcacacggatgtaattctattcttgcaacaaaaacagctttgaaactatctgattatgtagttacagaagcaggatttggtgcagatcttggtgcagaaaaatttttaaacattaaatgccgtaaagcaaaaatacaaccaagttgtgttgtgcttgttgctacaatcagagcattaaagatgcacggaggtctagaaaaagatgatcttaaaaaagaaaatttagaagcacttaaaa

SEQ ID NO: 315511 - DNA, 634 bp, Unknown
  Bacterial polypeptide expressing nucleotide sequence isolated from the Sargasso Sea
atggcaaattacccaagtgatttagaaatagcaaatgctgctaataaaaaaccaataattgaaattgcaaaggcattagatattgatgagaaacacttagtaaggtttggtgatgataaagcaaaacttaatacagaatttactaattctttatctaaaaatgaggatggtaaacttattttagtgactgcgatatcacctactcctgcaggcgagggtaaaacaactacaagcgttggtttggttgatggactctgccatgttggtaaaaaggcaatgatctgtttaagagaaccaagcttaggaccatgttttggtatgaagggtggcgcagcaggtggtggctatgctcaagtgatacctatgactgatattaatttacactttacaggagattttcatgcaattggagctgcgcataatcttctttcagcattaattgataatcatattcattggagtaatgagctaaatattgatcctagaagaattacttggaagagagtcgttgatatgaatgacagatcccttagagatataacttgtgggctgggaggaacaggtaatggaattccaagacaaagtggttttgacataaaagttgcttctgaaattatggctgtattttgtttgg

SEQ ID NO: 315512 - DNA, 941 bp, Unknown
  Bacterial polypeptide expressing nucleotide sequence isolated from the Sargasso Sea
catgaatgatagatctttaagatcaatcattgtagatctaggaggtgtagcaaatggatatccacgtcaagacagttttgatattacagttgcttcagaattaatggctattttctgtctagcaacagatttgaaagatttagaaaatagaattgcaaatatcacaattggatacactagagaaaaaaaacctgtacacgcgaaagatttaaatgctcaaggtccaatgacggttttgcttaaagaagcaattagaccaaatgtaactcaaactttagaaaataatcccgctattattcatggaggtccttttgcgaatattgctcacggttgtaattctgtaatagctacaaaggcaggacttaaattagcagattatgttgttacagaagctggatttggcgcagatcttggggcagagaaatttttgaatattaaatgtagaaaatcaggattaaaacctgattgtgttgttattgtagcaacaattagagctcttaaaatgcacggtggcgtcttaaaagatgaattaaaaaacgaaaacataaaagctttaaagaaaggtttggttaatttagagagacatataaataatacacgaaaatttggattgccagttacgattgcagtaaaccatttcattacagactcggataaagaaatgaaaacattattagatttttgtaaaacacaaggtgtgaaagcctctaaatgtactcattggtctaacgggggtgatggaacagcagagcttgcaaaaaatgttgtagctatttgtgaagataatcaagatacatttaaatttctatacgaagacaaattaccattgtttaaaaagatagaaaaaattgctcaagaaatttaccacgcaagtgaagtggtagctgatacaaaggtgagacaacaattaaaggattttgaagaaaaaggttatggtagtc

SEQ ID NO: 315513 - DNA, 757 bp, Unknown
  Bacterial polypeptide expressing nucleotide sequence isolated from the Sargasso Sea
gaagccgattattgagattggtgggtcggttaacatacctgcctctgatttgctgccatttgggcatgacaaagcaaagattagtcagagttttattaattcagttcaagaccggccgaatggcaagttgattttggtgacagcgattaatccgacaccagcgggtgagggcaagaccactacgactgttggtcttggcgatggtttgaaccggattggcaagaaagcgatgatttgcattcgcgaggcgtctcttgggccaaattttggtatgaagggcggtgccgctggcggtggctatgcgcagattgtaccgatggaagatatgaatttgcactttaccggtgattttcatgccatcacatcggcgcattctttgctatcagcgatgattgacaatcatatttactggggtaatgagctggaaattgataatcgccgagttgtttggcgacgggttgttgatatgaatgaccgggcattacgccagatcactgcctcgcttggtggcgtagccaacggctttccgcgtgaagctggatttgatattaccgtggcatctgaggtgatggcgattttatgtttggccaaggatttagctgatctgcaaaagcgtcttggtgatatgattgtggcttatcggcgtgatcgctcaccagtattttgccgcgacatcaaggctgatggggcaatgacggtgttgctgaaagatgcaatacagccaaatcttctgcaaactttagaaaataatccagct

SEQ ID NO: 315514 - DNA, 829 bp, Unknown
  Bacterial polypeptide expressing nucleotide sequence isolated from the Sargasso Sea
cgagttttggatatgaatgacagatcattaagagatattacatgtggtcttggaggcacaggtaatggcataccgcgacaaagtggatttgacattacggtagcttcagaaataatggcagttttttgtttagcctctgacattgaggatctccaaaaaagaattggtaatattgttattggctacacaaaatcaaatgaaccagtaagagcaagtcagcttaatgcagatggtgctatcacagcattgcttaaagatgcttttcaaccaaatatagtacaaactttagaaaataatcctgcttttatgcatggaggtccatttgcaaatatcgctcatggttgcaattcagttatttcaacaaaaaccgcattaaagcttgctgattatgtggttactgaagctggatttggagcagaccttggagcagaaaaattttttgatattaaatgcagaaaatcagggcttgaacctgatgcagtcgttctagttgcaactacaaaagcacttaaaatgcatggaggtgtaaagaaagaggatttaggatcagaaaatgttgatgcagttacattgggttgtaaaaacttagaaaaacatgttgaaaatataaataaatttggagtacctgtagttgtcgcaattaatgattttgttacagatactgaaagagaacacaatgcaattataaatttctgtaagaatcttggtgttcaatgcaaaatctcttcacattgggaaaaaggtggtcttggagcatcagagcttgctgaggaagttgctaaagtagcagactcaaacatgtctgagtttaagactttgtatgaagaca

SEQ ID NO: 315515 - DNA, 799 bp, Unknown
  Bacterial polypeptide expressing nucleotide sequence isolated from the Sargasso Sea
cgagaaaaaaaaccgatttatgctaaagatttaaatgctcatggaccaatgactgttttgctaaaagaagcaatcagacccaatattacacaaacattggaaaataatcctgcaataattcacggtggaccgttcgcaaatattgcacatggatgtaattcagtaattgcaactaaagctggattaaaacttgctgactatgttgtaactgaagcaggtttcggtgcagatttaggagctgaaaaatttttagatattaaatgtagaaaatcaaatttaaaaccaagttgcgttgttatagttgcaactataagagctttaaagatgcatggtggtgttgcaaaagatgatttaaaaaatgaaaatgttgatgcacttaagaaaggattgataaaccttgaaagacatattgaaaacgtaaaaaaatttggtttaccagtggctgtagccataaatcactttataaaagacacagataaagaggtaaatgctttagttgagttctgtaaaaagctaggagtaaatgctagtatttgtaagcactgggctgatggtggtgaaggaacaaaagatttagctaaacatgtaatagatttatgtgagaaaagtgcagctaaatttaaatttttatatgaaagcaaaactccccttttcaaaaagatagaaactatagcaaaagagatttatagagcagatgaagttatcgcagatacaaagataagagatcaattaaaaaactttgaagatgctggatatggtgaattacctatatgtgtgcgaaaactcaatatagtttcta

SEQ ID NO: 315516 - DNA, 709 bp, Unknown
  Bacterial polypeptide expressing nucleotide sequence isolated from the Sargasso Sea
atgagcagtgatattgaaatagcaagaaaagcaaacatggagccaattttggatattggagctaagttagatattcctttcaaagcactcagaccatttgggcattttaaggcaaaattatcaccaacatggctacaaaaccaatccaagaaaaaaaatgctaaattaattttagttactgcaattaatcccacaccggcaggagaaggcaaaaccaccacttcagttggtttgaatgatggtttaaatgcaattggaaaaaaatctatagtttgtcttagagagccatctcttggcccttgttttggtatgaaaggaggtgcagctgggggaggatatgctcaagttgtacctatggaagacattaacctgcatttcacaggtgattttcacgctattacatcagcacacaatctattatctgccatgatagataaccatatttactggggcaataaacaagaaatagatccaagaagagtgacatggaaaagagtcttggatatgaatgatcgagcattaagaaatattgttgtttctcttggtggcgttagcaatggttttccaagagaaactggttttgatattacagttgcatctgaaatcatggccatattttgcttatcggaaaatcttgaagatttagagaaaagacttggtgatataattataggttatagaaaagataaatctccctgtattttgtaga

SEQ ID NO: 315517 - DNA, 889 bp, Unknown
  Bacterial polypeptide expressing nucleotide sequence isolated from the Sargasso Sea
gatggccattaggcccaacataacacaaacgttagaaaataatcctgctataattcatggtgggccatttgcaaatattgctcatggttgcaattctgtaattgcaactaaagctagtttaaaattaagtgattacgttgtaactgaagcaggctttggagctgatctaggagcagaaaaattccttgatataaaatgtagaaaatcaaatttaaaacctgattgcgtggttttggtagctacaattagagcactaaaaatgcatggcgatgtttcaaaagaagatttaaaaaatgaaaatgtaaatgctcttaaaaagggtttagtaaatctagaaagacatattaataatgttagaaaatttggattaccagtaaccgttgctattaatcattttattacagattcaagagatgaagtagatgcagttctaagtttttgtacaactcaaggagtcaaggcttctatgtgtactcactggtccgatggtggtgatggtgcaactgaattagctcaaaatgtaatagatatttgtgaagaaaataagaatacatttaagtttttatatgaagatgatttaactctattcaaaaaaatagaaaaaattgcacaagagatttatcacgcaagtgaagttgttgcagacacgaaagtacgtcgacaattgaaggattttgaaactaaaggatttggcaaattacctgtttgcattgcaaagactcaatatagtttttcaactgaccctaatttaaaaggtgcccctactggccacgtcttacctattagagaggtaagattgtcatcaggagcagaatttatagtagttgtttgtggtgatattatgaccatgccgggtctaccaagtgttcctgcggcaaattcgataaag

SEQ ID NO: 315518 - DNA, 719 bp, Unknown
  Bacterial polypeptide expressing nucleotide sequence isolated from the Sargasso Sea
tttgctttcagcattaattgataatcacatttactggggcaataaactaaacattgatgtaagacgtgtagtttggaaaagagtaatggatatgaatgatagatctttaaggtcaattgttgtagatttaggaggagtagctaatggttatccaagacaggatggatttgatattactgtggcttctgagataatggcgattttctgcttagcaaaaaatctaaatgatcttgaagaaagaattggcaatattacaatagcatatactagagataaaaaagctatttatgctaaagatttaaatgcacaaggcccaatgacagttttacttaaagatgcaataagaccaaatattactcaaacacttgaaaataacccagctatcattcatggtggaccttttgctaatattgctcatggatgtaattctgtaattgctacaaaagcaagtttaaaattaggtgattatgtagttacagaagcagggtttggtgctgatttaggggcagaaaaattcttagatattaaatgtagaaagtctggattaaaaccagattgcgttgttctagttgccacaataagagcattgaaaatgcatggagatgtttcaaaagaagacttaaaaaatgaaaatgttgaagcattaaaaaaaggtcttgtaaatttagaaaggcatataattaatgttcgtaagttcgggcttccagttacagtaagcc

SEQ ID NO: 315519 - DNA, 875 bp, Unknown
  Bacterial polypeptide expressing nucleotide sequence isolated from the Sargasso Sea
gataatcatatttattggggtaacaaacttaatattgatgaaaaaaagatagtttggaaaagagttatagatatgaatgatcgtgctttgagatttgtggacataaacactgatggagttgcaaaagattttaaaagagttgatggttttgatataactgtcgcctctgaagttatggcaatcttttgtttatctaatgatctaagagagttagaaaaaaaaattggtaacataactattgcatataacaaaagcgggaaacctatttttgcaaaagatcttgatgcccatggtccaatgacagttttacttaaggaggcaataagaccaaatgtaactcaaagtttggaaaataaccctgcaattattcatggtggtccctttgcaaatatagcacatggatgtaattcagttatagctaccaaaacagcattaaaattgtccgattatgtggttactgaagcagggtttggggctgatcttggggcagaaaaatttttaaatatcaagtgcagaaaggcaggtctttttccaagttgcgttgtaatagttgctacaataagagctttaaaaatgcatggtggagtggaaaaagataatttaaataaggaggatgttaagtcgttaaaaaaaggattagaaaatttagaaaggcatattctaaatattaaaaaatttggcctagaacctattgttgcaataaatcattttagccttgacactggcaaagaaataagggctgtcttaaatttttgtaagagcatgaaagtggaaataagtgaaagcaaacattgggctaagggaggtaaaggtgcagctgatttggcaaaaaaagtcgtaaaaatttgtaaaaataaaactaaatttaatttttt

SEQ ID NO: 315520 - DNA, 711 bp, Unknown
  Bacterial polypeptide expressing nucleotide sequence isolated from the Sargasso Sea
gcatggatgcaattcagttgtttcaactaagctcgcactaaaacttgccgattatgttgttacagaggctgggtttggagccgatttaggcgctgagaaatttttcgatatcaaatgcagaaaatcaggtctaaagccagacgcagttgttctagtcgcgaccacaaaggctcttaaaatgcatggaggcattgccaaggataatctgggtggcgagaacgtggatgctgtaaccaagggttgtaagaacctcgaaaggcacattgaaaacatcacaaaatttggagtccctgtcattgttgcaatcaatgactatgtgactgatacaaaagatgaacatgacgcaataataaattactgcaaagaaattggtgtcgagtgcagaatttcctcgcattgggaaaaaggcggtaagggcgcatcggatctagcagaagaagtggtcaaaattgccgactccaatgcttctaaatttaaacctttatacgacaataaaatgtctctgtgggataaaaccgaatacatagcaaaaaccatttacggtgcatcagaaatcattgcagataagaaagtaagaaatcaatttaagaaattagaagacgatggatttggtgaatacccaatatgcatggcgaagactcaatatagtttctcaacggatccattattgatgggtgctccttcgggacatgacgtttccgatcagagaag

SEQ ID NO: 315521 - DNA, 832 bp, Unknown
  Bacterial polypeptide expressing nucleotide sequence isolated from the Sargasso Sea
ggtaaaactacagtttcagttggtctttcagatggaattaataaaattggaaaaaaatcaattgtttgtttaagagaacctagtttaggaccatcgtttggaatgaaaggtggtgctgctggtggaggttatgctcaagtagttccaatggaacaaattaacttacatttcactggtgattttcatgcaataacatcggctcataatctcttatcagcccttatagataaccatatttattggggtaacgcacttaacatagatgataaaaaaattgtatggaaaagagttatggatatgaacgacagagctttaagagcaataaatattaatactaaaggagccgcaaaagactttccaagagaagatggtttcgacattacggttgcttctgaagttatggctatattttgtttatcaaataacttagaagatttagaaaaaaaaattggtaacataacaatagcttataataaagatggtaaaccaatttatgcaagagacttaaatgctcaaggtccaatgacagttttgcttaaagaagctattagacctaatgttgctcaaactttagaaaataatccagccttaatacatggcggacctttcgcaaatattgcacatggatgtaattctgtaatcgctacaaaagctgctctaaaactttcagattatgttgttaccgaagctggatttggagcagatctcggcgcagaaaagtttatggatattaaatgtagaaaagcaaatttaaaacctagttgcgtagttatagttgcaactataagagctcttaaaatgcatggtggtgtgaaaaagaagattaaaaaaa

SEQ ID NO: 315522 - DNA, 937 bp, Unknown
  Bacterial polypeptide expressing nucleotide sequence isolated from the Sargasso Sea
aaattaatattagtaacagcagtaactccaactcctgcaggtgaaggcaaaacaactacctcagttggattaaatgatggtcttaataagattgggaaaaaatcaatagtatgtttaagagagcctagcttaggcccatccttcggtatgaagggaggagcagccggaggaggttatgctcaagttgttcctatggaacaaataaatcttcattttacaggtgactttcatgcaattacatctgcacataatttactttctgctttaattgacaatcatatctattggggcaacaaattaaatattgatgtaagaagagttgtttggaaaagagtaatggatatgaatgatagatctctcagatcaatagttattgatttaggaggcgttgccaatggttatccaagacaggatggatttgatattacagttgcatctgaaatcatggctatcttttgtttagcaaaaaatcttaatgatcttgaagaaagaatcggtaacataacaattgcatatactagagataaaaaagcaatttatgcaaaagatcttaatgctcaaggaccaatgacagttcttttaaaggatgcaataagacctaatgtaactcaaacacttgaaaataatcctgcaattattcatggtggcccttttgcaaatattgctcatggatgcaattctgtaattgcaactaaagctagtttaaaattagcagattatgtagtaactgaagctggatttggagcagatttaggtgcagaaaagtttttaaacattaaatgcagaaaatcagatataaaacctgattgcgtagttttagtagcaactatcagagcacttaagatgcacggaaatgtttcaaaagaagatttaataaatgaaaatgttacagcattaaaaaacggtttagtaaacctagaaaggcatattaataatc

SEQ ID NO: 315523 - DNA, 1014 bp, Unknown
  Bacterial polypeptide expressing nucleotide sequence isolated from the Sargasso Sea
aaaggaggagctgctggcggaggttattctcaagttgttccaatggaacagataaatttgcattttacaggagattttcatgcaataacttcagctcataatcttttatctgcattaatagataatcatatttattgggggaataaattaaatatagatgacaaaaaaattgtttggaaaagagttatggatatgaatgatagagctttaagatcaataaacataaacacaaagggtgttgcaaaagattttcctcgtgaggatggttttgatattacagtagcatctgaagtaatggcaatattttgtttatctaataatttaaaagatttagaaaaaagaattggaaatataacaattgcttataacaaaggtggtaaaccaatttatgcaagagatttaaatgctcaaggtccaatgacagtattattaaaagaggctatcagacctaatatagcccaatcattagaaaataatcctgccataatacatggaggaccatttgcaaatattgcccatggttgtaattcagtaatagcaacaaagtcagctttaaaacttgcagattatgttgtaacagaagcaggatttggtgcagacctcggagcagaaaaatttttagatattaaatgtagaaaagcaaatttaaaacctaagtgtatagtcatagtagctacaataagagctttaaaaatgcatggtggtattcaaaaagaaaatttgaaaaaagaaaatatagatgctgttaaaaaaggtttagttaatcttgaaagacacattaataatgtaaaaaaatttggactaaatcctgttatagctattaataattttattttggatactaaacaagaaataaatgttgtattaaatttttgtaaaaaaataggaattgaagtaagcgagtgtactcattggtcaaatggtggtaaaggaacaaaagatttagccaagaaagttgttaaaattttgtataagacaagaaataataattttaaatttttatataaagataat

SEQ ID NO: 315524 - DNA, 835 bp, Unknown
  Bacterial polypeptide expressing nucleotide sequence isolated from the Sargasso Sea
tgcttacgagaaccaagtcttggaccctcttttggtatgaaaggtggggcagcaggcggcggctacgcgcaagtagtgccaatggaacaaattaacttacattttaccggagactttcatgccattacttctgctcataacttattatcagcaatgatagataatcatatttattgggggaataaacttaatattgacgaaaaaaaaattgtttggaagagggtgatggatatgaatgaccgtgcactaagatttatagacattaatactagtggggttgcaaaagattttaaaagaattgatggtttcgatataacagttgcatctgaggtaatggctattttttgtttatctactgatttaaaagatttagaaaaaaagatcggtaatataactatagcatataataaacatggagatcctatttatgcaaaagatctcaatgctcatggtccaatgactgttttgcttaaagaagccttaagaccaaatgtaacccaaagtttagaaaataatgcagcaattattcatggaggaccattcgcgaatattgctcatggctgcaattcaattatagcaacaaaaacagctttaaaattgtctgattacgttgttacagaggcaggatttggtgcagacctaggtgcagaaaaatttttaaatattaaatgtagaaaagcaggttttgttcccagttgtgttgtgatcgtggctacaattagagctttaaagatgcatgggggcgttgaaaaagaaaatttaaaaaaagaagatgttaatgctcttaaaaaaggtttggttaatttggaaagacacattctaaatataaaaaaat

SEQ ID NO: 315525 - DNA, 825 bp, Unknown
  Bacterial polypeptide expressing nucleotide sequence isolated from the Sargasso Sea
aatgagtacttatccaagtgacttagaaattgcaagtgctgctaataaaattttaattgacaaagttgctgcaactattgacataactgataaggatttaattaaatttggagatgataaggctaaaatctcttcatcattgattgaaaaactaaaaaaaaatgaagatggaaagctaatattagttactgcaatatctccaacaccagcgggcgagggtaaaactactacaagtgtagggttggtagacggcctatgtcatattggaaaaaaagcaatgatatgtttaagagagcccagcttaggtccatgttttggaatgaaaggaggagcagcgggtggtggttatgctcaagtaattcctatgacagatataaatcttcatttcacaggtgattttcacgcgataggtgctgcacataatcttctatctgctttaatagataaccacattcattgggataatcaattaaatattgatcctagaagaatcacatggaaaagggtcgttgatatgaatgatagatctctaagagatatcacatgtggattaggtgggacaggaaatggcataccaagacaaagtggttttgatatcacggttgcatctgaaattatggctgttttttgtcttgcctctgatattgatgacttacagaaaagaattggaaatattgttattggttatacaaaagataataagcctgtaaaagctaagcaacttaaagcggatggagcaataactgttcttttgaaagatgcatttaaaccaaatcttgtacaaactttagaaaataatcctgcatttatgcatggtggtccatt

SEQ ID NO: 315526 - DNA, 764 bp, Unknown
  Bacterial polypeptide expressing nucleotide sequence isolated from the Sargasso Sea
cttaaacataaaaaaaatgggaaacttattttagtcactgcaatcaccccaacacctgcaggagaaggtaagacaacggtatcagttggattatcagatggaataaataaaatcggaaaaaaatcaatagtatgtttaagagaacctagtttaggaccatcatttggaatgaaaggaggcgcagcaggaggaggatatgcgcaagtagttcctatggagcaaattaatttacattttactggggactttcatgcaattacttcagctcataaccttttatcagcacttatagacaaccatatctattggggaaacaaattaaatatagatgataaaaaaatagtatggaaaagggttatggatatgaatgatagagctttaagagcaatagatattaatactaaaggagttgcaaaagattttccaagagaagatgggtttgatattacagtagcctcagaaataatggctatattttgcttgtcgaacaatttgaaagatctggaaaaaagaattggaaatataacaattgcctataataaaaaaaatcaaccagtttatgcaaaagatttaaatgcccatggtcctatgacagttttacttaaagaagcaataagaccaaatgttactcaaactttagaaaataatcctgcattaatacacggaggtccatttgccaatattgctcacggatgtaattctgtaattgcaacgaaagcagctttaaagttatctgactatgtggttactgaagcaggatttgg

SEQ ID NO: 315527 - DNA, 634 bp, Unknown
  Bacterial polypeptide expressing nucleotide sequence isolated from the Sargasso Sea
aaattgggtgattacgttgttacagaagctggctttggtgctgatttaggtgcagaaaaatttttagatattaaatgtagaaaatcagagttaaaacctgattgtgtagttctagttgctactattcgagcactaaaaatgcatggagatgtctccaaagaggaattaaaaaatgaaaacgtcaaagcattaaaaaaaggtctcgtaaacttagagagacatataattaatattcgtaaatttggacttccagttacagtggcaataaatcactttgtaacagatactcaaggtgaggtagatgcagttcttgatttctgtaaaacacaaggagttaaagcttcaatgtgtacacattggtcaaatggaggagaaggagcaactgaattggcaaaaaatgttgttgatatttgtgaagaaaataaaaatacatttaaatttttatatgaggacaatttatcacttttcaaaaaaattgaaaaaattggtcaggaaatctatcatgcaagcgaagttgtcgctgacacaaaagttagaaaccaactaaaagattttgaaagcaaaggttttggtaaactaccagtttgtattgctaaaacacagtatagcttctctactgacccaaatctaaaag

SEQ ID NO: 315528 - DNA, 493 bp, Unknown
  Bacterial polypeptide expressing nucleotide sequence isolated from the Sargasso Sea
atgtcagatatagaaatcgcaagagctgctaaaaaaattcacataagagacgttgctgctaaagtaaatattcctgaggaaaatcttataccttatggacatgatgcggcaaaaataaattttgattttattgaaaaaagtaagtctaaccctgatggaaaattaatattagtaaccgcaattaatcctacaccagcaggtgaaggcaaaacgactacatctgttggcttaaatgatggtctaaataaaattggaaagaaatctattgtttgtctcagagaacctagcctaggtccatgttttggtatgaagggtggagctgctggaggcggatatgctcaggttgtccctatggaagaaattaatcttcacttcacgggtgattttcacgcaatcactgcagctcacaatcttttatcatcattaattgataatcatatttattggggaaatgaattacaaatagaccaaagaagaattacttggggtcgag

SEQ ID NO: 315529 - DNA, 680 bp, Unknown
  Bacterial polypeptide expressing nucleotide sequence isolated from the Sargasso Sea
tagagcattaaaaatgcatggaggtattaaaaaagaaaatttaaaaacagaaaatatagatgctcttaaaaaaggcttagttaatttagaaagacacattaataatattaaaaaatttaatttacctgtcacagttgcagtgaattattttattaccgatactgaggaagaagtaaattcgttaattgatttctgcaaaaagattggtgttaaatcctctttatgtactcattggtcaaacggtggcgaaggaactaaagaacttgccaaaaatgttagtgaaatatgtgacaataataaaaataaatttaagtttttgtatgaagataaatcacccttatttaaaaaaatagaaactattgctaaagaaatataccacgctagtgaagtggttgctgatacaaaagttagagaacaactaaaagattttgaagcaaaaggatatggaattctcccaatatgtattgcaaaaactcaatatagcttttcgacagacccaagtttaaaaggtgcaccttcaggtcatgtactcccggtaagggaagtaagactttcgtccggtgctgaattcgttgttgttatatgcggttcaataatgactatgcctggtctacctaaagttcctgctgctgattcaattaaaatgaacgacaaaggtgaaatcgaaggattattttaat

SEQ ID NO: 315530 - DNA, 877 bp, Unknown
  Bacterial polypeptide expressing nucleotide sequence isolated from the Sargasso Sea
atgaaaaagtatccatcagatcttgagattgctcaagcagcaaaaaaagaactcattggtgacatcgccagtaaattagatattgattcagatggtctaatcccatttggaaatgataaggcgaaaataacatacgacttcatggataaggtcaaaaataataaggacggtaaccttatccttgtaactgcaatctccccaactccagcaggagaaggcaaaaccactacaagcgttggtctagttgacggtctttgccacattggaaaaaaagccatgatatgtcttagagagcccagccttggtccttgttttggaatgaaagggggtgcagcgggaggaggatatgcgcaagttattccaatgacagacatcaaccttcactttacaggtgattttcatgccattggtgccgcacataaccttctttcggcggtaattgataaccatatacattgggaaaatcagttggatattgatccaagaagaatcacttggaaaagagttgtagacatgaatgatcgagcccttagagacataaccacaggcttgggtggaccagggaatggcatacctcgtcaaggtggttttgatataactgtagcatcggagatcatggcagttttttgtcttgctaaagatctggatgatttgcaaaaaagaataggaaacatagtaattggttacacgcgaaaaaaagaaccagttaaggtctctcagctggatgttcagggtgctatgactgcgcttttaagagatgcctttcaaccaaacctagttcaaaccctagaaaataatcctgcattgatgcatggggggccttttgcaaatatcgcgcatggatgcaactcagtgatcgccacaaaaactgcataaa

SEQ ID NO: 315531 - DNA, 825 bp, Unknown
  Bacterial polypeptide expressing nucleotide sequence isolated from the Sargasso Sea
tccaatattgcccatggttgtaattcagttgtctctactaagttagctttaaagcttgctgattatgttgttacggaggcaggatttggagctgatctaggtgccgagaagttttttaatatcaagtgcaggaaatctgggttaaaacctgatgcagttgttttggtagcaactactaaagcgttaaaaatgcatggtggtttagaaaaagaagatcttgcttctgagaatgtagatgcaataaataaaggctgcaagaacttagaaagacatatcaaaaatataagaaaatttggcctaccagttattgttgcaataaatgactatgtaactgataccgagaatgagcataatgcaattcttaatttttgtaaaaagatagatgttcaatgcaaaatttcttcccattgggaaaaaggtggagaaggcgcagctgatctagctgaagaggttgcaaaaattgctgatgcgggttcttccaaatttaaaactttatatgataataaaatgtctctttgggataaaactcgatgcatagcccaaaacatttatggtgcagcagatataattgctgataagaaagtaagaaatcagttcaaaaaattagaagatgatggatttggtaaataccctatatgtatggccaaaactcagtacagcttttcaactgaccctttattaatgggtgctccttcaggacacgatgttccaatcagagaagtccggttatcagcaggggcagaatttattgtggtagtttgtggtgaaataatgactatgccaggattaccaagaataccggctgcggaaaatatagaccttgac

SEQ ID NO: 315532 - DNA, 683 bp, Unknown
  Bacterial polypeptide expressing nucleotide sequence isolated from the Sargasso Sea
attgaaaacagacattgaaatagctagagaggctaaacctaaaagaattgaagaaattgctagtagtgttggtatcagcgacgagtatcttgagcattatggtaaatttaaaggcaaagttaacctttcaattaatgatgaaaaattaaacgatcaagataacggtaaactaatcttagttacagcaatatctcccactcctgctggggagggaaagactactacaagtgttggtctagttgatggacttagtcatattggtaagaaggcaatgatttgtcttagagagccaagccttggtccatgttttggaatgaaaggtggtgctgcaggtggaggctatgctcaagttatccccatgacagatattaatctgcattttacaggcgattttcatgctattggcgcggctcacaatttgctttctgcgctcgtagataatcatattcattggagcaatgatcttgatattgatccaagaagaattacttggaaaagagtggttgatatgaatgatagatcattgcgtgaaattacatgtgggctaggtgggacaggcaatggaatacccagacaaagtggatttgacataactgttgcttctgaaattatggctgtattttgtcttgcatccgatgctgatgatctgaagaaaagaataggaaatatagtcataggttatt

SEQ ID NO: 315533 - DNA, 783 bp, Unknown
  Bacterial polypeptide expressing nucleotide sequence isolated from the Sargasso Sea
tatgaacgatcgatcattgagagatattacctgtggtcttggtggaactggaaatgggataccgagacaaagtggttacgatataactgttgcatctgagattatggcagtgttttgtttggcatcagatattgatgacttaaagcaaagaattggaaacatagtaattggttatacaagatccaatgagccagtaagagcaaaacaactcaatgctgatggagctatgattgcactattgcaagatgcattccagcctaaccttgttcaaacacttgagaataatccagcatttattcatggtggaccttttgccaatattgctcatggttgtaattcagtaattgcaactaaaactgccttgaaacttgcagattatgttgttactgaggcaggttttggggcagacttgggcgcagaaaaattttttgatattaaatgtagaaaatcaggattaaagcccgatgccgttgtattggttgctacgactaaggcattaaaaatgcatggcggcgttaaaaaagatgatcttggtactgaaaatatagatgcagtgaccaaaggttgcaaaaaccttgagagacatattgaaaacattaaaaaatttggcgttcctgttgttgtagccatcaatgatttcatcactgatactcaaaaggaacatgcagcaattattgattattgcaaaaagattggtgtcgaatgcaaaatttcttcccattgggaaaagggcgggaaaggtgcagcagaactagcagaagaggtagtaaaaattgctgatgc

SEQ ID NO: 315534 - DNA, 828 bp, Unknown
  Bacterial polypeptide expressing nucleotide sequence isolated from the Sargasso Sea
agatctaatgagcctgtaagggctaagcagttaaatgctgatggagcaatagcagcattattgaaagatgcgtttcagcccaacttagtacaaaccttagagaataatcctgcatttatacatggcggaccttttgcaaatattgcacatggatgcaattcagttgtttccactaaagcagcacttaaactagctgattatgttgttacggaagctggatttggagctgacctaggtgctgagaaattttttgacatcaaatgtagaaaatcaggtctgaagcctgatgctgttgtgctagttgcaaccactaaagcgttaaaaatgcatggcggtattaaaaaagaagacttaggttcagagaatgtggatgcagtaaagaaaggttgtaaaaatctcaaaaagcacattgaaaatatagggaagtttggtgtccctgttgtcgttgcaataaatgattatttaacagacacaaagaatgaacatgcctcaattattgattattgtaaaaatattggtgttgagtgcaaaatctcttctcattgggaaaaaggtggtttaggagcagtagaccttgcagaagaggttgcgaaaattgctgactcaaattcagctgaatttaaacctttgtacgataataaaatgtctctttggaataaaacccaatatatagcaaaaaatatttatggtgcagcagatatcatcgctgataaaaaggtaagaaaccaatttaagaaattagaagatgatggttttggtgaataccccatatgtatggcaaaaactcaatacagcttttctactgatccattattaatgggtgcacct

SEQ ID NO: 315535 - DNA, 787 bp, Unknown
  Bacterial polypeptide expressing nucleotide sequence isolated from the Sargasso Sea
gtaacagaagcaggttttggtgcagaccttggggcagaaaagtttttagatattaaatgcagaaaatctaatttgaaaccgagttgtgttgtcatcgtagcaacaattagagctttaaaaatgcatggtggtgttgcaaaagatgaattaaaaaatgaaaatgttgatgcattgaaaaaaggtctggtgaatcttgaaagacacatagaaaacgtaaaaaaatttggattacctgttgcgattgcagttaatcattttattaaagatacagatagtgaagttaaagctttaataaatttttgtgaaaacctaggagttaaagcaagtttatgcactcactgggcaaatggtggcgaaggaacaaaagaattagcaaagcatgttgcttatttgtgtgaaaaaaaagatgccaattttaattttctttatgaaagtaacacgcctctatttaaaaaaatagaaacgattgcaaaagaaatttatagagctgatgaagtgattgctgatacaaaaataagagatcaattaaaaaattttgaagaagcaggttacggggaattgccaatttgtgtagcaaaaacacaatacagtttttcaactgatccaaatcttaaaggtgcaccaactggttacgttttgcctgtaagagaaataagactttcgtcaggtgcagaatttattgttgttgtttgtggggcaattatgactatgccaggactacctcgcgtacctgcagctgactctattaaattaaataataatggtgaaatcgaaggtttattttaaa

SEQ ID NO: 315536 - DNA, 898 bp, Unknown
  Bacterial polypeptide expressing nucleotide sequence isolated from the Sargasso Sea
cgtgtattagatatgaatgatcgagcattgagaaaaacagtttgctcaataggatctattggcaatgggtatcctagagaagatggctttgatatagttgtggcatcagaaattatggcaatattttgtttggcaacatcattagcagacttgaagaaaagattaggtgatattgttgttggatatacaagagataaagcgcctatcctagccagccagataaatgctcatggagctatgacagttttattaaaagatgctgttatgccaaacttggtccaaactctagagaataatccagcaattattcatggaggaccatttgccaatattgcgcatggttgtaattctgtcattgctacaaaggcttctctaaaattagctgattatgtagttactgaagctggatttggtgcggatttaggcgctgaaaaatttttggatattaaatgtagaaaagctaatttaaaacctgcagtagtagtattggttgcaacaattagagctctaaaatatcatggtggttgcccaaaagaggattttggaaaagaggggtgtgaatacctacaaaaaggactagttaatctagaaaaacatgtagaaaatcttaaaggtcattatgggctccctgttgttattggtataaatgggtttgcaacagataccgatgccgagagaaaaattttacaagacaaatcagaagaactacaggtgcctattgtatcttcaacgcatcacgcaaatggtggagaaggtgcaaaagatcttgcggaaatggttgtaaagactatagatgaagctgagaataattttcaatacctatatgaagacgagttagatttatggtctaaaatggaaacaatcgcaaaaaaaatatatgggtgcagcaagcattgat

SEQ ID NO: 315537 - DNA, 409 bp, Unknown
  Bacterial polypeptide expressing nucleotide sequence isolated from the Sargasso Sea
tatgagtagtgatattgaaatagcccgtaaagcagatttaaatccaattgtagaagttggggcttcactaggaataccaaatgatgcaataaatccatttggtcattataaagctaaaatttcctcaaattggcttgaaagtaagagaaagaattctgatggtaagttaattctggtaactgctattaatcctactccagctggagaaggcaaaacaacaacttcagtaggtctaaatgatggattaaatagtataggtaaaaattcggttgtttgcttgagagagccatcattaggaccttgctttggcatgaagggaggggctgcaggaggtggatatgctcaagttgttccaatggaagatattaacctacattttacaggtgatttccatgccataacttctgcc

SEQ ID NO: 315538 - DNA, 784 bp, Unknown
  Bacterial polypeptide expressing nucleotide sequence isolated from the Sargasso Sea
tgtttagcaacagaccttaaagatttagaaaatagaattggtaatattacaattggttatacaagagataagcaatcaatttatgcaaaagatttaaatgcacaaggtccaatgaccgttttactaaaagaagcgataagacccaatgtaactcaaactctagaaaataatcctgcaataattcatggtggtccttttgcgaatatagctcacggatgtaattcggttattgcaactaaagctggacttaaattagctgactacgttgtaacagaggcgggattcggagctgatttaggagcagaaaaatttcttgatattaaatgtagaaaatctgatctcaaaccagattgtgttgttattgtagcaacaatcagagcactaaaaatgcatggaggagttgctaaagaagatttaaaaaaaaaaaatgtatctgcactaaaagatggaatggtaaatttacgtagacatataaataatattagaaaatttggattacctgttactgttgcagttaatcattttatcactgatacagaagatgaaatgaaaacattgttagatttttgtgaaactcaaggagtaaaagcttctaaatgtactcattggtcaaatggaagcgaaggaactattgaattagctaaaaatgttacagaaatttgcgaggacaaaaaagatacatttaaatttttatatgaagatgatctcccactattcaaaaaaatagaaaaaatcgcacaagaaatttatagcgcctctgaagtggtagcagatacaaaagtta

SEQ ID NO: 315539 - DNA, 943 bp, Unknown
  Bacterial polypeptide expressing nucleotide sequence isolated from the Sargasso Sea
tggaaatatagtcataggtattccagatccaacgaacccataagagcaaagcaactcaatgccgatggcgcaataaccgctttattgaaagacgcattccagccaaatttagtacaaacacttgaaaataatccagcatttatacacggtggaccattcgcaaatattgcacatggttgcaatacagtcgttgcaactaagcttgcattaaaacttgctgattatgttgttaccgaagccggatttggagcagacctgggcgctgagaaattttttgatatcaaatgcagaaaatcaggtctcaaaccagacgcagttgttctggttgcaaccacaaaagctttaaaaatgcatggtggcgtgacaaaggataaccttggagcagagaatgtagatgcagtaaccaaaggttgcaaaaatctcaaaagacacattgaaaatatcaagaagtttggagtccctgtcatggttgcgatcaatgactatgtgaccgatacaaaagatgaacatgccgcgataattcaatattgtaaagaaattggtgttgagtgcagaatttcatctcactgggaaaaaggaggcaaaggtgcatcagaactagcagaagaggttgttaaaattgctgattctggttcttctgatttcaaacctttgtatgacaataaaatgtctctatgggataagacccaattcattgcacaaaacatatatgatgcctcagaaatcattgcagataaaaaggtaagaaatcagtttaagaaattagaagatgatggatttggtgagtacccaatttgtatggcaaaaactcagtacagcttttcaacggacccattgctgatgggcgcaccatcaggtcatgatgtgcctattcgagaagtaagactatctgctggcgctgagtttattgtggttgtttgcggtgaaattatgacaatgccag

SEQ ID NO: 315540 - DNA, 651 bp, Unknown
  Bacterial polypeptide expressing nucleotide sequence isolated from the Sargasso Sea
ggacttggaggagttggaaatggtatacctcgtcaaagtggatttgatatcacagttgcatcagaaataatggcagtattttgtctggcaacagacttaaaagatttagaagaaagaattggaaatattgttattggatacaaaaaaaatcaagagccaattaaagttaggcaattaaatgcacaaggagcattgactgcacttttaagagatgcatttcagcctaatttagttcagactcttgaaaataatcctgcattaatgcatggaggcccttttgctaatattgctcatggatgcaattcagttattgctacaaagagcgcattaaaattagcagattatgttgtcactgaggctggatttggtgctgatttaggagcagaaaaattttttgatattaaatgtagaaaagctagacttaaaccagatgcagtggtgctagtagcaactactaaagcattaaaaatgcatggtggcgtgaaaaaagaagaccttaattctgaaaacattgatgctgttataaatggatgtgaaaatctaggaagacatatagaaaatattaaaaaatttggtgtacctgttgttgttgcaatcaatgattttattactgatacacagaacgagcacaatgcaatcgtaaagttttgg

SEQ ID NO: 315541 - DNA, 584 bp, Unknown
  Bacterial polypeptide expressing nucleotide sequence isolated from the Sargasso Sea
ttgtctcagagagccaagccttggtccatgctttggtatgaaaggaggtgctgctggaggtggatttgctcaagtgattcccatgacagatattaatctgcatttcactggagattttcatgccattggagctgcacacaatcttttatcagctttgattgataatcatattcattgggataataaattgaatatcgatcctagaagaattacctggaagagggtagttgatatgaacgatagatcattaagagatattacttgcggtcttggcggaacaggcaatggaatacctagacaaagcggttttgacataactgttgcatctgagattatggcagtgttttgcttagcatcagatatcgatgatcttaaaaaaagaattggaaatatagttattggttatacaagaaccaatgagccagtaagagcaaaacaactcaatgctgatggtgccatgattgcattactgcaggatgctttccaaccaaatttagtccaaactcttgagaataatcctgcattcatacatggtggtccttttgcgaacattgcacatggatgcaattcagttatttccacta

SEQ ID NO: 315542 - DNA, 809 bp, Unknown
  Bacterial polypeptide expressing nucleotide sequence isolated from the Sargasso Sea
atgcgttgtaattccagttgtttcaacaaaaactgcattaaaacttgcagattatgttgttactgaagctggatttggtgcagacttaggggcagaaaaattttttgatatcaaatgtagaaaatcaggccttaaacctgatgcagttgttcttgttgcaaccacaaaagcactcaaaatgcatggaggcgtgaagaaagaggatttaggaacagaaaatgttgatgcagttacattaggttgtaaaaatttagaaaagcatgttgaaaatataaataaatttggagttcctgtagttgtagctatcaatgattatgtttctgatactgaaagggaacataatgcaataataaatttctgtaaaaatcttggtgttcaatgcaaaatttcttcacattgggaaaaaggcggtcaaggagcatcggagcttgctgaggaagttgctaaattagctgactcaaatatgtctgagtttaaaactttgtatgaagatgcaatgtccttgtgggataagactaaatatatcgctcaaaatatttatggagctcaagacattattgctgacaaaagagttagaaatcagtttaagaagctagaagatgatggctttggctcttatcctgtttgtatggcaaaaacacaatacagtttttctacagatccattgctaatgggagctccaactggtcatgaagttccaataagagaagtaagactatcagctggtgcagaatttgtggtagtggtttgcggtgaaataatgacaatgcctggacttcctagagtcccagcagcagaggctattgggc

SEQ ID NO: 315543 - DNA, 1387 bp, Unknown
  Bacterial polypeptide expressing nucleotide sequence isolated from the Sargasso Sea
atgagtgaaataaaatcagatattcaaattgctagagaagctaaaatggagcctattaaggacatattaacaaaaattaatgtaccagatgaaagttctgcctttagtccaatgggacgccatatagcaaaaatcaatttaaactacttagatagtttaaaagataaaaaagatggaaaattagttttagttactgccataaccccaacccctgcgggggaaggaaaaactactacatctgtagggctgaatgatggtttaaataaaattggaaaaaaatctatagtatgtttaagggaaccaagtcttggtccatcttttggattaaaaggtggtgctgctggaggaggttatgctcaggttgttcctatggaacaaatcaatttacatttcactggagattttcatgcaataacttctgctcataatttattatctgctcttattgataatcatatttattggggtaataaactaaacatcgatgtaagacgagtttcttggagaagagttatggacatgaatgatagatctttaagatcaatcatcgtagatctaggaggtgtagcaaatggatatccacgtcaagacagttttgatattacggttgcttcagaattaatggctattttctgtttagcaacagatttaaaagatttagaaaatagaatcgcaaatataacaattggatacactagagaaaaaaaacctgttcacgcgaaagatttaaatgctcaaggtccaatgacagttttgcttaaagaagcaattagaccaaatgtaactcaaactttagaaaacaatcctgctattattcatggaggtccttttgccaatattgctcacggttgtaattctgtaatagctacaaaggcaggacttaaattagcagattatgttgttacagaagctggatttggtgcagatcttggggcagaaaaatttttgaatattaaatgtagaaaatcaggattaaagcctgattgtgttgttattgttgcaaccattagagctcttaaaatgcatggtggtgtattaaaagatgaattaaaaaacgaaaacgtaaaagctttaaagaaaggtttggttaatctagagaggcatataaataatactcgaaaatttgggttgccagtcacgattgcagtaaaccacttcattactgactcagataaagaaatgaaaacattattagatttttgtaaaacacagggtgtgaaagcgtctaaatgtactcattggtctgatggaagtgagggaacaagagagcttgcaaaaaatgttgtagctatttgtgaagattatcaagatacatttaaatatttatacgaagacaaattaccattatttaaaaagatagaaaaaattgctcaagatatttatcacg

SEQ ID NO: 315544 - DNA, 934 bp, Unknown
  Bacterial polypeptide expressing nucleotide sequence isolated from the Sargasso Sea
ttactaaaagacgcattccaaccaaacttagtgcaaactcttgaaaataatcccgcgtttatacacggtggacctttcgccaatatcgcgcatggatgcaattcagttgtttcaactaagctcgcactaaaacttgctgattatgtggtcacagaggctggatttggagccgatttaggcgctgagaaattttttgatatcaaatgcagaaaatcaggtctaaagccagacgcagttgttctagtcgccacgacaaaggctctaaaaatgcatggaggcattgccaaggataatctgggtggcgaaaacgtggatgcggtaaccaagggttgtaagaacctcgaaaggcatattgaaaacatcacaaaatttggagtccctgtcattgttgcaatcaatgactatgtgactgatacaaaagatgaacatgacgcaataataaattactgcaaagaaattggtgtcgagtgcagaatttcctcgcattgggaaaaaggcggtaagggcgcatcggatctagcagaagaagtggtcaaaattgccgactccaatgcttctaaatttaaacctttatacgacaataaaatgtctctgtgggataaaaccgaatacatagcaaaaaacatttacggtgcatcagaaatcattgcagataagaaagtaagaaatcaatttaagaaattagaagacgatggatttggtgaatacccaatatgcatggcgaagactcaatacagtttctcaacggatccattattaatgggtgctccttcgggacatgacgttccgatcagagaagtaagactctctgctggcgcagaatttatagtcgttgtttgcggtgaaattatgacaatgccaggattgcctagaataccagcagcagagggtattgatgttgacgatgaaggattgattcagggtctgttttaat

SEQ ID NO: 315545 - DNA, 1300 bp, Unknown
  Bacterial polypeptide expressing nucleotide sequence isolated from the Sargasso Sea
tatgtcagatattgaaatagcaagaaaagctaagatgcatcctataagtgaaattcttgaaaagataggagtaccagatacgccagaagctttcagcccaatgggaagacatatagcaaaattaaatttggaatatattgataaattaaaagataaaacagatggtaaattggtcttagttacagctataactccaactccagcaggtgaaggtaagacaactacatctgttggactaagtgacggtttaaataaaataggtaaaaaatcgatagtctgcctaagagagcctagcttgggtccatcgtttggaatgaaaggtggtgcagcaggaggtgggtatgcacaagtagttcctatggaacaaataaatttacactttaccggtgattttcatgcgattacttcagcgcataatctattatcagcattaattgataaccacatatattggggcaataaattaaatatagatataagaagagttgtttggaaaagagtaatggatatgaatgatagatcgctaaggtctatagttgttgatttaggtggggttgctaatggttatccaagacaagatggatttgatattacagtagcatctgaaattatggctatattctgccttgcaaaaaatcttcaagatcttgaagaaagaattggtaacataactattgcatacacgagagataaaaaatcaatttatgcaaaagatcttaatgcccaaggaccaatgacagttttacttaaagatgcaattagaccaaatataactcaaactcttgaaaataatccagcaattattcatggagggccttttgctaacattgcacatggatgtaattctgtaatagcaacaaaagcaagtttaaaattaagtgattacgtagttactgaagctggttttggtgctgaccttggtgctgaaaaatttttagatattaaatgtagaaaatcaaatttaagacctgattgtgttgtgttagttgctactataagagctttaaaaatgcatggtaatgtttcaaaagaagatttaaaaaatgaaaatgtaacggcattaaaaaatgggctagtaaatttagaaaggcacataaataatgtacgtaaatttggattaccagttacagttgcaattaatcattttattactgactcacaaaaggaagtcgatgcagttcttgatttctgcaaaacacaaggtgtaaaagcttcgatgtgtactcactggtcagatggtggaaagggtactactgaacttgcgcaaaatgttgtagaaatttgtgaggaaaataaaaat

SEQ ID NO: 315546 - DNA, 812 bp, Unknown
  Bacterial polypeptide expressing nucleotide sequence isolated from the Sargasso Sea
tgctcttaaacttgctgattatgttgtaacagaagcaggatttggtgcagatttgggggctgagaagttttttgacattaaatgtagaaaatctgacctaaaacctgatgctgtagttttagttgcaacaactaaagcgttaaaaatgcatggtggtgttaaaaaagaggatcttgcttcagagaatgttgacgcagtaataggtggttgtaagaatcttgagagacatgtaaaaaatattagaaaatttggggttcccgttatagttgggataaatgattatgtaactgatacagaaaatgagcatgctgccatcattgatttttgtaaaaatatgggagtggcttgcaaaatttcttcccattgggaaaagggcggcgaaggagcatcagatcttgcgaaagaggttgcaaaattggccgactcaggaacttctgaatttaagactttgtatgataatgagatgtctctatgggataaaactgaatatattgcccagaatatatatggagcctctgagataattgcagataaaaaggtgagaaatcaattcaaaaagttagaagatgatggttttggtaattacccaatatgtatggcaaagactcaatatagcttttcaactgatccactgctaatgggggctccctcagggcatgatgttcctataaaagaggtgagattatcagcaggggcagaatttattgttgttgtttgtggagacattatgactatgccaggtcttccaagaatacctgctgctgaaaatatagatgttgatgaaaatggattaattcagggattattttaat

SEQ ID NO: 315547 - DNA, 982 bp, Unknown
  Bacterial polypeptide expressing nucleotide sequence isolated from the Sargasso Sea
tatggctgaagtaaaatctgacattcaaatagctcgagaagctaagatgcaacccataaaagatatactgtcaaaagttggtgtaccagatgaaaattttgcttttagtccaatgggcagacatatagctaaaataaatctggaatatttaaatactcttaaaaaagagaatggcaaactaattttagttactgcaataacccccactccagcgggtgagggtaaaactacaacctcagttggtttaaatgacggtttaaacaaaattggaaaaaaatcaattgtctgtttaagagagccaagccttggaccttcttttggaatgaagggtggagctgctggcggtggttatgcacaagtagtaccgatggaacaaatcaatcttcattttactggtgactttcatgctattacatccgctcataatttattgtccgcattaattgataatcatatctattggggcaacaaacttaacattgacgttagaagagttgtttggcgaagagtaatggatatgaacgatagatccttaagatcaataattgttgatcttgggggagtagccaatggttatccaagacaagatagttttgatatcactgttgcatctgaattaatggctattttttgtttagctacagacttaaaagatttagaaaatagaattggcaatattacaattggatatacaagagataaacaatcgatttatgcaaaagatttaaatgcacaaggtccaatgactgttttgcttaaagaagcaataagaccaaatgtaactcaaactttagaaaataacccagcaataatccacggtggcccttttgcaaatattgctcatggatgtaattccgtgatcgcaactaaggcaggacttaaattagctgactatgttgtaacagaagcaggatttggagctgatttaggaacggaaaaatttttagatattaagtgcagaaaatccaatctaaaacccaga

SEQ ID NO: 315548 - DNA, 978 bp, Unknown
  Bacterial polypeptide expressing nucleotide sequence isolated from the Sargasso Sea
ctatttatgctaaagatttaaatgcacaaggcccaatgacagttttactaaaagatgcaataagaccaaatattactcaaactctggaaaataatcctgccatcatccatggtggaccttttgctaatattgcgcacggatgtaattctgtaattgctacaaaagcaagtttaaaactaggtgattatgttgttacggaagctggttttggtgctgatttaggagcagaaaaatttttagatataaaatgtagaaagtctggattaaaacctgattgtgtagttcttgttgccactataagagcattaaaaatgcatggtaatgtttcaaaagaagacttgaaaagtgaaaatgttgaagcattaaaaaaaggtcttgtaaatttagagagacatataattaatgttcgtaaatttgggcttcctgttacagtggctatcaatcacttcattactgattctaaaagtgaagttaatgcagtgcttgatttttgtagaactcaaggtgtaaaagcttcaatgtgcacacattggtcaaatggaggagatggagcaacagaattagcaagaaatgtcgttgaaatttgtgagcagagtaaaaatacatttaaatttttatatgaagataatttatcacttttcaaaaaaatcgaaaaaattggtcaagaaatttatcatgcaagtgaggtagtcgctgatacaaaagttagaaatcaactaaaggattttgaaactaaaggttttggaaaacttccagtatgcatagctaaaacacaatatagcttttctacagatcctaatctaaaaggggctccaacaggccatgttcttccagttagagaagtgagattatcctcaggagctgaatttattgttgtaatttgtggagatattatgacaatgcctggattaccaagtgtgcctgcggcaaattcgattaagttaaatccaaaaggagaaattgaaggtcttttttaaa

SEQ ID NO: 315549 - DNA, 886 bp, Unknown
  Bacterial polypeptide expressing nucleotide sequence isolated from the Sargasso Sea
atgagcgaagttaaatcagatatccaaatagcaagagaagcaaaaatgcagccaataaaagatatattggcaaaaattaatgtaccagatgaaagctttgcatttagtccaatgggcagacatattgcaaaaataaaccttgaatatcttgaaactttaaaaaataaaaaagaaggcaaacttatcttggttactgccattactccaacacctgctggagaaggaaagacaacagtttctgtgggtctatcagatggaataaataaaattggaaaaaaatctattgtatgtttgagagaacctagtttaggaccatcttttggaattaaaggtggagctgcaggaggtggatatgcacaagtagtccctatggaacaaattaatttacattttactggagactttcatgcaatcacttcagctcataatcttttatcggctcttatagataatcatatttattggggcaacaaacttaatatagatgataaaaagatcgtttggaaaagagttatggatatgaacgatagagcattaagaacaattaatattaatactaaaggtgttgcaaaagattttccaagagaagatggttttgatatcactgtagcttctgaaattatggctatcttttgtttatcaaataatttgcaagatttagaaaaaagaattggaaatattacaattgcttataacaaaaacaaccaacccatttatgccaaagacttaaaagctcaaggtccaatgactgttttgttaaaagaagcaattagacctaatgttactcaaactttagaaaataatcctgctttaatacacggtggaccatttgccaatattgcacatggatgcaactctgtaattgcaacaaaaacagcattaaaac

SEQ ID NO: 315550 - DNA, 764 bp, Unknown
  Bacterial polypeptide expressing nucleotide sequence isolated from the Sargasso Sea
tatggattctgatataaatattgcaagaaaagctaattctttacccattttagaaatagcaaaaaatcttaatattcctgaagaatccataataccttatggaaacaataaggctaaaattgattatggttttataaaaagtctatccaataaaaaaaatggtaaactcattctagtgactgctatatctcccacaccagctggagagggcaaaacaacaacaacagttggccttggtgatggacttaacaagatagggaaaaatacacttatttgccttcgtgagcctagtttgggtccatgttttggcatgaagggaggagcagcaggagggggatattctcaagtcataccaatggaagatataaatcttcattttacaggtgattttcatgctataagttcagctcacaaccttttatcggctttagtagataatcacattcattgggacaacacattaggttttgacgtaagaagagttagctggaaaagagtcgttgatatgaacgatagagctctccgtaaggtagtattgtccttaggcggagtaaataatggttttccaagagaaggaggatttgacataactgtagcctcagaaattatggcaattttttgtttggctgaagatttaaatgatctgagacgaagaattggaaatattgttgtgggttttacaaggaagaacgatccaataacagctaaacagataaatgcagatgaaccagtaaccgcacttttgaaggatgcatttatgccca

SEQ ID NO: 315551 - DNA, 940 bp, Unknown
  Bacterial polypeptide expressing nucleotide sequence isolated from the Sargasso Sea
aatgagtgaaataaaatcagatattcaaatagctagagaagctaaaatgcaaccaataaaagacatattgtcaaagatagatgtgcctgatgagaattttgcttttagtcctatgggtagacatattgcaaagattaacttggaatatctagatacccttaaaaataaaaatggtaaattaattttagttacagcaatcactcctaccccagctggcgaaggtaaaacgacaacatctgttggattaaatgatggtttaaataaaattggaaaaaaatctattgtttgcttaagagaaccaagtttgggaccttcatttgggatgaaaggtggagctgctggtggtggttatgcacaagtagtaccgatggaacaaatcaaccttcattttactggagactttcatgctattacatcagcccacaatttattatctgcactgatagataatcatatttactggggtaacaaactaaatattgatgtaagaagagttgtttggagaagagtaatggatatgaatgataggtcgttaagatctataattgttgatttgggtggagttgccaatggttaccctagacaagatagttttgatataactgttgcttctgaattaatggctattttctgtttagcaacagatttaaaagatttagaaaacagaatcggtaatatcacaattggttatacaagagataaacaagcaatttatgcaaaagatttgaatgctcagggcccgatgacagttttacttaaagaagcaataagaccaaatgtaactcaaacgttggaaaataatcccgcaataattcatgggggaccttttgcaaatattgctcatggatgtaattctgtaattgcaactaaagcaggattaaaattagctgattatgtagtcacggaagcaggatttggggctgatttgggagctgaaaaa

SEQ ID NO: 315552 - DNA, 223 bp, Unknown
  Bacterial polypeptide expressing nucleotide sequence isolated from the Sargasso Sea
gatgtcagatatagagatagcaagagctgctaaaaaaattcacataagagatgttgccgctaaagtaaatattccagaggaaaatcttattccttatggccatgatgcagcaaaaataaattttgattttattgaaaaaagtcaatctaaccccgatggaaaattaatattagtaactgcaattaacccaacacctgcaggcgaaggcaaaacgactacatca

SEQ ID NO: 315553 - DNA, 1267 bp, Unknown
  Bacterial polypeptide expressing nucleotide sequence isolated from the Sargasso Sea
ttgaccaaaattaaatcagatattgaaatagcaagagcatctaaaatgaaaccaataggggatgttcttggaaaatttaatatacctgacgatcccttttcttttagtccaatgggtcgacatattgcaaaattaaattttgaatacatcgataaattaaaagaaaaaaaaagtaatcttattttagtaactgccataacaccaacgccagcaggagaaggaaaaacaactacttcggtcggtttaaatgatggtttaaataaaattggaaaaaaatcaattgtttgcctcagggaaccaagtttaggaccttcttttggaatgaaaggcggagctgctggagggggatacgcacaagttgttccaatggaacaaataaatttacatttcactggagattttcacgcaataacctcagcacacaatttattatcagctttaattgataaccatatttattggggaaacaaactaaaaatagattcagaaaatatagtttggaaacgtgtagtagatttaaacgatcgtggtcttagaaaaataaagataaatctcgaaaaattaaaagcaaatattccaagagacgacagctttgatattactgttgcctcagaagtaatggcaatattttgtttatcaaacagcatcaaagatttagaagaaaaaattggaaatattacagttgcttataccaaagataaaaaacctgtttatgcaaaagatttaaaagccaatggtcctatgacagtattattaaaagaggcaatcagacctaatgcagttcaaacattagaaaataatcttgcaattattcatggcggtccatttgcaaatattgcccatggctgcaactcaattattgctaccaaaactgctttaaaactatctgaatatgtaattaccgaagcaggttttggggctgaccttggtgctgaaaaatttttcaatataaaatgtcgaaaagcagaactaaaaccaagttgcgtagttcttgttgccacaataagagctttaaaaatgcatggaggtgttgagaaagacgatcttaagaaagaaaatcttgatgcactcaaaaaaggtatgcctaatttagaaagacacataaaaaatattaagaagtttggtttagaagtaatagttgcaatcaaccattttattactgacacagatagggaagttaaaattatccaagaacaatgtgctaaacttggagttaaagtaagtctttgtacacattggtcagatgggggaagcggaactaaagatt

SEQ ID NO: 315554 - DNA, 1095 bp, Unknown
  Bacterial polypeptide expressing nucleotide sequence isolated from the Sargasso Sea
tatggagcaaataaatttacattttacaggtgattttcacgcgattacttcagcgcataatttattgtcggctatgattgataatcacatttattggggaaataaacttaacatagatgaaaataggattgtttggaaacgtgtaatggatatgaatgaccgcgcacttatatttattgatattaatactagtggagtcgctaaggatttcaaaagagttgatggtttcgacataacagttgcatcagaggtaatggcaattttttgtctatctaacgatttaaaagatttagaaaaaagaattggtaatattacttttgcatacgataaaaaagggagcccactttatgcaagagatattaatgctcatggtcctatgactgttttgcttaaggaagcaataaggccgaacgtgactcaaactttagaaaataatcccgcaataattcatggaggtccatttgcaaacatagcccacgggtgcaattcagtgattgcaacaaaatctgcattaaaattatctgattatgtagtaactgaagcaggatttggtgcagatcttggtgcagaaaagtttttaaatataaaatgcaggaaagcagggttaagccctagctgtgtggtaattgttgcaacaataagagcattaaaaatgcatggaggcgttgaaaaagaagacttgaaaaaagaaaatatatcggcgttagaaaaaggattggtcaacttggaaaggcatataacaaatataaaaaaatttggtttagaaccaatagtagccataaatcattttgcgctagatacaaaaaaggagattaaaaccgttttaaatttttgtaaaaaaaataaagttgaagtaagtgaatgcaagcattgggctaaaggtggaaatgggaccaaagatcttgcaaaaaaagttgttaaagtctgcaaaaataacaaaaataaatttaaatttttatataatagcaatctgaaactttgggataaaatagagttaattgctaaacaaatctataaggctgataaaataacagctgatgataaagtcaaagaacaattaaaagtttttgaagataatggtcatggaaatttacc

SEQ ID NO: 315555 - DNA, 817 bp, Unknown
  Bacterial polypeptide expressing nucleotide sequence isolated from the Sargasso Sea
taagcttgcattaaaactggctgattatgttgttaccgaagccggatttggagcagacctgggcgctgagaaattttttgatatcaaatgcagaaaatcaggtctcaaaccagacgcagttgttctggtggcaaccacaaaagctttaaaaatgcatggtggcgtgacaaaggataaccttggagcagagaatgtagatgcagtaaccaaaggttgtaagaatctcaaaagacatattgaaaatatcaagaagtttggagtccctgtcatggttgcgatcaatgactatgtgaccgatacaaaagatgaacatgctgcgataattcaatattgtaaggagattggtgttgagtgcagaatttcatctcactgggaaaaaggaggcaaaggtgcatcagaactagcagaagaggttgttaaaattgctgactctaattcttctgattttaaacctttgtatgacaataaaatgtctctatgggataagacccaattcattgcaaaaaacatatatggtgcctcagaaatcattgcagataaaaaggtaagaaatcagtttaagaaattagaagatgatggatttggtgagtacccaatttgcatggcaaaaactcagtacagcttttcaacggacccattgctgatgggtgctccatcaggtcatgacgtccccattcgagaagtaagactatccgctggcgctgagtttattgtggttgtttgcggtgaaattatgacaatgccaggcctgccaagggtgcctgcatcagagggtatcgatgtagatgatgagggactgattcaaggacttttctaa

SEQ ID NO: 315556 - DNA, 1033 bp, Unknown
  Bacterial polypeptide expressing nucleotide sequence isolated from the Sargasso Sea
tattggaaaaaaacagcaatttgtattcgagaggcgtctttgggaccatgctttggtatgaaaggaggtgctgccggaggtggtaaagctcaagtagtaccaatggaagaaatgaatcttcattttactggagattttcatgcgattacaagtgcccataatttactttctgccatgatagataatcatatttattggggtaacaaagaacaaattgatataagaagggttgtttggaaaagagtattagatatgaacgatagagctttaagagacatagttacctctcttggcggtgctactaatggatttcctagacaagctggctttgacataactgtggcctcagaggtaatggctatactttgtcttgctaatgatttaaaagacttaaaaaaaaggttgggtaatataattattgcttatagaagggataaatctccagttttttgtaaagacataaaagcagacggagctatgacagttctgctgcaacaagccatgcaaccaaatattgttcaaacactagaaaataacccagccttggttcatggtggcccttttgcgaatattgcccatgggtgcaattcagtaatagcaacaaaagcggccttaaacctcgcagattacgtggtaactgaagcaggttttggagcagatttaggagctgaaaaattccttaatatcaaatgtagaaaagctgatttaaaaccatctgctgttgttttagtagctacggtaagagctttaaagatgaatggtggagttactaaggagaacctaggagaagaaaattcttcagcagttgaaaaaggttgtgataacctaggaagacatattgaaaatttaaaaaactttggattacctgtgatcatagctataaatcattttatatctgatactgataatgaaatatttaagataaaggaatatgttgctaaaaaagattgtgagtcaattttatgcaaacactgggaaaaaggttctgaaggcactattgaacttgcaaacaaagtagtagaaattgcagata

SEQ ID NO: 315557 - DNA, 761 bp, Unknown
  Bacterial polypeptide expressing nucleotide sequence isolated from the Sargasso Sea
tttgaagacagatatagaaatagctagagctgcaaagcctaaaaaaattgatttaattgcgaatcaattaggtattagcgaagaatatctggagctttatggcaaatacaaatgtaaggtcgacctttcaattgccaacaaagaactcaaagataaaaagaacggtaagcttatattggttactgcaatatcccctactccagctggagaaggcaaaactacaacaagcgttggtctcgttgacgggctatgcaacattggaaaaaacgcaatcatttgtcttagagaaccaagtttaggtccttgttttggcatgaaaggtggtgcagctgggggaggaaatgcccaagtaataccaatgacagatataaatttacattttactggtgattttcatgctataggagcagctcataacttactctctgctctgatagataaccatattcactgggacaatcagcttgatatagaccctagaagaattacttggaaacgagtagttgacatgaatgacagatctttaagagatataacttgtggccttggtggtacgggcaacggcatacccagacaaagtggttatgacataaccgttgcttctgagattatggcagttttttgtctggcaacagatttagaggatcttcaaaaaagaataggaaatattgtaattggttacaccagatctaatgagcctgttcgagcaaaacaactaaatgctgatggagcaattactgcattattaaaagatgcatttc

SEQ ID NO: 315558 - DNA, 1048 bp, Unknown
  Bacterial polypeptide expressing nucleotide sequence isolated from the Sargasso Sea
atggttaaaattaagtctgatattgaaattgctagaaaagcaaagatgcagccgatcggcaatattttaaaaaagtttaaaattcctgacactccttttgcttttagcccaatgggccgccatgtagcaaaaataaatttaagatatattaaaacacttaaagaaaaagaaaaaaatctagtgctggtaactgcaattacaccaactcctgctggagaaggcaaaacgactacctcagttggattaaatgatggtttgaataagattggaatgaaatcaattgtttgtttaagagaaccaagtttaggtccgtcatttggtatgaaaggtggagctgctggaggtggttatgctcaagtagtaccaatggaaagaattaatttgcattttacaggggattttcacgctattacaactgctcataatttattatcagcgttaattgataatcatatttattgggggaataaattgaatatagacatagaaaatattgtttggaaaagagtcgtagatttaaatgatagaagtttaagaaaaataaaaattaatttagagcagcttaaagctaaccatcccagaaatgatagttttgatattactgtagcctctgaggtcatggctattttctgtttatcaaatgacattggtgaattagagagaaaaattgggaatattacaattgcatatacaaaaaacaaaaaacctatttttgcaaaagatttaaaagctcaaggacccatgacagtattattaaaagaggcgtttagaccaaatgtagttcaaactttagaaaataatcttgcaattatccatggtggtccttttgcaaatatcgctcatggatgtaattcaatcttagctactaaaactgcattaagattgtcagattacgtaattactgaagcaggatttggtgcggatttaggggcagaaaagtttttagatattaaatgtcgtaaagcaggtcttcaaccgaaatgcattgtcctcgttgcaacaattagggcactgaaaatgcatggtggtgttttaaaagaaaatttaa

SEQ ID NO: 315559 - DNA, 682 bp, Unknown
  Bacterial polypeptide expressing nucleotide sequence isolated from the Sargasso Sea
tatgagtaattatccaactgatttagagatagcaaacgctgctcataaaaaaccgattgaagaaattgcaagttcgttagatatcaattctgataatctaataagatatgggaatgataaggcaaaattatctaccaagttcgtcaactctctctcaaaaaaagataatggaaagttaatcttagtaactgctatatcgcctacaccagctggagagggtaaaactaccactagcgttggtttggtagatggactatgccatattggaaaaaaagcaatgatttgtcttagagagccaagtctaggtccttgtttcggaatgaagggtggcgcagctggaggtggttatgctcaggtcatacctatgacagatatcaatttacattttacgggtgattttcatgccataggtgctgcccataatcttttgtctgcattaattgataatcatattcattgggaaaataaattaaatattgatcctagacgtattacttggaaaagagttgttgacatgaatgatagatcattaagagatattacttgtggcttaggaggaattggaaatggtattcccagacaaagtggttatgacattacagttgcgtcagaaattatggctgtattttgtcttgcttcagatattgatgatcttcaagaaagaatggaaatattgtcatag

SEQ ID NO: 315560 - DNA, 889 bp, Unknown
  Bacterial polypeptide expressing nucleotide sequence isolated from the Sargasso Sea
ataatccagcttttatgcatggggggtccatttgcaaacatagctcatggttgtaattcagttgtctcaacaaaaactgcgttaaagcttgcagattatgtagttactgaagctggatttggtgcagacttgggtgcagaaaaattttttgatattaaatgtagaaaatctggccttgaacctgatgcagtcgttctggttgcaacaacaaaagcactcaaaatgcatggaggcgtgaagaaagaagatttaggaacagaaaatgtcgatgcagttatattaggttgtaaaaatttagaaaaacatgttgaaaatataaataaatttggagttcctgtagttgttgcaattaatgattatgttacagatactgaaaaagaacacaacgcaattataaatttctgcaagaatcttggtattcaatgcaaaatttcctcacattgggaaaaaggtggtcttggagcatcagagcttgctgaggaagttgctaaagtagcagactcgaatatatctgattttaagaccttgtacgatgatgcaatgtctttgtgggataagactaaatacattgctcaaaatatttatggagctcaagatattattgctgataaaaaagttagaaatcagttcaagaagttagaagatgatggttttggttcttatcctgtgtgtatggcaaaaacacaatacagtttttcaactgatccattactaatgggagccccaacaggtcatgaagttccaataagagaggtaagactatcagctggtgcagaatttgtagttgtggtttgtggtgaaattatgacaatgcctggccttccaagagttccagcagcagaggcaattggtcttgacgaaaataatgaaattgctggactattttaat

SEQ ID NO: 315561 - DNA, 1009 bp, Unknown
  Bacterial polypeptide expressing nucleotide sequence isolated from the Sargasso Sea
tatggtcataggctactcaagatccaacgaacccataagagcaaaacaactgaatgccgatggagcgatcactgctttactaaaagacgcattccaaccaaacttagtgcaaactcttgaaaataatcccgcgtttatacacggtggacctttcgccaatatcgcgcatggatgcaattcagttgtttcaactaagctcgcactaaaacttgccgattatgtggttacagaggctggttttggagccgatttaggcgctgagaaatttttcgatatcaaatgcagaaaatcaggtctaaagccagacgcagttgttctagtcgcgaccacaaaggctctaaaaatgcatggaggcattgctaaggataatctgggtggcgagaacgtggatgcggtaaccaagggttgcaagaacctcgaaaggcacattgaaaacatcacaaaatttggagtccctgtcattgttgcaatcaatgactatgtgactgatacaaaagatgaacatgccgcaataataaattactgcaaagaaattggtgtcgagtgcagaatttcctcgcattgggaaaaaggcggtaagggcgcatcggatctagcagaagaggtggtcaaaattgctgactccgattcttctgaatttaaacctttatacgacaataaaatgtctctgtgggataaaaccgaatacatagcaaaaaacatttacggtgcatcagaaatcattgcagataagaaagtaagaaatcaatttaagaaattagaagacgatggatttggtgaataccctatatgcatggcgaagactcaatatagtttctcaacagatccattattgatgggcgctccgtcaggacatgacgttccgatcagagaagtaagactctctgctggcgcagaatttatagtcgttgtttgcggtgagattatgacaatgccaggattgccgagaataccagcagcagagggtattgatgttgacgatgaaggattgattcagggtctgttttaa

SEQ ID NO: 315562 - DNA, 751 bp, Unknown
  Bacterial polypeptide expressing nucleotide sequence isolated from the Sargasso Sea
tatgactaagtacttaagtgatttagagatagctaatgctgctaacaaaaagcctataagcgagatagctaattcaataaatattaatgaagaagatttaattaagtatggcaatgataaagcaaaattatcatatgattttattaattcattatctaaaaaagatatcggaaaattaattttagtaactgctatttctccaactcctgctggtgagggcaagacaaccaccagtgtaggattagttgatggattatgtcacatcggcaagaaagcaatgatttgcttaagagaaccaagtcttggtccatgttttggcatgaaaggtggtgctgctggaggtggctatgctcaagtaatacctatgacagatattaatcttcattttactggagactttcatgctattggagcagcacataatttattatccgcattgattgataatcatatccattgggataatgaattaaatattgatcctagaaggataacttggaaaagggttgtggatatgaatgatagatcattaagagaaataacctgtggattgggaggccttggcaatggcgtccctcgacaaagcggatacgatattactgttgcgtctgaaattatggcagttttttgtcttgcatccgatctagaagatttacaaaatagaataggaaacattgttatcgggtataccaaagataataaaaaggtaagagctaaacagttaaatgctgatggggcagttacagcatta

SEQ ID NO: 315563 - DNA, 1080 bp, Unknown
  Bacterial polypeptide expressing nucleotide sequence isolated from the Sargasso Sea
aatgaataaaataaaatctgatattgaaatagcaagaactgctgatatcaaaccaattacagaggtcttaaaaaaattaaaaattcctgatgatccttttgcttttagccctatgggtcgtcatatagcgaaattaaatttagaatatattgactcattaaaagaaaaacaaagcaacttaattttagtaacagccataacacctactcctgctggagaaggaaaaacaactatttctgtaggcctgaatgatggtttaaacaaaataggaaaacagtcgatagtatgtttacgagaaccaagtttaggtccttcatttggaatgaagggtggagcagctggtggtggctacgcccaagttattcctatggaacaaatcaatttacattttacaggagattttcatgcaatcacttcagctcataatttactttctgctttaatagacaatcatatctattggggaaataaattaaacatagatccaaaaaacattgtatggaaacgggtaatagatttaaatgatcgctcgctcagaaaaatacaaataaatttagagaaattaaaagccaataccccgagaaatgacagctttgatattactgttgcctcagaagttatggcaattttctgcttgtcaaatagtataaaagaactagaaaaaaaaattgggaatattaccattgcatattcaaaagataataaacctatttacgcaaaagatttaaaagctcaaggcccaatgactgtattgcttaaagaagcagttaggcctaatgtagttcaaacacttgaaaataatttagcaattattcatggcggaccgtttgcaaatattgctcatgggtgcaactcaattttagctacaaaaactgctttaaaattatctgaatatgttgttactgaagcaggtttcggtgctgatctaggagctgaaaaatttttagacattaaatgtcgaaaagctggaattaaaccaagttgcgtagttctagtagcaacaataagagctttaaaaatgcatggcggagaggagaaagatgattttaaaaaagaaaatctagaggctctaaaaaagga

SEQ ID NO: 315564 - DNA, 826 bp, Unknown
  Bacterial polypeptide expressing nucleotide sequence isolated from the Sargasso Sea
atgttcaaatcagacattgaaatcgcaagaaaagcaaatactatttctattcaaaaagtaggaggtaaacttggtttagaggaagatcatttgcttccgtatggaaatgataaagctaaaattagtgaaaaattcataaaatctattcagaaaaataaaaatggaaaattaattttagtaactgcaattaaccctactccagcaggtgagggaaaaactacaactacagttgggcttggagatggactgaatgcactgggtaaaaaaacctcaatttgtattcgtgaagcttctcttggaccatgttttggtatgaaaggtggagcggctggtggtggtttatctcaagtaattccaatggaagatatgaatcttcattttaccggagattttcatgccataacaagtgctcataatctactatcggcaatgattgataatcatatttattggggcaatgaagaaaacattgacttaagaagagttgtttggagaagggttgtggatatgaacgatagagctcttcgtgatatagtcactagtttaggtggagtttcaaatggagtccctaaacaaacaggatacgatattacagtagcctcagaagtaatggctatcttatgtttagctaatgatttgcaggacttacaaagaagattaggagacataatagttgcttatagaagtgataagagtccagtctactgtagagatataaaagctgatggtgcaatgacagttttgttgaaagacgcaattcttccaaatctagttcaaacattagaaaacaatcctgcttttgtccatggaggaccattcgctaata

SEQ ID NO: 315565 - DNA, 1155 bp, Unknown
  Bacterial polypeptide expressing nucleotide sequence isolated from the Sargasso Sea
tgcaaaaattgattttaataaaattaaagaaaaaaaagaaaattcaaaattaattctagttacagctattactccaactcctgctggagaagggaaaacaactacctctgttggtttaagtgatggtctatgcaagattggtaagcaaagtattgtttgtcttcgtgaacctagtcttggcccaagctttggtatgaaaggtggagcagctggaggtggatacgctcaagtagttccaatggaaaatattaatttacactttactggggatttccacgcaatcacttctgcaaataatttattagcttcattaattgataatcacatctattggggaaataaactacaaattgatacacgtcgtgtaagttggaaaagatgtgttgatcttaatgatagagctttaagagaaataactgctaaccttggaggagttgcaaatggttatcctcgaacagatggatttaatattacagttgcatccgaggtaatggcaatattttgcttagcaaataatttagaagatttggaaagaagattaggaaatataacagtagcatacactagagagagaaaacctatttttgcgaaagatttaaatgcacatggacctatgacagtgctgctcaaagaagcaattatgccaaacttagtacagacattagagaacaatcctgcaataattcacggaggtccttttgctaatatagcacacggttgcaatagtattatcgcaactaaaacaagtttacagcttagtgattatgttgttacagaagctggttttggtgcagatttaggtgctgaaaaatttcttgatataaaatgtcgtaaaggtgaattagtgccaagtgctgttgtgttagttgcaacaattcgtgcattaaaaatgcatggtggtgtaaataaaaaagatttacaagtagaaaatgtagacgctgttattaaaggtacttccaacttaaaacgccatatagaaaatatacaaaagtttagactacctgtagttgtagcagtcaaccattttgttgcggatacagatatggaaatagaagctttaaaaaatgaatgtaaaaaacttaatatagatgcaataacttgtgaacactgggctaaaggaggtgatggaactattgatttagcaaataaagtagt

SEQ ID NO: 315566 - DNA, 871 bp, Unknown
  Bacterial polypeptide expressing nucleotide sequence isolated from the Sargasso Sea
aaattaattttagttacagcaatatcccctactcccgccggtgaaggcaaaactactacaagtgttggtctattagatggactttgccatattggaaaaaaagcaatggtttgtcttagagagccaagcttagggccgtgttttggaatgaaaggcggtgcagcgggaggtggatacgctcaagtgataccaatgacagatattaatttacattttactggtgattttcatgccattggggctgcgcataaccttctttctgcattaattgacaatcatatccattgggaaaatcagttagatatagatccaagaagaattacatggaagagagttgttgatatgaatgacagatctctaagagatataacatgtggccttggtggcacaggtaatggtgtgcctagacaaagcggttacgacataactgttgcctcagaaattatggctgtattttgccttgcatcagattttgatgatctacaaaaaaggataggaaatatcgttataggctatacaagatctaataaacccataagggcaaaggagttaaatgccgatggagccataactgcattactaaaagatgcgtttcaaccaaacttagtacaaactcttgagaataaccctgcatttatacatggcggaccttttgcaaatattgcgcatggttgtaactcagttgtctctactaaaactgcattaaaactcgttgattatgttgttacggaagctggatttggagctgatctaggagctgagaaattttttgatatcaagtgcagaaaatcaggattggaaccagatgcagtagttctagttgcaactactaaagcattaaaaatgcatggcggtattaaaaaagaagatt

SEQ ID NO: 315567 - DNA, 994 bp, Unknown
  Bacterial polypeptide expressing nucleotide sequence isolated from the Sargasso Sea
agttgatttaaatgatagaagtttaagaaaaataaaaataaatttagagcaacttaaagccaatactccaagagatgatagttttgacattacagttgcatcagaggtaatggctattttttgtttatctaacgatatcaatgaattagaaagaaaaatcggaaatataacagttgcatatacaaaaagtaaaaaacctatttacgcaaaggatttaaatgctcatgggccaatgactgtattattgaaagaggcgataagacctaatgcagttcaaactttagaaaataatcttgcaattattcatggtggtccattcgctaatattgctcatggttgtaactcaattttagcgactaaaactgcattaaaattatctgagtatgtaattactgaagcagggtttggagcagatttgggtgctgaaaaatttttaaatataaagtgtcgtaaagccggaatacagccaaagtgcgtggttcttgttgcgactataagagctttaaaaatgcatggaggtgaagaaaaagataatcttaaattagaaaatttagatgcacttaagaaaggtcttccaaacttaaagagacatattgaaaatataaaaaaatttggtttagaccttgtggtcgcaattaatcattttaaaactgatactgaaaaagaagtgcaaattattgagaaatattgcaatgatttaaacgtgcaagttagcctttgtacccactgggctaatggaggaaaaggaacaaaagatttagcaaacaaggttgtcaagctttgcaatgaggcaaagaaaacaaaatttaattttatttatgatgataaaatctcattattagagaagattgaaacagttgcgaataaaatttatagagcaagttcagttgaaataagtgatacaattaaacaacaattatctaaacttgagcaagctggatattcaaaattcccaatatgtattgccaaaacacagtatagtttttctgttgac

SEQ ID NO: 315568 - DNA, 965 bp, Unknown
  Bacterial polypeptide expressing nucleotide sequence isolated from the Sargasso Sea
gatttagaagacctagagagaagacttggaaatattacagttgcttatacaagagagagaaaaccaatttttgcaaaagatttaaatgctcatggtccaatgactgttttgcttaaagaagcattaatgccaaatttagttcaaacactagaaaataatcctgctataattcatggaggaccgtttgctaatatagcgcatggatgtaatagcattatagcaactaagacaagtttagacctaagcgattatgtagttacagaggctggtttcggagcagatcttggtgctgaaaagtttttagatatcaaatgccgaaaaggaaatcttgcgcctagtgttgttgtattggttgcaactatacgcgcacttaaaatgcatggtggtgtagataaaaaagatctccaaacagaaaacattaaagcagttgttgatggaacttccaacttaaaacgtcacattgaaaatattcaaaaatttggtcttccagttgtggtggcagtaaatcactttgttgcagatacagacaaagaagtagaagcgcttaaagatgaatgtaaaaaattaaatattgatgccataacatgcaagcattgggctaatggtggagaaggaacggtagatcttgcagaaaaagttgtagaattagctgaggaaaaaaataattttaaatatatttacgaggatgatttacctcttattgaaaaagttagaaagatagctaaagaaatttacagagcagacgatgtcattgctgataaaaaaattttagatcagctagctcaatttgaggaagcgggatatgctaaatttccaatttgtattgcaaaaactcaatatagtttttcaactgatccaaacaataaaggggcacctatcaaccattctataccaataagagaagtgcgcttatcaagtggggcagaatttattgtagtaatctgtggggagattatgacaatgcc

SEQ ID NO: 315569 - DNA, 943 bp, Unknown
  Bacterial polypeptide expressing nucleotide sequence isolated from the Sargasso Sea
tggcggttatgctcaggtcgttccgatggaagatattaatctgcattttaccggtgatttccatgcaattggtgctgctaataatttattggcagcgatgattgataatcacatctattggggtaactcgttacaactagatgaacgtcgaatagcgtggcgaagggctgtagatatgaatgatcgtgcgcttcgctccatcgttggctcattaggaggtgtggccaatggtttccctagatcggatggtttcgatattgttgttgcatctgaaattatggcgattttttgccttgcaacaagcctagaggatatgcaaaggcgtttgggaaatattattgttggatatactagagagagaaagccggtctacgcgagagatctagaagcggatggcgcaatgacggtcttattgaaagatgcattggctccaaatttagtgcaaactttggaaaacaacccggcttttattcatggaggtccattcgccaatatagctcatggttgcaattctgttatggcaacacaagtgggtttgaagttagctgactatgtcgtaactgaggcaggatttggagctgatttgggtgcagaaaagttctttgatattaaatgccgcaaagctggattacagccagctacagcggttgttgtcggtacaatacgagcactaaaaatgcacggtggagtggctagggaggacttagggaaagaaaatgtggaagctgttcgcaaaggtgtttctaatatagaaagacatgtggtcaatactcaacaatttgggcttcctgtaattgtagcactgaatcgatttatcactgacacggatgcagaagttgaagcagttaaagatattttggctgaacatggtgttgaagctataccctgttctcactggtcagatggtggtgcaggcgcggaagatttggctcataaggttgta

SEQ ID NO: 315570 - DNA, 914 bp, Unknown
  Bacterial polypeptide expressing nucleotide sequence isolated from the Sargasso Sea
aatgaaaggtggtgctgctggaggaggttacgcgcaagttgttcctatggaacaaattaatttacattttactggagattttcatgcaattacatcagctcataatttattatcagcattaatcgataatcatatctattggggcaacaaattagatatagatgtaagacggattgtttggaaaagagttatggatatgaacgaccgatcattaagatcaataaatataaatttaggtggagttgcaaatggttttccaagggaagatgggtttgatattactgttgcatcagaaatcatggcaattttctgcttatcaaatgatttagaagatttagaaaagaggatcggtaacataacgattgcttataccagagacaagaaaccagtttacgcgaaagacttgaaagcacatggtccaatgacagtattattaaaagatgctatcagaccaaatgtaactcaaacattagaaaataatcctgcaattattcatggtggtccatttgcaaacattgcacatgggtgtaactcagttatagcaactaaaactggattgaaactagcagactatgttgtaacagaggctggttttggtgctgatctaggagcagaaaagtttttagatattaaatgcagaaaatccaatctaaaaccaagttgtgttgtcatcgtagcaacaattagagctttaaaaatgcatggtggtcttgcaaaagatgatttaaaaaatgaaaatgttgatgctttaaaaaaaggtctagtaaatcttgaaagacatatagaaaacgtaaaaaaatttggattacctgttgcgattgctgttaatcattttattaatgatacagataatgaggtaaaagctttaattgatttttgtgaaactttaggcgttaaagcaagtttatgcacac

SEQ ID NO: 315571 - DNA, 822 bp, Unknown
  Bacterial polypeptide expressing nucleotide sequence isolated from the Sargasso Sea
gggttatggcaattttctgtttatcaaatgatcttaaggatttggaaagacgcttaggtaatataactgttgcttacacaaaaaataaaaaaccaatatttgcaaaagatttgaaagcagagggcccaatgaccgtattactaaaacaagctcttatgcctaacttagttcaaacattagaaaacaacccggcaatcattcacggaggtccttttgcaaatattgcccatggttgtaatagtgttattgctactaaaactagtcttaaaattgctgattatgttgttaccgaggcaggatttggagcagatctaggagcagaaaaattcttaaatattaaatgtagaaaatctgatttaaaacctagtgcagcagttattgtagcaacagtacgtgctttaaaaatgcacggaggagtgacaaaagataatttaacaattgaaaacattgatgctttaaaattaggtatttcaaatttaaaacgccatattaataatatcaaaaaatttggattacctgctatagtagcaataaatcattttattgcagatacagaaaaagaattgaagctacttcaagatgaatgtagcaaaattggaattgaagctgtaatttgtaaacattggtcagaaggtggtgaaggagcaaaagaattagctaaaaaagtggttgatattgttgataaaaaaacagtttttaattttttatatgaagataaaagccctttaattgaaaaaattaaaaaaattgctttagaaatttatgctgctgatgaagtaattgctgataacaaaattagatcacaattaaaaacaatttgaa

SEQ ID NO: 315572 - DNA, 645 bp, Unknown
  Bacterial polypeptide expressing nucleotide sequence isolated from the Sargasso Sea
gtttgatattactgttgcatctgaaataatggcaatattctccttttcaaatgaccttaaagatttagaaaaaagaataggaaatataacagttgcctacacaagagaaaaaaaacccatctatgcaaaagatttaaatgcccaaggtccaatgacagtattgcttaaagatgcaattagaccaaatgtaactcaaaccttagaaaataatccagcaattatccatggtggtccatttgctaatattgcacacggatgtaattctgttttagcaacaaaaacaggattaaaactatctgattatgtagtcactgaagctggctttggtgctgacttaggtgcagaaaagtttttagatattaaatgtaggaaatcaggactaaaacctgactgtgtagttattgtgtcgacagttagagctcttaaaatgcacggtggattaaacaaagacgaattaaaaaatgaaaatgttgatgctttaaataaaggtttagtaaatttagaaagacatatcaacaacattaagaaattcaagttgcctgttacagtagcaataaatcattttgttttggataccgagaatgagatcaattcaataattaatttctgtaaaaaaattaatgtaaaagcatcagtatgtaaaca

SEQ ID NO: 315573 - DNA, 868 bp, Unknown
  Bacterial polypeptide expressing nucleotide sequence isolated from the Sargasso Sea
attgcaagtgcctgctaataaaatttcaattgacgaagttgctgcaactattgacataactgataaggatttaattaaatttggagatgataaggctaaaatctcttcatcattgattgaaaaactcaaaaaaaatgaagatggaaagctaatattggttactgcaatatctccaacaccagcaggtgagggtaaaactactacaagtgtagggttggtagacggtctatgtcacattggaaaaaaagcaatgatatgtttgagggagcctagcttgggcccatgttttggaatgaaaggaggagcagcaggcggtggttatgctcaagtaattcctatgacagatataaatcttcatttcacaggtgattttcatgcgataggtgcagcacataatcttctatctgctttaatagataatcatattcattgggataatcaattaaatattgatccgagaagaatcacatggaaaagggtcgttgatatgaatgatagatctttaagagatatcacttgtgggttaggtggaacaggaaatggcataccaagacaaagtggttttgatattacggttgcatctgaaattatggctgttttttgtcttgcctctgatattgatgacttacagaaaagaattggaaatattgttattggttatacaaaagataatgagcctgtaagagctaaccaacttaaagcggatggcgcaataactgctcttttgaaagatgcatttaaaccaaatcttgtacaaactttagaaaataatcctgcatttatgcatggtggtccatttgcaaatattgcacatggatgtaattctgttgtctctactaagactgcactcaagcttgcagattatgtc

SEQ ID NO: 315574 - DNA, 845 bp, Unknown
  Bacterial polypeptide expressing nucleotide sequence isolated from the Sargasso Sea
tgcacatggatgcaattcattagttgccacacaaacagcattaaaattaagtgattatgttgttacggaggcaggatttggggctgatcttggtgcagaaaaatttttagatatcaagtgtcgtaagggaaaattaaatccttcagctatagtaatagttgcaacagtcagagcgcttaaaatgcacgggggtatggataagaaggaactaaaaaatgaaaatgttgaagctgttaaaaatggtctttccaatttgaagcaacatattgctaacatgcaaatatatggctcgcctgtaactgttgccatcaatcactttattactgacactgaaaaagaattgtctgcaatcagagaatgctgtgaattattaaatgtgaaatcgtttaattgtactcattggagcaatgggggtgctggaactgaagatttggctaatcatattgttaatattacaaatgaagatgctccaaaaattaagcatttatatccggatgaaatgaaattatgggataaaatgaaaaaaatagcacaagaaatatacggagcaagtgatattatcgcagatcaaaaaatcatgttacaatttgaagaattgcagaaaaaatacggacactatcctatttgcgttgcgaaaacacagtacagcttctctacagacccaaatttaagaggcgctccaaaggaacatgtggttcccataagagaagttagactggctgccggtgctgagttcttagttgttgtatgtgataaaataatgacaatgccgggtcttcctagagttccagctgctaatgctatacacttaaatcaaaatggagatatagaggggttgttttaat

SEQ ID NO: 315575 - DNA, 958 bp, Unknown
  Bacterial polypeptide expressing nucleotide sequence isolated from the Sargasso Sea
atctattaaagatctaaaaactagattgggtaaaatagtcatcgcatatactagagaaaaaaaacctatattagctagtgatattaatgcacatggtgccatgaccgtgttacttaaagatgcaatgaaaccaaacttagttcaaacactagaaaataatcctgcaatgattcatggaggaccatttgccaacattgcacatggatgtaactctgttattgcgacaaaagcatcgttaaaactagctgattatgttgttacagaagctggatttggagcagaccttggagcagaaaaattccttgatataaaatgtagaaaagcaaatattaagccttccgtagtagtactagtagctacaatacgtgctctaaaatatcatggtggctgttctctagataaacttaattatgagagtacagaatatttatcaaaaggattaagtaatcttgaaagacatattcataatttaaaaaataattttggacttcctgtagttgtaggtattaacggtttttcattcgatactgaaaaagaaaaagagcttcttaaagcaaaatcaaatgaattaaatgttccaatagtatcgtcaacacactgggcaaatggcggaaaaggcgcggaagaattagctaaagcagtagtaaatgaaatagaaaacgcagaaaataattttgaatatttatatcctgatgatatgccgctatgggataaaatggaaactatagctaaaaaaatctatggagcatcaacaatttcagctccagcaaatataaagaaacagatagatgaattacagaaaaacggatatgggaatttccctgtatgcgttgctaaaactcaatattccttctcaacagatccaacgctaagaggtgcaccttcaaatcatgagatacctattcgtgaagtacgcttatctgcaggggcagagtttatcgtaatggtgtgggagata

SEQ ID NO: 315576 - DNA, 729 bp, Unknown
  Bacterial polypeptide expressing nucleotide sequence isolated from the Sargasso Sea
accgtacttttaaaagaggctctcagaccgaatgtaactcaaactctagaacataaccctgctataattcacggaggtccatttgcaaatattgctcatggttgtaattctgtgatagctactaaaaccgctttgaagttgtcagattatgtagtcacagaggctggttttggagctgatttaggggctgaaaaatttttaaatataaaatgtagaaaatcaaaattagttccaagttgtgttgtaatagtagctactgtcagagctctgaagatgcatggaggattagaaaaagataatttaaaaaaagaaaatattcctgcattaaagaatggtttagtgaaccttgaaaggcatatttcaaacataaaaaaatttggtttagaacccgtagttgcaataaatcactttgtattagatacaaacaatgaaattaaagaaattaaaaaattctgcgataatattggtgttcaagttagtgtcagttctcactgggctaatggaggcaaaggagcaaccgacttagcaaaaaaagttattaaaatttgtaaagattcaaataaaaataattttaaatatttgtatactgaaaaattatctccttggaaaaaaatagagaaaatagctaaagaaatttatggtgcaaaaactgtaactgctccaactgaagtaatggatgatttaagaaagtttgaattaaatggatacggtaatttaccagtttgtatt

SEQ ID NO: 315577 - DNA, 853 bp, Unknown
  Bacterial polypeptide expressing nucleotide sequence isolated from the Sargasso Sea
ggaccatttgcaaatattgcccatggatgtaattcgattattgctactaaaactgctttaaaactatcagaatatgtaattactgaagctggttttggagcagatcttggagctgaaaaatttttagatattaaatgtcgtaaagcaggccttataccaagctgcgtagttcttgttgcaacaattagagctttaaaaatgcatggaggtgttgaaaaagatgatcttaaaaatgaagatcttgatgcccttaaaaaaggtatgtcaaatttagaaaggcatattcaaaatataaaaaagtttggtttagatgtagtcgtcgccattaatcactttattaccgacacagataaggaatttaaaattattcaggagcaatgcactaaacttgggatcaaagcaagtctctgtacacattggtctgatggtggagaaggtatgaaagatttagctaataacgtagtggatttatgtaaaaagaatgatacatctaaatttaaatacttatactcagataagatatcaatcttagaaaaagttgaaaaaattgctaaagaaatttacagcgcaaaaggaatagaagtagatgaaaaaattaaggaacaagttaaaaaaatagagcaagctggatttggaaaatttccggtttgtattgcaaaaacacaatatagcttctctactgatcctaaattaaaaggagctccctctggtcatactttattaataagagaagtaagattatccagtggagctgaatttgtagttgttgtgtgtgggtcaatcatgactatgccaggccttccaagaaacccatctgcaagtaatattaaattaaataaaaaaggtgagatag

SEQ ID NO: 315578 - DNA, 916 bp, Unknown
  Bacterial polypeptide expressing nucleotide sequence isolated from the Sargasso Sea
caaacaatcattggtatgcctcagagaaccaagcttaggtccctgttttggcgttaaaggtggagctgctggaggtggctatgctcaagtggtcccaatggataagattaatcttcattttacaggtgattttcatgcaatcacatctgctcataacctgcttgcttctatgatcgacaatcacatctattggggaaatgatctaaatatagatacaaggcgaatagtttggggtcgagttgtagatttaaatgaccgagctttgcgaaatacaaatataaatcttggaggcatagcaaacggttttcccagagaagataaatttgatattacagttgcttctgaggttatggcgatcttttgtttatcaacaagtctaagtgatctgcaaaaaagacttggcaatattatcattggttacacacgagataaaaaagaaatcaaagctcgtgacgtaaatgcagatggagcaatgacgactctacttaaagatgcttttctcccaaaccttgttcaaacgttagaagaaaatcctgcaatcattcatggcggtccttttgctaacattgcgcatggctgcaattcacttatagcaactcaaactgctcttaagctaagcgattatgtagtaacagaagctggatttggagcggatcttggcgcagaaaaatttctagatataaaatgcagaaaaggaaatttaaatccttctgcaatagtcattgtagctactgtaagggctttaaaaatgcatggcggcatggataaaaaggaactgaaaaatgaaaatctagacgccttgaggaaaggtctatcgaacttgcaacaacatatttcgaatatgaaaaaatatggagttcctgtgtctgtagcaattaatcattttataaccgatactgataatggaactctcaat

SEQ ID NO: 315579 - DNA, 910 bp, Unknown
  Bacterial polypeptide expressing nucleotide sequence isolated from the Sargasso Sea
aaaaattaagcctgaatatttagaaactttaaaaaacaaaaaagatggaaaattaattttggtcacagctattacacctacgccagctggggaaggaaaaacaacaacttctgtaggtttgtgtgatggtttaaataaaataggaaaaaaatctgttgtttgtcttagagagccaagtttaggaccatcttttggaatgaaaggtggtgctgccggaggtggttatgctcaagttgttccaatggaacaaattaatttacatttcactggtgattttcatgcaataacttcagctcacaatctcctagcagctttaattgataaccatatttactggggaaataaattaaacattgatgttagaagagtagtttggaaacgagtaatggatatgaatgatcgatctttaagatcaataaatataaatcttggaggagtcgcaaatggttatcctagagaagatggatttgacattaccgtagcttcagaaataatggctattttctgtttatcaaatgatttaaaagatttagaaaatagaattggaaatattacgataggttataccagagataaaaaacctatttatgcaaaagacttaaatgcgaatgggccaatgactgttttattaaaagatgccattagacccaacgtcactcaaacactagaaaataatccggctataatacacggtggaccatttgcaaatattgctcatggttgcaactcagttattgctacaaaaacaggattaaaattatctgactatgtggtgacagaagctggatttggtgctgatttaggtgcagaaaagttcttagatataaagtgtagaaaatctggtttaaaacctgattgcgttgtaattgttgcaaccattagagctttaaaaatgcacggtggagtaaaa

SEQ ID NO: 315580 - DNA, 904 bp, Unknown
  Bacterial polypeptide expressing nucleotide sequence isolated from the Sargasso Sea
aatgggcagacacatagccaaaataaatttagagtatctagaccaacaaaaagataagaaagatggaaaattaattcttgttactgcaatcacacctactccagcgggtgagggaaaaacaactacgtctgtaggtttaaatgatggtttgaataaaatcggaaaaaaatcaattgtttgtctaagagaaccaagtttaggaccttcttttggaatgaaaggaggggctgcaggtggtggatatgcacaagtagttccgatggaacaaataaatttacatttcactggagactttcacgcaattacatctgcacataatttgctttccgcgttgattgataatcacatttactggggcaataaacttaatattgacgtgagaagagtagtttggaaaagggtaatggatatgaatgatagatctcttagatcaatagtggttgacttaggaggtgttgcaaacggatatccaagacaagatggatttgatattactgtagcctctgagatcatggcgattttttgtttagctaatgatttgaaagatttagagaatagaattgggaatataacaatagcttataccagagataaaaaaccaatttacgcaaaagatttaaatgcccagggtccaatgacagttcttttaaaggatgcaattagaccaaatgtaactcaaacattggagaataatcctgcaataattcatggaggtccttttgcaaatattgctcatggatgtaattcagtaattgcaactaaagcaggtttaaaattagcagattttgttgttactgaggcaggttttggagctgatcttggtgcagaaaaatttttagatatcaaatgtagaaaatctggaattaaaccagattgcgtggttattgtagcaacaattagagca

SEQ ID NO: 315581 - DNA, 781 bp, Unknown
  Bacterial polypeptide expressing nucleotide sequence isolated from the Sargasso Sea
gatgactgttcttttaaaagaagctataagaccaaacgtcactcaaactttggaaaacaatccagcaattattcatggtgggccatttgcaaatatagctcacggatgtaattctgttattgcaactaaagcaggtcttaaactatcagagtacgtcgttaccgaagcaggatttggtgctgaccttggagctgaaaaatttttagatatcaaatgtagaaaatcaggaattaaaccagattgtgttgtaattgttgcaacgataagagctctcaagatgcatgggggagtagcaaaagatgatttaaaaaaagaaaatgttgatgcattaaaaaaaggtttagtcaacttagaaaggcacataaataataccagaaaatttggtttaccagtcacaattgctgtaaatcattttataaccgactccgataaagaaatgaatgccttacttgatttttgcaaaactcaaggtgtaaaagcttctaaatgtacacattggtcaaacggtggagaaggtactaaagaattagcaaagaatgtagttgaaatttgtgaggaaaataaaaatactttcaaatacttatacgaagataaattaccattatttaaaaaaattgaaaaaattgcacaagaaatttatcatgctagtgaggttgttgcagatacaaaaacgagacaacaattaaaagattttgaagaaaaaggttatggaaatcttccagtatgtattgctaaaactcagtacagcttttcaacagatcctaatcttaaaggagctcct

SEQ ID NO: 315582 - DNA, 810 bp, Unknown
  Bacterial polypeptide expressing nucleotide sequence isolated from the Sargasso Sea
gaataaattaaatatagatgttagacgtgtagtttggaatagagtaatggatatgaatgatcgttctctaagatcaatagtagttgatttaggaggagtagctaatggatatccaagacaagatggttttgatattacagtagcatcagagataatggctattttttgcttatccaaaaatttaaaagatctcgagaatagaataggaaatataacaataggatatactagagataagaaacctatttatgcaaaagatctaaaagctcagggccctatgactgtacttttgtatagagctttcagaccaaatgttgttcaaactttagaaaataatccagcaataattcatggtggaccatttgcaaatattgctcatggatgtaattctcttcttgctactaaaactgctcttaaattatcagactatgttgtaacagaggctggcttcggtgcagatctaggtgcagaaaagtttattaatattaaatgtagaaaatcaggattaaaaccttcttgtattgtaattgtagcaactataagagctttaaaaatgcatggtggattagacaaacatcagttaaagaaagaaaacatgtcagcattaataaaaggtatgattaatttagagagacatataaacaatatgaaaaaatttggcgttcctgttactgttgctataaataaatttgtaaatgatacccgtaaagaggaaaatgccgtaattgatttttgtaaaagcatgggtatcaaagctaatttatgtacgcattggtctgaaggaagcaaaggtacgagggaattagctaa

SEQ ID NO: 315583 - DNA, 797 bp, Unknown
  Bacterial polypeptide expressing nucleotide sequence isolated from the Sargasso Sea
tgttgcaaatggatttccaagagaagatggttttgatattaccgttgcatcagaaataatggcaatcttttgtttatcaaatgatttgcacgatcttgaaaatagaataggtaatatcactgttgcttatactagagataaaaaaccaatatatgcaaaagatttaaacgctcacggtccaatgactgtattgttaaaagatgctattagaccaaacgtaacacaaactttggaaaataaccccgcaataattcatggtggaccatttgcaaatattgctcatggatgtaattctgttttagcaactaagacagcattaaaactttcaaattacgttgtaacggaagcagggtttggagctgatttaggagcggaaaaattcttagatattaaatgtagaaaatcaggattaaaaccaagttgtgttgtgattgttgcaactataagagcgctgaagatgcatggaggagtaaaaaaagacgaattaaaaaatgaaaatgtcgatgcagttaaaaaggggctggttaatttagaaagacatatagaaaatattcaaaaatttggtttacctgtaacagtagctataaaccactttgttttagatactgataaagaaattgatgaagttacaaagttttgtgaacaaaaggatattaaagcctctatatcaaagcattgggaaaaaggtggagaaggtgcaatagatttagcaaatgatgtagttaaacaatgtgaaaaagatagtaattttaaatttttatatgatgataaaacttcattatttaaaaaaatagaaa

SEQ ID NO: 315584 - DNA, 856 bp, Unknown
  Bacterial polypeptide expressing nucleotide sequence isolated from the Sargasso Sea
ttcagtgggtttgtctgatggattaaataagataggaaaaaaatcaattgtgtgtcttcgtgaaccaagtttgggtccatcttttggaatgaaaggtggtgctgcaggaggtggctatgctcaagttgttccaatggaacaaattaatttacattttactggtgattttcatgcaatcacttctgctcataatcttctttcagctttgattgataatcatatttactggggaaataaattaaacatagatgttagaagggttgtttggaaaagagttttagacatgaatgatagagctttaagatcaattaatataaatcttggaggtgtagcaaacggttttcctagagaagatgggtttgatattactgtagcttcggaaataatggctatattctgtttgtcaaatgatcttcacgatttagaaaaaagaattggaaatataactgtagcttatacaagagataaaaaacctatttacgctaaagatttaaatgcacaaggtccaatgacagtattattaaaagatgcaataagaccaaatgttacccaaacattagaaaataatcctgcaattatacatggaggaccatttgcaaacatagctcacggttgtaactctgttttagctacaaaaactgcattaaaactatctgactatgttgtaactgaagcgggttttggagctgatttaggtgctgaaaagtttttagatattaaatgcagaaaatcagatttaaaacccaattgtgttgtaattgttgctacaattagagctttaaagatgcacggcggattaaataaagatgaattaaaaactgaaaatgttgacgcactaaaaaaaggattagtttaa

SEQ ID NO: 315585 - DNA, 888 bp, Unknown
  Bacterial polypeptide expressing nucleotide sequence isolated from the Sargasso Sea
actaactctttatctaaaaataatgatgggaaacttattttagttactgcaatatcaccaactcctgcaggagagggtaaaacaactacaagcgttggtttggttgatggactttgccatattggtaaaaaggcaatgatttgtttaagagaaccaagtttaggaccatgttttggtatgaaaggtggcgcagcgggtggtggatatgctcaagtgatacctatgactgatattaatttacactttacaggagattttcacgcaattggagctgcgcataatcttctttcagcattaattgataatcatattcattggagtaatgaactaaatattgatcctagaagaattacttggaaaagagtcgttgacatgaatgatagatcccttagagacataacttgtgggctgggaggaacaggtaatggaattccaagacaaagtggttttgatataacagttgcatctgaaataatggctgtattttgtttagcatctgatattgatgatcttcaaaaaagaataggaaatattgttattggctatacaagatctaatgaacctgtaagagcaaaagaattaaatgcagatggagcaataactgcattattgaaagatgcatttcaaccaaatttagttcaaacccttgagaacaatcctgcatttatgcatggaggaccttttgcgaatattgcacatggttgcaattctgttgtttcaactaaaacagcattaaaacttgcagattatgttgttacagaagcgggatttggtgctgatttaggtgctgagaaattttttgacattaaatgcaggaaatcaggtttaaaaccagatgcagttgttttagtggctacacaccaagcactcaaaatgcatggtggtata

SEQ ID NO: 315586 - DNA, 895 bp, Unknown
  Bacterial polypeptide expressing nucleotide sequence isolated from the Sargasso Sea
cttcattggaatgaaaggtggcgcagctggtggtggttatgcgcaagttgttcctatggaacaaataaatcttcatttcacaggtgactttcatgcaatcacttctgctcacaatcttttatctgctttaatagataaccacatatattggggtaacaaattaaatattgatgtacgaagaatagtttggaaaagagtacttgatatgaacgatcgagcgctaaggtctatcaatattaatcttggtggtgttgcaaatggtttccctagagaagatggttttgatattacagttgcctctgaaatcatggcaatcttttgcttatcaaatgatttacatgatctagaaaatagaattggaaatattacagttgcttacacaagagatagaaaaccaatttatgcaaaagacttaaatgcacatggtccaatgactgttttgctaaaagacgcaattagaccaaatgtaactcaaactttggaaaataatcctgctataattcatggagggcctttcgcaaatattgcgcatggttgtaattctgtattagcaaccaagactgcattaaaactatcagactatgttgttactgaagcaggatttggtgccgatctaggtgctgaaaaattcttagatataaaatgtagaaaatcaggtctaaaaccaagctgtgtggtgattgtagcaacaataagagctttaaaaatgcacggtggtgttaataaagatgaacttaaaaatgaaaatatagatgctgtaaaaaaaggattagtgaatttagaaagacatattgaaaatattcaaaaatttggcttgcctgttacagtagctattaatcactttgttttggatacagacaaagaggtcgatgaagttataaaatttgtcaacaaa

SEQ ID NO: 315587 - DNA, 874 bp, Unknown
  Bacterial polypeptide expressing nucleotide sequence isolated from the Sargasso Sea
ctttggtgtaaaaggaggcgcggctggtggtggttatgcgcaagttgtacctatggataaaataaatctacattttacgggtgatttccatgcaattacctcagctcataacttgctgtcttcaatgatagacaatcatatttactggggcaatcaactaggcattgatgttagaagagttgtttggggaagagttgtcgacttaaacgatagagctttaagaaatataaatgttaatttgggaggcgtagcaaacggttatcctcgtgaggataattttgacataactgttgcatctgaagtaatggctatcttttgtctctccactgaccttaaagacttacaagagagacttggtaatattataattggttacacaaaagatagaaatgaaattagagctagagacattaatgctgacggtgcaatgacaacactacttaaagatgcatttctcccaaaccttgttcagacgcttgaaaaaaatccagcaattattcatggcgggccttttgcaaatattgcccacggttgtaattctctagttgcaactcaaacagcactgaagctcagtgattatgtagttacagaagctggttttggagccgacttaggggctgaaaaatttttggatattaaatgtcgtaaaggagacctcagtccttcagctataactatagttgcgacagttagagccttaaaaatgcatggtggaatggataagaaagatctcaaaaacgaaaatattgaagcactaaaaaacgggcttacgaatcttgagcaacacattacaaatatgcagaaatatggagtacccgtaactgttgcaattaatcaatttattacagatacaaatgatgaactggcagtataa

SEQ ID NO: 315588 - DNA, 810 bp, Unknown
  Bacterial polypeptide expressing nucleotide sequence isolated from the Sargasso Sea
taatattaacttgggcggagtagccaatggttatccaagagaagatgggtttgatattactgtggcttcagaaatcatggcaattttctgcttatcaaatgatctaaaagatttagagaaaagaattggaaatattacaattggttacacaagagataaaaaagcaatttatgcaaaagatttaaatgcacaaggtccaatgacagttcttttaaaagacgcaatgagacctaatgttacgcaaaccttagaaaacaaccctgcaattattcatggtggtccttttgcaaatattgcacacggttgtaattcagttattgcaacaaaaacaggattaaaattagctgactatgttgttacagaagcagggtttggtgctgatcttggtgctgaaaaatttttagatataaaatgtagaaagtcaggaataaaaccaagttgtgtagtaatcgttgcaacaattagagctttaaaaatgcacggaggcgtagcaaaagatgaacttaaaaaagaaaatattgaagctcttaaaaaagggttagtaaatttagaaagacatattatcaatataagaaaatttggcttacctgttgcggttgccgttaatcactttattactgatactgacaaagaagtaaaagcattaattgattactgtaaaacacttaatgttaaagcaacactttgtacccattggtcaaatggaggagaaggaacaaaagaactagcaaaagatgttgttgaattatgtgagaaaggagaaaataaatttaaatttttatatgaagataaagctcctctgtttaaaaa

SEQ ID NO: 315589 - DNA, 906 bp, Unknown
  Bacterial polypeptide expressing nucleotide sequence isolated from the Sargasso Sea
actggggctaggtattagtgacgaatatcttgaactttacggtaaatacaaatctaaagttaacctttctattaataaggaaaaacttaaatctaagaaggatggtaaattaattttagttactgcaatatcccctactccagctggagaaggcaaaactacaacaagtgtcggtctcgtggatgggctttgtcatattgggaaaaaggctatgatttgcttaagagagcctagtttagggccttgtttcggtatgaaaggtggagctgctggtggtggatacgcgcaagtaatacctatgaccgatataaatttacattttacgggcgactttcatgcaattggagcggcacacaaccttctttcagcactaattgataatcatatacattgggataatgagctaaatattgaccctagaagaatcacctggaagagagtggttgatatgaatgatagatctttgagagatattacatgtggcctaggtggtacagggaatggtgtacctagacaaagtggttacgatataacggttgcttctgaaataatggcagttttttgtttagcatcagacattgaagatctcaagaagagaattggtaatattgttatagggtatacgaaatccaacgagccagtaagagcgaagcagctaaacgctgatggtgcaatcactgcattattgaaagatgcatttcaaccaaacttagttcaaacactagagaataatccagcatttatccatggaggtccttttgccaatattgcccacggctgtaactccgtcgtttctactaagttggcattaaaacttgctgattatgtggttactgaagctggatttggagctgatttaggcgctgaaaagttttttgatattaaatgtagaaaatcagatctgaa

SEQ ID NO: 315590 - DNA, 865 bp, Unknown
  Bacterial polypeptide expressing nucleotide sequence isolated from the Sargasso Sea
acaccggcgctaattcacggtggaccttttgccaacatcgcacacggttgcaactccctgacggcgactagggttggtctttcgctaggtgacgttgtagttacggaagccggtttcggagcagaccttggggcggagaaattcttcgacataaagtgtcggtttggtaacctaaaccctgaggcagcagtagttgtcgctacagtccgcgcaataaaaatgaatgggggaaagagcaaggatgacctcgggcatgaagatgttgaggccgtaaggcgcggcttcgtgaacctcgaagcccacgcgaataacgtccgcaaattcggtgtgcctccggtggtagcgataaaccggttcgtgacagacacggacgctgagatagccgtattgcttgatggctgtgccgaaatgggagttcgagccgttgttgcagatccgtggggtgaaggcggtgcaggatgcctggacctcgcagatgctgtatgggagatcctgacatcaggagaagcagcgtacgcgccactataccccaacgacatgggcctgatcgagaaaatggaaaccgtagctcaggagatttatggcgctgaaggtctggatatccacccaactgccgccaaggaaattgctgttctggaagaagccggtatgcgtgactcacccgtgtgtatcgcaaagacccagtactcgttctctgatgatccagcgctcttaggacgaccatcgggtttcaggattcacgttcgggaggtcactccttccgctggtgccgggttcgtggtcgctaagacgggtgccattatgacgatgcccggcctaggtgctgtgccatctgcgatgggagttgatctgatcgatggggttg

SEQ ID NO: 315591 - DNA, 884 bp, Unknown
  Bacterial polypeptide expressing nucleotide sequence isolated from the Sargasso Sea
tatgctcaagtagttccaatggaagatattaacctccactttacgggtgatttccatgcaataagtgtagcccacaacctactctctgcgcttattgacaatcacatatactggggaaacaaattagggtttgatgctaggcgggtagcttggcgtcgggttgtggatatgaatgatcgagccctgcgtcaaataaattgtaatttggggggtattgctaatgggtttccccgagaagatggctttgatattacagtggcctcagaaattatggccatcttttgcttggcaaaagatctgaacgatttgactaaaagggttggtaatattgtggttgggtatacaaaggggcgaaagcctattagagccagtcagttgaaggggcatggaccgatttcggttttgctgagagatgcattgatgccaaaccttgttcaaacccttgagaataacccagcttttatccatggagggccatttgctaatatagcgcatggatgtaactcagttgttgcaactaaggcagcgctgaaactatcggattatgtggtcacggaagcgggatttggagccgatttaggagctgaaaaatttttaaacattaagtgcagaaaggcgggtctgactccatcagctattgttttagtagcaactgtgagggctctaaaaatgcacggaggtgttagtaaacaagacttgtccaaagagaatgtgcaggcggtaaagaaaggatgcgaaaatcttggtcgacatattaagaatttgagactgtttggcgttccggtagttgtagcgatcaatcagtttgtcgcagataccaaaaaagagcttaaggttgttagagaaacggctaaagtatttggcgttgaggctatcgtagcctc

SEQ ID NO: 315592 - DNA, 946 bp, Unknown
  Bacterial polypeptide expressing nucleotide sequence isolated from the Sargasso Sea
agtaatgaacctatttacgctaaagatttaaacgcacaaggtccaatgactgtattactaaaagaagctataagacctaacgttacacaaactttagaaaataaccctgctataattcatgggggcccttttgctaacatagctcatggatgtaattctgtaatagcaacaaaaacagctctaaaattatctgattatgtagttacagaagctggatttggtgcagatcttggtgctgaaaagtttatggacattaaatgtagaaaatcaaatttaaaacctagctgtgtagttatagttgcaacaattagggctctaaagatgcatggtggtgtagaaaaagaaaatttaaaaaatgaaaatatagaggctttaaaaaaaggcttagtaaatttagaaagacacatcaaaaatgtaaaaaaatttggagtagaagttatagtggcaataaatcattttattatggatacagaaaatgaaataaaaattttaaaagaatattgtgaaaatattggtataaaagttaataaatgcactcattggtcagatggtggtgaaggaactaaagatttagcaaaaaatgttgtggaaatttgcgataattcagatccgaaagattttaaatttttatatgatgaaaaagaaactctttggaataaagtagaaaagattgctaaagaaatttataaagctggaaatataactgctgacgaaaaagtaaaagaacaattaaaaatttttgaaaaaaatggctatggaaaattaccagtttgtatagctaaaacccaatatagtttttcagtagatccaaagcttaaaggagcaccttcgggtcatgaaattccaattagagaagtaagactttcttctggagcagaatttatagtagttgtctgtggatcaataatgacaatgccaggattgccaagggttccggctgccgatt

SEQ ID NO: 315593 - DNA, 966 bp, Unknown
  Bacterial polypeptide expressing nucleotide sequence isolated from the Sargasso Sea
ttacattttacaggagattttcatgcaataacatcagctcataatcttctttctgctttaatagataatcatatctattggggtaataaattaaatattgatgtcagaagaattgtttggaaaagagttatggatatgaatgatcgttcattaagatcaattgttgtagatcttggtggagtagcaaatggatatcctagacaagacggctttgatattacagtggcttctgaaataatggccatcttctgtttatcaaatgatttaaaagatttagaaaatagaattggaaatattacagtagcctacactagagataaaaaaccaatttatgcaaaagatttaaatgctcaaggtccaatgactgttttattaaaagatgcaattagacctaatgtaacacaaacgttagaaaacaacccagcaataatacatggaggaccgtttgcaaatattgcacatggctgtaattctgtcatagctacaaaaacaggattaaaattagctgattatgtcgtaactgaagctggttttggtgctgacttaggtgctgaaaaatttttagatattaaatgcagaaaatcaaatttgaaacctgattgtgtagtaattgttgcaactataagagctttaaaaatgcatggtggtgtagcaaaagatgatcttaaaaatgaaaatgtcaaagctttaaataaaggattagtaaatcttgaaagacatattaacaatattagaaaatttggtttgccagttgtagtggccgttaaccactttatcacagacactgataaagaagttaatgcacttatggatttttgtaaaacattaggtgtaaaatcatctatctgcaaacactggtcagatggaggagaaggaacaaaagatctggcaaatatcgtcgttgatatatgtaataataaaaatacttttaaatttttatatgaagataagttgcctttgttaaaa

SEQ ID NO: 315594 - DNA, 999 bp, Unknown
  Bacterial polypeptide expressing nucleotide sequence isolated from the Sargasso Sea
ggcgctgctggcgggggatttgctcaagttgtcccaatgggaagatataaatcttcattttacaggagatttccatgcgatcggtgcggcaaataatttactggcagccatgattgataatcatatttattggggcaacgcgttagaactagatgaacgacgtatagcttggcgtcgtgcacttgatatgaatgaccgagctctgagatctatagttgggtccttggggggcgttgcaaatgggtttcccagatcagatggttttgacattgtggttgcttctgaaatcatggctatattctgcctcgctactagtttggaagatatgcaaagaaggttgggaaatattatagttggctataccagggccagaaaaccagtttatgctcgagaattagaggcagatggcgctatgacggtcttgttaaaagatgctttagcgccaaatcttgtgcaaaccctagaaaataacccggcatttattcatggtggtccgtttgcgaatatagcgcatggttgtaactctgttatggcgacgcaaattggtttgaaactggcagactatgttgtaaccgaagctggttttggcgccgatttaggtgcggagaaattttttgatattaagtgccgaaaagctggtttaaaaccagccgccgcagttgttgttggtaccgtgcgagctttaaaaatgcatggcggtgtcgctcgagaggatttgggcgaagaaaatatagaagctgtgcgtcgaggcatttctaatattgaaaggcatgttctaaatacccagcagtttggggttcccgttatcgttgccctgaatagatttatcactgatactgatgctgaggttgaagcagtcaaacaagctttggcatcgcatggggttgaggccgtcacgtgcacacattggtctgacggtggcgcaggtgctgaagatttagctcataaagtcgtagaattagcagatagtggtgtagcgaactttaaaccattgtaccc

SEQ ID NO: 315595 - DNA, 807 bp, Unknown
  Bacterial polypeptide expressing nucleotide sequence isolated from the Sargasso Sea
aaatacaaatctaaagttaacctttctattcataaagaaaaacttaaatctaaaaaggatggtaaattaattttagttactgcaatatcccctactccagctggagaaggtaaaaccacaacaagtgttggcctcgtggatgggctttgtcgtattgggaaaaaggctatgatttgcttaagagaacctagtttagggccttgttttggtatgaaaggtggagctgctggtggtggatacgctcaagtaatacctatgaccgatataaatttacattttacgggcgactttcatgcaattggagcggcacacaaccttctttcagccctaatcgataatcatatacattgggataatgaactaaatattgatcctagaagaatcacctggaagagagtggttgatatgaatgatagatctttaagagatattacgtgtggcctaggtggtaccgggaatggtatacctagacaaagtggttacgatataacggttgcttctgaaataatggcagtgttttgtttagcgtcagatattgaagatctcaagaagagaattggtaatattgttataggttacacgaaatccaacgaaccagtaagagcaagacaactaaaagctgatggtgcaataaccgccttattgaaagatgcatttcagccaaacttagttcaaacactagagaataatccagcattcatacatggaggtccttttgccaatattgctcatggttgtaactccgtcgtttcaactaagttagcattaaaacttgctgattatgttgttacagaagctggatttgga

SEQ ID NO: 315596 - DNA, 853 bp, Unknown
  Bacterial polypeptide expressing nucleotide sequence isolated from the Sargasso Sea
catgggaggaccatttgcaaatattgcccatggatgtaattctgtcatagctacaaaaacaggattaaaattagctgattatgttgtgacagaagctggatttggcgctgatcttggagctgaaaaatttttagatataaaatgtagaaagtcaaatttaaaacctgattgtgtagtaattgttgcgactataagagctttgaaaatgcatggcggtgtagctaaagatgatcttaaaaatgaaaatgtggaagctttaaataaaggattggtaaatcttgaaagacacattaacaatactaaaaaatttggtttatcagttgtggtagctgttaatcattttatcaccgacactaacaaagaagttgatgcactaatgagtttttgtaaaactttaagtgtaaagtcatctatttgcaaacactggtctgatggaggagaaggaacaaaagatctagcaaacattgttgttgaaatatgtaataacaaaaatacttttaaatttttatatgaagataagatgcctttatttaaaaaaattgaaacaatcgcacaagaaatttatcacgcaagtgaagtagtagctgatacaaaaataagagatcaattaaaagactttgaatcaaaaggttatggaaatcttccaatatgtattgctaaaacacagtacagtttttcaactgatcctagtttaaagggtgcgccatcagggcacgtagttccaataagagaagtaagattatcttcaggggcagagtttattgtagttgtatgtggagcaataatgaccatgccgggtcttccaagagtacctgctgcagattctattaagttaatgaaaaaagtgaaatag

SEQ ID NO: 315597 - DNA, 957 bp, Unknown
  Bacterial polypeptide expressing nucleotide sequence isolated from the Sargasso Sea
attgatgaaatagcaaaagtactgggtattgatcataatggattgatcaaattcggtgatgacaaggctaaattaaattctaattttatagattctgtttcaaataatgaaaatggtaaattaattctggttacagctatatcacctacacctgctggagaaggaaaaactaccacaagtgttggattggttgatggactttgccatattggaaagaaggctatgatttgtttgagagaaccaagtttaggtccatgttttggaatgaagggaggtgcagctggtggtggatatgctcaagttattccaatgactgatatcaatcttcacttcacaggagatttccatgcaataggagcagctcataatcttctatccgcattaattgataatcatattcactgggataatgaactaaatattgattctagaagaattacctggaaacgagttgtggatatgaatgatagatctcttcgtgatataacatgcggtcttggtggaactggtaatggaataccaagacaaagtggatttgatatcacagtagcatctgaaataatggcagttttttgcttggcttcagacattgaagatcttcaaaacagaattggtaacattgtaataggctattcaaaatcaaacgaacccataagagctaaacaacttaatgctgatggtgccatcactgcattactcaaagacgcttttcaaccaaatttagtacaaactttagaaaataatccagcctttatgcatggaggtccttttgcaaacattgcacatggttgtaattctgttgtttcaacaaaaactgcgttaaagcttgcagattacgttgttactgaagctggttttggagcagatctaggagcagaaaaattttttgatatcaaatgtagaaaatcaggactcaaacctgacgcagttgtcttagttgcaactacaaaagcacta

SEQ ID NO: 315598 - DNA, 840 bp, Unknown
  Bacterial polypeptide expressing nucleotide sequence isolated from the Sargasso Sea
ggaccttcttttggaatgaaagggggagcagctggaggtggttatgctcaagtggttccaatggaacaaattaatttacattttacaggtgattttcatgccattacttctgctcataacttattatctgctttaattgataatcatatttattggggtaataaattaaatatagatgttagaagaattgtttggaagagagttatggacatgaacgatagatctttaagatctattgtagttgatttaggtggaattgcgaatggatatcctagacaagatggatttgatattacagtagcttcagaaataatggcaatcttttgtttggcaaaagatttgaaagatttagaaaatagaattggaaatattactattggatatactagggataaaaatccaatttgtgcaaaagatctaaatgcccaaggtccaatgacggttcttctaaaagatgcaattagaccaaatataactcaaactttagaaaataatccagcaataattcatggtggtccatttgcaaatattgctcatggatgcaattctgttatcgcaacaaaaactgctttaaaattatctgattatgttattacagaagctggatttggagcagacttgggggctgaaaaatttattaatattaaatgtagaaaatcagaactaaaaccggattgtgtggtgattgttgcaactattagggcactaaaaatgcacggtggtgttcttaaagatgaattaaaaaatgaaaatttagacgctttaaaaaaaggtatagttaacctggaaagacatataaacaatgttagaaaatttggattaccggtaggcctgttgcta

SEQ ID NO: 315599 - DNA, 878 bp, Unknown
  Bacterial polypeptide expressing nucleotide sequence isolated from the Sargasso Sea
tatggaacaaattaatttacattttacaggatattttcatgcaattacttctgcgcataatttgttgtcggccttaattgataatcatatttactggggaaacaaacttaatattgatgtcagaagagtagtttggaaaagagtaatggatatgaatgacagatcgctaagatcaattgttgttgaccttggtggagtggcgaatggttaccctagacaagatggtttcgatattactgtagcatctgaaattatggcaatcttttgcttagcgactgatttaaaagatttagaaactagaattggaaatattactattggttatactagagataaaaaagcagtttatgcaaaagatctaaaagcacaaggtccaatgactgtattactgaaagaagcaattagacctaatgtgactcaaactttagaaaataatccggcaattattcatggtgggccatttgcaaatattgctcatggatgtaattcagtgattgcaactaaagctggtttgaaacttgcagattatgttgttacagaggctggttttggtgctgatcttggagcagaaaaatttttagacattaaatgtagaaaatcaggaattaaacctgactgtgtagtgatagtagcaactattagagctttgaaaatgcacggtggtgttcctaaagatgaattaaaaaatgaaaatgttgatgcattgaaaaaagggttagtaaatttagaaagacatgttaataatactagaaaatttggtcttccagtaacaattgctgtaaatcactttataacagatactgaaaaagaaatgaatacactacttgatttctgtaaaactcaaggtgttaaagcttcaaaatgtacacactggtcta

SEQ ID NO: 315600 - DNA, 877 bp, Unknown
  Bacterial polypeptide expressing nucleotide sequence isolated from the Sargasso Sea
ttattcacggaggtccatttgcaatattgctcatggttgtaattctgtgatagctactaaaactgctttgaagttatcagattatgtggtcacagaggctggttttggagctgatttaggggctgaaaaatttttaaatataaaatgcagaaaatcaaaattagttccaagttgtgttgtaatagtagcaactgtcagagctctgaagatgcatggaggattagaaaaagataatttaaaaaaagaaaatattcctgcattaaagaaaggtttagtaaaccttgagaggcatatttctaatataaaaaaatttggtttggaacctgtagtcgcaataaatcattttgtattagatacaaacaatgaaattaaagaaattaaaaaattctgcggtaatattggtgttgaagttagtgtcagttctcactgggctaatggaggcaaaggagcaaccgacttagcaaaaaaagttattaaaatttgtaaaaattcaaataaaaataattttaaatatttgtatactgaaaaattatctccttggaaaaaaatagagaaaatagctaaagaaatttatggtgcaaaaaacataaccgctccaactgaagtaaagaatgatttaagaaagttcgaattaaatggatacggtaatttaccagtttgtattgcaaagactcaatatagtttctccgtagaccccaaacttaaaggggcaccgcagaatcatgaaatacctataagagaagtaagattatcatctggggctaattttattgttgttgtatgcggatcaataatgactatgcctggattaccaagaattccagctgctgataaaattaaattaaataaaaaaggtgagactgagggtttattttag

SEQ ID NO: 315601 - DNA, 843 bp, Unknown
  Bacterial polypeptide expressing nucleotide sequence isolated from the Sargasso Sea
tatggacatgaatgatcgttcattaagatcaattgttgttgatcttggaggagtagccaatggatatcccagacaagatggttttgatattacggtagcctctgaaataatggctatcttctgtttgtcaaatgatttagaagatttagaaaatagaattggaaatattacagtagcttatactagagataaaaaaccaatttatgctaaagatttaaatgcccaaggtccaatgaccgttctattaaaagacgcaattagacctaatgtaactcaaaccttagaaaataatcctgcaataatacatggtggtccatttgcaaatatcgcacatggttgtaattctgtcatagctacaaaaacaggattaaagttagctgattacgttgtaacagaagctgggtttggtgcagatctaggagctgagaaatttttagatattaaatgtagaaaatcaaatttgaagcctgattgtgtagtaattgttgcaactataagagctttaaaaatgcatggtggtatagttaaagaaaatcttaaaaatgaaaatattgaagctttaaaaaaaggtttagtgaatcttgaaagacatataaacaatgttagaaaatttggtttaccagttgcagtagctatcaaccattttattacagatactaataatgaggttgacgcactaatggatttttgtaaaacattaggtgtaaaatcatctatttgtaaacattggtctaatggaggagaaggagcgaaagatctagcaaatattgtagttgatatatctaatagtaaaaacacctttaaatttttatatgaagataagatgccattatttaaaaaatc

SEQ ID NO: 315602 - DNA, 887 bp, Unknown
  Bacterial polypeptide expressing nucleotide sequence isolated from the Sargasso Sea
acagggagattttcatgcaatatcatcagctcataatcttctttctgctttaatagataatcatatctactggggtaataaattaaatattgatgtcagaagaattgtttggaaaagagttatagatatgaatgatcgttcattaagatcaatagttgtagatcttggtggggtagcaaatggatatcctagagaagacggctttgatattacggtagcttctgaaataatggccatcttctgcttatcaaatgatttaaaagatttagaaaatagaattggaaatattacagtagcctacactagagataaaaaaccaatttatgcaaaagatttaaatgctcaaggtccaatgactgttttattaaaagatgcaattagacctaatataacacaaacattggaaaacaacccagcaataatacatggtggcccatttgcaaatattgcacatggttgtaattctgtcatagctacgaaaacaggattaaaattagcagactatgttgtaactgaagctggttttggtgctgacttaggtgctgaaaaatttttagatataaaatgcagaaaatcaaatttgaaacctgattgtgtagtaattgttgcaactataagagctttaaaaatgcatggtggtgtagcaaaagatgatcttaaaaatgaaaatatcaaagctttaaataaaggattagtaaatcttgaaagacatattaacaatattaaaaaatttggtttgccagttgcggtggctattaatcattttatcactgacaccaataaagaagttaatgcacttatggatttttgtagaacattaggtgtaaaatcatctatttgcaaacactggtcagatggaggagacggaacaaagatctggcaaatat

SEQ ID NO: 315603 - DNA, 832 bp, Unknown
  Bacterial polypeptide expressing nucleotide sequence isolated from the Sargasso Sea
tggttacaaaaccaatccaagaaaaaaaatgctaaattaattttagttactgcaattaatcccacaccggcaggagaaggaaaaaccaccacttcagttggtttgaatgatggtttaaatgcaattggaaaaaaatctatagtttgtcttagagagccatctcttggcccatgttttggtatgaaaggaggtgcagctggaggaggatatgctcaagttgtacctatggaagacattaacctacatttcacaggtgattttcacgctattacatcagcacataatctattatctgctatgatagataaccatatttactggggcaataaacaagaaatagatccaagaagagtgacatggaaaagagtcttggatatgaatgatagagcattaagaaatattgttgtttctctaggtggcgttagcaatggctttcctagagaatctggttttgatattacagttgcatctgaaatcatggccatattttgcttatcagaaaatcttgaagatttagagaaaagacttggtgatataattataggttatagaaaagataaatcacctgtattttgcagagatattggtgctgatggcgcaatgacagttcttttaaaggaggcactccagccaaatttagtacaaactttagaaaataatccagctttcattcatggcggtccttttgcaaatattgcccatggatgtaattctgttgttgcaacacgagcaggtcttgaattaggggattatgtaataactgaagctggttttggtgctgatttaggtgcagagaaatttttaaatatcaaatgcaggaaagcaaatctga

SEQ ID NO: 315604 - DNA, 912 bp, Unknown
  Bacterial polypeptide expressing nucleotide sequence isolated from the Sargasso Sea
atgtaactcaaacgttagaaaataatcctgctataattcatggtggtccatttgcaaatattgctcatggttgtaactcaataatagcaactaaaacagcgttaaaattatctgaatatgttgtaacagaggctggttttggagcagatctcggtgcagaaaaatttttagatataaaatgtagaaaagcagaaattcaacctgactgtgttgtaatagtagcaactataagagctttaaaaatgcatgggggtattgaaaaagaagatttaaaaaaggaaaatttagatgctctcaaaaaagggcttccaaacttagaaaagcatattaataatgtaaaaaaatttggtttagaactagttgtagcaattaatcactttattaccgacagcgataaagaagttaaacttattcaagaatattgtacaaaacttggagttaaagtaagtctttgcactcattggtctgatggtagcaagggaactgaagatttagcaaaaaatgttgtcgagatatgtaaaaaaaataataaagataatttcaaatatttatataaagatgaaatgccaattttaaaaaaagttgaaaccatcgcaaaagaaatttatggagcaagcggaatagaatttgatgataaagttaaagaacaagtaagtataattgaaaaatctggattttctaaatttccagtttgtatagcaaaaactcaatacagtttttcaactgacccaaaattaaaaggagcaccttcaggtcatacattgccaattagagaaatcagattatcaagtggtgctggatttgttgttgcaatttgtggtgcgatcatgactatgcctggtctaccaagagtccctgctgcagattcaattaaattaaataaaaaaggtgaaatagaaggtttattttagt

SEQ ID NO: 315605 - DNA, 957 bp, Unknown
  Bacterial polypeptide expressing nucleotide sequence isolated from the Sargasso Sea
gatgttagaagagtggtttgggaaaagagtaatggatatgaatgatcgatccctaagatcaataaatataaatcttggaggagttgcaaatggttatcctagagaagatggtttcgatattactgtagcttcagaaatcatggctattttctgtttatcgaatgatttaaaagatttagaaaatagaattggaaatattactattgcttacaccagagataaaaagcctatttatgcaaaagacttaaatgcacaagggccaatgactgttttgttaaaagatgccattagacccaacatcactcaaacattagaaaataatccagctatcatacacggtggtccatttgcaaatattgcacatggttgcaattcggttattgccacaaaaacaggattaaaattatctgattatgtagttacagaagcaggatttggtgctgatttaggtgcagaaaaattcttagatataaagtgtagaaaatctggtttaaaacctgattgtgttgtaattgtcgcaacaattagagctttaaaaatgcacggtggagtaaaaaaagaagaccttaaaaaagaaaatgtagatgctcttaaaaaaggtttagtaaatttagaaagacatataaataatataaaaaaatttaatttgcctgtagcagtagcagtaaatcattttattactgatacagataatgaagtaaataaattaattgatttctgtaataatcttaaagtaaaagcatctttatgtactcattggtctaatggtggtgaagggactaaagagcttgcaaaaaacgtttctgaaatatgcgataaaaatgaaaataaatttaaatttttatatgaagataaaacttcactatttaaaaaaatagaaacaattgctaaagaaatttatcatgccagtgaagtagtggctgatacaaaaattagagatcagctcaaagattttga

SEQ ID NO: 315606 - DNA, 868 bp, Unknown
  Bacterial polypeptide expressing nucleotide sequence isolated from the Sargasso Sea
atgacagacatcaaccttcactttacaggtgattttcatgccattggtgccgcacataatcttctttcggcggtaattgataaccatatacattgggaaaatcagctgggcattgatccgagaagaatcacttggaaaagagtggtagacatgaacgatcgagctctcagagacataaccacaggcttgggtggaccggggaatggcattcctcgtcaaggtggttttgatataactgtagcatcagagatcatggcggttttttgtcttgctacagatttggatgatttgcaaaaaagaataggaaacatagtaattggttacacgcgaaaaaaagaaccggtgaaagtttctcagctggatgttcaaggtgctatgactgtgcttttaagagatgcctttcaaccaaacctagttcaaaccctagaaaataatcctgcactgatgcatggagggccttttgcaaatatcgcacatggatgcaactctgtgattgccacaaaaactgcattaaaaatggctgattatgtggttactgaagctggttttggtgcggatttgggtgctgagaaattttttgatatcaaatgccgtaaagccggtttgcatcctgatgcagtggtcttggttgctacaacaaaagcattaaaaatgcatggtggtatagataaatctaatctctcagcagaaaatgttgatgcaattaaaaaagggtgtgaaaacctcggacgacacattcgaaatattgggcaatatggtgtgccagtcactgtaggcataaatggatacgtaactgatacagaaaatgagcacctagctatcattgattattgcaaacaatttgatgttgaatgcaaaatctcaacac

SEQ ID NO: 315607 - DNA, 856 bp, Unknown
  Bacterial polypeptide expressing nucleotide sequence isolated from the Sargasso Sea
aatttacatttcacaggagattttcatgcaattacatctgctcacaatttactgtctgcattaatagataatcatatttattggggcaataaattaaacattgatgttagaagaattgtttggaaaagagtcatggatatgaatgatagatcattaagatcaatagttgttgatcttggcggggttgcaaatggatatcctagacaagatggttttgatattacagtagcttcagaaattatggctatattttgcttagcaaaaaatttgaaggacttagaggagaaaattggaaatattacagtagcttatactagagacaagaagccaatttatgcaaaagatttaaatgctcaaggtccaatgacggtattattaaaagatgcaattagacctaatgtaactcaaacattagaaaataatcctgcaataattcatggtggaccatttgcaaatattgctcatggttgtaactcagttatcgccacaaaaactgcattaaaactttctgattatgtaataactgaagctggttttggtgctgacttgggtgcggaaaaatttattaatattaaatgtagaaaatccggtttgaaacctgattgtgttgttatagttgccactataagagcgttaaaaatgcatggtggaatgcaaaaggaagatcttaaaaaagaaaatgtagatgctttaaaaaaaggtttagtaaatttagaaaggcatataaataatgtaaggaaatttggtttgccagtggtagtagctcttaaccattttattaccgatacaaataaagaagtaaattttctcgttgatttttgcaaaaatcttggagtaaaaattgcattatgtactc

SEQ ID NO: 315608 - DNA, 993 bp, Unknown
  Bacterial polypeptide expressing nucleotide sequence isolated from the Sargasso Sea
aaaaaacaaccacctagtgttggtttggttgatggactctgtaacataggtaaaaaagcaatgatttgtttaagagagccaagtttaggtccttgctttggaatgaaaggtggagctgctggcgggggcaatgctcaggttattccgatgacagatattaatcttcattttactggagactttcatgctattggtgccgcacataatttgttatctgctctaatagataatcatattcattgggataatgagcttaatattgacccacgaagaataacttggaagagagtggttgatatgaatgataggtctttaagagatataacatgtggccttggtggaactggcaacggtattccacgtcaaagtggatatgacataactgttgcttcagagataatggctgtattttgtttagcttctgatttggacgatcttcaaaccagggttggaaatatcgtaataggatatacaaaaaataatgagcctgtaagagctaaacaattaaatgcagacggtgctattacagctcttttaaaagacgcatttcaacctaatctagtgcaaacattggaaaataatccagcatttatgcatggagggccatttgcaaatatagctcatggttgtaattcagtagtttcaacaaaaacagcacttaagttggcagactatgttgttactgaagctggttttggggctgaccttggggctgagaaattctttgatattaaatgtagaaaatctggacttaaaccagatgttgtagttttagtagcaacaactaaagcattaaaaatgcatggtggtgttaaaaaagatgaacttagtttagaaaatattgatgcagttttaaaaggttgtgaaaatttaggcaaacacatagaaaacattagtaaatttggagttcctgttgtcgtcggaattaacgactacgtaacagatactaaaaacgagcatgagcaaataattaatttttgtaagaatctaggt

SEQ ID NO: 315609 - DNA, 932 bp, Unknown
  Bacterial polypeptide expressing nucleotide sequence isolated from the Sargasso Sea
ggagaaggaaagacaactacgtctgtaggtttgaatgacggtttaaataaaattggaaaaaaatcaattgtttgtctaagagaaccaagtttaggaccttcttttggaatgaaaggtggtgcagcaggtggtggatatgcacaggtagttcctatggaacaaattaatttacattttactggagactttcatgctattacatctgcacataacttactgtctgcattaattgataatcatatttattggggcaacaaacttaatattgatgtgaggagagtagtttggaaaagagtaatggatatgaatgataggtcgcttagatcaatagttgttgatttaggaggtgttgcaaatggatatccaagacaagatgggtttgatataactgtggcgtctgagataatggcaatattttgcctagctaatgatttgaaagatttagaaaatagaattggaaatataacaatagcttatacaagagataaaaaaccaatttatgcaaaagatttaaatgcccaaggtccaatgactgttctattaaaagatgcaattagaccaaatgtaactcaaacattggagaataatcctgcgataattcatggaggtccttttgcaaatattgctcatggatgcaattcggtaattgcaacaaaagcagggttaaaattggcggactttgttgtcactgaagcaggttttggcgctgatcttggtgctgaaaaatttttagatataaaatgtagaaaatccggaattaaaccaaattgcgtggttattgtagcaacaattagagcgcttaaaatgcatggaggggtttcgaaagatgaattaaaaaatgaaaatgtagatgcgctgaataaaggattagtcaatttagaaagacatattaacaacacaagaaaatttggtattccagttactattgcagt

SEQ ID NO: 315610 - DNA, 946 bp, Unknown
  Bacterial polypeptide expressing nucleotide sequence isolated from the Sargasso Sea
tcaatggctgtgctacttaaggacgctttaatgcctaatttagttcagacattagagcacactccggcatttgttcatggaggaccttttgctaatattgctcatggatgtaactctataattgcgacagatgccgcacttcatttatccgactatgttgttacggaggctggttttggagcagacttaggggcagaaaagtttttcaatattaaatgcagaaaatcaggactagagcctgcagccgcagtagtcgttgcaactgttcgtgctttgaaaatgcatggaggagtggacttatctgagctaaaaaacgttgatgttaccgctgtttcacgggggctatcaaacttacgtcgacatatctcaaacataaaaaagtttggagttcctgttattgtagcaattaatagatttagtgctgattctgattctgaaatcatggaaatcaagaataatatttcatctttaaatgttgatgttgttgagtgtaatcattggaaaaatggatcagaaggcataatagatttggctaccaaagtaagtgaattagtggatgaaggcgtttctcagttccaaccactttatgaggaaaatcaatcattgtttgagaaaattaatattatatgtagggaaatttatggagctaaggaggcaatagctaataaaagtatcagagagaaattaagagagtgggaaagccaaggttttggaaaatttccaatttgtattgctaaaacccagtatagtttttctactgatccgaatctacttggagctccaaaagaccacgttgttccgataagagaagtacggttatcagcaggcgcggagtttgtcgtagctatctgtgggcaaataatgacccttccaggtttaccaagtgagcctgctgcaaataacattagattagacgataacgatttaataactgggttgttttaaa

SEQ ID NO: 315611 - DNA, 887 bp, Unknown
  Bacterial polypeptide expressing nucleotide sequence isolated from the Sargasso Sea
tccgatggagcaattaatttacattttactggagactttcacgcaattacttcagctcataatcttttatcagctcttatagataatcatatttattggggtaacaaacttaacattgatgataagaaaattgtttggaaaagagtaatggatatgaacgatagagctctaagagcaattaatattaataccaaaggtgttgccaaagattttcctagagaagatggctttgatattactgttgcatctgaaattatggctatcttttgtttatcaaataatttgcaagatttagaaaaaagaattggaaacattacaatagcatatgacaaaaataacaaaccaatttattcaaaagatttaaatgcacaaggcccaatgactgttttattaaaagaagcaattagacctaatgttactcaaactttagagaataatcctgcattaatacatggtggtccatttgctaatattgcacatggatgcaactcagtgatcgcaacaaagactgctttaaaattatctgattatgtcgttacggaagctggatttggagctgatcttggtgctgaaaaatttatggatattaaatgtagaaaatcaaatttaaaacctagctgcatagttatcgttgcaacagttagagcattaaagatgcatggaggagtagaaaaagaagatttaaaaaaagaaaatattgtggctttaaaaaaaggtttggtaaatctagaaagacacatcaacaatataaaaaagtttggtgtagatgcagtagttgcaataaatcattttgttatggatactgaaaatgaaacaaatgcattagaagaatattgcaataaaattggtgtaaaagtaagtaaatgtacacattggtcagacggtgg

SEQ ID NO: 315612 - DNA, 749 bp, Unknown
  Bacterial polypeptide expressing nucleotide sequence isolated from the Sargasso Sea
gatggcctttgtccatattggaaaaaaagcaatgatttgtctaagagagccaagtcttggaccatgttttggcatgaaaggtggtgctgcaggagggggatatgctcaagttatacctatgactgatataaatttacattttactggagattttcatgctattggcgcagcacataatcttctatcagctctaattgataatcatatccattgggagaatgaacttaatattgacccaagaagaataacttggaaaagagttgtagatatgaatgacagatcattaagagatattacatgtggtctcggcggcactggaaatggaataccgcgacaaagcggatatgatatcactgtagcttcagaaataatggctgtattttgcttagcatcagatttagatgacttacaaacaagaattggaaatattgttataggctatacaaagaaaaatgaacctgttaaagcaaaagaacttaatgcagatggagctatcactgcactattaaaagatgcatttcaaccgaatctggttcaaacattagaaaataatcctgctctcatgcacggaggaccctttgcaaatattgctcacggctgcaattcagttgttgctacaaaaacagcattaaaattagcagactacgttgtaactgaggcaggttttggtgctgacttaggagctgaaaaattttttaatattaaatgtagaaaatctggtcttaaacccgatgcagttgtattggttg

SEQ ID NO: 315613 - DNA, 927 bp, Unknown
  Bacterial polypeptide expressing nucleotide sequence isolated from the Sargasso Sea
taatttacattttacaggcgacttccacgcaataacttcagctcataatcttttatcagctttaatagataatcatatttactggggtaacaaacttaatatagatgataaaaatattgtttggaaaagagtaatggatatgaatgatcgagctcttagagcaataaatattaatacaaaaggcgcatcaaaaaattttccaagagaagatggttttgatattacggttgcatcagaagtaatggctatattttgtttatcaaataatttgaaagacctagaaaaaaaaattggaaatataactattgcttataataaatatggaaagcctatttatgctaaggatttaaatgctcagggtcctatgactgttttgcttaaagaagcaattagaccaaatataactcaaactctagaaaataatcctgctcttattcatggaggtccttttgcaaatatagctcatggatgtaattctgtaatagccactaaatcagctttgaaactttcagactacgttgtaactgaagctggttttggagcagatcttggtgcagaaaaatttttagacattaaatgtagaaaagcaaatctaagaccaagttgtgttgtaatagttgctacggtcagagctttaaaaatgcatggtggagtagaaaaagatgatttaaaaaatgaaaatattaaagctgtaaaaaaaggattagttaatcttgaaagacatataaataatataaaaaagtttggaatagatccgatcatagctataaatcattttgtattagacacaaaagctgaaattaaaattatatttgatttttgtaaaaaattagacgttgaagtaagtgaatgtactcattgggctaacggtggtaacggaacaaaggatctagctaaaaaagtggtaaaaatatgcaaaaattcaaa

SEQ ID NO: 315614 - DNA, 823 bp, Unknown
  Bacterial polypeptide expressing nucleotide sequence isolated from the Sargasso Sea
ccatttgcaaatattgctcatggatgtaattcggttatagcaacaaaaactgccttaaagttatctgaattcgtagttactgaggctggatttggagcagacttaggagcagagaaatttttaaatattaaatgtcgaaagtctaacatagttccaagttgcgtagttatagtagcaactgttcgtgctttaaaaatgcatggtggattagagagaaatgaacttaaaaaagaaaacttagaagcattaaaaaaaggaatggttaacttaaagagacatatagaaaatgttaaaaaatttggtttagagccgattgtagcattaaatcattttgtcttggatacaaagagagaaattaaggaagttttggaattttgtgaagatcaaaatgttgaagctagcgtgagtactcactggtcaaatggaggcagtggagccaaagatcttgcaaaaaaggtaataaaaatatgcaaaaaaaataaaataaataaatttaaatatttgtacagtgaaaaattatctctttggaataaaatagaagtaatagctaaggagatatatagagctcataatattacagcctcggatgaagttaaaaaaaatttaaaatattttgaaaaaaatggctatggaaatttaccagtttgtattgccaaaactcaatatagtttttctgtagacccaaaacttaaaggtgcaccaattggacatgaaataccaataagagaagtaagattgtcatcaggtgcaaagtttattgtagtagtatgtgggtcgataatgactatgcccggcttaccaagaatacctgcagcaaataaca

SEQ ID NO: 315615 - DNA, 835 bp, Unknown
  Bacterial polypeptide expressing nucleotide sequence isolated from the Sargasso Sea
aatgatatgtttaagagagcccagcttaggtccatgttttggaatgaaaggaggagcagcgggaggtggttatgctcaagtaattcctatgacagatataaatcttcattttacaggtgattttcacgcgataggtgctgcacataatctcctgtctgctttaatagataaccatattcactgggataatcaattaaatattgatccaagaagaatcacgtggaaaagagtcgttgatatgaatgatagatccctaagagatatcacatgtggattaggtggaacaggaaatggcataccaagacaaagtggttttgatattacggttgcatctgaaattatggctgttttttgtcttgcctctgatattgatgacttacagaaaagaattggaaatattgttattggttatacaaaagataatgagcctgtaaaagctaagcaacttaaagcggatggagcaataactgctcttttgaaagatgcatttaaaccaaatcttgtacaaactttagaaaataatcctgcatttatgcatggtggtccatttgcaaatattgcacacggatgtaattcagttgtctctaccaagactgctctcaagctcgcagattatgttgttactgaagctggatttggtgctgatcttggagcagagaagttttttaatattaaatgtagaaaatctggtttaaaaccagatgctgtcgttttagttgctacaacaaaggctcttaaaatgcatggaggcgtaaaaaaagaagaactgaataatgaaaatattcaagcagttgttaaaggctgtgataatcttgggaggcacattgaaaatatt

SEQ ID NO: 315616 - DNA, 721 bp, Unknown
  Bacterial polypeptide expressing nucleotide sequence isolated from the Sargasso Sea
tattcatggaggtccatttgctaatattgctcatggttgtaattctgtaatagctacaacagcggctctcaagctatctgactatgttgttactgaagcagggttcggtgcagaccttggtgctgaaaaatttttagatattaaatgtagaaaggctggattaaaacccagctgtgttgtgattgttgcgactataagagcattaaagatgcatggaggtgtagaaaaagaaaatcttaaaaaagaagacacagactctttaaaaaaaggtttagtcaatttagaaaggcatattttaaatattaaaaaatttggattagaaccaattgtagcaattaatcattttgctctagataccaaaaaagagatagatgttgttcttgatttttgtaaagatatgagtgttcaggttagtgaatgtaaacactgggcaatgggaggaaaaggcacaactgatctggctaaaaaagtagtcaaaacatgtaaagattcaaaaaaaagtagtttcaatcttttatataaagatgatttaaatctttgggataaaattgaaaaaatcgttaaagaaatttacagaggccgtggaattacagcgaacgaagatgtaaaagaacaactaaaagtttttgagaatagcggctacaagagtttacctgtttgtatagctaaaacccaatatagtttttcaacagatccaaagttaaaaggagctccatcaaat

SEQ ID NO: 315617 - DNA, 859 bp, Unknown
  Bacterial polypeptide expressing nucleotide sequence isolated from the Sargasso Sea
cctgcttgcttctatgatcgataatcacatttattggggaaatgatctaaatatagatacaagacgaatagtatggggtcgagttgtagatttaaatgatcgagctttgagaaatacaaatataaatcttggaggtatagcaaacggttttcctagagaagataaatttgatattacagttgcttctgaagttatggcgatcttttgtttgtcaacaagtctaagtgatctacagaaaagacttggcaatattatcattggttacacgcgagataaaaaagagatcaaagcgcgtgacataaatgcagacggagcaatgacaacgttactaaaagatgcttttctcccaaatcttgttcaaacgttagaagaaaacccagcaattattcatgggggtccttttgctaacattgcacatggttgcaattcgcttattgcaactcaaaccgcacttaaacttagtgattatgtagtaaccgaagctggatttggagcggatcttggcgctgaaaaatttctagatattaaatgcagaaaaggaaatttaaatccttctgcaatagtcattgtggctactgtaagagctttaaaaatgcatggcggaatggataaaaaggaactgaaaaatgaaaatctagacgccttgaggaaaggtctatcgaacttgcaacaacatatttcgaatatgaaaaaatatggggttcctgtgtctgtagcaattaatcattttataaccgataccgataatgaactctcaataatcagtgaatgctgtgataagcttgacattaaatcgtttaattgtactcactggagcaatggcggagctggggcagaaaccttagcgcaacacatgtag

SEQ ID NO: 315618 - DNA, 890 bp, Unknown
  Bacterial polypeptide expressing nucleotide sequence isolated from the Sargasso Sea
aaaaaaatctattgtatgtttaagggaaccaagtctgggtccgtcttttggtatgaaaggtggtgctgcaggaggaggatatgctcaggtagtcccaatggaacaaattaatcttcactttactggagattttcacgcaataacatcagcacataatcttttatcagctttaattgataatcatatctactggggaaataaattaaacatagatgtcagaagaattgtttggaaaagagttatggatatgaacgacagagctttaagatcaatcaatattaatcttggcggtgttgctaatggttttccaagagaagatggttttgatatcacggttgcttctgagataatggctatcttttgtctcgccaataatcttgaagatttggaaaaaaggattggaaatattacagtagcatacactcgagagaaaaaaccgatttatgctaaagatttaaatgctcatggaccaatgactgttttgctcaaagaagcaatcagacccaatattacacaaacattggaaaataatcctgcaataattcacggtggaccgttcgcaaatattgcacatggatgtaattcagtaattgcaactaaagctggattaaaacttgctgactatgttgtaactgaagcaggtttcggtgcagatttaggagctgaaaaatttttagatattaaatgtagaaaatcaaatttaaaaccaagttgcgttgttatagttgcaactataagagctttaaagatgcatggtggtgttgcaaaagatgatttaaaaaatgaaaatgttgatgcacttaagaaaggattgataaaccttgaaagacatattgaaaacgtaaaaaaatttggtttaccagtggccgtagccataaatcactttataa

SEQ ID NO: 315619 - DNA, 717 bp, Unknown
  Bacterial polypeptide expressing nucleotide sequence isolated from the Sargasso Sea
catggaacaaattaatttacatttcactggtgattttcttgcaattacctctgcccataatttactctcggcattaattgataatcatatttactggggtaacaaactaaagatagatattcggagagtagtttggaaaagagtaatggatatgaatgatagatctttaagatctattgtagttgatttgggaggtgttgctaatggttatccaagacaagatggttttgatataacagtcgcttctgaaataatggctattttttgtttagctactgatttaaaggatttggaaaatagaataggaaatattacaattgcgtacactcgagataaaaaagcaatttatgcaaaagatttaaacgcgcaaggtccaatgactgttcttttaaaagaagctattagacctaatgttactcaaaccttagaaaacaatccagctattattcatggaggtccttttgctaatattgctcacggctgtaattctgtaatagctacaaaggcaggacttaaattagcagattatgttgttacagaggctggatttggtgcagatcttggggcagaaaaatttttaaatattaaatgtagaaaatcaggattgaagcctgattgtgttgttattgttgcaactataagagctcttaaaatgcatggcggtgtaataaaagatgaattaaaaaatgaaaacgtaaaagctttaaaaaaaggttt

SEQ ID NO: 315620 - DNA, 859 bp, Unknown
  Bacterial polypeptide expressing nucleotide sequence isolated from the Sargasso Sea
tgctatattgcccatggatgtaattctgtaattgctacaacagcagctcttaagctatcagactacgttgtaactgaggcaggatttggcgcagacctaggtgctgaaaaatttttagatattaaatgtagaaaggctggattaaaacctagctgtgttgtaattgttgcaactataagagcattaaagatgcacggaggtgtagaaaaagaaaatcttaaaaaagaagacaccaactctttaataaaaggtttagtcaatttagaaagacatattttaaatattaaaaaatttggactagaaccaatcgtagcggttaaccattttgccttagatacaaaaaaagaaataaatgttgttcttaatttttgtaaagacttgaatatccaggtaagtgaatgtaaacactgggcaacgggaggcaaaggaacgactgatctagcaaaaaaagttgtcaaaacttgtaaagagtcaaaaaagagtaatttcaagcttttgtatgaagataatttaaatctttgggataaaattgaaaaaatcgttaaagaaatttatagaggtaatggaattactgcaaatgaagatataaaagaacaactaaaagtttttgagaataacggctacaagagtttgcctgtttgtatagctaaaacccaatatagtttttcaacagatcctaagttaaaaggggctccatcaaatcatgaaattccaataagagaagtgagattatcatctggagctgagtttattgtagttgtttgtggatctattatgacaatgcctggtctacccaaagttcctgcggctaataatattaagcttaataaaaaaggtgaagttgaaggacttttttagt

SEQ ID NO: 315621 - DNA, 853 bp, Unknown
  Bacterial polypeptide expressing nucleotide sequence isolated from the Sargasso Sea
aaatctatagtttgtcttagagaaccaagtttaggtccttcttttggaatgaaaggaggtgctgctggcggtggttatgctcaagttgttcctatggaacaaattaatttacattttacaggagattttcatgctattacttcagcccacaatcttctttctgctttaattgataatcatatttattggggaaacaaacttaatattgatgttaggcgaattgtttggaaaagagttatggatatgaatgatcgttcattaagatctataaatataaatctaggaggtatagcaaacggatatcctcgagaagatggatttgatattactgtagcttcagaaatcatggctatattctgtttatcaaatgatttaaaagatttagaaaatagaattgggaatattacaataggttatactagagacaaaaaaccaatatttgcaaaagatttaaatgcacaaggtcctatgacagttttattaaaagatgcaattagaccaaatataactcaaactttagaaaataatcctgcaattatacatggagggccatttgcaaacattgcacatggttgcaattcagttattgcaacaaaaactgggttaaaactatctgattatgttgtaacagaagcaggatttggtgctgatttaggtgctgaaaaatttttagatattaaatgtagaaaatcaaatttaaaacccgattgtgttgttattgttgctactatcagagctttaaaaatgcatggtggtgttgccaaagaagatcttaaaaatgaaaatattaaatctttaaaaaaaggtttagtaaacttagaaagacatgtaaataatgtcaaaaaatttaatt

SEQ ID NO: 315622 - DNA, 872 bp, Unknown
  Bacterial polypeptide expressing nucleotide sequence isolated from the Sargasso Sea
tcctagacaagatggttttgacatatctgtagcttctgaaattatggcaatcttttgcttatcaaaagatttaaaagatttagaaaaaagaattggaaatattaccattggttacacgagagataagaaaccgatttgcgcgaaagatcttaaagcagaagggccgatgacagttcttttaaaagatgcaatcagaccaaatattacccaaactttagaaaataatcctgcaattattcatggaggtccatttgcaaatattgctcatggatgtaattcggtaattgctacaaaggcagcattaaaattatcagattatgtaattacagaagctggatttggagcagaccttggtgctgaaaaatttataaacattaaatgtagaaaatctggtcttaaaccagattgtgttgtcatagtcgcaacaataagagctcttaagatgcatggtggtgtaaaaaaagatgaattaaaaaaagagaacttagatgctctaaaaaaaggtttaactaatttggaaagacatataaataatactagaaagtttggagtaccggtggcagttgctgtaaatcactttgctacagattcaaataaagaggtaaattttctaatagatttttgtaaaaatttcggtgttgaaatatcgttgtgtacccattggtcagatggaggaaatggtacaaaagatcttgctagcactgtggtaaaaatttgtaataaaagtaaaaatacctttagatatttatatgaagataagcttcctttatttaaaaaaattgaaaaaatcggccaagaaatttatcacgcaagtgaagtagtagctgatacaaaagttcgaaatcagctaaaagatttcgaaaaaaagggta

SEQ ID NO: 315623 - DNA, 976 bp, Unknown
  Bacterial polypeptide expressing nucleotide sequence isolated from the Sargasso Sea
gttattcctatgactgatatcaaccttcacttcacaggagattttcatgcaataggggcagctcataatcttttatctgcactgatcgataatcatattcattgggataatgaactaaatattgaccctagaagaataacctggaaacgtgttgttgatatgaatgataggtctttaagagatattacatgtggtcttggtggaacaggtaatggcataccaagacaaagtggatttgacattacagtagcatcagaaattatggcagttttttgcttggcctctgatattgaggatcttcaaaaaagaattggtaatattgttataggctacacaaaatcaaatgaaccagttagagctagtcaacttaaagcagatggtgccatcacggcattgcttaaagacgcttttcaaccaaatttagtacaaactttagaaaataatcctgcttttatgcatggtggtccatttgcaaacatagctcatggttgtaattcagttgtttcaacaaaaacagcattaaaacttgcagattatgtagttactgaagctggatttggtgcagacttaggcgcagaaaaattttttgatattaaatgtagaaaatcaggccttaaacctgatgcagttgttctagttgcaacaacaaaagcacttaaaatgcatggtggtgtgaagaaagaagatttaggaacagaaaatgtcgatgcagttacattaggttgtaaaaatttagaaaaacacgttgaaaatataaataaatttggagttccagttgttgtcgctattaataattatgtttctgatactgaaaaagaacatattgcaataataaatttctgtaagaatcttggtgttcaatgcaaaatttcttcacattgggaaaaaggtggccagggagcatcagaacttgctgtggaagttgctaaagtagctgattcaaatatgtctgagtttaataccttatatgaggatg

SEQ ID NO: 315624 - DNA, 849 bp, Unknown
  Bacterial polypeptide expressing nucleotide sequence isolated from the Sargasso Sea
gtcttggtccttcttttggaatgaaaggtggtgctgctggaggaggatacgctcaggttgttcctatggaacaaataaatttacatttcacaggtgatttccacgcaatcacatcagctcataatttgttatctgcattaattgataatcatatttattggggaaataaattagacatagacgttagaagaattgtttggaaaagagttatggatatgaatgatagatctttaagatcaataaacattaatttaggtggtgttgctaacggatttccaagagaagatggttttgatattactgttgcatctgagataatggcaatcttttgtttatcaaatgatctagaagatttagagaaaagaattggaaatattacaattggatataaccgagataaaaaaccagtttatgcaaaagatttaaatgctcaaggacctatgacagtgcttcttaaagaagctattagacctaacgtaacacaaacattagaaaacaatcctgcaattatacatggaggaccttttgcaaatatagcacatggctgcaactctgttattgcaacaaaaactggattaaaacttgcagattatgttgtgacagaagcaggatttggtgctgatctaggtgctgaaaaatttttagatattaaatgtagaaaatcaaatttaaaacctagttgtgtagttatcgttgcaacaattagagcattaaaaatgcatgggggagttgcaaaggaagatttaaaaaacgaaaatgtagatgcacttaaaaaaggattggttaaccttgagaggcatattgaaaatgttaaaaaatttgggttacccagttgctgttgctgttaat

SEQ ID NO: 315625 - DNA, 877 bp, Unknown
  Bacterial polypeptide expressing nucleotide sequence isolated from the Sargasso Sea
ggaaaattaattttagttactgctattacaccaactcttgcaggtgaggggaaaaccactacgtcagttggtttaaacgatggattgaacaaaattggtaaaaattctatagtgtgtttacgtgaacctagtttaggtccttcatttggaatgaaaggtggagcagcaggtggtggatatgctcaagttgttccaatggaacaaatcaatttacattttactggggatttccatgcaattacatctgctcacaatttattgtcagcgttaattgataatcatatttattggggaaataaattaaacatagatgtaagaagagtagtttggagaagagttatggatatgaatgatagatctttaagatctatcaatattaatttaggtggagtagctaatggttttccaagagaagatggttttgatattacagtagcatctgagataatggctatcttttgtttagcaaatgatcttgaagatttggaaaagagaataggtaatattacagttgcttatactagagatagaaagcctatttttgcaaaagatttaaatgctcatggaccaatgactgttttattaaaagaagcaatcagacctaatgtaacccaaacgttagaaaataatccagcaatcattcatggtggtccttttgcaaacattgcgcacggttgtaactctgtaatagcaactaaagcaggtttaaaactagctgattatgttgtaactgaagctggatttggagcagacctaggagcagaaaaatttttagatattaaatgtagaaaatcaaatttaaaacctgagtgtgtagttattgttgcaacaatcagagcattaaaaatgcacggtggtgtagctaaagatgattaaa

SEQ ID NO: 315626 - DNA, 804 bp, Unknown
  Bacterial polypeptide expressing nucleotide sequence isolated from the Sargasso Sea
tatttgattatgtcgtaactgaagctggttttggagcagatcttggagctgaaaaatttttagatattaaatgtagaaaagcaagtctaaaaccaagttgcgttgtaatagttgcaacagttagagctttaaaaatgcatggcggtgtagaaaaaggaaatttaaaaaaagaaaatgttctagctataaagaaaggattagttaatcttgaaaggcatataaataatattaaaaaatttggaattaacccagttgttgctataaatcactttgttttagatactaaagctgaaattaaaattatatccaatttttgcaaaaagttgaatgtggaagttagtgagtgcactcattgggccaatggtggtaaaggaacaagggatttggcaaaaaaagttgtgaaagtatgtaaaaaatcaaaaaaaaataatttcaaatttttatatagcgaaaaagaatctttgtggaataaaatagaaataattgcaaaagaaatttataaatccagaaaaattacagctgatgaaaaagttaagcaagaactaataaaatttgaaaaaaatggatatggaagattgcctgtctgtattgcaaaaacccagtatagtttttcagttgatccaaaacttaaaggtgcaccatctggtcacgaaattccaataagagaagtaagactttcttcaggagctgaatttattgttgtaatttgtggatctataatgactatgcctggactaccaagggttcctgctgctaattcaattaaattaaataataaaagtgaaattgaagggttgttttaat

SEQ ID NO: 315627 - DNA, 826 bp, Unknown
  Bacterial polypeptide expressing nucleotide sequence isolated from the Sargasso Sea
agagttatggatatgaatgatcgctcattaagatcaattgttgtagatcttggtggagtggcaaatggatatcctagacaagacggctttgatattacagtagcttctgaaataatggcaattttctgcttatcaaatgatttaaaagatttagaaaatagaattggtaatattacagtagcctatactagagataaaaaaccaatttatgcaaaagatttaaatgctcaaggtccaatgactgttttgttaaaagatgcaattagacctaatgtaacacaaacattggaaaacaaccctgcaataatacatggtggaccttttgcaaatattgctcatggttgtaattcagtcatagctacaaaaacaggattaaaattagcagattacgttgtaactgaagctggttttggtgctgacttaggtgccgagaaatttttagatattaaatgtagaaaatcaaatttaaaacctgattgtgtagtaattgttgcaaccataagagctttgaaaatgcatggtggtgtaactaaggatgaccttaaaaatgaaaatgtcaaagctttaaataaaggattagtaaatcttgaaagacatattaacaatattagaaaatttggtttgccagttgcagtggccgtcaaccactttatcacagacaccgataaagaagttaatgcacttatggatttttgtaaaaccttaggtgtaaaatcatctatttgcaaacactggtcagatggaggagaaggaactaaagatctagcaaatattgttgttgatatatgtaataataaaaattcttttaaatttttatatgaagata

SEQ ID NO: 315628 - DNA, 885 bp, Unknown
  Bacterial polypeptide expressing nucleotide sequence isolated from the Sargasso Sea
atgcaatcacatctgctcataatttgttatctgcattaattgataatcatatttattggggaaataaattagacatagatgttagaagaattgtttggaaaagagtcatggacatgaatgatagatctttgagatcaataaatattaatttaggtggagttgctaatggatttcctagagaagatggttttgatattactgttgcatcagaaataatggcaatcttttgtttatcgaatgatctagaagatttagagaaaagaattggaaatatcacaattggatataaccgagataaaaaaccagtttatgcaaaagatctaaatgctcaaggtcctatgacagtacttcttaaagaagctataagaccaaacgtaacacaaacattagaaaacaatcctgcaattatacatggaggaccttttgctaatatagcacatggatgtaattctgttattgcaacaaaaactggattaaaacttgcagattacgttgtaacagaagcgggatttggtgctgatttaggtgctgaaaaatttttagatattaaatgtagaaaatcaaatttaaaacctagttgtgtagttatagttgcaacaatcagggcattgaagatgcatggaggagttgcaaaggaagacttaaaaaacgaaaatgtagatgcgcttaaaaagggactagttaatctagaaaggcacattgaaaatgttaaaaaatttggtttaccagttgctgttgccgttaatcattttattaaggatacagatagtgaagtaaaagcactaattgatttttgtaatgatttaggagttaaagcaagtctttgtactcattggacaaatggtggtgagggaacaaaagatttagcggcacatggttactgaa

SEQ ID NO: 315629 - DNA, 1338 bp, Unknown
  Bacterial polypeptide expressing nucleotide sequence isolated from the Sargasso Sea
aatgttggggagcattactgtgagtgacatagagattgcgcgtgcggcgaagaagaagccgatttttgagattggtgagtctttgaacataccggcggcggatttggtgccgtttggacatgacaaggcgaagattagccagggttttattaactcggtacagggtcagccgcatggcaagctgattttggtgactgcaatcaacccgacaccggctggcgagggtaagaccaccacaacggttggtcttggcgatggtctgaatcggattggcaagaaagcgatgatttgcattcgcgaggcatccttggggccgaatttcggtatgaagggcggcgccgctggtggtggctatgcgcagattgtaccgatggaagatatgaatttgcactttaccggtgattttcatgccattacatcggcgcattcgctgctatcagcaatgattgacaatcatgtttactggggcaatgagttagaaattgatactcgccgggttgtatggaggcgggttgttgatatgaatgaccgggcattacgccagatcaccgtctcacttggtggggtagctaatgggtttccgcgtgaagctggatttgacatcactgtggcatctgaggtaatggcgattttgtgtctggccaaggatttagctgatctgcaaaagcgtcttggtgatatgattgtggcttatcggcgtgaccgctcaccagtattttgccgtgatatcaaggccgatggagcgatgacggtattgcttaaagatgcaatacagcccaatcttctgcaaactttagaaaatagcccagcttttgtacatggtggcccgtttgccaatattgcgcatgggtgtaattcggtgattgcgacgacgacagcgttaaagctggctgattatgttgtaaccgaagctgggtttggagctgatcttggagctgaaaaattcttgaacatcaaatgccgtaaagccggtctagcaccatcagtggtggtgcttgtggctacggtacgggcgatgaagatgaatggtggcgtagcgaaaaatgatttgaatgaagaaaatgtggcggctgtaaaggggggatgtccaaatcttggtcgtcatattgagaatttaaaatcatttggcgttccggtggtcgtagcaattaatcattttgtcaaggatactgatgccgaggtgcaggctgttcaggattattgtgcgaagatgggaactgaagctattgtttcaaaacactgggcggatgggtctgctggatcagaaaatctggcgaagcgggtagccgaggttgccgatgctgatacgggcaattttgccccaatttatccagatga

SEQ ID NO: 315630 - DNA, 1315 bp, Unknown
  Bacterial polypeptide expressing nucleotide sequence isolated from the Sargasso Sea
ggatactctcaggtagttccaatggagcaaattaatttacattttactggtgactttcacgcgattacatcagcacataatttattatctgcattgatagacaatcatatttactggggaaataaattaaatatagatgttagaagagttgtttggaatagagttatggatatgaatgatcggtcacttagatcaattgtcgttgacctaggtggagttgcgaatggataccctagacaagatggttttgatataacagtagcttcagaaataatggcaatattttgcctttcaaagaatttaaaagaactagaaaataaaattggaaatattacaataggttacacaagagataaaaaaccaatttatgcaaaagatttaagagctcaaggtcctatgactgtattattacacagagcattaagaccaaatgttgtacaaactttagaaaacaatccagcaataattcatggaggaccttttgcaaatatagctcacgggtgtaactcaatcattgctacaaaaacagcattaaaattatctgattatgtagttacggaagctggatttggtgcagaccttggtgctgaaaaatttgtagatattaaatgtagaaaatcaggaattaaaccatcttgcatcgtaattgttgcaactataagagctttaaaaatgcatggaggcatcgaaaagaagcagttgaaaaaagaaaatatgtctgcgcttataaaaggtttagtaaatttagaaagacatataaacaacatgaaaaaatttggtttaccagtaactgttgcaattaataaatttatttatgatactaaaaaagaagaaaatgcagttatcgacttttgtaaagatttgggagtaaaagcaaatctatgtacacattgggcagatggaggtaaaggaacaagagatttggctaaaacagtcgtagaattatcttctaaaggtaaaaataaatttaagtatctttacgaggataaattacctttgtttaaaaaaatagaaaaaattgctaaagaattttataaagctagtgaagttattgctgatagcaaaattagaagtcaactcaaggagtacgaagctttaggttttaaaaatttacctatatgtatagcaaaaacacaatatagtttttcaacagatccaaatttaaaaggagcaccgaaagatcacgtagttcaaataagaggactaagactttcatctggtgccgaatttttagtagtattttgtggagctataaatactatgcctggtcttcctaaggttcctgcagctgaaagtatcaagcttaattcaaaag

SEQ ID NO: 315631 - DNA, 1135 bp, Unknown
  Bacterial polypeptide expressing nucleotide sequence isolated from the Sargasso Sea
ttcaatcttgggtggtatttcgaatggctttccaagaacagatggttttaatatcacagttgcttctgaagttatggcaatcttttgtcttgcaaaagatcttaaagatttacaaagaaggttgggtaatattactgttgcatatacgcgagacaaaaaagctatacatgctaaagacttaaaagctgaagggccaatgactgtccttctaaagcaagccttaatgcctaacttagttcaaacactagaaaacaaccctgcaatcattcatggtggtccatttgcaaatattgcccatggttgtaacagtgtcattgccacaaagacaagcctaaaaattgcagattatgtggtaactgaagctggttttggtgcagatctaggggctgaaaaatttctaaatataaaatgtcgtaaatcagaattaaatcctgatggagtagttgttgtagctacaattagagctcttaaaatgcatggtggcgtaaaaaaagaaaatctgggaattgaaaatgttgaatccataaaaaaaggaatgtcgaatttgaaacgtcatatagagaatattaaaaaatttggacttcctatagttgtagcaataaatcattttaaagcagatactgacaatgaaacagctgcacttaagcaagagtgtaagaaaattggagttgaagcaataatttgtaaacattgggcagaaggtagtaatggaactgttgaattagcaaagaaagtagttgaacttgttaatgaaaaaaattcatttaaatttttatatgaagataagattcctttaattgaaaaaattgagaaaattgcaaaggaaatttacggtgctgaagaagtaattgcagataataaaattagagaacaacttaaacaatatgagaataatggttacggtgattttcctatatgcatagcaaaaacacagtatagtttctcaacagatccttctcttaaaggcgctccaactggtcatagtataccaatcagagagttaagattatcaagtggtgcagaatttattgttgtgatttgtggtgaaataatgacaatgccaggattacctagtgttccagctgcaaattctatacatttaaatgaaaaaggtcaaattgaaggtcttttctaa

SEQ ID NO: 315632 - DNA, 937 bp, Unknown
  Bacterial polypeptide expressing nucleotide sequence isolated from the Sargasso Sea
gactgtactattaaaacagcattgatgcctaatttagttcaaacacttgaaaataatccggcaattattcacggaggaccatttgcaaatattgctcacggttgtaatagtgtaattgcaacaaaaacagcattaaaaatttctgactatgtagttactgaagctgggtttggtgcagaccttggtgctgaaaaatttttaaatattaaatgtagaaaagcagaactaaatcctgacgccgtagtgctggtagcaactataagagctcttaaaatgcatggaggtatagaaaaaaataatttgaaaaatgaaaatgttgaagctgttaaagctggcatatctaatcttaaacagcatgtaaataatattaaaaaatttggattacctataatagttgctataaatcattttgaagctgatactgagaaagagataaaaattctaaaagaagagtgtaataaaataggagtagaggctgttcaatgcaaacattggtctgatggtggtaatggtactatagaattagctgaaaaagttgttgatctaactaatcaaaaaaattcatttaattttttatatcaagacaacatacccttacttgaaaaaattaaaacaatagcaacaaaaatttatcaagctaatgatgttattgttgataataagattagatcacaattaaaactatttgaaaaaaatggatatggaaaatttcctatttgtatagctaagactcaatacagtttttcaacagatccaagtttaaaaggtgctccaactaaccatagtattccaattagagaggtaagactttctagtggagctgaatttattgtagtaatttgtggagaaataatgacaatgcctggcttacctagtgtacctgctgctaatgcaattcatttaaatgaaaatggacaaattgaaggtcttttttaaa

SEQ ID NO: 315633 - DNA, 1690 bp, Unknown
  Bacterial polypeptide expressing nucleotide sequence isolated from the Sargasso Sea
atggacgcagtcaaatctgatattgagatagctagaaaagcaaaaatgcgtcctattaaggatattttagctaaaattaaagtaccagactcaaataaagctttcagtcctatgggacgtcatattgcaaaaatcaatttaaaataccttgaaactttaaaaaataaaaaagatggcaacttaattttagtaactgcaataactccaactccagcaggtgaaggtaagactacggtatccgttggtttaagtgatgggttaaataaaattggaaaaaaatcgatagtttgtttgagagaaccaagtcttgggccttcttttggtatgaaaggtggtgcggcaggcggtggttattctcaagttgtgccaatggaacaaataaatttacattttactggtgattttcatgcaataacttcagctcacaatcttttatccgcattaatagataatcatatttattggggcaataaacttgatatcgatgataaaaaaattgtttggaaaagagttatggatatgaatgatcgtgctttaagggcaataaatataaatacaaaaggtgcatctaaaaattttccaagagaagatggttttgatattacggtagcctccgaagtaatggctatattttgtttatccaataatttaaaggaccttgaaaaaaaaattggaaatataactattgcttacaaaaaagatggaaaaccagtttatgcaaaagatttaaatgctcaaggacctatgactgtattattaaaagaagcaataagaccaaatgtaactcaaacattagaaaataatccagcttttattcatggaggcccttttgcaaatatagcacacggatgtaattcagtaatagctactaaatcagctttaaaactatccgattacgtagtaactgaagcaggttttggtgcggatcttggtgctgaaaaatttttagatattaaatgtagaaaagcaaatctaaaaccaagttgtgttgtaatagttgctacagttagagctttaaaaatgcatggtggtgttgaaaaagaagatttaaaaaaagaaaatatacacgcagtaaaaaaaggattggttaatcttgaaagacatataaataacatcaaaaagtttggaataaaccctgttgttgctataaatcattttgttttagataccaaagctgaaattaaaattatatctgatttttgtaaaaagttgaatgtaaaggtcagtgaatgtactcattgggcaaatggtggtaaagggacaaaagatttagcaaaaaaagttgtggaaatatgtaaaaaatcaaaaaaaaataattttaaatttttatataatgaaaaagaaactttgtggaataaaatagaaacgatagctaaagaaatttataaagccagtaaaattacagcagatgaaaaggttaaagaagaactaataaaatttgaaaaaaatggttatggaaaattaccagtttgtattgcaaaaactcagtacagtttttcggtagatccaaaactcaaaggggcgccttcaaatcatgaaattccaattagagaagtaagactttcatctggagctgaatttatagtagttgtttgtggatcaattatgactatgcctggtttgccaagaattcctgcggctgattctattaaaataaataataaaggtgagattgatggattattttaat

SEQ ID NO: 315634 - DNA, 1684 bp, Unknown
  Bacterial polypeptide expressing nucleotide sequence isolated from the Sargasso Sea
atggccgaagtaaaatctgacattcaaatagctcgagaagctaagatgcaaccaataaaagatatactttctaaggttggagtgccagatgaaaattttgcttttagtccaatgggtagacacatagccaaaataaatttggaatatttaaatactcttaaaaaggaaaatggcaaattaattttagttactgcaattactcccactccagctggtgaggggaaaactacaacttctgttggtttaaatgacggtttaaataaaattggaaaaaaatctattgtttgtttaagagaaccaagtcttggtccatcatttggaatgaagggtggagctgctggtggtggttatgcccaagtagtaccaatggaacaaatcaatcttcattttacaggtgactttcatgctattacatctgctcataatttattatctgcattaattgataatcatatctattggggcaacaaacttaacattgatgttagaagagttgtttggagaagggtaatggatatgaatgatagatcgttaagatctattattgttgatctaggaggagtagctaatggttacccaaggcaagatagtttcgatattacagttgcatctgagcttatggctattttttgtttagcaacagacttaaaagatttagaaaacagaattggaaatattacaattggttatactagagataagcaagcaatttatgcaaaagatttaaatgcacaaggcccgatgactgttttgcttaaggaagcaataagacccaatgtaactcaaactctagaaaacaatcctgcaataattcatggtggcccttttgcaaatattgctcatggatgtaattcagttattgcaactaaagctggacttaaattagctgactacgttgtaacagaggcaggattcggagctgatttgggagctgaaaaatttctggatattaagtgtagaaaatctggtctaaaaccagattgtgttgtcattgttgcaactataagagcactgaaaatgcatggtggagttgctaaagaagatttaaaaaaagaaaatgtatcagcacttaaagagggaatggtaaatttacgtagacatattaataatattagaaaatttggattacctgttactgttgcagttaatcattttattactgatactgaagatgaaatgaaaaccttgttagatttttgtgaaacgcaaggagttaaagcctctaaatgtactcattggtcaaatggaagtgaaggaactattgaactggctaaaaatgttacagaaatttgtgaagataaaaaagatacatttaaatttttatatgaggatgatcttccgttattcaaaaaaatagaaaaaattgcacaagaaatttatagcgcatctgaagtggtagctgatacaaaagtgagacagcaattaaaagattttgaggaaaagggttatggcaaattacctgtttgtattgcaaaaacacaatatagtttttcaacagatccaaatttaaaaggtgctcccacaggtcatgttttgcctgtaagagaagtaagactttcttctggtgctgaatttatagttgttgtgtgtggagaaattatgacaatgcctggacttccaagagttcctgcagccgactctataaaattaaatgacaaaggtgaaatagaaggtttattctaaa

SEQ ID NO: 315635 - DNA, 1642 bp, Unknown
  Bacterial polypeptide expressing nucleotide sequence isolated from the Sargasso Sea
atgactgagtacttaagtgatttagaaatagccaatgctgccaacaaaaaacctatcagtgatattgctcattcaataaatattgctgaaaaagatttaattaaatatgggaatgataaagcaaaattatcatatgattttattaattcattgtctaaaaaagaaaatggaaaattaattctagtaactgctatttcaccaactcctgctggtgaaggtaagacaaccacgagtgtagggttggttgatggattatgtcacattggtaagaaagcaatgatttgtttaagagaaccaagtcttggcccatgttttggaatgaaaggtggtgccgctgggggtggttatgctcaagtaatacctatgactgatatcaatcttcattttactggagattttcatgctatcggagcagcacataatttattatcagcattaatagataatcacatccattgggataatgaattaaatattgatcctagacgaataacctggaaaagagttgtagatatgaatgatagatccttaagagaaataacttgtggtttggggggacttggtaatggaatacctcgtcaaagtggatacgatataaccgttgcatctgaaattatggcagttttttgtcttgcatctgatttagaagatttacaaaatagaatagggaatattgttattggatatactaaagacaataaaccggtaagagctaaagaattaaatgctgacggagcagttacagcattattaaaagatgcatttcagccaaatctagttcaaactctagaaaataatcctgcattcatgcatggaggcccatttgcaaatattgctcatggatgtaattcggtaacatcaacaaaaaccgctttaaagcttgcagactatgttgtaactgaagcaggttttggtgcagatcttggggctgaaaaattctttgatattaaatgcagaaaatctgggctaaagccagacgcagtagtactagttgcaacaacaaaagcattaaaaatgcatggtggtgttcaaaaaagtgaattaaataaggaaaacgtggaagcagttataaaaggttgtcaaaatctaggaaaacacatcgaaaatattagtaaatttggtgtcccagtagtcgtaggtataaacgattatgttaccgatactgaaaatgagcacaaagaaataattaatttctgcaagaaaaaaggtgttgaatgcaaaatttcatctcactgggaaaaaggtggagaaggagcggctgctttagcggaagaggttgtaaaagtagccgattcaaatttgtcaaagtttaaaactttatataaaagtgaaatgggcttatgggacaagactcaatatatagctcaaaatatttatggtgctgcagatataattgctgataagaaagttagaaatcagtttaaaaaactagaagatgatggatttggagattatcctatatgtatggctaaaactcagtatagtttttcaacagatccattattaatgggggcaccatcaggtcatgatgtcccaataagagaagtaaggttatcagctggtgctgaatttgtggttgttgtatgtggtgaaattatgactatgccaggactgcctagagtgcctgcagctgaagcatagg

SEQ ID NO: 315636 - DNA, 1681 bp, Unknown
  Bacterial polypeptide expressing nucleotide sequence isolated from the Sargasso Sea
atgtcaaaatcagatatccaaattgcacgagaagcaaaaatgaaacccataaatgagattttgggtaaaattaatgttccagacgaaccaagtgcttttagccctatgggacgtcatattgctaaaataaatttagaatatttagatagtttaaaagataaacaaaatggaaaattaattttagttactgctattacaccaactcctgcaggtgagggaaagacaactacgtcagttggtttaaatgatggattaaataaaattggtaaaaattctatagtgtgtttacgtgaacctagtttaggtccttcatttggaatgaaaggcggagcagcaggcggtggatatgctcaagttgttccaatggaacaaatcaatttacattttacaggagacttccatgcaattacatctgctcacaatttattgtcagcgttaattgataatcatatttattggggaaataaattaaacatagatgtgagaagagtagtttggagaagagttatggatatgaatgatagatctttaagatctataaatattaatttaggtggagtagctaatggttttccaagagaagatggttttgatattacagtagcatctgagataatggctatcttttgtttagcaaatgatcttgaagatttggaaaagagaataggtaatattacagttgcttatactagagatagaaagcctatttttgcaaaagatttaaatgctcatggaccaatgactgttttgttaaaagaagcaatcaggcctaatgtaactcaaactttagaaaataatcctgccattattcatggtggtccttttgcaaacattgcgcacggttgtaactctgtaatagcaactaaagcaggtttaaaactagctgattatgttgtaactgaagctggatttggagcagacctaggagcagaaaaatttttagatattaaatgtagaaaatcaaatttaaaacctgagtgtgtagttattgttgcaacaatcagagcattaaaaatgcacggtggtgtagctaaagatgatttaaaaaatgaaaatgtagaagcgttaaaaaaaggtttagtaaatttagaaagacatattgaaaacgtaaaaaaatttggtttaccggtagcagttgctgttaatcattttgttgctgatactgataatgaggtaaaagagttaataaatgcttgtgataatatgggagttaaagctactttatgtactcattggtcaaatggtggcgaagggacaaaagaacttgccacacatgttgtagatttaattgatcaaaaacaagcaaattttaaatttttatatgatgaaaaaacacctttgttaaagaaagttgagactgttgcaaaagaaatatatcgagcaaacgaagttgttgctgacagtaaaataaaagaccaattaaaatcttttgaagaagcgggttatggaaatttaccgatatgtgtagcaaaaacacaatatagtttttctactgatccaaacgcaaaaggcgctccaacaggtcactcattaccaattagagaagtaagattatcttcaggtgcagaatttattgttgttatatgtggagccatcatgacaatgcctggacttcctcgagttcctgcagcagactctattaagcttaatgaaaaaggtgaaatagaaggcttgttctaat

SEQ ID NO: 315637 - DNA, 1678 bp, Unknown
  Bacterial polypeptide expressing nucleotide sequence isolated from the Sargasso Sea
tatggctaaaacagatattgaaatagcacgagaagctaaaatgaaacctattcaagaaatattggatagtattaatgttccagataaagctgaagtttatagtcccatggggagatatattgctaaaatcaaactcgaatatttagaaaagttaaaagacaaaaaagatggaaagctaattttagtgactgcaattactccaactcctgctggggagggtaaaactacaacttctgttggattatgtgatggattaaataaaataggaaaaaaatctattgtatgtcttcgtgaaccaagtttgggtccatcttttggaatgaaaggtggtgctgctggtggtggctatgctcaagttgttccaatggagcaaattaatttacactttactggtgatttccatgcaatcacttctgctcataatcttctatccgcattaattgataatcatatttactggggaaacaaattaaatatagatgtgagaagagtagtttggaaaagagttttagacatgaatgatagagctttaagatcaattaatataaatcttggaggaattgcaaatggttttcctagagaagatggatttgatatcacagtagcttcagagataatggctatattctgtttgtcaaatgacctttatgatttagaaaaaaaaattgggaatataaccatagcctacacaagagataaaaaaccaatatttgctaaagatttaaatgcacaaggtccaatgacagtattattgaaagatgcaataagaccaaactttacccaaacattagaaaataatcctgcaattatacacggaggaccattcgcaaatattgctcatggatgtaattctgttttagcaacaaaaactgcattaaaattatcagactatgttgtaactgaagcaggttttggagctgatttaggtgcagaaaagtttttagatattaaatgtagaaaatcaggcttgaaaccaaattgtgttgtaatagttgctactatcagagctctaaagatgcatggaggtctaaataaagatgaattaaaaacagaaaatttaaatgcgttaaaaaaaggattagttaatttagaaaaacatataagtaatattaaaaaatttggactacctgttacagtagctattaaccattttgtcttagatacagagaaagaaatagacgttgtgattaatttctgtaaaaaattaaaaataaaagtttcaacttgtaaacactgggaaaaaggaagtgatggaacaaaagaattagcaaacgatgttataaaattgtgcgaagaaaaaagtgaatttaaatttctgtataatgatgatgttggattgtttaaaaaaatagagaccattgcaaaggagttgtatggggctaacgaggttattgcagacacaaaaattagagaacagcttaagaattttcaggataatggatatcaaaaattaccaatttgtattgctaaaactcaatatagtttctcaacagacccgagtttgaaaggagccccaacaggacatgttcttccaattagagaagtaagattatcttcaggtgcagaatttatagtggttgtatgtggagctataatgacaatgcctggtctgcctagagtgccagctgcagactcgataaaaataaatgaaaaaggtgaaacagaaggtttattttaa

SEQ ID NO: 315638 - DNA, 1604 bp, Unknown
  Bacterial polypeptide expressing nucleotide sequence isolated from the Sargasso Sea
tatggattctgatataaatattgcaagaaaagctaattctttaccaatttcagaaatagcaaaaaatcttaatatacctgaagaatccataataccatatggaaacaataaagctaaaattgattatagttttataaaaagtctatccaataaaaaaaatggcaaactaattcttgtgactgctatatctcccacaccagctggagagggcaaaacaacaacaacagttgggctaggtgatggacttaacaagataggggaaaatacacttatttgccttcgggaacctagtttgggtccatgtttcggaatgaagggaggtgcagccggaggggggtattcccaagtcataccaatggaagatataaatcttcattttacaggtgattttcatgctataagttcagctcacaaccttttatcggctttagtagataatcacattcattgggacaacacattaggttttgacgtaagaagagttagctggaaaagagtcgtggatatgaacgacagagcactccgtaaagtaatattgtccttaggcggagtaaacaatggttttcctagagaaggaggatttgacataactgtagcttcagaaattatggcaattttttgtttggctgaagatttaaatgatctgagacgaagaattggaaacattgttgtgggttttacaagaaaaaatgatccaataacagctaaacagataaatgcagatggaccagtaactgcactgttgaaggatgcatttatgcctaatctagtgcagacattagaaaataatccggcacttatccatggtggaccattcgctaatattgctcatggttgtaattcagtagtagcaactaaaacagctttaaagcttgctgattatgttgtaacagaagctggttttggagcagatctaggtgctgaaaaatttttcaatattaagtgtcgtaaatcaggattgcggcctgatgctgttgtgcttgttgcaacaacaagagcattaaaaatgcatggtgggctcagcaaagataatcttaatacagaaaatcttaatgctctcgataaaggtttatgcaatcttgaacgccatattagaaacataaaactttttggagtaaatgttgtcgtcgcaattaacaaatttcattcagatactcaaaaagagtttgaaataattaagaattcttgttcaaaaaataatgtaaatgtatttgaatgtaatcattgggcagaaggaggagaaggaactttagagcttgcaaaccatgtcgttcatttaactaaaaattctgagtcagagtttgtaactttgtatgaagataaaataactttagttgacaaggtaagaaaaatttgtagggagatatattctgcagaagatattgcttatgatcagaaagttgagaaacaattcttaaggtttcaagaattatatggtgatttccctatttgtatagctaaaactcaatacagtttttcaactgacaataatcttttaggtgctccagaaaatcataaaatacctatcaaggaattaaggctttctgctggagcagaatttatagtcgttgtttgtggagaaatcatgaccatgcctggactcc

SEQ ID NO: 315639 - DNA, 1687 bp, Unknown
  Bacterial polypeptide expressing nucleotide sequence isolated from the Sargasso Sea
atgagcaaaataaaatctgacattgaaatagctagatcagcaaaaatgaagccaataaaagaagttttagatggaattaatgtgcctgataaagctgaggcatatagtccaattggaagatatatggcaaaaattaaatcagaatatttagaaaatttaaaaaataaaaaagacggtaaattaattttagttactgccattacccctacaccagctggtgaaggtaaaactactacatctgttggtctctgtgatggattaaataaaattggtaaaaaatccattgtatgccttagagaaccaagtttaggaccttcctttggattgaaaggtggtgctgcaggtggagggtatgcacaagttgttcctatggagcaaataaatttacactttactggtgactttcacgcaattacatcagcgcataatttactttcatctttaatagataatcatatctactgggggaataaacttaatattgatgttagaagaattacttggaaaagagttatggatatgaatgatcgttcgctgagatcaatagtggtagatttaggtggtattgctaatggttatccaagacaagatggttttgatattactgtagcatcagaaataatggcgatattttgcttatcaaaagatttaaaagatttagaaaaaagaataggtaatattacgattggttatactagggataaaaaaccaattcttgcaaaagaccttaaagctcaaggaccaatgacagttcttttaaaagatgcaataaggccaaatgtaacccaaactttagaaaataatcctgcaattatacatggtggaccatttgcaaatattgctcatggttgtaactcagttatcgccacaaaaactgcattaaaactttctgattatgtaataactgaagctggttttggtgctgacttgggtgcggaaaaatttattaatattaaatgtagaaaatccggtttgaaacctgattgtgttgttatagttgccactataagagcgttaaaaatgcatggtggaatgcaaaaggaagatcttaaaaaagaaaatgtagatgctttaaaaaaaggtttagtaaatttagaaaggcatataaataatgtaaggaaatttggtttgccagtggtagtagctcttaaccattttattaccgatacaaataaagaagtaaattttctcgttgatttttgcaaaaatcttggagtaaaaattgcattatgtactcactggtccaatggtagtgaaggaacgaaagatcttgcatcaacagttgttaaaatatgtgaaaaaactaagagcacatttaaatttttgtatgatgataaattacctttattcaaaaaaattcagaaaattgcgcaagaaatttatcacgcaagtgaagtggttgctgatacaaagattagaaaccaattaaaggaattcgaaacaaaaggatatggaaaacttcctatttgtgttgctaagacacaatatagtttttcaactgaccctagtttaaaaggagctcctactggtcatgtattgccggtaagagaagtaaggctgtcatctggggctgaatttattgttgtcgtgtgtggtgaaatcatgactatgcctggtctaccgaaagtgcctgctgctgagggaattaaaataaattctaaaggtgaagtagaaggtttattttagt

SEQ ID NO: 315640 - DNA, 1063 bp, Unknown
  Bacterial polypeptide expressing nucleotide sequence isolated from the Sargasso Sea
atggccgaaattaaatctgacatccaaatagctagagaagctaagatgcagccaataaaggatattctttcaaaggttggtgtccccgatgaaaattttgcgtttagcccaatgggaagacacatagccaaaataaatttggaatatttgaatactcttaaaaaagaaaatggcaaattaattttagttacagcaatcactcctactccagctggtgaaggtaaaactacaacttctgttggtttaaatgacggtttaaataaaattggaaaaaaatctattgtttgcttaagggaaccaagtctgggtccatcatttggaatgaaaggtggagctgctggtggtggttatgcccaggtagtgccgatggaacaaatcaatcttcattttacaggtgattttcatgctatcacatctgcacacaatttgctttctgcattaattgataatcatatttattggggtaataaacttaatatagacgtaagaagagtcgtttggagaagagtaatggatatgaatgatagatctttaagatctattattgttgatcttggtggagtagccaatggttacccaagacaagatagttttgatattactgttgcatctgaactaatggctattttttgcttagcaacagatttaaaggatttagaaaatagaattggtaatattacaattgggtatacgagagataaacaatcgatttatgcaaaagatttgaacgcacatggcccgatgactgttttgcttaaagaagcaataagaccaaatgtaactcaaacactagaaaacaatcctgcaataattcatggtggaccttttgcaaatattgcacacggatgtaattcggttattgcaactaaagctggacttaaattagctgactatgttgtaactgaggcaggatttggagcagatttaggagctgaaaaatttttaaatattaaatgtagaaaatcaggacttaaaccagactgtgtagttattgtggcaactataagagcacttaaaatgcatggaggagttaataaagaagatttaaaaaaagaaaatgtag

SEQ ID NO: 315641 - DNA, 1675 bp, Unknown
  Bacterial polypeptide expressing nucleotide sequence isolated from the Sargasso Sea
atgtcagatattgaaatagcaagaaaagctaaaatgaagcctattagtgaaattctaaaagggcttgatgtaccagacacacctgaagccttcagtcctatgggtcgtcatatagcaaaaataaacttggagtacatagagtcacttaataaaaataaagatggtaaacttgttctagtctcagcaataactccaacaccagcaggagaaggtaaaacaacaacttctgttggattaagtgatggtcttaataaactaggaaagaaatcaatagtttgtttaagagagccgagtcttggaccatcattcggtatgaaaggtggtgcagctggtggaggctatgctcaagtagttccaatggagcaaattaatttacattttactggagattttcatgcaattacatccgctcataatttactttctgcattaattgataatcatatctactggggaaataaattaaatattgatgttagaagggttgtttggaagagagtaatggatatgaatgatagatcacttagatctattgttgttgatttaggaggagttgcaaatggatatcctagacaagatggttttgatattactgttgcatcggagataatggcaattttctgcttagcaaaagatttaaaagatcttgaagagagaattggaaatataactattgcttatacacgagataaaaaagctatttatgcaaaagatttaaaggcagaaggtccaatgacagtattattaaaagatgccattagacccaacataacacaaacgttagaaaataatcctgctataattcatggtgggccatttgcaaatattgctcatggttgcaattctgtaattgcaactaaagctagtttaaaattaagtgattacgttgtaactgaagcaggctttggagctgatctaggagcagaaaaattccttgatataaaatgtagaaaatcaaatttaaaacctgattgtgtggttttggtagctacaattagagcactaaaaatgcatggcgatgtttcaaaagaagatttaaaaaatgaaaatgtaaatgctcttaaaaaaggtttagtaaatctagaaagacatattaataatattagaaaatttggattaccagtaactgttgctattaatcattttgtcactgattctaaagctgaagttgatgccgttctaagtttttgtacaactcaaggagtcaaggcttctatgtgtactcactggtccgatggtggtgatggtgcaactgaattagctcaaaatgtaatagatatttgtgaagataataagaatacatttaaatttttatatgaagatgatttaactctattcaaaaaaatagaaaaaattgcacaagagatttatcacgcaagtgaagttgtggcagacacgaaagtacgtcaacaattgaaggattttgaaactaaaggatttggcaaattacctgtttgcattgcaaagactcaatatagtttttcaactgaccctaatttaaaaggtgcccctactggccacgttttacctattagagaggtaagattgtcatcaggagcagaatttatagtagttgtttgcggtgatattatgaccatgccgggtctaccaagtgttcctgcggcaaattcgataaagctaaatgaccatggagaaattgaaggtcttttttaaa

SEQ ID NO: 315642 - DNA, 1690 bp, Unknown
  Bacterial polypeptide expressing nucleotide sequence isolated from the Sargasso Sea
tatgggcgcagtcaaatcagacatcgaaatagcaagagccgcaaaaatgaagcctattaaggatattttaggcaaaatcaaagttcctgataataataccagctttagtcctatgggtagacatattgctaaaataaaccttgaatacttaaataaattaaaaaataaaaaagatggacatctaattttagtaaccgctattactcctactccagcgggagaaggaaaaacaactacctctgttgggttacatgatggccttaacaaaattggtaaaaaatcaatagtatgtttaagagagcctagtctcggaccatcgtttggtatgaagggaggggctgctggaggaggttatgctcaagtagtacctatggaacaaattaatttacattttactggagacttccatgccattacatcagctcacaatttgctatctgcattaatagataatcacatctattggggtaacaaacttaaaattgacgataagagaattgtttggaaaagagttatagatatgaatgacagagctctaaggttcataaatataaatactaaaggtgttgcaaaagaattccctagggaagatggctttgatatcacagttgcatcagaggttatggcaattttttgcctatcaaatgatttaaaagatttagaaaaaagaatcggaaatataacaattgcatacaataccgatggcaaacctatttatgcaaaagatctaaatgcccaaggaccaatgactgttcttttaaaagatgcaataagaccgaacgtaacacagactttagaaaataaccctgcattaatccatggaggaccttttgctaatattgcgcatggatgtaattcggtaattgcaacaaagtctgctttaaaacttgctgactatgttgttacagaggctgggtttggcgcagatctaggtgctgaaaaatttttagatattaaatgtagaaaatcaaacttaaaaccaagttgtgtagttattgttgcaacaataagagccttaaaaatgcatggaggtgttgaaaaagaaaatttaaaacacgaaaatgttgaagcactaaaaaaaggcttagtaaatttggagagacacataagtaatataaaaaaatttggattaacgccaattgtagctgttaatagtttcattttagatacaaaaaaagaaatatccgcagtaaaagatttttgcaaaagtcaaaaagttgaagtcagcgagtctacacattgggcagatggtggaaaaggtgcaaaagatttagctaaaaaagttgttaaaatatgcaaagtttcaaaaaagaaaaattttaagtttttatatgaggacaatcaatcattgtggagcaaagtggaaactattgcaaaagagatatacaaagcaagttcaattacctcagatgaaaatgttaaaaaacagttgaaaatatttgaggataatggatatggaaaattacctgtttgtatagctaaaactcagtacagtttttcagttgatcctaaattaaaaggagctcctacaggtcatgaaatttctataagagaggtaagattatcatctggtgctgagtttattgttgtagtttgtggatcaattatgacaatgcctggtttaccaagagttcctgccgctgataaaataaaactaaataaaaaaggtgatatcgaaggattattttaa

SEQ ID NO: 315643 - DNA, 1681 bp, Unknown
  Bacterial polypeptide expressing nucleotide sequence isolated from the Sargasso Sea
atggctaaaactgatattgaaatagcaagagaagcaaaaatgaaacctatccagaaaatactggatggtattaatgtccctgacaaagctgaagtttatagtcctatgggaagatatattgcaaaaattaaaacagaatatttagattctttaaaaagtaaaaaaagtggaaaattaattttagttacagctataacacctactcctgctggggaaggaaaaacaacaacttctgttggtctatgtgatggattaaataaaattggaaaaaaatcaattgtatgtttaagagaaccaagtttgggtccttcttttggaatgaaaggtggagcagctggtggaggttatgcccaagtggttccaatggaacaaattaatttacattttacaggtgattttcatgctattacttctgctcataacttattatctgctttgattgataatcatatttactggggaaacaaattaaatatcgatgtgagaagaattgtttggaaaagagttatggatatgaacgatagatcattaagatctatagtcgttgacctaggaggtattgcaaacggatatcctaggcaagatggttttgatattacagttgcttctgaaataatggctatcttttgcttagcaaaagatttgaaagatttagaaaatagaattggaaatattactattggatatactagggataaaaatccaatttatgcaaaagatctaaatgcacaaggtccaatgacggttcttttaaaagatgcaattagaccaaatgtaactcaaactttagaaaataatccagcaataattcatggaggtccatttgcaaatattgctcatggatgcaattctgttattgcaaccaaaactgcattaaaactatctgattatgttatcactgaagctggatttggagctgatttaggagctgaaaaatttattaatattaaatgtagaaaatcagacctaaagccagactgtgtagtgattgttgcaactattagagcactaaaaatgcacggtggtgttcttaaagatgaattaaaaaacgaaaatttagaagctttaaaaaaaggtatagttaacctagagagacatattaataatgttagaaaatttgggttaccagtcgctgttgctataaatcattttgtgactgacactgacaaagaagttaattttattatggatttttgtaaaaacctcggagttaacatttcattatgcactcattggtctaatggtggcgaaggaacaaaagatttggcaaatacagttgttaatatatgtgaaaaaagcagcagtacttttaaatttttatatgaagataaaattccattatttaaaaaaattgaaactattgcacgagaaatttatcatgcaagcgaagtggttgccgacacaaaaataagaagtcaattaaaagattttgagtcaaaaggatacggcaatcttccaatttgtgttgctaaaacccagtatagtttttctactgatccaagtttaaaaggcgctcctacaggtcacgttttacctgttagagaaattagactttcttcaggagctgagtttatcgttgtagtttgcggagagataatgacaatgccaggcttgcctagagtgccagccgcagattcaattaaaattaatgatgaaggtaatatagaaggattattttaat

SEQ ID NO: 315644 - DNA, 1642 bp, Unknown
  Bacterial polypeptide expressing nucleotide sequence isolated from the Sargasso Sea
atgagtaattatccaactgatttagaaatagcaaatgcagcttataaaaaaccgattgaggaaattgcaaatatattagatattaatcctgatgatcttataagatatggaaatgacaaagccaaattatcttctaaacttattaattctctatcaaaaaaagaaaatggtaagttaattttggtaactgctatatctccaacaccagctggagagggtaaaactacgacaagtgtgggtttggtagatggtctctgtcacattggaaaaaaagcaatgatatgtctcagagagccgagtctcggcccttgttttgggatgaaaggtggagctgcgggtggaggtcatgctcaagtcattcccatgacagatataaacctgcatttcacaggtgattttcatgcgataggtgcagcccataatcttttatcagctttaattgataaccatattcattgggaaaataaattgaatattgatcctagacgcatcacttggaaaagagttgttgatatgaatgataggtctttgagagatattacttctggtttaggaggaatcggcaatggcattcctagacaaagcggttatgacatcactgttgcatctgaaataatggctgtattttgtcttgcttcagatattgatgatctacaagaaagaattggaaatattgttattggttacacaagagataaggaacctgtcagagccaagcaattaaatgcagatggggctgttactgcattattaaaagatgcatttcaaccaaatttagttcaaacactcgagaataatcctgcatttatgcatggaggtccttttgcaaatattgcacatggatgcaactcagtaatttcaaccaaaacagctctaaagctcgcagattatgttgtcactgaagctggattcggtgcagacttaggagcagaaaagttttttgatatcaaatgcagaaaatcaggattagagccagatgctgttgttttagttgcaacaaccaaggctcttaaaatgcacggcgcagtaaaaaaagaggatttatctcaagaaaatgttggtgcagtttctaaagggtgtcaaaatctcgaaaggcatattaagaacattgagaagtttggtgttcctgtagtagttgcaatcaatgattatgttactgatacacaaaaagaacacagcgcaataataaattattgtaaaaatcttggtatccaatgcacaatatcctcacattgggagaaaggtggtaagggtgcagcggaattagcaactgaggttgcaaaaatagcagattcaaattcagcggaatttaaaacactttatgataatgaattatctttatgggaaaaaaccaaattaattgcccaaagcatatacggagcatctgatatcattgctgacaaaaaagtacgaaatcaatttaaaaaattggaggatgatggatttggtgagtatccaatttgtatggcaaaaactcaatatagtttttctactgatccattattaatgggagctccttcaagacatgatgtgccaattagagaagtaaggctatctgctggagcagaattcgttgtagtggtatgtggagaaatcatgaccatgcctggtttgcctagagttccagctgctgaagcaattg

SEQ ID NO: 315645 - DNA, 1681 bp, Unknown
  Bacterial polypeptide expressing nucleotide sequence isolated from the Sargasso Sea
tatggctaaaactgatatcgaaatagcaagagaagcaaaaatgaaacctatccaggaaatactggatggtattaatgtccctgataaagctgaagtttacagtccaatgggaagatatattgcaaaaattaaaactgaatatttagagtctttaaagaataaaaaaaatggaaaattaattttagttacagccataacacctacacctgctggggaaggaaaaaccactacttcagttggtctatgtgatggattaaataaaattggaaaaaaatcaattgtatgtttaagagaaccgagcttaggaccttcttttggtatgaaaggaggtgcggctggaggtggttacgcccaagttgttcctatggaacaaataaatttacattttactggagatttccacgcaataacttctgctcacaatttactttctgctttaattgataatcatatttattggggtaataaattaaatatagatgttagaagaattgtttggaagagagttatggatatgaacgatagatctttaagatctattgtagttgatttaggtggaattgcaaatggatatcctaggcaggatgggtttgatattacggtagcttcagaaataatggctatcttttgtttagcaaaagatttgaaagatttagaaaatagaattggaaatattacaattggatatacaagagataaaaatccaattttcgcaaaagatttaaatgctcaaggaccaatgacagttcttttgaaagatgcaattagaccaaatgtaactcaaacattagaaaataatcctgcaataatacatggtggcccttttgctaatattgctcatggatgcaattcggttattgcaaccaaaacagctttaaaactttctgaatatgtaataactgaagctggttttggtgcagacctaggagcagaaaaatttataaatataaaatgcagaaaatcaaatttgaaacctgattgtgtagtaattgttgcaacaataagagctttaaaaatgcatggtggtgttggtaaagatgaacttactaatgaaaatgtagaagcattaaaaaaaggtgttgtaaacttagaaagacacataaataatgttagaaaatttggcttacctgttgctgtagcagtaaatcactttgttactgacacagaaaaagaagtaaattttttgatgaatttctgtaaaaatcttggtgtagacatttcattatgtacacattggtctaacggtggagaaggaacaaaagatttagcaaacactattgtaaatatatgtgaaaaaagtgagagcacgtttaaattcttgtatgaagataaaatcccattatttaaaaaaattgaaacaattgctcaagagatctaccatgctagcgaagtagttgcagatacaaaaataagaacccaattaaaagattttgaaagtaaaggatatgctgatcttcctatttgtgttgctaaaacgcagtatagtttttctactgatccaagtttaaaaggtgcgccttcaggtcacgttttacctgttagagaaataagactttcttcgggagcagagtttatagttgtagtttgtggagagataatgactatgcctggactacctagagtaccagctgcagattctattaaaattaatgataaaggtaatatagaaggattattttaa

SEQ ID NO: 315646 - DNA, 1618 bp, Unknown
  Bacterial polypeptide expressing nucleotide sequence isolated from the Sargasso Sea
attgaaaaaggtagcctcaaaactaaaacttggggaagacagtcttcaaaaatttggccatcatattgcaaaaatcgataccaacacattgaaaaatcataataaaaatggaaaattgatattggttactgctatttcgccaactcctgcaggtgaaggtaaaactactacctcagtaggattaaatgatgctctcaataaaataggaaagcagtcattggtttgcctcagagaaccaagcttgggtccatgttttggcgttaaaggtggagctgctggaggtggctatgctcaagtggtcccaatggataagattaatcttcatttcacaggtgatttccatgcaatcacatctgctcataacctgcttgcttctatgatcgataatcacatttattggggaaatgatctaaacatagatacaaggcgtatagtatggggtcgagttgtagatttaaatgaccgagctttgcgaaatacaaatataaatcttggaggtatagcaaacggttttccccgagaagataagtttgatattacagttgcttctgaggtaatggcgatcttttgcttatcaacaagtctaagtgatctgcaaaaaagactcggcaatattatcattggttacacacgagacaaaaaagaaatcaaagcacgtgacgtaaatgcagatggagcaatgacaactctacttaaagatgctttcctcccaaaccttgttcaaacattagaggaaaatcctgcaatcattcatggtggtccttttgctaacattgcgcatggttgtaattcacttatagcaactcaaacagcgcttaaactaagcgattatgtagtaactgaagctggatttggagcagaccttggcgcagaaaaatttctagatataaaatgccgaaaaggaaatttaaatccttctgcaattgttattgtggctactgttagagcattaaaaatgcatggtggtatggataaaaaggaactgaaaaatgaaaatctagatgctcttaagaaaggcttatcaaacttacaacaacatatttcaaacatgaaaatatatggagttcctgtttcagtagcaattaatcattttattaccgatactgataatgaactctcaataattagtgaatgctgtgatgacctcggcattaaatcatttaattgcactcattggagcaatggcggagctggggcagaaaccttagctcaacacattgtagatgtaacaactgaagaaaatccaaaaattacccacctttatcctgatgaaatgaaactgtgggataaagttaagaaaattgcacaagatatttatggagccaaagatattatcgcagatcaaaaaataagatcacaatttgatgagttgcaagacaactatggtcattaccctatttgtattgcaaaaactcaatacagtttttcaacagatccgaatttgcgcggggcgccaaaggatcacattgttccaattagagaaatacgattagctgctggagctgaatttcttgtagttgtatgcgataaaatcatgaccatgcctggtctgcctagaattcctgctgcaaatgcgatacacttaaatgatgatggtgaaattgaaggattattctaa

SEQ ID NO: 315647 - DNA, 1687 bp, Unknown
  Bacterial polypeptide expressing nucleotide sequence isolated from the Sargasso Sea
aatgagcgacataaaatcagatattcaaattgctcgtgaagcaaaaatgcttccaataaaggaaatcttagcgaaagtaaatgttccagacgaaagttcagcttttagcccgatgggcagacatattgcaaaaataaacttggaatacttagatacattaaaagataagccagacggtaaattaattttagttacggcaataactccaactcctgctggggaaggtaaaacaaccacttccgttggattaaacgatggactaaataaaattggaaaaaaatctattgtatgcttaagagaaccaagtctaggtccatcctttggtatgaaaggtggtgctgcaggaggaggatatgctcaagtagtcccaatggaacaaattaatcttcactttactggagattttcacgcaataacatcagcacataatcttttatctgctttaattgataatcatatctactggggaaataaattaaacatagatgtcagaagaattgtttggaaaagagttatggatatgaacgacagagctttaagatcaattaatattaatcttggcggtgttgctaatggttttccaagagaagatggttttgatatcacggttgcttctgagataatggctatcttttgtcttgctaataatcttgaagatttagaaaaaaggatcggaaatattacagtagcatacactcgagaaaaaaaaccaatctacgctaaagatttaaatgcacatggaccaatgactgttttgcttaaagaggcgatcagacctaatattacacaaacactggaaaataatcctgcgataattcatggtggaccctttgcaaatattgctcatggatgtaattctgtaattgcaactaaagctggattaaaacttgctgattatgttgtaactgaagcaggttttggtgcagatttaggagctgaaaaatttttagatatcaaatgtaggaaatcaaatttaaaaccaagttgcgttgttatagtagcaactgttagagccttgaagatgcatggtggtgttacaaaagatgatttaaagaatgaaaatgtagatgcactaaaaaaaggattaataaatcttgaaagacatattgaaaatgtgaaaaaatttggtttacctgtagcagtagctataaatcattttataaaagacactgataaagaagtaaatgctttagtagaattttgtaaaaagctaggagttaaagctagtatttgtaagcattgggctgatggtggtgaaggaacaaaggatttagctaaacatgtaacagatttatgtgaaaagaatgaagctaaatttaaatttttatatgaaagtaaaactccacttttcaaaaaaatagaaaccatagcaaaagagatttatagagctaatgaagttattgcagatactaaaatcagagatcaactaaaaaactttgaagaagctggttatagtgaattacctatatgtgttgcaaaaactcaatatagtttctcaacagatccaaatctgaaaggtgctccgactggtcattcactaccaattagagagattaggttatcatctggcgcggagttcattgttgttgtttgtggagcaatcatgacaatgcccggacttcctagagtgccagcagctgactctattaagctaaataaagacggtgatatagaaggtctattttaa

SEQ ID NO: 315648 - DNA, 980 bp, Unknown
  Bacterial polypeptide expressing nucleotide sequence isolated from the Sargasso Sea
tatggctaattatcctagcgatttagaaattgctaatgcagcaaataaaaaacctataagagaaattgcaaaattattagatattgatgaaaaggatcttataaagtttggagatgataaagctaaattaaattcgaactttttaaattcagtatcaaaaaaagaaaatggcaaacttattctagttactgcaatttcaccaacacctgcaggtgagggaaaaaccactactagtgttggtctcgtcgatggcttatgccatattggtaagaaagctgtgatttgtctaagagagccaagtttaggaccttgttttggtatgaaaggtggagctgctgggggtggtaaagctcaagtaattcctatgactgatattaatttacattttacaggagattttcatgcaattggagcagctcataatctattatcggcattgatagacaatcatattcattgggagaatcaattaaatatcgatcctagacgaattacttggaagcgtgtcgttgatatgaatgataggtcacttagagatataacatgtggcttaggaggaactggaaacggcattccaagacaaagtggctttgacataactgttgcatctgaaattatggctgtcttttgtttggcctctgacctcgaagacttacaaaagagaattggcaatattgtcattggatatactaaatctaatgaaccagttagagcaaaacaactaaacgcggatggtgctgttacagctttacttaaagatgcttttcagccaaatttagttcaaacattagaaaacaatcctgcgttcatgcatggaggtccttttgcaaatattgcgcatggttgtaatacagttatttctactaaaactgctcttaagcttgctgattatgtagtgacagaagcgggatttggtgccgatttaggtgctgaaaagttttttaacattaagtgcagaaaatcgaaccttcagccagatg

SEQ ID NO: 315649 - DNA, 786 bp, Unknown
  Bacterial polypeptide expressing nucleotide sequence isolated from the Sargasso Sea
cagaagcaggttttggtgctgacctaggtgctgaaaaatttctaaacattaaatgtagaaagtctcaaatatggcccagctgtattgttattgtagctacagtaagagctttaaaaatgcatggtggtatagaaaaagataatcttaaagatgaaaacatagatgctttaaaaaaaggaattgtaaatttagaaagacacataattaatataaaaaagtttggtattgaaccaattgtagcaattaatcattttattttggatacaaatcatgaaattaaaacgatacaaaaattttgtaaaaaaattggtgttgatgtaagtgtaagtaaacactggtcagatggaggtagtggggctaaagacttagctaaaaaagtaattaaaatatgtaaaaaaacttcaaagaaaaaatttaattacttatacagcgatagtatttctccttgggaaaaaatagaaaaaattgctaaagaaatatatggagcaaacagaattacagctccggatgatgtaaaagaaaaattaaaaaattttgagaaaaatggttatggaaagttgccagtttgtattgcaaagacacagtacagcttttctgttgatccaaaacttaaaggtgctcctacaaaccatgaaatacctataagagaagttagactttcatctggagctaattttattgtcgtggtctgtgggtctataatgacgatgccaggtttaccaaaagttccagcagcaaataaaatcaaactgaataataagggtgacacagaaggtctattttaat

SEQ ID NO: 315650 - DNA, 1231 bp, Unknown
  Bacterial polypeptide expressing nucleotide sequence isolated from the Sargasso Sea
atgagcgacataaaatcagacatacaaatagctagagaagcaaaaatgcagccaataaatgacatattggcaaaaataaatgttccagatgaaaatcacgcatttagtcctatgggaagacatatagctaaaataaatttaggatatttaaatggccttaaaaataaagatggtaaattaattttagtaactgcaattacaccaacacctgcaggagaaggaaaaacgacaacttcagttggtttaaatgacggtcttaataaaattggaaaaaaatcaattgtatgcttgagagaaccaagcttaggaccctcttttggtatgaaaggtggtgctgctggaggtggttatgctcaggtagttccgatggaacaaataaatcttcatttcactggagattttcatgcaataacgtcagcacacaatttattgtcagccttgattgataatcatatttattggggcaataaacttaacattgatgttagacgaattgtttggagaagagtaatggatatgaatgatagatctttaagatctgttattgttgatcttggtggagttgcaaatggttatccaagacaagacagttttgatataacagttgcatctgagttgatggctatattttgtttagctactagtctgaaagatttagaagataaaattggaaatataactattggttatactcgagaaaaaaaatctatacaggcaaaagatttaaacgcacaaggtccaatgactgttttgcttaaagaggcaattagaccaaatgtaactcaaactttagaaaataacccagctataatacatggtggaccatttgctaatattgcccatggttgtaattctgtaatcgcaactaaagctgggttaaaattagctgactatgttgtgacggaagccggctttggagctgatctcggtgctgaaaaatttttagatataaaatgtagaaaatctggattaaaacctgattgtgttgttatagttgcaactattagggctcttaaaatgcatggtggaattaataaagaagatttaaaaaaagaaaatgtttctgcattaaaagatggattggttaatttagagagacacataaataatataagaaagtttggattaccctgtactgttgctgtaaatcattttattactgacacagataatgaaaatgaaaccctactagatttttgtgaaacacaaggtgtaaaagcttcaaaatgta

SEQ ID NO: 315651 - DNA, 1678 bp, Unknown
  Bacterial polypeptide expressing nucleotide sequence isolated from the Sargasso Sea
aatgtcaaaaacagatatccaaattgcaagagaagcaaatatgaaaccaattcaagagattttggatgaagttggtgttccagataatgctgaggcatatagtccaataagtagatacatagctaagatcaaactggaatatcttgaaaaatttaaaaataaaaaagacggaaaattaatattagttacagcaattactcctactccagctggagaaggaaaaacaaccacctcagttggattgtcagatggattaaataaaataggtaaaaaatctattgtttgtttaagagagccaagtttaggtccttcatttggaatgaaaggtggtgcggctggtggtggttatgcgcaagtcgttcctatggaacaaataaatcttcatttcacaggtgactttcacgcaatcacttctgctcacaatctattatctgctttaatagataaccatatatattggggaaacaaattaaatattgatgtgagaagaatagtttggaaaagagtacttgatatgaatgatcgagcactaaggtctatcaatattaatcttggtggggttgcaaatggtttccctagagaagatggttttgatatcacagttgcatctgaaatcatggcgatcttttgtttatctaatgatctacatgatcttgaaaatagaattggaaatataactgttgcttacacaagagataaaaaaccaatttatgcaaaagatttaaatgcacatggtccaatgactgttttgctaaaagacgcaattagaccaaatgtaactcaaactttggaaaataatcccgcaataatccatggaggtcctttcgctaatattgcgcatggttgtaattctgtattagcaactaagacagcattaaaactatcagactatgttgttactgaagcaggatttggtgccgatctaggtgctgaaaaattcttagatataaaatgtagaaaatcaggattaaaaccaagttgtgtagtgattgttgcaactataagagcattaaaaatgcacggtggtgttaacaaagatgaactcaaaaatgaaaatatagatgctgtaaaaaaaggattggtgaatttagaaagacatattgaaaatattcaaaaatttggcttgcctgttacagtagctattaatcactttgttttggatacagacaaagaggtcgatgaagttataaaattttgtcaacaaaaaggtgtaacagcatcaatatcaaaacattgggaaaaaggtggagaaggagcagtagatttagcaaacaatgttgctgaactgtgtgaaaaaggaagtgacttcaaatttttatacgatgataaaatatcattatttaaaaaaattgagacgattgctaaggaattgtatagagcaagtgaagttgtagcggatactaaaataagagaacaattaaaaaattttgaagagacaggttaccaatccttaccaatttgtattgcaaagacacaatatagtttttctacagaccctaatttaaaaggcgcaccatccggacatgtcctaccaataagagaagtaaggttatcatcaggagcagaatttatcgtagttgtttgcggtgcaataatgactatgcctgggttaccaaaggtgccagctgcagataaaataaaaattaatgataaaggtgaaacagaaggtttattttaa

SEQ ID NO: 315652 - DNA, 1285 bp, Unknown
  Bacterial polypeptide expressing nucleotide sequence isolated from the Sargasso Sea
ttttcatgcaattacatcagctcataatttattatcagcattaatcgacaatcatatctattggggtaacaaattagatatagatgtaagacggattgtttggaaaagagttatggatatgaatgaccgttcattaagatcaataaatataaatttagggggagtggcaaatggttttcctagggaagacggatttgatattaccgttgcttcagaaattatggcaattttctgcttatcaaatgatttggaagatttagaaaaaagaattggcaatattacaattgcttatacaagagataagaaaccagtttacgcgaaagacttgaaagcacatggtccaatgactgtattattaaaagatgcgatcagaccaaatgtaactcaaacattagaaaataatcctgcaattattcatggtggtccttttgcaaatattgcacatggatgtaactccgttatagcaactaaaactggattaaaacttgcagactatgttgtaacagaagcaggttttggtgcagaccttggggcagaaaagtttttagatattaagtgcagaaaatctaatttgaaaccgagttgtgttgtcatcgtagcaacaattagagctttaaaaatgcatggtggtgttgaaaaagatgacttaaaaaatgaaaatgttgatgctttaaaaaaaggtctagtgaatcttgaaagacacatagaaaacgtaaaaaaatttggattacctgttgcgattgcggttaatcattttattaaagatacagatagtgaagttaaagctttaattgatttttgtgaaaacttaggggttaaagcaagtttatgcactcactgggcaaatggtggtgaagggacaaaagaattagcagcacacgttgctgatttgtgcgaaaaaaaagatgccaggtttaattttctttatgaaagtaaaacacctctgtttaaaaagattgagacaattgcaaaagaaatttatagagccgatgaagtgattgctgatacaaaaataagagatcaattaaaaggttttgaggaggcaggctatggagaattgccaatttgtgtagcaaaaacacaatacagtttttcaactgatccaaatcttaaaggtgcaccaacaggtcatgttttgcctgtaagagaaataagactttcgtcaggtgctgaatttattgttgttgtttgtggagcaattatgactatgccaggactacctcgtgtacctgcagctgactcaattaaattaaacaataatggtgaaattgaaggtttattttaa

SEQ ID NO: 315653 - DNA, 1513 bp, Unknown
  Bacterial polypeptide expressing nucleotide sequence isolated from the Sargasso Sea
atgggaacatatccaagtgatttagaaatagctaatgctgctcataaaaaaccaattgatgaaattgctgaatcaataggtatacaaaaaaaagacttaataagatttggagacgataaagctaagcttacacataatcttgtaaaatctttgtctaaaaatgatgatggtaaactaattctcgtaactgctatttctccaacccctgcaggtgaaggaaaaacaaccactagtgttggtttggttgatggactctgtaacataggtaaaaaagcaatgatttgtttaagagagccaagcttaggtccttgctttggaatgaaaggtggagctgctggtggaggcaatgctcaggttatccctatgacggatattaatcttcattttactggagactttcatgctattggtgccgcacataatttgttatctgctctaatagataatcatattcattgggacaatgaacttaatattgacccaagaagaattacttggaagagagtggttgatatgaatgatagatctttaagagatataacatgtggcctcggtggaaccggtaacggtattccacgtcaaagtggatatgacataactgttgcatcagagataatggctgtattttgtttagcctctgatttggatgatcttcaaaccagagttggaaatattgttataggatatacaaaaaataatgagcctgtaagagctaaacaattaaatgcagacggtgctataacagctcttttaaaagacgcatttcaaccaaacctagtacaaacattggaaaataatccagcatttatgcatggaggaccatttgcaaatatagctcatggttgtaattcagtagtttcaacgaaaacggctcttaagttagcagattatgttgtaacggaagctggctttggagccgaccttggggctgagaaattctttgatattaaatgcaggaaatctggacttaaaccggatgttgtagttttagtagcaacaactaaagcattaaaaatgcatggtggtgttaaaaaagatgaactaagcagagaaaatattgatgcagttttaaaaggttgcgaaaatttaggcaaacatatagaaaatattggtaaatttggagttccagttgttgttggaattaatgactatgtaacagatacttcaagcgagcatgagcaaataattaatttttgtaagaatctaggtgttcagtgcaaaatttcttcgcactgggaaaaaggtggagaaggagcagcagatttagcagaagaagttgcaaaaattgctgattcaaattctgctgaatttaaaactttatacaaagatgaaatgactttatgggataaaaccgaacatattgcaaaaagcatttatggggcttctgagattattgcagataaaagagttagaaatcaatttaaaaaacttgaggatgatggttttggagaatacccaatttgtatggcaaaaactcaatatagtttctcaactgatccgttattaatgggtg

SEQ ID NO: 315654 - DNA, 1351 bp, Unknown
  Bacterial polypeptide expressing nucleotide sequence isolated from the Sargasso Sea
atgaaaacagacatagaaatagcaagagaagcagaacctaaaaccattgataaaattgcagaccagttgggtattggcgaggagtatcttgaacgttacggtaaattcaaatccaaggttgacctctcaatcaatgatgaaaaacttaaggactctaagaatggtaagttaattttagttaccgcaatttctcctacgcctgcaggagaaggaaaaactaccacaagcgttggtctagtcgatgggctttgtcatattggcaagaatgcaatgatctgtcttagagagccgagtttaggaccatgttttggaatgaaaggcggtgctgcaggaggagggcatgcccaagtcataccaatgactgacattaacttacattttacaggcgattttcatgccataggagcagctcataatcttctttctgcactcatcgataatcacattcattgggacaatcaattagatattgatcccagaagaattacttggaagagagtggttgatatgaatgatcgatctttaagagatattacatgcggtcttggtggggttggcaatggcatacctagacagagtggttacgacattacagttgcttcagaaatcatggctgttttttgtcttgcatcagacattgatgatctaaaaaagagaattggcaatatggtcataggctactcaagatccaacgaacccataagagcaaaacaactgaatgccgatggagcgatcactgccttactaaaagacgcattccagccaaacttagtgcaaactcttgaaaataatcccgcgtttatacacggtggacctttcgccaatatcgcgcatggatgcaattcagttgtttcaactaagctcgcactaaaacttgccgattatgtggttacagaggctggttttggagccgatttaggcgctgagaaatttttcgatatcaaatgcagaaaatcaggtctaaagccagacgcagttgttctagtcgcgaccacaaaggctctaaaaatgcatggaggcattgccaaggataatctgggtggcgagaacgtggatgcggtaaccaagggttgtaagaacctcgaaaggcacattgaaaacatcacaaaatttggagtccctgtcattgttgcaatcaatgactatgtgactgatacaaaagatgaacatgacgcaataataaattactgcaaagaaattggtgtcgagtgcagaatttcctcgcattgggaaaaaggcggtaagggcgcatcggatctagcagaagaagtggtcaaaattgccgactctaatgcttctaaatttaaacctttatacgacaataaaatgtctctgtgggataaaaccgaat

SEQ ID NO: 315655 - DNA, 1201 bp, Unknown
  Bacterial polypeptide expressing nucleotide sequence isolated from the Sargasso Sea
atgacaaaaagtgatattcagatagcaagagaagctaaaatgaagcctatccaagaaatattggatagcattaatgttccagacaaagccgaagtttatagtcctataagtagatatattgcaaaaattaaactcgaacacttagaaaaattaaaagaaaaaaaagatggaaagctaattctagtaactgcaattacgccaacgcctgcgggtgaaggtaaaactacaacttcggtaggcttatcagatggtttaaacaagataggaaaaaaatctattgtatgtcttcgtgaaccaagtttaggcccatcttttggaatgaaaggtggtgcagccggaggtggttatgcgcaagttgttccaatggaacaaattaatttacattttactggtgattttcacgcaatcacttctgctcataatcttctttcagctttaattgataatcatatttattggggaaataaattaaacatagatgttagaagagttgtttggaaaagagttttagacatgaatgacagagctttgagatcaattaatataaatcttggaggtgtagcaaatggttttccaagagaagatggatttgatattactgtagcttcagagataatggctatattctgtttgtcaaatgaccttcatgatttagaagaaagaattggaaatataactataggctacacaagagataaaaaacctatttatgctaaagatttaaatgctcaaggtccaatgacagtattattaaaagatgcaataagaccaaatgttactcaaacattagaaaacaatcctgctattatacatggaggtccatttgcaaacatagctcacggatgtaactctgttttagcaacaaaaactgcattaaaattatctgactatgttgtaactgaagctggttttggagccgatttaggtgcagaaaaatttttaaatattaaatgcagaaaatcaggtttaaaaccaaattgtgttgtaatagttgctactatcagagctctaaagatgcatggtggattaaaaaaagatgagttaaaaactgaaaatgtcgatgcattaaaaaaaggattagttaatttagaaaaacacataaacaatattaaaaaatttggtctgcctgttactgtagctattaaccattttgttttagatacaaataatgaagttgatgcggttattaattttgtaaaaa

SEQ ID NO: 315656 - DNA, 1234 bp, Unknown
  Bacterial polypeptide expressing nucleotide sequence isolated from the Sargasso Sea
atgagcgatgttaaatcagatatccaaatagcaagagaagcaaaaatgcagcctataaatgaggtattggcaaagataaatgttccagatgagagtactgctttcagtccaatgggacgacatattgcaaaaattaacttagaatatttagatacattaaaagataaaccagaaggaaaactaattttagtcactgcaattacacctacacctgctggtgaaggtaaaacaactacttcagttggtttaaatgatggattaaataaaattggaaaaaaatctatagtttgtttaagagagccaagtctcggaccttcctttgggatgaaaggtggtgcagctggaggaggttacgctcaagttgttccaatggaacaaattaatttacattttactggagattttcatgcaattacttcagctcataatctattatcagcattaatagataatcatatctattggggcaataaattagatatagatgtaagacggattgtttggaaaagagttatggatatgaacgaccgttcattaagatcaataaatataaatttaggtggagtagcaaatggttttccaagagaagatggatttgacattacagttgcttcagaaatcatggcaattttctgcttatcaaatgatttggaagatttagaaaaaagaattggtaatataacaattgcttataccagagataaaaaacctgtttatgcaaaagacttgaaagcacacggtccaatgactgtattattaaaagatgcaatcagaccaaatgtaactcaaacattagaaaataatcctgcaattattcatggtggtccttttgcaaatattgcacatggatgtaactcggttatagcaactaaaactggattaaaactcgcagactatgttgtaacagaagctggttttggtgcagaccttggagcagaaaagtttttagatataaagtgcagaaaatctaacttaaaaccgagttgtgtagtcattgttgcaaccattagagctttaaaaatgcatggtggcgttgcaaaagatgacttaaaaaatgaaaatgttgaggctttaaaaaaaggcctagtcaatcttgagcgacacatagaaaatgttaaaaaatttggattacctgtagcaattgcggtaaatcattttattaaagatacagacagtgaagttaaagctttaattgatttttgtgatagcctaggagttaaagcaagtttatgca

SEQ ID NO: 315657 - DNA, 1261 bp, Unknown
  Bacterial polypeptide expressing nucleotide sequence isolated from the Sargasso Sea
atggcaaattacccaagtgatttagaaatagcaaatgctgctaataaaaaaccaattattgaaattgcaaagacattagatattgatgagaaacacttagtaagatttggtgatgataaagcaaaacttaatactgattttactaactctttatctaaaaatgatgatgggaaacttattttagttactgcaatatcacctactcctgcaggagagggtaaaacaactacaagcgttggtttggttgatgggctctgtcatgttggtaaaaaggcaatgatttgtttaagagaaccaagcttgggaccatgttttggtatgaagggtggcgcagcaggtggtggttatgctcaagtgatacctatgactgatattaatttacactttacaggagattttcacgcaattggagctgcgcataatcttctttcagcattaattgataatcatattcattggagtaatgaactaaatattgatcctagaagaattacttggaagagagtcgttgacatgaatgatagatctcttagagacataacttgtgggctgggaggaactggtaatggaattccaagacaaagtggttttgatataacagttgcttctgaaattatggctgtattttgtttggcatcagatattgatgatcttcaaaaaagaataggaaatattgttattggttatacaagatcaaatgaacctgtaagagcaaaagaattaaatgcagatggagcaataactgcattactgaaagatgcatttcaaccaaatttagttcaaacccttgagaacaatcctgcatttatgcatggaggaccttttgcgaatattgcacatggttgtaattctgttgtttcaactaaaacagcattaaaacttgcagattatgttgtcacagaagctggatttggtgctgatttaggggctgagaaattttttgacattaaatgcaggaaatcaggtttaaaaccagacgcagttgttttagtggctacaactaaagcactcaaaatgcatggtggtataaaaaaagaagatttaggttcagaaaatgttgatgctgtttcaatgggatgtaaaaatcttgaaaaacatattgaaaatataggcaaatttggagtccctgttgttgtagcaattaatgattatgttactgatacagaaaaagaacatactgctattattaattattgcaaaaatcttggagttcatgcaaaatttcttcacattgggaaaatggaggcgaggagcggctgat

SEQ ID NO: 315658 - DNA, 1690 bp, Unknown
  Bacterial polypeptide expressing nucleotide sequence isolated from the Sargasso Sea
aatgggcgcagttaaatctgatattgagatagctagaaaagcgaaaatgcgtcctattaaggatattttagctaaaattaaagtaccagacacaaataaagcttacagtcctatgggacgtcatattgcaaaaatcaatttaaaataccttgaaactataaaaaataaaaaagatggccacttaattttagtaactgcaataactccaactccagcgggcgaaggtaagactacagtatctgttggtttaagtgatggtttaaataaaattggaaaaaaatcgatagtttgtttgagagagccaagtcttggtccttcttttggtatgaaaggtggtgcagcaggcggtggttattctcaagttgttccaatggaacaaataaatttacattttactggtgattttcatgcaataacttcagctcacaatcttttatctgcattaatagataatcatatttattggggcaataaacttgacatcgatgataaaaaaattgtttggaaaagagttatggatatgaatgatcgtgctttaagggcaataaatataaatacaaaaggtgcgtctaaaaattttccaagagaagatggttttgacattacggtagcttctgaagttatggctatattttgtttatccaataatttaaaagaccttgaaaaaaaaattggaaatataactattgcttacaaaaaggacggaaaaccaatttatgcaaaagatttgaatgctcaaggtcctatgacggtattattaaaagaagcaataagaccaaatgtaactcaaactttagaaaataatccagcttttattcatggaggtccttttgcaaatatagctcacggatgtaattcagttatagcaactaaatcagctttaaaactatcagactacgtagtaactgaagctggttttggtgcggatcttggtgcggaaaaatttttagatattaaatgtagaaaagcaaatctaataccaagttgtgttgtgatagttgctacagttagagctttaaaaatgcacggcggtgttgaaaaggaagatttaaaaaaagaaaatatacaagccgtaaaaaaaggattagttaatcttgaaagacatataaataatatcaaaaaatttggaataaaccctgttgttgctataaatcattttgttttagatacaaaagctgaaattaaaattatatctaatttttgtaaaaagttgaatgtagaagtcagtgaatgtactcattgggcaaatggtggaaaaggcacaaaagatttagcaaaaaaagctgtagaaatatgtaaaaaatcgaaaaaaaataattttaaatttttatataatgaaaaagaaactttgtggaataaaatagaaacaatagctaaagaaatttataaagccagcaaaattacagcagatgaaaaagttaaagaagaactgataaaatttgaaaaaaatggttatggaaaattaccagtttgtatagcaaaaactcagtacagtttttcgattgatccaaagctcaaaggagcgccttcgggtcatgaaattccaattagagaagtaagactctcttctggatgtgaatttatagttgttatttgtggatcaatcatgactatgccgggtttaccaagagttcctgctgcagattctattaaaataaataataagggtgagattgacgggttattttaa

SEQ ID NO: 315659 - DNA, 1678 bp, Unknown
  Bacterial polypeptide expressing nucleotide sequence isolated from the Sargasso Sea
aatgtcaaaatcagatattgaaatagctagagaagcaaaaatgaaacctatccaagaaattttggatggagtgggagtacccgacaaaactgaggcatatagtccaataagcagatatatagctaaaatcaaacttgaatacttagaaaaatttaaagacaaaaaagatggaaaattaatactagtaacagcaattacacctactccggcaggggaaggaaagacaacaacttctgtaggattgtcagatggattaaacaaaataggtaaaaaatctattgtttgtttaagagaaccaagtcttggtccttcttttggaatgaaaggtggggctgctggtggtggttatgctcaagtagttcctatggagcaaataaatcttcatttcacaggagattttcatgcaattacatctgcacataatcttttatctgcattaatagataaccacatatattggggaaataaactaaatatagatgtcagaagaatagtttggaaaagagttctcgacatgaatgatagagctttaagatctataaatattaatcttggtggtgttgcgaatggatttccaagagaagatggttttgatattactgttgcgtcagaaataatggcaatcttttgtttatcaaatgatttgcatgatcttgaaaatagaattggtaatattactgttgcttatactagagacaaaaaaccaatatatgcaaaagatttaaacgcgcagggtccaatgactgtattgttaaaagacgctattagaccaaatgttacacaaaccttggaaaacaatcctgctataattcatggtggaccatttgcaaatattgctcatggatgtaattctgttttagcaactaagacagcattaaaactctcagattatgtcgtaacagaagcagggtttggagctgacctaggagcagaaaaattcttagatattaaatgtagaaaatcaggattaaaaccaagttgtgttgtgattgttgcaactataagagctttgaaaatgcatggaggagttaaaaaagatgaattaaaaaatgaaaatgtagatgcagttaaaaaaggattggttaacttagaaaggcatatagaaaatattcaaaaatttggtttacctgtaacagtagctataaaccattttgttttagatactgataaagaaattgatgaagttacccggttttgtgaagaaaaggatattaaagcctctatatcaaagcattgggaaaaaggtggagaaggcgcaactaatttagcaaatgatgtagttgaactatgtgaaaaagatagtgattttaaatttttatatgatgataaaacttcattatttaaaaaaatagaaacaattgccaaggaactttatagagcaagcgaagtagttgcagatactaaaataagagaccaattaaaagcttttgaagaaagaggttaccaatcattaccaatttgtattgcaaaaactcaatatagtttttccactgacccaaatctaaagggagcaccttcaggtcatgtattaccaataagagaagtaagactatcatcaggagcagaatttatcgttgttgtatgcggtgcaataatgacaatgccaggattaccaaaagtgccagctgcggactcaattcgtattaataaaaaaggtgaaacagagggtctattttaa

SEQ ID NO: 315660 - DNA, 1126 bp, Unknown
  Bacterial polypeptide expressing nucleotide sequence isolated from the Sargasso Sea
ttgaaagctaatgttccaagagatgatagttttgatattactgttgcgtcagaagttatggcaatattctgtttatcaaacagtatcaaagatttagaagaaaaaattggaaatattactattgcttatacaaaagacaaaaaacctatttatgcaaaagatttaaaagcccatggcccgatgactgtattgctaaaagaagcaattagacccaatgcagttcaaacattagaaaataatcttgcaattattcatggcggaccgtttgcaaatattgcccatggatgtaattcaattattgctacaaaaactgctttaaaactatcagaatatgtaataactgaagctggtttcggagcagatcttggtgctgaaaaatttttagatattaaatgtcgcaaagctgaccttaaaccaagctgcgtagttcttgttgcaacaattagagctttaaaaatgcatggaggtcttgagaaagatgatcttaaaaatgaaaatcttgatgcccttaaaaaaggtatgccgaatttagaaagacatatagaaaatattaaaaagtttggtttggaagtagtagtcgcgattaatcattttattactgacacagctaaggaagttaaaattattcaagaaaaatgtgctaaacttggagttaaagcgagtctttgtacacattggtcaaatggcggaagtggaacaaaggatttggctaacaatgtagtggaattgtgtaagaagagtgatacatctaaatttaagtatttatattctgatcaaacaccaattttagaaaaagtagaaaaagttgcaaaggaaatttataatgcaaaagatatcgaagtagatgaaaaaattaaggaacaagtcaaaaaaatagaacaggctggattcggaagatttccagtttgcattgcaaaaacacaatatagtttctctactgaccctaaattaaagggagctccttcaggccatacattatcaataagagaaataagattgtctagtggagctgaatttgtagttgttgtctgtggttctataatgacaatgccaggacttccaagagttccagctgcagataatattaaattaaataaaaaaggtgaaatcgaaggtttattttaaa

SEQ ID NO: 315661 - DNA, 1687 bp, Unknown
  Bacterial polypeptide expressing nucleotide sequence isolated from the Sargasso Sea
aatgagtgaaataaaatcagatattcaaatagctagagaagctaaaatgcaaccaataaatgatgttttaaataaaattaatgtccctgatgaaagtacagctttcagtcctatgggtcgtcatattgcaaagataaacttggaatatttagatacactaaaagataaaccagacggtaaattaattttggttactgcaattacacctacgccagccggtgaaggtaaaacgactacttctgttggcctgcacgatggattaaataaaataggtaaaaaatctattgtttgcttgagagaaccaagtcttggtccttcttttggaatgaaaggtggggccgctggtggtggatacgctcaagttgtgccaatggaacaaataaatttacatttcactggagattttcacgcgattacttctgctcataatttattatcagcactaatagacaatcatatctattggggaaataaattaaatattgatgttagaagagttgtttggaaaagagttatggatatgaacgatagatccttaagatcaatagttgtagatcttgggggtgttgcaaacggatatcctagacaagatggttttgatattactgttgcctctgaaataatggctatattttgcttagcagttgacttaggggatttagaaaaaagaattggtaatattacaatcggatatactagagacaaaaaggcaatctacgcaaaagatttaaatgcacaaggaccaatgacagttctattaaaagatgcaattagaccaaatgtaactcaaacgttggaaaataaccctgcaataattcatgggggaccttttgcaaatattgctcatggatgtaattctgtaattgctactaaagcaggcttaaaattagctgattatgttgtaacagaagcaggatttggagcggaccttggggcagaaaaatttttagatattaaatgtagaaagtcaggaataaaaccagattgtgtagtcattgttgcaacaattagagctttaaaaatgcatggtggcgttgcaaaggatgatttaaaaaaagaaaacgttaatgccctaaaagatggaatggttaatttaagaaggcatattaataatataagaaaatttggcttaccagttacagttgctgttaatcattttataactgacaccgatgaagaaatgaaaaccctgttagatttttgtgaaactcaaggagtaaaagcatcaaaatgtactcattggtctcatggaagtcagggaacattagaattagccaaaaatgtagctgaaatttgtgaagataataaagatacttttaaatatttatatgaagatgatatgcctttattcaaaaaaattgaaaaaattgcacaagaaatctatagcgctagtgaggtagtggctgatacaaaagtaagacaacaattgaaagactttgaagaaaagggttttggtaaattacctgtatgcattgcaaaaacacaatacagtttttcaactgatcctggtttaaagggagctcctactggacatgtactaccagtcagagaagtaaggctttcatcaggtgctgaatttgttgttgttgtatgtggtgagattatgacaatgcctggacttcctagagttccagcggctgactcgattaaactaaatgaaaaaggcgagattgaaggattattctaa

SEQ ID NO: 315662 - DNA, 1213 bp, Unknown
  Bacterial polypeptide expressing nucleotide sequence isolated from the Sargasso Sea
aacattgatgacaaaagaatagtttggaaaagagttatggatatgaatgatagagctttaagagctataaatataaataccaaaggagcttcaaaagattttccaagagaagatggatttgatattacggttgcttctgaagtgatggctatattttgtttatcaaataatttagaagatttagaaaaaaaaataggaaatataacaatagcttataataaagatggtaaaccaatttatgcaaaagatttaaatgctcaaggtccaatgacagttttgctaaaagaagcaattaggccaaatattactcaaactttagaaaataatcctgccttaatacatggaggtccttttgcaaacattgcgcatggatgtaattctataattgctacaaaaactgctctaaagctttcagattatgtagttacagaagctggatttggagctgatcttggagcagaaaaatttatgaatattaaatgcagaaaagcaaatttaaaacctagttgtgtggttatagtcgcaactataagagctcttaaaatgcatggtggtgtcgaaaaagaagatttaaaaaaagaaaacatagaggctcttaaaaaaggtttagttaaccttgaaagacatattaataatgtaaaaaagtttgggatagaagcaatagtagcaattaatcattttgttatggatacagaaaatgaaataaatattttaaaagaatactgtaatagcattggtataaaagttaataaaagcactcattggtctgatggaggtgaaggagctaaagctttagctcaaaatgttgtcgaaatatgtgaaaaatcaaatcaagataattttaagtttttatataatgataatgagactctctggaacaaagtagaaaaaattgcaatagaaatttataaagcaagtaaaataacagcagatgataaagtcaaagaacaattaaaaatatttgagaaaaatggctatggaaaactgccagtatgtatagcaaaaactcaatacagtttttctgttgatccaaaacttaaaggagcaccctcggaccacgaaataccaattagagaggtaaggctttcatcgggtgctgaatttatagtagttatatgtggatcaattatgacaatgccaggtctacctaaagtacccgctgcagattctattaaattaaataaaaaaggtgaaatagaaggcttgttttaat

SEQ ID NO: 315663 - DNA, 1365 bp, Unknown
  Bacterial polypeptide expressing nucleotide sequence isolated from the Sargasso Sea
gtatgaagggaggtgcagccgggggtggatacgctcaagttattcctatgactgatatcaaccttcacttcacaggagattttcatgcaataggggcagctcataatcttctatctgcattgatcgataatcatattcattgggataacgaactaaatattgaccctagaagaataacctggaaacgcgttgttgatatgaatgataggtctttaagagatattacatgtggtcttggtggaacaggtaatggcattccgcgacaaagtggatttgacattacagtagcgtcagagattatggcagttttttgcttggcctcagatattgaggatcttcaaaaaagaattggtaatattgttataggctacacaaaatcaaatgaaccagttagagctagtcaacttaaagcagatggtgccatcacagcattgcttaaagatgcttttcaaccaaatttagtacaaactttagaaaataatcctgcttttatgcatggtggtccatttgcgaacatagctcatggttgtaattcagttgtttcaacaaaaacagcattaaaacttgcagattatgtagttactgaagctggatttggtgcagacttaggcgcagaaaaattttttgatattaaatgtagaaaatcaggccttaaacctgatgcagttgttcttgttgcaacgacaaaagcacttaaaatgcacggtggtgtgaagaaagaagatttaggaacagaaaatgtcgatgcagttacattaggttgtaaaaatttagaaaaacacgttgaaaatataaataaatttggagtcccagttgttgtcgctattaatgattatgtttctgatactgaaaaagaacatactgctataataaatttctgcaagaatcttggtgttcaatgcaaaatttcttcacattgggaaaaaggtggccaaggagcatcagaacttgctgaggaagttgctaaagtagctgattcaaatatgtctgagtttaatatcttatatgaggacgatatgtccttgtgggataagactaaatatattgctcaaaacatttatggagctcaagacattatcgctgacaaaagagttagaaataagtttaagaagttagaagatgatggctttggttcttatcctgtttgtatggcaaaaacacaatacagtttttctaccgatccattgttaatgggagctccaaccggccatgaagttccaataagagaagtaagactatcagcaggtgcagaatttgtagtagtagtatgtggtgaaattatgacaatgcctggccttcctagagttccggcagcagaagctattggacttgataaaaataatgaaattgctggattattttgat

SEQ ID NO: 315664 - DNA, 1408 bp, Unknown
  Bacterial polypeptide expressing nucleotide sequence isolated from the Sargasso Sea
ggcaaaagtaaatgttccagatgaaaatcacgcatttagtcctatgggaagacatatagctaaaattaatttagaatatttaaacaacctcaaaaataaagatggtaaactaatattagttaccgcgattacacctacacctgcaggcgaaggtaaaacgacaacatcggttggtttgaatgatggtcttaataaaattggtaaaaaatcgattgtatgtttaagagaaccaagcttaggtccttcttttggtatgaaaggtggtgcggcaggaggtgggtatgctcaagtagttccaatggaacaaataaatcttcatttcactggagatttccacgctattacatcagcacataatttattatcagctttaattgataatcacatttattggggaaataaacttaatattgatgtcagacgaattgtttggagaagagtaatggacatgaatgatagatccttaagatctgttattgtagatctaggtggcgtagcgaatggttatccaagacaagatagttttgatataactgttgcttcagaattaatggctatattttgtctagcaaaaaatcttaaagatttagaggaaagaataggaaacataactattggttatactcgtgaaaaaaaatcaatacaggcaaaagacttaaacgcacatggaccaatgactgttttacttaaagaagctattagaccaaatgtaactcaaactttagaaaacaatcctgctataatacatggtggtccatttgctaatatagctcatggttgtaattctgtaatagctactaaggctggtttaaaactggcagattatgttgtaacagaagctggctttggagcagatcttggtgcggaaaagtttttagatattaaatgtaggaagtcgggcataaaaccggattgtgttgtaatagttgctactattagggctcttaaaatgcacggcggtgtaaacaaagaagatttaaagaaagaaaatgtctctgccttaacaaatggattagtaaatttaagaagacacataaacaacatcagaaaatttggtttaccggtgactgtagctgttaatcattttattacagacactgataatgagatgaaaattttattagatttttgtgagactcagggggtaaaagcatcaaaatgtacacattggtcaaatggaagtgaaggtacaaaagaactggcacaaaccgtaagtgatatttgtgataataaaaaggatacttttaaatatttgtatgaagatgatgtgtcactgtttaaaaaagtcgaaaaaattgctttagaaatatatggtgctagtgaggtagttgctgacactaaagtaagacagcaactaaaagactttgaggagaaaggatataaaaaactacctgtagtattgcaaaaa

SEQ ID NO: 315665 - DNA, 1203 bp, Unknown
  Bacterial polypeptide expressing nucleotide sequence isolated from the Sargasso Sea
ttgatgtaagaaggattgtatggggtcgtgttgttgatttgaatgatcgatcattaagagcagtgaatgtcaatttaggtggtgttgcaaatggttttcctcgtgaagaaaaatttgatattactgttgcctcagaagtaatggcaattttttgcttatctacaagtctagaagatttacaaaatagacttggaaacataattattggatacactagagatagaaaagaaatccgagcgagagaattaaatgcagatggagcaatgacaactttacttaaagatgcattcctaccgaatttagtccaaacgcttgaaaaaaatcccgcaatgattcatggtggtccttttgcaaacatcgcacatggatgcaattcattaattgctacgcaaacagctttaaaattaagcgattatgttgttactgaagctggttttggtgctgatcttggtgcagagaaatttcttgatataaaatgtcgaaaaggagatttaaaaccatcagcaattgtactagttgcaacagttcgtgcacttaaaatgcatggtggcgtagataaaaaagaattgaagggtgaaaatgttgaagctgttaaaaaaggattggctaatttagaacagcacattgcaaatattaaaaaatttaatgttcctgtatcagttgctatcaatcattttagtctagatacggaaagtgaactaaaagtagttgaagattgctgtgaaaatttaggagttaaagcgtttaattgtaagcattgggctgatggaggcgctggtgcaactgacctcgctgagcatattgcttcagttgctgaaagtggagaggcagatcttaaacatttatacactagcgaaactactctttgggaaaaaatgagaactattgcaactgaaatttatggtgctgatgatataattgctgatcaaaaaattagaagccaatttgaagaacttcaaaaagactatggttcctaccctatttgtgttgctaaaactcagtatagcttttcaactgatcctaatttacgaggagcgcctaaagggcatgttgttccaattcgtgaaatcagacttgctgccggggcagaattccttgtcgttgtttgtgataagattatgacaatgcctggccttccaagggttcctgctgctgacgcaatacacttaaataaagatggagaaattgaaggactattttaat

SEQ ID NO: 315666 - DNA, 1316 bp, Unknown
  Bacterial polypeptide expressing nucleotide sequence isolated from the Sargasso Sea
tatggaacatattaatcttcattttacgggagactttcatgctattacatccgctaataatttgttggcctctttgattgataatcatatttattggggtaataaattagaaattgatactagaagagtagtttggaaaaggtgtgttgatttaaatgatagagctttacgagagataacagttaatcttggaggcgtatctaatggttttccaagaactgatggatttaatattactgttgcttctgaagttatggctatattctgtttagcaaatgatcttaaagatttagagagaagattaggaaacattacagtagcctacactcgaagtaaaaaaccaatttttgctaaagatttaaaagctgaaggaccaatgactgtattgttaaaacaagctttgatgccaaatttagtccaaacactagaaaataatccggctataattcatggtggtccatttgcaaatattgctcatggatgtaacagtgttatagctaccaaaacaagtctcaaaattgcagattatgttgttactgaagctggctttggggctgatctaggagcagaaaagtttcttgatattaaatgcagaaaagcagatttaaaacctgatggtgtagttcttgttgcaactattagagctttaaagatgcatggaggtgttgaaaaaagtgatttaggaaaagaaaatattgaagctgttaaatcagggatttctaatctgaaaagacatgttgaaaatataaaaaaatatggcttaccagttattgtagcaataaatcattttgtagcagatactgaaaatgaaatgagaatactgcaagaagaatgtgaaaaaataggtgttgaagccgtcccctgtaaacattggtctgacggaggaaaaggcactgttgatttagctaaaaaagttgttgatctagttgatcaaaaaaattcttttaaatttttatacgaagataaaataagtttattagataaaatagaaaaaattgctaaagaaatttacggtgctgatgaaattatagctgataataaaataagatcacaactaaaacaatttgaagaaaatggttatggtgattttccaatatgtattgccaaaactcaatatagcttttctactgatccaacccttaaaggagctccttctggacatagtgtcccaattagagagcttagactttcaagtggagctgagtttattgtagtcatttgtggagaaataatgactatgcctggtttaccaagtataccggcagcagattcaataaaactgaatgacaaaggagaaattgaaggtcttttctaaa

SEQ ID NO: 315667 - DNA, 1684 bp, Unknown
  Bacterial polypeptide expressing nucleotide sequence isolated from the Sargasso Sea
atgagtgatgtaaaatcagacattcaaatagctagagaagctaaaatgcaaccaataaaagatattctttcaaaggttggtgtaccagatgaaaattttgctttcagtccaatgggcagacacattgccaaaataaatctggattatttgaatacccttaaaaaagaaaatggtaaattaattttagttactgcaatcactcctactccagctggtgagggtaaaactacaacttcagttgggttaaatgacggtttaaataaaatcggaaaaaaatctatagtttgtttaagagaaccaagtcttggtccatcatttggaatgaagggtggagctgctggtggtggttatgcccaggtagtaccaatggaacaaattaatcttcattttacaggtgactttcatgctattacatctgcacataatttactatctgctttaattgataatcatatttattggggtaacaaacttaacattgatgttagaagaattgtttggagaagagtaatggatatgaatgatagatccttaagatctatcattgttgatctgggaggagtggctaatggttaccctaggcaagatagttttgatattacagttgcatctgagctaatggctattttttgtttagcaacagaccttaaagatttagaaaatagaattggtaatattacaattggttatactagggataagcaagcgatttgtgcaaaagatttaaatgcacaaggtccaatgacagttttgcttaaagaagcaataagacctaatgtaactcaaactttagaaaacaatcctgcaataattcatggtggcccttttgcaaatattgctcatggatgtaattcagttattgcaactaaagcaggacttaaattagctgactatgttgtaacagaggcaggatttggagctgatttaggagctgaaaaatttttggatattaagtgcagaaaatctaatctaaaaccagattgcgtagttattgtagcaacaataagagcactgaaaatgcatggaggtattgctaaagaagatttaaaaaaagaaaatgtgtcagcactaaaagagggaatggtaaatttacgtagacatataaataatattagaaaatttggattacctgttactgttgcggttaatcattttattactgatacagaagatgaaatgaaaaccttgctagatttttgtgaaacgcagggtgtaaaagcctctaaatgcactcattggtctaatggaagtgaaggaactattgaattagctaaaaatgttactgaaatttgtgaggataaaaaagatacatttaaatttttatatgaagacgatcttccgctgttcaaaaaaatagaaaaaattgcacaagaaatttatagtgcctctgaagtagtagcagacacaaaagtgagacaacaattaaaagattttgaggaaaaaggttatggtaagttgcctgtttgtattgcaaaaactcaatatagtttttcaacagatccaaatttaaagggtgcacccacgggtcatgttttaccagttagagaggtaagactttcttctggtgctgaatttatagttgttgtgtgcggtgaaatcatgacaatgccagggttacctagagttcctgctgctgactctattaagttgaatgacaaaggcgaaattgaaggtttattctaaa

SEQ ID NO: 315668 - DNA, 925 bp, Unknown
  Bacterial polypeptide expressing nucleotide sequence isolated from the Sargasso Sea
ctaaagccaaaccttgtgcagactctggaaaacaatccagcatttgtacatggagggccttttgcaaatatagcccatgggtgtaattcaatcatatcgacaaacttagctttaaaattatctgattttgtgattacggaagccggttttggtgctgacttaggtgctgaaaagttttttgatattaagtgtcgctatcttgatgaaaaaccatccgttgcagttgtagtcgcgacagtgagagcccttaaaatgcatgggggtgttaagatcgatcatttgaaagaagagaataatgacgcagtcaatgccggttctgcgaacttgataagacatttggaaaatatatcaaaatttggcgtgccgaccgtcgtatgtataaatagatttattaatgacactgacagtgagataagcactctaattgaagcaatagataagagtggtattaagagtaaagtgattttatcgaatcattgggctgagggcggaagtggaattactgaccttgcaaaagaagtaatagatatgtgtgaaaacgctgatcgagattttaaacatttatatgagctcgaggagggaattgagtataaaataactaaaattgcaaaggaaatctatcgtgcaaaggacgttattttaagtaaaaaagttaaaactcaaattagtgatttggaaaagaatggttttagtaaacttccaatctgcatggcgaagacgcaatattcattttcaacagatccaactttgaaaaatgcgcctgtcgatcatgatattgaaataagagagctcaggctatcagccggagcagggtttatcgttgctatatctggtgatatcatgaccatgcccggattgccgcgaaagccatctgcagagaatatttatttagataggggcggtaatattgaaggcctgttctaga

SEQ ID NO: 315669 - DNA, 1252 bp, Unknown
  Bacterial polypeptide expressing nucleotide sequence isolated from the Sargasso Sea
atgagcgcggtcaaatcagacatagaaatagcaagagctgcaaaaatgaaacccatacaagaaatacttgatgggataaatgttccagacaaagctgaagtttatagtccaatgggaaggtatattgcaaaaattaaacctgaatatttaaataccttgaaagataaaaatgatggaaaattaattttagttactgcaattaccccaactccagctggggaaggaaaaacaacaacttctgttggtctttgcgatggtctaaacaaaattggaaaaaaatccattgtttgtcttagagagcctagcttgggcccttctttcggaatgaaaggtggtgctgctggtggtggttatgctcaagtagttccaatggaacaaataaatttacattttacaggagactttcatgctattacatctgcacataatcttctttcagctttaattgacaatcatatttactggggaaataaattaaatattgatgtgagaagaattgtttggaaaagagtaatggatatgaatgatcgttcattaagatcaattaatgtaaatttgggaggagttgcaaatggttatcctagggaagatggttttgatattactgtagcttcagaaatcatggccattttctgcttatcaaatgatttaaaagatttagaaaatcgaattggaaatattactataggctatactagagaaagaaagccagtttatgcaaaagacttaaatgcccaaggacctatgactgttctattaaaagatgctattagaccgaatataactcaaacattagaaaataatccagcaattatacatggtgggccttttgcaaatattgctcatggctgtaactccgttatcgctacaaaaactggattaaaattatctgattatgttgtaacagaagcaggatttggtgctgatttaggtgctgaaaaatttttagatataaagtgcagaaaatctggtttaaaacctgattgcgttgtaattgttgcaaccattagagctttaaaaatgcatggtggagtagcaaaagaagatcttaaaaaagaaaatgtagatgctcttaaaaaaggtttagtaaatttagagagacatataaataatacaaaaaaatttaatttgccagttgtggtagcagtaaatcattttattaccgatgcagacgaagaagtaaatatattaattgatttttgtaaaaaacttggtgttaaatcatctttgtgtactcattggtctaatggtg

SEQ ID NO: 315670 - DNA, 1063 bp, Unknown
  Bacterial polypeptide expressing nucleotide sequence isolated from the Sargasso Sea
tatggcattttttgccttgctactgatcttaaagatttagaaagacgacttggaaatataacaattgcttatactagagacaaaaaaccaattcttgctaaagatttaaaagcagaaggaccgatgactgttttgttaaaacaagcttttttgccaaatttagttcaaacacttgaaaataatccagcaattattcatggtggaccttttgcaaacattgcccatggttgtaatagtgtagtagcaactaaaaccagtttgaaaattgctgattatgttgtcactgaagcaggttttggtgctgatcttggggcagaaaaattttttaatataaaatgtcgcaaatcaaatttaaaaccagatggagttgttcttgttgcaacaataagagctcttaaaatgcatgggggtgtagaaaaaaataatttaggatctgaaaatatagatgctgtaagaaaaggtttttcaaatctagcacgtcatgtaaaaaatataaaaaaatttggattaccggttattgttgcaattaatcattttgatgccgatactgataatgagattaaagcacttgatgaagagtgtaaaaaaataagtgtagatgctgtttcttgcaagcattggtctaaaggaagcgatggtactgttgaactagctcaaaaagtagtagatttagtaaatgaagaaaatacttttaattttttatataaagaaaaaatatccttattagaaaaaatcaagattattgctaaagaaatctattcagctgatgatgtgttggctgataaaaaaatcagagatcaattaaaacaatttgaagaaagtggttatggaaactttccaatatgtattgcaaaaacacaatatagtttttctacagatccatctttaaaagctgctcctagtggacatagtattccaataagagaagtgaggctttctagtggtgctgaatttattgttgtaatttgtggagaaataatgaccatgccaggactgccaagtgtacctgcggcaaattccattcacttaaatgatgatggacaaattgaaggtcttttctaaa

SEQ ID NO: 315671 - DNA, 1445 bp, Unknown
  Bacterial polypeptide expressing nucleotide sequence isolated from the Sargasso Sea
aatgtctaaaagcgatatccaaatagcaagagaagcaaaaatggatcctataaacaaggtcctagccaaaattaatgtacccgacgatccaagcgcattcagccctatgggaagacatattgcaaaaataaattttgattatcttcaaactttagaaaaaaaaaagaatggaaaacttattcttgtaacagctataactccaacgccagcaggtgaaggtaaaactacagtttcagttggactttcagatggaataaataaaattggtaaaaaatcaattgtgtgtttaagagagcctagtttaggaccttcttttggaatgaaaggtggcgcagctggaggaggttatgcacaagtagttcctatggaacaaattaatttacattttactggagattttcatgcaataacttctgcacataaccttttatcagcccttatagacaatcatatttattggggaaacaaattaaatatcgatgacaaaaaaatagtatggaaaagagttatggatatgaatgacagagctttaagagcaataaatattaataccaaaggagcagcaaaagattttccaagagaagatggttttgatattacggttgcttcagaagttatggctatattttgtctatctaataacttggaagatttagaaaaaaagataggaaatataacaatagcttataataaagatggtaaaccaatttatgcaaaagacttaaatgctcaaggtccaatgacagttttgcttaaagatgctattagacctaatgttacccaaactttagaaaataatcctgccttaatacacggtgggccatttgcaaatattgcacatgggtgcaattctataattgctacaaaagccgccctaaaactttcagattatgtcgtaaccgaagctggatttggagctgacctcggagctgaaaaatttatggatattaaatgcagaaaagcaaatttaaaaccaagttgcatagttatagtcgcaacgataagagctcttaaaatgcatggcggtgttgaaaaagaagatttaaaaaaagaaaatatagaggctcttaagaaaggtttagttaatctagaaagacatataaataatgtaaaaaaatttggagtagaagcagtggtagcaattaatcatttcgttatggatacagaaaatgaaataaatgttttaaaagaatattgtaatagtattggtattaaagttagtaaaagcactcattggtctgaaggaggagaaggagctaaagatttagccaaaaatgttgttgaaatatgcaatagttcaaatcaaaataattttaaatttttatacagtgaaaatgagactctttggaacaaagtagaaaaaattgcaaaagaaatttataaagcaaagaaaataacagcagatgaaaaaattaaagaacaattaaaaacttttgaaaaaaatg

SEQ ID NO: 315672 - DNA, 1621 bp, Unknown
  Bacterial polypeptide expressing nucleotide sequence isolated from the Sargasso Sea
atgtcaaaatccgatattcagatagcaagagaagcaaaaatgaaaccaattcatgaagtgcttgctaaaataaatgtgccaaatgaacccgatgcttttagtccaatgggaagacatatagccaaaatcaactttgaataccttgaaaaattagaaagtaaaaaaaacggtaaacttattttggttactgcaataactccaactcctgctggagaaggtaaaactactgtatctgtaggtcttgcggatggtattaacaaaattggtaaaagatcaattgtgtgtctaagagaacctagtttgggcccatcatttggtatgaaaggtggagctgctggtggtggttatgcacaagttgttcctatggaacaaataaatttacattttactggagattttcatgcaataacttctgctcataatcttctatctgctcttattgataatcatatctactggggaaacaatttaaatattgatgataaaaaaatagtttggaaaagagtaatggatatgaatgatagagctcttagagcaattaatattaatactaagggagttgcaaaagattttccacgagaagatggttttgatataactgttgcctcagaagttatggctatattttgtctatcaaataatttgcaagatttagaaaaaagaattggtaatataacaattgcttataataaaaatggtgaacctatttatgcaaaagatataaatgctcaaggtcctatgacagttttgttaaaagaagcaataagaccaaatgtgactcaaactttagaaaataatcctgcaatcatacatggtggtccgttcgcaaatatagctcatggatgtaactctgttatagcaacaaagacagctttgaaattatctgattacgttgttactgaagctggatttggagctgatctaggagcagaaaaatttatggatattaaatgtagaaaatcaaatatcaaacctagttgtgtagttatagtagctacaataagagctctcaaaatgcatggaggtgtagaaaaagaagatttaaaaaacgaaaatatagaagcgttaaaaaaaggtttggttaatctagaaagacatatcaataatgtaaaaaaatttggagttgaaactattgtagcaataaatcattttgttatggatacggataaggaagtaaatgttttacaagaatactgcaaaagtataggtgttaaagttaataaatgtactcactgggctgagggcggaaaaggaacacaagagttagcaaataatgttgttgaaatttgtgaaaaatcaaatttaaacaattttaaatttttatatgatgaaagagataatttgtggaacaaaatagaaaagattgcaaaagaaatttatagagcaagcaaaattactgctgatgaaaaagtaaaagaacaactaaatatttttgaaaaaaatggttatggaaaactacctgtttgtattgcaaaaacacaatatagcttttctgttgatccaaaactcaaaggagcaccaactgatcatgaaatacctattagggaagttaggctttcttcaggtgcagaatttattgtagtaatttgcggttctataatgacaatgcctggtctaccta

SEQ ID NO: 315673 - DNA, 1255 bp, Unknown
  Bacterial polypeptide expressing nucleotide sequence isolated from the Sargasso Sea
atggcaccaacagatatagaaattgctcgagaagcaaacttggctccaattacggaaatagcatcaaaattacaaataccagaggatgcgctagagctatatggaaataataaagcaaaaatttccaacgattacataactagtcttcaaagcgaacccgatggaaaacttgttttggttacagcaattacccctacgccagcgggtgagggaaagacaacgatgactgtggggctgggagatgctttaaataggattgggcgcagggctggcatttgtcttcgcgaacctagtttggggccttgcttcggaatgaagggaggtgctgcaggcgggggatatgcgcaggtcgttccaatggaggatatcaatctacattttacaggagatatgcacgcaataggtgttgcccataatctcttatctgcaatggtggataatcatatttactggggtaacaaagaagaaattgatgttcgcagagttcaatggcggagagttgtcgatatgaatgatagggctcttcgagatgtagtttcttcccttggaggcgttgccaacggtttccctcgtcagacaggttttgatattacggttgcctcggagattatggctatattttgtctggctgagaatttaacggatctaactagtaggttagaaaatatagttattggttttactagtgacaaacggcccgtcagagccggtcagctagaagctcatggtgcgatggctgtccttttaaagaatgctattgcccctaacttggtccagacacttgaaaataatcccgccttcgttcacggggggccatttgcaaatattgcacatggttgtaattcggttatcgcaaccaaagctatgctcaagatgtctgacattgtggtcacggaagctggttttggggcagacctcggagctgaaaagttttttgatatcaagtgccgaaaggcaggtttaaagcccgacgtagcagtgctggtagcaactactcgggcactaaaaatgcatggtggggttgccagggctgatttagatgcagaaaatctggacgctgtaaaacagggccttgcgaaccttgaccaacatgacgaaaatatagctaagtttggtgtcccccgggtcgtaggtatcaatcgatttacaggggatacagacgcagagatcaaaataattgtagattattgtgaggctaaaggcctgccggttagaatctgcactcactgggctaatggcggggagggtgcagaag

SEQ ID NO: 315674 - DNA, 1144 bp, Unknown
  Bacterial polypeptide expressing nucleotide sequence isolated from the Sargasso Sea
attgaaaacagacattgaaatagccagagaagctaaaccaaaaagaattgaagaaatagctagcagtattggtattagtgacgaatatcttgagcattatggtaaattcaaaggcaaagttaacctttcaattaatgatgaaaaattaaaagatcaagataacggcaaactgattttagttacggcaatatctcctactcccgctggggagggtaagactaccacaagtgttggtttggttgacgggctttgtaatattggtaagaaagcaatgatttgtcttagagagccaagccttggtccatgttttggaatgaagggtggtgctgcaggtggaggccatgctcaagttatacccatgacagatattaatctgcattttacaggtgattttcatgctattggcgcggctcacaatttgctttctgcgctcgtagataatcatattcattggagcaatgatcttgatattgatcctagaaaaattacttggaaaagagtggttgatatgaatgatagatcattgcgtgaagttacatgtgggcttggtgggacaggaaatggaatacccagacaaagtggatttgacataactgttgcttctgaaattatggctgtattttgtcttgcatctgatgctgatgatctgaagaaaagaataggtaatatagtcataggttattcaagatctaatgaacccgtaagagcaaaacaattaaaggctgatggcgccataagtgctttgcttcaggacgcatttcaaccaaatttggttcaaactcttgagaataatccagcatttatccatggaggtccttttgcaaacattgcgcatggatgtaattctgttgttgcaactaaaacagctcttaaacttgctgattacgttgttacagaagcaggatttggtgcagatttaggggctgaaaaattttttgacattaaatgtagaaaatctggcctaaaacctgatgctgtagttttagttgcaacaactaaagctttaaaaatgcatggtggtgttaaaaaagaagatcttggttcagagaatgttgatgcagtaataggtggttgtaagaatcttgagagacatgtaaaaaatattagaaaaatttggggttcacgttatagttggcataaatga

SEQ ID NO: 315675 - DNA, 1375 bp, Unknown
  Bacterial polypeptide expressing nucleotide sequence isolated from the Sargasso Sea
aatggatgttctatcagacattgaaatagcaagaaaaaatcaaatggtgccaattgaaaaggtggcctcaaaactaaaacttgaggaaaacagccttcaaaagtttgggcatcatattgcaaaaattgataccaacaccttgaaaaatcaaaacaaaaatggaaaattgatattggtaacggccatttcgccaactcctgctggtgagggtaaaactactacctcagtgggattaaatgatgctcttaataaaataggtaagcagtcattggtatgcctcagagaaccaagcttaggtccgtgttttggcgttaaaggtggagctgctggaggtggatatgctcaagtagtcccgatggataagattaatcttcattttacaggtgattttcatgcaatcacatctgctcataacctgcttgcttctatgatcgataatcacatttattggggaaatgatctaaacatagatacaagacgtatagtatggggtcgagttgtagatttaaatgaccgagctttgcgcaatacaaatataaatcttggaggtattgcaaacggttttcccagagaagataagtttgatattacagttgcttctgaggttatggcgatcttttgtttatcaacaagtctaagtgatctgcaaaaaagacttggcaatattatcattggttacacacgagataaaaaagaaatcaaagctcgtgacgtaaatgcagatggagcaatgacgactctacttaaagatgcttttctcccaaaccttgttcaaacgttagaagaaaatcctgcaatcattcatggcggtccttttgctaacattgcgcatggctgcaattcacttatagcaactcaaactgctcttaagctaagcgattatgtagtaacagaagctggatttggagcggatcttggcgcagaaaaatttctagatataaaatgcagaaaaggaaatttaaatccttctgcaatagtcattgtagctactgtaagggctttaaaaatgcatggcggcatggataaaaaggaactgaaaaatgaaaatctagacgccttgaggaaaggtctatcgaacttgcaacaacatatttcgaatatgaaaaaatatggagttcctgtgtctgtagcaattaatcattttataaccgatactgataatgaactctcaataatcagtgaatgctgtgatgagcttggcattaaatcgtttaattgtactcactggagcaatggtggagctggggcagaaaccttggcgcaacacattgtagatgtaacaactgaggaaaatccaaaaataaagcacctttaccctaatgaaatgaaactgtgggataaagttcagaaaattgcacaagatattatgagcaaa

SEQ ID NO: 315676 - DNA, 1513 bp, Unknown
  Bacterial polypeptide expressing nucleotide sequence isolated from the Sargasso Sea
atgaaaacagatatagaaatagcaagagaagcagaacccaaaacgattgataaaattgcagatcaattaggtattggagaagagtatcttgagcgctatggtaaatttaagtccaagattgacctatcaatcaatcaggaacaattaaaggattctaagaacggtaaactaatcttggttaccgctatctcacccacgcctgcaggagaaggcaagaccactacaagtgttggcctcgtcgatgggctatgtcacatcggaaaaaaagcaatgatttgcctcagagaaccgagcctaggaccttgctttggtatgaaaggtggtgcagctggaggaggtcatgctcaagtgatccccatgacagacattaatctacattttacaggtgattttcatgccattggagcagctcataatcttctttctgcattaattgataatcacatacattgggacaatgaattggatattgaccctagaagaatcacttggaagagagtggttgatatgaatgatcgatcattaagagatattacctgcggtcttggtggggttgggaatggtattcctagacagagtggtttcgatatcacagttgcttcagaaatcatggctattttttgtcttgcatcagacattgatgatctaaaaaagaggattggaaatatagtcataggttattccagatccaacgaacccataagagcaaagcaactcaatgccgatggcgcaataactgctttgttgaaagacgcattccagccaaatttagtacaaacacttgaaaataatccagcatttatacacggtggaccattcgcaaatattgcacatggttgtaatacagtcgttgcaactaagcttgcattaaaacttgctgattatgttgttaccgaagccggatttggagcagacctgggcgctgagaaattttttgatatcaaatgcagaaaatcaggtctcaaaccagacgcagttgttctggttgcaaccacaaaagctttaaaaatgcatggtggcgtgacaaaggataaccttggagcagagaatgtagatgcagtaaccaaaggttgtaagaatctcaaaagacacattgaaaatatcaagaagtttggagtccctgtcatggttgcgatcaatgactatgtgaccgatacaaaagatgaacatgccgcgataattcaatattgtaaggaaattggtgttgagtgcagaatttcatctcactgggaaaaaggaggcaaaggtgcatcagaactagcagaagaggttgttaaaattgctgattctaattcttctgatttcaaacctttgtatgacaataaaatgtctctatgggataagacccaattcattgcacaaaacatatatggtgcatcagaaatcattgcagataaaaaggtaagaaatcagtttaagaaattagaagatgatggatttggtgagtacccaatttgcatggcaaaaactcagtacagcttttcaacggacccattactgatgggtgctccat

SEQ ID NO: 315677 - DNA, 998 bp, Unknown
  Bacterial polypeptide expressing nucleotide sequence isolated from the Sargasso Sea
tatggctaaaagtgatattcaaatagctagggaagctaaaatgaaacccatccaagaaatattagatggtattaatgttcctgataagccagaagtttatagtcctataagtagatatattgcaaaaattaaacttgagcacttagaaaaattaaaagaaaaaaaagatggaaaactaattttagtaactgcgattaccccaactcctgcaggtgaaggtaaaactacaacttcagtaggtttatcagatgggttaaataagataggaaaaaattctattgtatgtcttcgtgaaccaagtttaggtccatcttttggaatgaaaggtggtgctgctgggggtggatatgctcaagttgttccaatggaacaaattaatttacattttactggagattttcatgcaatcacttctgctcacaatcttctctcggctttaattgacaatcatatttattggggaaataaattaaatatagatgttagaagaattgtttggaaacgagttcttgatatgaatgatagagctttaagatcaattaatattaaccttggaggagtggcaaatggttttcctagagaagatggatttgatattactgtagcttcagagataatggctatattctgtttatcaaatgatcttaaagatttagaaaaaagaattggaaatataaccgtggcttatacaagagatagaaagcctatttatgcaaaagatttaaatgcacatggtccaatgacggtattattaaaagacgcaataagaccaaacgttacccaaacattagaaaataatcctgcgattatacatggaggtccatttgcaaacatagctcatggatgtaattctgttttagcaacaaaaactgcattaaaattatctgactacgttgtaactgaagctggctttggagctgatttaggtgcagaaaagtttttagatattaaatgcagaaaatcaggtttaaaacccaattgcgtagtaatagtagcaa

SEQ ID NO: 315678 - DNA, 1526 bp, Unknown
  Bacterial polypeptide expressing nucleotide sequence isolated from the Sargasso Sea
tagcaaactaaattttaactatatcgacaagctaaaagagaaaaaaagtaatttaattctgataactgcaataacaccaactcctgcaggagaaggtaaaacaacaacatcggttggtttaaatgatggtttaaataaaatcggaaagaaatcaattgtctgtttaagagaacctagcttaggaccctcatttggaatgaaaggtggggcagccggaggaggatatgctcaagttgttccaatggaacaaattaacttacattttactggagattttcatgcaataacttcagctcacaacttattatcagctttaatcgataaccatatttattggggaaataaattaaacattgaccctgaaaatatattatggaagcgtgtagttgacttaaacgatcgtggactaagaaaaataaaaattaatcttgaaagattgaaagccaatattccaagagatgatagttttgatatcactgttgcctcagaagttatggcaattttttgcctatcaaacagcattaaggatttagaggagaaaataggaaatattacaattgcttataccaaagacaaaaaacctatttacgcaaaagaccttaaagctaacggtcctatgacggtattattaaaggaagcaattaggcctaatgcggttcagactttagaaaataatcttgcaattattcatggtggaccttttgcaaatattgctcatggatgtaattcaattatcgctactaaaactgctttaaaattgtctgaatatgttattacagaagctggttttggagcagaccttggggctgaaaaatttttagatattaaatgccgaaaagcgggtcttaaaccaagttgtgtagttcttgtcgccacaattagagctttaaaaatgcatggaggagttgagaaagatgatcttaacaaggaaaatcttgaggcacttaaaaaaggcatgcctaatttagaaaagcatatacaaaatatcaaaaagtttggtttggaagtaatagttgcgattaatcattttattactgacacagataaggaagtaaaaatcattcaagaacaatgtgctaaacttagggttaaagtaagtctttgcacacattggtcagaaggtggaaacggaacaaaggacttagctaataatgtagtagaaatatgtaacaagagtgacagatctaaatttaaatatttatattctgatcaactaccaattttagaaaaagtagaaaaaattgctaaagaaatctacaatgcaaaaggtattgaggtagatgagaaaattaaagaaaagattaaaaaaatagagcaagcaggatttggaagatttccggtttgtattgcaaaaacacaatatagcttctctactgacccaaaattaaaaggagctccgtcaggtcatacattatctataagagaaataagattatccagtggagctgaattcgtagttgttgtttgtggagctataatgactatgccgggacttccgagagtaccagcagcttacaatattaagt

SEQ ID NO: 315679 - DNA, 1684 bp, Unknown
  Bacterial polypeptide expressing nucleotide sequence isolated from the Sargasso Sea
atgtctaaaagtgatattcaaatagcaagagaagcgaacatgaaaccaataagtgagattcttgcaaaaatcaatgttccagatgacgcaaaagcttttagtccaatgggtagacatattgcaaaaataaattttgagtatttagaaactctagaaaataaaaaagaagggaagctcattttagttactgctattacaccaacaccagctggcgaaggaaagacaactgtttctgttggtctttcagatggaataaataaaattggaaaaaaatcaattgtatgtttaagagaacctagtttaggaccatctttcggaatgaaaggtggagcagcaggtggcggttttgctcaagtagtgccaatggaacaaattaatttacattttactggtgactttcacgcgatcacttcagctcataatcttttatcagctcttatagataatcatatttattggggaaacaaacttaacattgatgataaaaaaattgtttggaaaagagttatggatatgaacgatagagctctaagggcaattaacattaataccaaaggtgttgccaaagatttccctagagaagatggttttgatattactgttgcttctgaaattatggctatcttttgtttatcaaacaatttgcaagacttagaaaatagaatcggaaacattacaattgcatatgacaaaaataataaaccaatttatgctaaagacttaaatgcacaaggcccaatgactgttttattaaaagaagcaattagacctaatgttactcaaactttagagaataatcctgctttaatacatggtggaccatttgctaatattgctcatggatgtaactcggtgatcgcaacaaagaccgctttaaaattatctgattatgtcgttacggaagctggatttggagctgatcttggtgctgaaaaatttatggatattaaatgtagaaaatcaaacttaaaacctagctgcatagttatcgttgcaacagttagagcattaaagatgcatggaggagtagaaaaagaagatttaaaaaaagaaaatattgaagctttaaaaaaaggtttggtaaatttagaaagacacatcaacaatgtaaaaaagtttggtgtggaagcagtagtagcaataaatcattttgttatggatactgaaaatgaaacaaatgcattagaagaatattgcaataaaattggagtaaaagtaagtaaatgtacacattggtcaaacggaggtgaaggtactaaagatctagcaaaaaaagttacggaaattgccgataattctaattctaaaaattttaaatttttgtatgaagaaaaagatactttatggaataagatagaaaaaatcgctaaagaaatttataaagcaaatagtattactgctaacgaaactgttaaagaacagcttaaaacttttgaaaataacggttacggaaatttacccgtttgtattgcaaaaacacaatatagtttttcggttgatccaaagcttaaaggtgcacctacaggccatgaaattccaattagagaagtaagactatcatctggggctgaatttattgtagtagtctgtggatcgataatgacaatgccaggactgcctagagtaccggcagctgattctattaaattaaatgacaaaggtgaaatagaaggcttattttaat

SEQ ID NO: 315680 - DNA, 994 bp, Unknown
  Bacterial polypeptide expressing nucleotide sequence isolated from the Sargasso Sea
gatgtcagatatagagattgcaagagctgctaagaaaattcacataagagatgttgctgctaaagtaaatattccagaggaaaatttaattccttatggtcacgacgcagcaaaaataaactttgatttcattgaaaaaagtaaatccaaccctgatggaaaattaatactagtgactgcaattaatccgactccagccggagagggcaaaactactacttctgttggcttaaatgatggactaaataaaattggtaaaaaatctatagtttgtcttagagagcctagtcttggaccttgttttggaatgaaaggtggagccgcaggtggaggttacgctcaagtagtgcctatggaagaaataaatcttcatttcactggtgactttcatgcaataacttctgcgcataatttattatcttcgttaattgacaatcatatttattggggaaatgaattacaaattgatcaaagaagaattacatggggtagagttgttgacttaggtgataggtcattaagaaaagtaaatgtcaatcttggaggtgtgtcaaacggatttcctagagaggataaattcgatatcacagtcgcaagtgagataatggcaatattttgtttagcaaatgatattgatgatcttcaaaaaagaataggtgacattattattgcatataaaagagataaaactcctatatacgcaagagatgtaaaagctgatggtccaatgacagttttattaaaaaatgctttgatgcctaatttagttcaaacattagaaaataaccctgccattattcacggaggtccttttgctaatattgcacatggatgtaacacagttatagcgactaaagctggcttaaaacttgcagattatgttgtgactgaagcaggatttggagcagatctgggagctgaaaaatttttggatataaaatgtcgtaaagctggattaactcccaagtgctgttgttattgttgctacagttag

SEQ ID NO: 315681 - DNA, 1258 bp, Unknown
  Bacterial polypeptide expressing nucleotide sequence isolated from the Sargasso Sea
tttatcagctcttatagacaatcatatttattggggaaacaaacttaatattgatgataaaaaaattgtttggaaaagagttatggatatgaacgacagagctttaagagcaattaatattaataccaaaggtgttgcaaaagatttccctagagaagatggttttgatatcacagtagcttctgaagtaatggctatattttgtttatcaaacaatttacaagacttagaaaaaagaattggaaacattacaattgcttatgacaaaaataataaaccaatttatgctaaagacttgaatgctcaaggtccaatgactgttttgttaaaagaagcaataagaccaaatgttactcaaactttagaaaataatccagctttaatacatggtggaccatttgctaatattgcgcatggatgtaattctgtgattgcaacaaaaactgctttaaaattatctgactatgtagttactgaagctggatttggtgctgatcttggcgctgaaaaatttatggatattaaatgcagaaaatcaaatctaaaacctagctgcatagttatagttgcaaccattagagcattaaaaatgcacggtggtgtagaaaaagataatttaaaaaaagaaaatattgaagctttaaaaaaaggtttagtaaatttagaaagacatatttataatataaaaaaattcggtgtagaagcagttgtagcaattaatcattttgttatggatacagaaaatgaaataaaatcattagaagaatactgtaataaaattggagtaaaagtaagcaaatgtacccattggtcagaaggtggtgaaggtacaaaagatctagcaaaaaaagttactgaaattgctgataattcaaattctgaaaaatttaaatttttatatgatgaaaaagatactctatggaacaagatagaaaagatagctaaagaaatctatagggcaaaaagcattactgctgatgaaaatgttaaaaaacagcttaaaacttttgaaaataacggttacggaaatttacctgtttgtattgcaaaaacacaatatagtttttcagttgatccaaagcttaaaggggcaccttcagatcatgaaattccaattagagaggtaagactttcatcaggagcagaatttattgtagttgtctgtggatctataatgaccatgcctggactacctagagtgccagcggctgattcaattaaattaaacgacaaaggtgaaatagaaggtttattttaa

SEQ ID NO: 315682 - DNA, 1016 bp, Unknown
  Bacterial polypeptide expressing nucleotide sequence isolated from the Sargasso Sea
aattggtaatattactgtagcatatactagagataaaaaaccaatttatgcaaaagatttaaatgctcacggtccaatgactgttttattaaaagatgcaattagacctaatatgacacaaacattagagaataacccagcaataatacatggaggaccttttgcaaatattgcgcatggttgtaattctgtgatagcaacgaaaacaggattaaaattagctgattatgttgtaactgaagctggttttggtgctgatctaggagctgaaaaatttatagatataaaatgtagaaaatcaaatttaaaacctgattgtgtagttattgttgcaacaataagagctttaaaaatgcatggtggtgtagctaaagatgatcttaaaaatgaaaatgttaaagcattaaataaaggtttggtaaatcttgaaagacatattaataacgttagaaaatttggtttaccagttgtagtggccgttaaccattttatcacagataccgataaagaagttaatgcgcttatggatttttgtaaaacattaggtgtaaaatcatctatttgtaaacactggtcagacggaggagagggagcaaaagacctagcaaacattgttgtagacataagtaataataaaaatacttttaaatttttatatgaagataagatgcctttatttaaaaaaattgagataatcgcacaagaaatttatcatgcaagcgaagtagtggctgacacaaaaataagagatcaacttaaagattttgagtcaaaaagttatggaaatcttccgatatgtattgctaaaactcaatatagtttttcaactgaccctagtctaaaaggtgctcctacggggcatgtggttccaataagagaagtaagattatcgtcaggagcagaatttattgtagttatatgtggagcaataatgacaatgccaggtcttccaagagtccctgctgcggattccattaaattaaatgataaaggtgaaatagaaggtttgttttaat

SEQ ID NO: 315683 - DNA, 1361 bp, Unknown
  Bacterial polypeptide expressing nucleotide sequence isolated from the Sargasso Sea
gggaggtgcggctggaggtggtaatgcacaggtagttcctatggaacaaataaatcttcacttcactggtgactttcatgctattacatcagcacataatcttctgtcagctttaatcgataatcatatttattggggaaataaacttaacattgatgaaaaaaaaattgtttggaaaagagttgtagatatgaacgatcgggctttaagatttatagatataaatactaaaggagtagcaaaggattttgctagagaggatggttttgatattactgtggcatctgaggtaatggcaattttttgtttatctaatgatttgtctgatttagaaaaaagaattggaaacattacaattgcttatgataaaaataataaaccagtctatgcaaaagacctaaatgctcaaggtccaatgacagtccttctgaaagaagcaattaggccaaatgttactcaaagtctagagcataacccagctataattcatggaggaccgttcgctaacattgctcacggatgtaattcagtaattgcaacaaagtcagctttaaagttatctaaatacgtagtaacagaggcaggttttggtgctgaccttggtgctgaaaaatttttggatattaaatgtagaaaagcaaatataaaaccaagttgtgttgttatagttgccacagttcgtgctttaaaaatgcatggcggtgtggaaaaagaaaatttaaaaaccgagaatattgatgctctaaaagaaggattatcaaatttagacaggcatataaataatattaaaaaatttggcatagaaccaatagttgcgattaatcattttgttttagatactaaaaaagaaatacaaacaataataaatttttgtaaaaatttaaatgttgaagttagtaattgtaaacactgggcagcaggtggatcaggaacagttgatttagcaaaaaaagttgtacgagtttgtaataattcaaaaaaacagaaatttaaattcttgtataacgatagtaaaagtttatgggaaaaaattgagattattgcaaaagaaatatatagagctgataaaattacagcaactgaagagattaaacaaaaattaaagacatttgaaaataacgggttcaaaaattttccagtttgtgttgcaaaaactcaatatagtttttctactgatccaaaattgaaaggtgcgccaacaaatcatgaaataccaattagagatgtaagattatcctctggagcagaatttattgttgtgatatgtggatcaattatgactatgcccggcttgccaaaaattcctgctgcggacaaaattaaattaaataaaaaaggtcaggtagaaggtttattttaat

SEQ ID NO: 315684 - DNA, 1687 bp, Unknown
  Bacterial polypeptide expressing nucleotide sequence isolated from the Sargasso Sea
atgagtgaagtaaaatcagatatccaaatagcaagagaagctaagatgcgaccaatcaacgatatattggctaaagttaatgtaccagatgaaagcactgcttttagtcccatgggaagacatattgcaaaaattaacttggagtatcttgatacattaaagaataaacctgatggaaaactaattttagttaccgctataactccaacacctgctggtgagggaaaaactaccacatctgtaggtttaaatgatggattaaataaaattggaaaaaaatctattgtttgtttaagagagccaagtttaggtccttcatttggtatgaaaggtggtgctgctggaggtggatttgcccaggttgtaccaatggaacagataaatctacatttcacaggtgactttcatgcaataacatcagctcacaatcttttatctgcattaattgataatcacatctattggggtaataaattgaatatagatgtaagaagaattgtttggaagagagttatggatatgaatgatcgatcccttagatctattaatataaatttaggtggcgtagcaaatggttttcctagagaagatggatttgatataacggttgcttctgaaataatggctatcttttgtttagcaaataatcttgaagatttagaaaaaagaattggtaatattacagtagcttatacaagagaaaaaaaacctatttttgcaaaagatttaaaagctcaaggtcctatgactgttttacttaaagacgcaattagaccaaatgtgactcagacattggagaataatcctgcaattattcatggaggaccttttgcaaatattgctcatggatgtaactccgttatagcaacaaaagctggcctaaaacttgcagactatgttgtaacagaggctggatttggagctgacctaggtgctgaaaaatttcttgatattaaatgtagaaaatcagatcttaaaccaagttgtgttgtaattgttgcaacaataagagctcttaaaatgcacggaggtgtcgcaaaagatgatttaaaaaatgaaaatgttgatgcacttaaaaaaggattagtgaatcttcaaagacatgttgaaaatgttaaaaaatttggcctacccgttgcaatagctgtaaatcatttcattaaagatactgataaagaggtaaaagctttaataagtttttgtgatggtttaggtgttaaagctagtctatgtacccattgggcaaatggtggtgaaggcacaaaagatttagcagctctagtagctgatttatgtgaaaaaaatgatactaaatttaaatttttatatgaaaacaaaactcctctatttaaaaagatagaaactattgctaaagaaatttatagagctgatgaagttatagcagacactaaaattagagaacaacttaagggttttgaggagtctggatatggtgatctacctatttgtattgcaaaaactcaatacagtttttctacagacccaagtcttaaaggagctccaaccggacatgctttacctttaagagaaattagactttcatcaggtgctgaatttatagttgttgtttgtggggctatcatgacaatgcctgggttaccaagagttccagcagctgactcgataaaattgaataaaaaaggggaaatagaaggtttattttaat

SEQ ID NO: 315685 - DNA, 1201 bp, Unknown
  Bacterial polypeptide expressing nucleotide sequence isolated from the Sargasso Sea
aagaagaattacctggggtcgtgttgttgatttaggtgatagatctctaagaaaagtgaatgtcaatcttggtggtgtttcaaacggatttcctagagaagataaattcgacataacagttgcaagtgaaatcatggctattttttgtttagcgaatgatattaacgatcttcaaaaaagaattggtgatataataatcgcatataaaagagataaatctccgatatatgcacgtgatgttaaagctgatggtccaatgacagttttattaaaaaatgctttaatgccaaatctggttcaaacacttgaaaataatccagcgattatacacggcggtccttttgcaaacattgctcatggttgcaatacagtaattgcgacgaaaacaggtctaaaacttgctgattatgtggtaactgaagctggatttggtgcagacttaggtgctgaaaaattcttagatattaaatgtcgtaaggcaggattaacacctagtgttgtcgtcattgttgctactgtgagagcattgaaatcacacggaggtgtggaaaaagcagaccttaataatgaaaatgttgatgcagttgagaaaggttttgaaaatttacaacgacatatcgaaaatattcaatcttttggactacaaacaattgtagctatcaatagttttactcttgatacagaagctgagggtaaagttatttcagatggttgtgaaaaaatgggagtaaaagcaatcctttgctcgcactgggcaaatggtggtgatggcactttagaattagctgaagaggtagtaaaaattagtgagtcaagtgatccgtctaaatttaagtatatgtacgaggataatgtatctttagaggagaaaattcgctcagttgcacaaaaaatatatagagcagatgatattgtgattgataaatctgttagcgatcaacttaaaggatttgaggaaaacggttatggaaatcttcctatttgtatcgccaaaacacagtatagtttttctacaaacccctctttaaggggtgctccaaatggttttactgtcccagtaagagaagttaggttgtcagcaggagcggggtttatagttgttgtaacaggtcaaattatgacaatgccaggtctacctaaagtgcctagcgctaattcaataatgctagatgaaaaaggattaattcaaggtcttttttaa

SEQ ID NO: 315686 - DNA, 1669 bp, Unknown
  Bacterial polypeptide expressing nucleotide sequence isolated from the Sargasso Sea
tatggctgtactctcagatattgaaattgctagagaaaatagcatggctcctattgaagaaattgcttcaaaattagacttaaaagatcaaaatctccaaaaatttgggcaccacattgctaaaattgatactcaacatatagaaagtaataacaagaacggaaaactcattttagtgacggccatttcacctaccccagcgggcgaaggaaagactactacatcagtcggtcttagtgatggcttgaataaaattggaaaacagtcattggtatgcttgagagaacctagtttaggaccttgctttggtgtcaaagggggtgctgcaggaggcggttacgcccaagtagtaccaatggataaaattaatttacatttcacaggtgatttccatgcgatcacatcagcacataacctccttgcatcgatgattgataaccatatttattggggaaacgatttaggaattgatacaagaagagtggtttggggacgtgttgtagatttaaatgatcgtgctttaagaaatattaatgttaatttaggcggtatagccaacggatacccacgtgaggataaattcgatattactgttgcatctgaagtgatggcaattttttgtttatctacaagtttagacgatttacaaaatagacttgggaatatcattgttggttatacaagggagaagaaagaaattacggcgcgagacttaaatgcagatggcgcgatgactactttgctaaaagatgctttcttacctaatcttgttcaaacactggagaaaaatcctgctatcattcatgggggtccttttgcaaatattgcccatggatgcaattctttagttgctactcaaactgctcttaaattaagcgattatgttgtaacagaagcaggctttggtgcagatcttggagcagaaaaatttttagacataaagtgccgtaaaggaaaattaaatccttcagcaatagtaatagttgcaacagttcgagcgttaaaaatgcatggcggtatggataaaaaagaattaaaaaatgaaaatgttgaagctgtaaaaaaaggtttatcaaatttaaagcagcacattgcaaatatgcaaatgtatggggcgcctgttacagttgctattaatcatttcatatctgacagtgaaaaagaattgtcagcaatcagcgattgctgtgactcattaaatgtaaagtcatttaattgcacacattggagcaatggtggtgcaggcacagaggacctagcaaagcacatagtagaaattactgagcaaaatgctccaaagataaagcacctgtatccggacgaaatgaaattgtgggataagatgaaaaaaattgcacaagaaatatatggagcgagcgatattattgctgaccaaaaaataagaatgcagtttgacgacttggaggaaaaatatggccattacccaatatgtgtagctaaaactcaatacagcttctcaactgatccaaatctaagaggcgctccaaaagaccatgtagttcctatcagagaagttagactagcagcgggtgcagaatttcttgtagttgtatgcgataagattatgactatgccaggtctgcctagagttccagctgcaaatgctatacacttaaataaaaatggcgacatagagggattgttttaa

SEQ ID NO: 315687 - DNA, 1681 bp, Unknown
  Bacterial polypeptide expressing nucleotide sequence isolated from the Sargasso Sea
atggccaaaacagatattcaaatagcaagagaagcaaaaatgaaacctatccaagaaatattggatggcataaatgttccagacaaagctgaagtttacagcccaatgggaaggcatatcgcaaaaattaaaacagagtatttagacactttaaaagataaaaaagatggaaagttaattttagtaactgcaataacaccaactccagctggtgaaggaaaaacaacaacgtcagtaggtctttctgatggattaaataaaataggaaaaaaatctattgtttgtttaagagaaccaagtttgggtccatcatttggaatgaaaggtggtgctgctggtggaggttatgctcaggtagttccgatggagcaaattaatttacattttactggagatttccatgcgataacttctgctcacaatttgctatcggcattaattgataatcatatctattggggaaataaattaaatatagacgttagaagaattgtttggaaaagagttatggatatgaacgatagatctttaagatctattgtggtcgacttaggtggaattgcaaatggatatccaagacaagatggatttgatattactgttgcatcagaaataatggctatcttttgcctagcaaaagatttgaaagatttagaaaatagaattggcaatattacaatcggttatactagagataaaaatccaatttatgctaaagatctaaatgctcaaggaccaatgacagtacttttaaaagatgctattagaccaaacgtaactcaaactcttgaaaataatcctgcaataattcatggaggtccttttgcaaatattgctcatggatgcaattcagttattgcaacaaagacagctttaaaactttctgactatgtaataaccgaagctggttttggtgcagaccttggtgcagaaaaatttataaatattaaatgtagaaaatcaggcttgaagcctgattgtgtagtaattgttgcaacaataagagccttaaaaatgcatggaggaataggcaaagatgaacttacaaatgaaaatgtagaagctttaaaaaaaggcgttgtaaacctagaaagacatatagataacgttagaaaatttggcttacctgttgctgtggctgttaatcattttgttactgacactgaaaaagaagtaaaatttctaatggatttttgtaaaaatcttggagtagatatttctttatgtactcattggtctaatggaggagaaggaacaaaagatttagcaaatactgttgtgaatatatgcgaaaaaagtaagaacacttttaaatttttatatgaagataaaactccattatttaagaaaattgaaacaattgctcaagagatctaccatgctagcgaagtagttgcagatacaaaaataagaacccaattaaaagattttgaaagtaagggatatgcagatcttccaatttgtgtagcaaaaacacaatatagtttttctactgatcctagtttaaaaggagctccaaaagggcatgtgcttcctataagagaagtaaaactctcatctggagccgagttcattgtagttatttgtggagaaataatgactatgcctggtctaccaagagtaccagctgcagactcgataaaaataaatgaaaaaggtgaaacagaaggtttattttaat

SEQ ID NO: 315688 - DNA, 1296 bp, Unknown
  Bacterial polypeptide expressing nucleotide sequence isolated from the Sargasso Sea
aatgaaaggtggtgcagcaggtggtggatatgctcaagtagttcctatggagcaaataaatctgcactttactggagattttcatgcaataacctccgctcacaatttgttgtcagcattaattgataaccacatatattggggtaataaattaaatatagatgtaagaagagttgtttggaaaagagttatggacatgaatgatagatctttaagatctattgttgttgatcttggtggtgttgcaaatggttatccaagacaagatggatttgatattacggttgcttctgagatcatggctattttttgtctggcagaagatcttagtgatcttgaagaaagaattggtaacataacgattgcatatacaagagataaaaaacctatctacgctaaagatctaagcgcacaaggtccaatgactgtattactgagagatgcattgaggcctaatataactcaaacacttgaaaacaaccctgccataatacacggtggaccttttgctaatattgcacacggttgtaattctctaattgctactaaagcaagtttaaaattaggagattatgttgttactgaggctggctttggtgcagatttgggtgcagaaaagtttttagatataaaatgtagaaaatcaggtttgaaacctcactgtgttgttctagttgctacaataagagcacttaaaatgcacggagaagttgcaaaagtagatctaaaaaatgaaaatgtctcagcattaaaaaaaggtcttgtaaatttagaaagacatataattaatgttcgtaaatttggacttccagttacagtagcaataaatcattttattactgactctcaaagcgaggttaatgcagtacttgatttttgcaaaactcaaggtgtgaaagcttcaatgtgtacccattggtcagatggtggaaaaggtgcgactgaattagctcaaaatgttgtggaaatctgtgaagaaaataaaaatacctttaaatttttatacgaagatgatttaccgctattcaaaaaaatagagaaaattggtcaagaaatttatcatgcaagtgaagttgtggcagatacaaaagtaagaaatcagctgaaagattttgaatctaaaggctttggaaaacttccagtttgtatcgcaaagacacagtatagcttctctactgatccaaacttaaaaggagctcctacaggccacgttcttcccgtaagagaagtccgattatcatctggagcggaatttatagtcgttatttgtggggatattatgacaatgcctggttt

SEQ ID NO: 315689 - DNA, 1090 bp, Unknown
  Bacterial polypeptide expressing nucleotide sequence isolated from the Sargasso Sea
aatgagcacattcaaaactgatattgaaatagcaagagcagcaaaaatgaaacctattggtgaggtattgggtaaaattgctgtacctgacgatagctcagcatttagcccaatgggcagacatatagcaaaaattaactttgaatatcttgatacattaaaagataaaaaagatggtaaacttattttggtaacagcaatcacgcctactcctgcgggtgaaggtaaaaccactacttccgtaggcttatcggatggcttaaataaaattggaaaaaaatcaatagtatgtctaagagaaccaagtcttggaccatcttttggaatgaaaggtggtgctgctggcggaggttatgctcaagttgttcctatggagcaaatcaatttacattttactggagattttcatgctattacttcagctcacaatcttttatcagcattaattgacaatcatatttactggggaaacaaacttaacattgatgacaaaaatatagtttggaaaagagttatggatatgaatgaccgagcactaagagctataaatataaatacaaaaggtgttgcgaaagattttccaagagaagatggttttgacattacagttgcttctgaagtaatggcaatattttgtttatcaaataacttaaaagacttagaaaaaaaaatagggaatattacaattgcttacacaaaagataaaaaaccaatttatgcaaaagatttaaatgctcaaggtccaatgactgttttacttaaagaagcaatcagaccgaatgtaacacaaacattagaaaataatccagcatttattcatggaggaccatttgctaatattgcacatggatgtaactccgtaatagctactaaagctgctttaaaactttcagattatgttgttactgaagctggttttggagctgatcttggagctgaaaaatttttagatattaaatgtagaaaagcaaatttaaaaccaagttgcgtcgtaattgttgctacagtcagagctttaaaaatgcatggtggtgttgagaaagataatttaaaaaaagaaaatatagatgctttaaagaaaggattgtaa

SEQ ID NO: 315690 - DNA, 1660 bp, Unknown
  Bacterial polypeptide expressing nucleotide sequence isolated from the Sargasso Sea
tatgtctgacattgagatagcacgaaaagcgactaagaaaaatatttcagaaatcgcatcaaagttaaacttagatcaaaatcatttacatccctttggtcaccatacttcaaaaattgattttaataaaattaaagaaaaaaaagaaaattcaaaattaattcttgttacagctattactccaactcctgctggagaagggaaaacaactacctctgttggtttaagtgatggtttatgcaaaattggcaagcaaagcattgtttgtctacgtgaacctagtcttggcccaagttttggtatgaaaggtggagccgctggaggtggatatgctcaagtagttccaatggaaaatattaatttacactttacaggtgattttcacgcaatcacttccgcaaacaacctactagcttcattaattgataaccatatatattggggaaacaaacttaaaattgatacacgtcgtgtaagttggaaaagatgtgtggatcttaatgacagagctttaagagaaataactgctaatcttggaggtgttgcaaatggatatcctagaacagatggatttaatattacagtagcttcagaagtaatggcaattttttgtttagcaaataacttagaagacttggaaagaagattaggaaatataactattgcatatactagagataaaaaaccagtttttgctaaagacttaaatgcacatgggcctatgacagtacttctaaaagaagcgctgatgccaaatttagtacagacattagagaacaatcctgcaataattcacggaggcccttttgctaatatagcacatgggtgtaatagtattatagcaactaaaacgagcttaaaacttagtgactatgttattacagaagctggttttggtgcagatttgggtgctgaaaaatttcttgatataaaatgccgtaaaggtgacttagttcctagtgctgttgtattagttgccacagttcgtgcattaaaaatgcatggtggagtagataaaaaagacttacaaacagaaaatattgaagcagtaattaagggtacttcaaacttaaaacgtcatatagaaaatatacaaaaatttgggttgcctgtagttgttgcagttaaccattttgttgcggatactgataaagaaattgaagttctaaaaaaagagtgtgaaaaaatcaatattgaagcaattacatgtgaacactggtccaaaggaggcaatggtactttagatttagcaaataaagtagttgagttagctgaccaagagaataactttaaatttatatatgatgaaaatattcaccttattgataaggtcaaaaatatagctaaagaaatttacagagctgatgatataattgcagattctaaaattagagatcaattaaagttatttgaagaacaaggatatggtaattttcctatttgtattgctaaaacccaatatagtttttccactgacccatcattaaaaggagctccaacgaatcattcactaccaattagagaggttcgcttatcaagtggggctgaatttattgttgttatttgcggtgaaattatgattatgcctggtttaccaagtgtccctgcggcagattcaatcaggttaaattcgcaaggagaaattgaaggtctcttttaa

SEQ ID NO: 315691 - DNA, 1678 bp, Unknown
  Bacterial polypeptide expressing nucleotide sequence isolated from the Sargasso Sea
gatgagctataaaagtgatattgaaattgctcgaagtgcagaaaaaaaaccaattcaagaagttggtgctcaccttggaattcctgcagaacatttgttaccttacggtcatgataaagccaaagtaagccaagaatttataaatggtgttcaagataaggaaaatggaaaattaattcttgtaacggccataaatcccacacctgcaggtgaaggcaaaacaacaacaacagttggtcttggcgatggacttaacaaaatcggcaaaaatgccatgatttgtattagagaagcttcgttaggtccaaattttggtatgaaaggcggtgcggctggaggcggacatgcccaagttatcccaatggaagatatgaatttacattttacgggcgactttcacgcaataacttctgctcattcattactttcagctatgattgataaccatatttactggggtaatgaccttggtattgatactcggagagttgtatggcgcagagtggtagacatgaatgacagagcactccgtcagattacagcatctctcggaggaatttcaaatggcttccctcgcgaggcaggctttgacatcacagttgcctcggaagttatggcaattctttgtttagctaaggatctgaatgatttgcagacaaaactgggcaatatgatagttgcctacaggcgtgatcgttctcctgttttttgccgtgatataaaagcagacggagcgatgacagtattgcttaaagatgccatcaaacctaatttggtgcagactttagaaaataatccagcttttgtgcatggagggccttttgccaatattgcgcatggatgcaattccttaatagcaactcaaacagcgcttaagttatctgactatgttgtaactgaggcaggatttggagccgacttaggcgctgagaagtttttgaatattaaatgtcgtaaggcgggtttatcgccagcggttatcgtactcgttgctactattcgtgctatgaaaatgaacggcggggtcgcaaaagaagatttagggcaagaaaatgtcagtgctgtaaagtttggctgtgcaaatttaggttgtcatatagagaatttgaaaagttttggcgtgccggtaatcgtagcaatcaatcattttgtaaaagatactcagaacgaaattgacgcagtgatgcagtttgtcaaaagtcagggttcggaggctattgtttcaaaacattgggaatttggatcagagggttcagtagacttagccaagcgcgtctcagaaatagcagactcagaagtttctgattttgctccaatttatcctgatgaaatgccacttgctgaaaagatacagacgatttgtaaaagaatttatagagctgatgaagctcttatagataagaaaatttacgatcaattaaagcaatgggaagaacagggatacggcgatttgccaatttgcatggcaaaaacacaatatagtttctcaacagaccctaacttgcgtggagcccctacgggacacactgtgcctgttcgggaggtgagaataagtgctggtgccggttttatagttgttgtatgtggagaaattatgacgatgccgggtctgcctcgggttcctgccgcagaatctatatatctcaataagtttggtgaaatagaagggttgttctag

SEQ ID NO: 315692 - DNA, 1099 bp, Unknown
  Bacterial polypeptide expressing nucleotide sequence isolated from the Sargasso Sea
tatggctatactctcagatattgaaattgctagagaaaatagcatggttcctattgaggagattgcctcaaaattagacttaaaggatcaaaatctccaaaaatttggtcatcacatagctaaaattgatgctcaaaatatagaaaataataacaaagacggaaaactcattttagttacagctatttctcctactccagcgggtgaaggcaagaccacaacgtcagttgggcttaatgacggcttaaataaaattggtaaacaatcattagtatgcttgagagaaccaagtttaggaccttgctttggtgtcaaagggggtgctgcaggaggtggttacgcccaagtagttccaatggataaaattaatttacatttcaccggtgatttccatgcgatcacatcagcacataaccttcttgcatcgatgattgataatcatatttattgggggaatgatttaggaattgatacaagaagagtggtttggggacgtgttgtagatttaaatgatcgtgctttaagaaatattaatgttaatttaggaggtatagccaacgggtttcctcgtgaagataaattcgatatcactgttgcatcagaagtgatggcaattttttgtttatctacaagtttggaagatttacaaaatagacttgggaatatcattgttggttatacaagggagaagaaagaaattacagcccgagacttaaatgcagacggtgcgatgactactttgctaaaagatgctttcttacctaatcttgttcaaacactagagaaaaatcctgctatcattcatgggggtccttttgcaaatattgcccatggatgcaattctttagttgctactcaaactgctcttaaattaagtgattatgttgtaacagaagcaggctttggtgcagatcttggagcagaaaaatttttagacataaagtgccgtaaaggaaaattaaatccttcagcaatagtaatagttgcaacagttcgagcgttaaaaatgcatggcggtatggataaaaaagaattaaaaaatgaaaatgttgtagctgtaaaaaaaggattatcaaatttaaagcagcacattgcaaat

SEQ ID NO: 315693 - DNA, 1205 bp, Unknown
  Bacterial polypeptide expressing nucleotide sequence isolated from the Sargasso Sea
tatggcggttcttacagacattgaaatagctcgacaaaataaaatggtacccattgaagaagttgccaaaaaattagatcttgatgagcaatccctgcacaaatttggacatcatattgcgaaacttgatacagataaaatcagtattgattcgaggcatggaaaactaattcttgtaacggcaatctctcctactcccgctggggaaggaaaaacaactacttctgtaggacttaatgatgctttaaacaagattggtaaaaaatctttagtttgtttaagagaaccaagcttaggtccttgttttggagttaaaggaggagctgcaggtggaggatatgctcaagttgttccaatggaaaaaattaatcttcactttacaggtgattttcatgcaattacatcggctcataatttacttgcatcattaattgataatcacatttattggggcaatgatttaggcattgatactagaagagtagtctggggtagagtcgtagatctgaatgaccgagcattaagaaatataaatgtaaatcttggcggtattgcaaatggattcccaagagaagataaatttgatattacggttgcttcggaggtcatggctattttttgtttatctacaagtctaaaagatttacagaatagattagggaatattattatcggctacaccagagatagaaaagaaatactagctcgagagttgaatgcagatggagcaatgacaacgcttttaaaagatgcgttccttccaaatcttgttcaaactcttgaaaaaaatcctgcaattattcatggtggtccttttgcaaatattgcacatgggtgtaattcacttgttgcaactcaaactgctttgaagttaagtgattatgttgtaaccgaagccggttttggtgcagatctcggtgctgaaaaatttttagatattaaatgtagaaaaggaaatcttagtccttcagcaattgcaatagttgcaactgtaagagctcttaaaatgcatggcggtatggataaaaaagaacttaaaaatgaaaatgtagaagctctaaaaaaaggtttatctaacttagaacagcatattattaatatgaaaaaatatggtgttcccgtagcagtggcagttaatcattttatagctgatacagaaaatgaattgaaatgcgttagagaattttgtgagaatttaggagtaa

SEQ ID NO: 315694 - DNA, 1257 bp, Unknown
  Bacterial polypeptide expressing nucleotide sequence isolated from the Sargasso Sea
catgaaatctgatattgaaatagcacaagcagctaaactcgagaagatatcttctgtagcagataagcttgatatcccgcaagacagccttgagccatatggtcactataaagctaaaatctcaatggatttcattaaatcgcttgagtcaaagaaagacggtaaattaattttagtgactgctataagtcctacacctgctggagaaggaaaaacaacaacatctgtgggtcttggtgatgcgttaaatcatattgggaaaaaagcacttgtaacaattagagaaccttcattaggtccagtctttggaatgaaaggcggagcagctggaggaggtatggctcaagttataccaatggaggatattaatcttcattttaccggtgactttaatgcaatccaacttgcaaataatttgcttgcagctatgttagacaatcatatccatcacggcaatgcccttggtattgatgttagaagggtagcatggaaaagagtattggatatgaatgatagggcactaagaaaaactgtttgttcgctgggatctgtcggcaatggttatccgcgtgaagatggttttgatattgttgttgcttcagaaataatggcaattttttgtctcgcaacctcaatcaaagatttaaaagaaaaacttggaaatatagtagtagcttattcaagaacaaaagaaccaatattggctaaacaattgaatgcccacggagctatgacagtgttgctaaaaaatgcgcttagtccaaaccttgttcagactctagaaaataacccagcaatgatacatggtggaccatttgcaaatattgcgcacggttgtaattctgtgatagcaactaaagcatcattaaaacttgcagattatgtagtaactgaagcaggttttggagcagatttaggtgcagagaaatttttagatattaaatgccgcaaggctaatcttaaaccttctgttgttgttcttgttgccacaataagagcattaaaatatcatggtggttgtgaacttgaaaaccttaatcaagaaggttgcgaattcctagaaaaaggcttagtcaatttggaaagacatgtcaataatctaaagaaccattacgggttaccggtagtagttggtataaatggatttagttttgatacagacaaagaaagggagattctgcaaaataaatcaaatgaattaaatgttcctatagtgtcttctacacattgggctgatgggggagctggcgcgaaaga

SEQ ID NO: 315695 - DNA, 1556 bp, Unknown
  Bacterial polypeptide expressing nucleotide sequence isolated from the Sargasso Sea
tgacctctcaatcaatgatgaaaaacttaaggactctaagaatggtaagttaattttagttaccgcaatttctcctacgcctgcaggagaaggaaaaactacgacaagcgttggtcttgttgatgggctttgtcatattggcaagaatgcaatgatctgtcttagagaaccgagtttaggaccatgttttggaatgaaaggcggtgctgcaggaggagggcatgcccaagtcataccaatgactgacattaacttacattttacaggagattttcatgccataggagcagcccacaaccttctttctgcactcatcgataatcacattcactgggacaatcaattagatattgatcccagaagaattacttggaagagagtggttgatatgaatgatcgatcgttaagagatattacatgcggtcttggcggggttggcaatggcatacctagacagagtggttacgacattacagttgcttcagaaatcatggctgttttttgtcttgcatcagacattgatgacctaaaaaagagaattggtaatatggtcataggctactcaagatccaacgaacccataagagcaaaacaactgaatgccgatggagcgatcaccgctttactaaaagacgcattccaaccaaacttagtgcaaactcttgaaaataatcccgcgtttatacatggcggacctttcgccaatatcgcgcatggatgcaattcagttgtttcaactaagctcgcactaaaacttgccgattatgtggtcacagaggctggttttggagccgatttaggcgctgagaagtttttcgatatcaaatgcagaaaatcaggtctaaagccagacgcagttgttctagtcgcgacgacaaaggctctaaaaatgcatggaggcattgccaaagataatctgggtggcgagaacgtggatgcggtaaccaagggttgcaagaacctcgaaaggcacattgaaaacatcagaaaatttggggtccctgtcattgttgcaatcaatgactatgtgactgatacaaaagacgaacatgacgcaataataaattactgcaaagaaattggtgtcgagtgcagaatttcctcgcattgggaaaaaggcggtaagggcgcatcggatctagcagaagaggtggtcaaaattgctgactccgattcttctgaatttaaacctttatacgacaataaaatgtctctgtgggataaaaccgaatacatagcaaaaaacatttacggtgcatcagaaatcattgcagataagaaagtaagaaatcaatttaagaaattagaagacgatggatttggtgaatacccaatatgcatggcgaagactcaatacagtttctcaacggatccattattaatgggtgctccttcgggacatgacgttccgatcagagaagtaagactctctgctggcgcagaatttatagtcgttgtttgcggtgaaattatgacaatgccaggattgcctagaataccagcagcagagggtattgatgttgacgatgaaggattgattcagggtctgttttaat

SEQ ID NO: 315696 - DNA, 847 bp, Unknown
  Bacterial polypeptide expressing nucleotide sequence isolated from the Sargasso Sea
tattgcgcatggttgcaattctgtattagcaactaagactgcattaaaactatcagactatgttgttactgaagcaggctttggtgcagatttaggtgctgaaaaattcttagatataaaatgtagaaaatcaggattaaaaccaagttgtgtagtgattgttgcaactataagagctttaaagatgcacggtggtgttaagaaagatgaactaaagaatgaaaatatagatgctgtaaaaaaaggattagtgaatctagaaagacatattgaaaatattcaaaaatttggcttaccagtcacagtagcaattaatcactttgttttagacacagacaaagaagtcgatgaagttataaagttttgtaaacaaaaaggtataacagcatcaatatcaaaacattgggaaaaaggtggtgaaggagcagtagaattagcaaacaaagtagttgaacagtgtgaaaaagaaagtgaattcaaatttttatacaatgataaaacgtcgttatttaaaaaaattgagacaatagctaaagaactatacagatcaagtgaagttgttgcagattctaaaataagggatcagttaaaaaattttgaagaatcaggttatcaatccttaccaatttgtattgctaagactcaatatagtttttccacagacccgaatttaaagggcgcaccttctggacatgctctaccaattagagaggtaagattatcatcgggagcagaatttatagtagttgtttgcggtgcaataatgacaatgcctggtttaccaaaggtgccagctgcagataaaataaggataaatgataaaggggaaacagaaggtttattttag

SEQ ID NO: 315697 - DNA, 925 bp, Unknown
  Bacterial polypeptide expressing nucleotide sequence isolated from the Sargasso Sea
atgactgcctatccaagtgatttagagatagcgaatgctgctcataaaaaaccaattgatgaaatagcttcatcaataggtattgatcaaaaaaacttaattaaatttggtgatgacaaagctaaattaaattctgactttattgattctatttcaaaaaataaaaatggaaaattaattttggttacggcaatatctccgacaccagcaggagaaggaaaaacaacaacaagtgttggattggttgatggattatgtcacataggtaaaaaagcaataatttgtcttagagaacctagtttgggaccatgttttggcatgaagggaggtgcagcaggaggtggttacgctcaggttataccaatgactgatattaacctacactttactggagattttcacgcaataggggcagctcataatcttttatccgcattaatcgataatcatattcattgggataatgaactaaatattgaccctagaagaataacttggaaacgagttgtagatatgaacgacaggtccctgagagacattacatgtggtctaggtggaacgggtaatggtgtaccgcgacaaagtggatttgatattactgttgcgtcagagataatggcagttttttgcttggcatctgacattgaagatcttcaaaaaagaattggtaacattgtcattggttataccaagtcaaatgaaccagttagagcaagccaacttaatgcagatggtgcgttaaccgcattgcttaaagatgcttttcaaccaaatttggttcaaactttagaaaataatcctgctttcatgcatggaggtccatttgcaaatattgcccatggttgcaattcggtcgtttcaacaaaaaccgcattaaagctagcggattacgtaattaccgaagctggatttggagcagactagg

SEQ ID NO: 315698 - DNA, 760 bp, Unknown
  Bacterial polypeptide expressing nucleotide sequence isolated from the Sargasso Sea
tacagtagcatctgagataatggctatcttttgtttagcaaatgatcttgaagatttggaaaagagaataggtaatattacagttgcttatactagagatagaaagcctatttttgcaaaagatttaaatgcccatggaccaatgactgttttgttaaaagaagcaattagacctaatgtaactcaaactttagaaaataatccagcaattattcatggtggtccttttgcaaatattgcgcacggttgtaactctgtaatagcaactaaagcaggtttaaaactagctgattatgttgtaactgaagctggatttggagcagacctaggagcggaaaaatttttagatattaaatgtagaaaatcaaatttaaaacctgagtgtgtagttattgttgcaacaattagagcattaaaaatgcacggcggtgtagctaaagatgatttaaaaaatgaaaatgtagacgcgttaaaaaaaggtttggtaaatttggaaagacacattgaaaacgtaaaaaaatttggtttaccggtagcggttgctgttaatcattttgttgccgatactgataatgaagtaaaagagttaataaatgcttgtgataatatgggagttaaagctactttatgtactcattggtcaaatggtggtgaaggaacaaaagaacttgccacacatgttgtagatttaattgatcaaaaacaagcaaattttaaatttttatatgatgaaaaaacacctttacttaaagaaagttga

SEQ ID NO: 315699 - DNA, 1489 bp, Unknown
  Bacterial polypeptide expressing nucleotide sequence isolated from the Sargasso Sea
aatcactccaactcctgctggggaaggtaaaacaactacttctgttggattgaatgatggacttaataaaattggaaaaaaatctattgtctgccttagagaaccaagtcttggtccatcgtttggtttaaagggaggtgctgctggaggaggatacgctcaggtcgttcctatggaacaaataaatttgcattttactggtgacttccacgcaataacatctgcgcacaatttattatcagctctaattgacaatcacatttactgggataacaaactaaacatagacgtaagaagagtttcatggagaagagtgatggatatgaacgacagatctttaagatcaataattgttgatctaggtggtgtagcaaatggatatccgcgtcaagatagttttgatataactgtagcttcagaattaatggctatattttgtttagcaaatgatttgaaagatttagaaaatagaattgcaaatattacaataggatatactagagataagaaaccaatttatgcaaaagatttaaatgcccaaggcccaatgactgttcttttaaaagatgcaattagaccaaatgtatctcaaacattggagaataatcctgcaataattcatggaggtccttttgccaatattgctcatggatgtaactctgttatagcaactaaagcaggattgaatttagctgactatgtagtgactgaagcaggttttggtgctgaccttggtgcagaaaaatttttaaatattaaatgtagaaaatcaggaataaaaccagattgtgtagttattgttgcaacaattagagcccttaaaatgcatggtggactaagtaaggacgaacttaaaaatgaaaatgttaatgctcttaaaaaaggattagtaaatttagagagacacattaacaataccagaaaatttggtatacctgttacaattgctgtaaatcattttataactgatacagataaagagatgaaaacattgctggacttctgtaaaacacaaggcgtcaaagcatcaaaatgtacccattggtcaaacggaggagaaggtgcgacagagcttgctgaaaacgttgtagaaatttgtaaagataatcaaacaacatttaaatatttgtatgaagataatttaagcttatttaaaaaaatcgaaaaaatagctcaggaaatttatcatgcaagcgaagtagttgcagatacaaaagtaagacaacagctaaaagattttgaagaaaaaggttatggaaaacttcctgtatgtattgcaaaaactcaatatagtttctctactgatccaaatttgaaaggtgctccaactggtcatgtgctaccagtaagggaagttcgtttatcatctggagctgaatttattgttgttgtgtgtggagaaataatgactatgccaggcctaccacgcgtacctgctgctgactctataaaacttaatgacaaaggtgaaatagaaggtctattttaa

SEQ ID NO: 315700 - DNA, 964 bp, Unknown
  Bacterial polypeptide expressing nucleotide sequence isolated from the Sargasso Sea
aaagatttaaatgcccaaggtccaatgacagtgttgcttaaagatgcaattagaccaaatgtaactcaaactttagaaaataaccctgcaataatacatggaggtccttttgctaatattgctcatggatgtaattctgttttagcaacaaaaacaggattaaaactatctgattatgtagtcactgaagctggctttggtgctgacttaggtgcagaaaagtttttagatattaaatgtaggaaatcaggactaaaacctgactgtgtagttattgttgcaacagttagagctcttaaaatgcacggcggattaaacaaagatcaattaaaaaatgaaaatgttgatgctttaaataaaggtttggtaaatttagaaagacatatcaacaacattaagaaattcaagttgccagttacagtagcaataaatcattttgttttggataccgagaatgagatcaattcaataattaatttctgtaaaaaaattaatgtaaaagcatctgtatgcaaacattgggaaaaaggaggcgatggtacaaaagaattagccaatgatgttgtggatttatgtgaacaaaaaaatgaatttaaatttctttataatgatgacgtccctttatttaaaaaaattgaaacaattgctaaagagctttatgcagctagtgaagtagttgctgatacgaaagtaagagatcaacttaaaaacttccaagaaaatggttatcaaaaattaccaatctgcatcgcaaaaacccagtatagcttctcaacagatccaagtcttaaaggagccccttccggacatgttttaccaattagggaggtaagattatcttcaggagctgaatttatcgttgttgtatgtggatcaattatgacaatgccaggactgccgagagtacctgcggctgactcaataaaaataaatgacaaaggtgatacagaaggattattttaat

SEQ ID NO: 315701 - DNA, 1312 bp, Unknown
  Bacterial polypeptide expressing nucleotide sequence isolated from the Sargasso Sea
ataaatcttcatttcactggagattttcatgcaataacatcagcacataatttgttatctgcaatgattgacaatcatatttactggggaaacaaacttaatattgatgaaaaaaaaatagtttggaaaagagtgatggatatgaacgatcgtgctttaagatttattgacattaacaccagtggtgttgcaaaagattttaaaagagtagatggttttgatataactgttgcttctgaagtcatggctattttttgtttggctaaaaacttgaatgatttagaaaaaaaaattggaaatataactatagcttacaataaagataatcagccaatttttgcaaaagatttaaatgcccacggaccaatgactgttcttttaaaagaagcaataagacctaatgttacccaaagcttagaacataacccagctattattcatggaggtccattcgctaatattgctcatggatgtaattctgttattgctacaacggcagctcttaagctatcagactacgttgttactgaagccggatttggtgcagaccttggtgctgaaaaatttttagatataaaatgtaggaaggcaggattaaaacctagctgtgttgtaattgttgcaactattagagcattaaagatgcacggaggtgtggaaaaagaaaatctaaaaaaagaagatacagcctctttgaaaaaaggtttaattaatttagaaagacatatcttaaacattaaaaaatttggtctagagccaattgttgcaattaatcattttgctttagatacaaaaaaagaaatagatgctgttctcaatttttgtaaagatatgaaagttcaggtcagtgaatgtaaacattggtcgatgggtggcaaaggtacaactgatctggctaaaaaagttgtcaaaatatgtaaagactcaaagaaaagtaattttaaatttttgtacgaagatagtttaaatctttgggataaaattgaaaaaattgttaaagaaatttacagaggcgatagggttattgcaaatgaagatgtaaaagaaaaacttaaagtttttgagaataacggctataagaatttacctgtttgtatagctaaaacccaatatagtttttcaactgatccaaagttaaaaggagctccatcaaatcatgaaattccaattagagaagtgagattatcatcaggagctgagtttattgtggttatttgtggatcaattatgaccatgcctggtctacccaaagtgcctgcagctaataatattaagctaaacaaaaaaggtgacgttgagggactattttagt

SEQ ID NO: 315702 - DNA, 1465 bp, Unknown
  Bacterial polypeptide expressing nucleotide sequence isolated from the Sargasso Sea
gaaggaaaaacaacaacttctgttggattgtcagatggtttaaataaaataggtaagaaatctattgtttgtttaagagaaccaagtctaggtccttcttttggaatgaaaggtggagctgctggcggtggatatgcccaagtggttcctatggaacaaataaatcttcattttactggagactttcatgcaatcacatctgctcacaatcttttatctgcattaatagataaccatatatattggggaaataaattaaatatagatgtcagaagaatagtttggaaaagagttctcgacatgaatgatagagctttaagatctataaatattaatcttggtggtgtcgcgaacggatttccaagagaagatggttttgatattactgttgcttcagaaataatggcaatcttttgtctatcaaatgatttacatgatcttgaaaatagaattggtaatattactgttgcctatactagagataaaaaaccgatatatgcaaaagacttaaatgcacatgggccaatgactgtattgttaaaagatgctatcagaccaaacgtaacacaaactctggaaaataatcctgcaataattcatggcggaccatttgcaaatattgctcatggatgtaattctgttttagcaactaagacagcattaaaactctctgattatgtagtaactgaagctggttttggtgctgatctaggtgcagaaaaattcttagacattaaatgtagaaaatcaggattaaaaccaagttgtgttgtcatagttgcaactataagagctctgaagatgcatggaggagttaaaaaagacgaattaaaaaatgaaaacgtagatgcagtaaaaaaaggattagttaatctagaaagacatattgaaaatatacaaaaatttggattaccagtaacagtggctataaatcactttgttttagatactgataaagaagttgctgaagttactaatttttgtgaacaaaaaggggttaaagcctctatatcaaagcattgggaaaaaggtggagaaggtgcaattgatttagcaaatgatgtggttgggctatgtgaaaaagatagtgattttaaatttttatatgatgataaaatatcattatttaaaaaaatagaaacaattgctaaagaactttatagagcaagcgaagtagttgcggatactaaaataagagaacaattaaaagctttcgaagaaagaggttaccaatcattaccaatttgtattgcaaaaactcaatatagtttttctactgacccaaatctaaaaggagcaccctcaggacatgtattgccaataagagaggtaagactatcttctggagcagaatttatcgttgttgtatgcggtgcaataatgacaatgccaggattaccaaaagtaccggcggctgactcaattcgtattaatgaaaaaggtgaaacagagggtttattttaaa

SEQ ID NO: 315703 - DNA, 1003 bp, Unknown
  Bacterial polypeptide expressing nucleotide sequence isolated from the Sargasso Sea
gtagcttacacaagagagaaaaaaccaatatatgctaaagatttaaaagcacagggacctatgactgttttgttaaaagaagctataagaccaaacataactcaaacattagagaataatcctgcaataattcatggtgggccttttgctaatattgcacatggttgtaattctgtaatcgcaactaaagctggacttaaattagctgactatgtggtaactgaagctgggtttggtgcagatcttggtgctgaaaaatttctagatattaaatgtagaaaatctgatttaaaaccaagttgtgtggttattgttgctacaattagagcattaaaaatgcatggtggtgtaaccaaagatgatcttaaaaatgaaaacgttgaagcactaaaaaaaggtttgatcaaccttgaaaggcatgttgaaaatgtaaaaaaatttggtcttcctgtagcgatagctgtaaatcattttataaaagatactgacgatgaggtaaaagctttagttgatttttgtaataaattaggaataaaggcaagtctttgtactcactgggcaaatggaggagaaggtacaaaagaattagcttcacatgttgctgatttatgtgaaaaaaatgaaaataaatttaaatttttatacgaaagtaagacaccattgtttaaaaaaattgaaacaatagcaaaagaaatttacagagccgatgaagttattgctgatacaaaaattagagatcaacttaaaagttttgaagaagcaggttatggagaattaccaatttgtgtagctaaaactcagtacagtttttcaactgatcctaatctcaaaggtgcacctacaggtcactcattaccaattagagaaataaggctttcctcaggagctgaatttatagttgttgtctgtggagcaataatgacaatgcctggattaccaagggtaccagcagcagactctattaaacttaataaaaaaggtgaaatcgaagggttattttaat

SEQ ID NO: 315704 - DNA, 1444 bp, Unknown
  Bacterial polypeptide expressing nucleotide sequence isolated from the Sargasso Sea
tggtcttggcgatgggcttaacaaaatcggcaaaaatgccatgatttgtattagagaagcttcgttaggtcccaattttggtatgaaaggcggtgcggctggcggagggcacgcccaagttattccaatggacgatatgaacttacattttacgggtgacttccacgcaataacttctgctcactcattactttcagctatgattgataatcatatttactggggtaatgaccttggtattgatactcgaagagtcgtttggcgcagggtggtagacatgaatgacagagcacttcgtcagataacagcatccctgggaggtgtttcaaatggtttcccacgcgaggcgggctttgacatcacagttgcctcagaagttatggcaattctttgtttagccaaagatctaaatgatttgcagacaaagttgggcaacatgatagttgcttacaggcgtgatcgttctcctgttttttgtcgtgatataaaagcagacggagcgatgacagtattgcttaaagatgccattaaacctaatttggtgcagactttagaaaataatccggcttttgtgcatggagggccttttgccaatattgcgcacggatgcaattccttaattgcaactcaaacagcgcttaagttatctgattatgttgtaactgaggcaggatttggagctgacttaggcgctgagaagtttttgaatattaaatgtcgtaaggcgggtttatcgccatcgcttattgtgctcgttgcaactattcgcgctatgaaaatgaacggtggagttgcaaaagaagatttaggacaagaaaatgtcagtgctgtaaaatctggctgtgcaaatttaggttgtcatatagagaatttgaaaagctttggcgtcccggtaatcgtggcaattaatcattttgtaaaagatactgaaaatgaaattgatgcggtaatggaatttgtcacaagtcagggttcggaggctattgtttcaaaacattgggaatttgggtcagaaggttcagtggatttggctaggcgcacctcagaaatagcagattcggaagtttctgattttgctccaatttatcctgatgagatgccacttgctgaaaagatacagacaatttgtaaaaaaatttacagggccgatgaagctcttatcgataagaaaattcatgatcaattgcggcaatgggaagaagaaggatatggcgatttgccaatttgtatggcaaaaactcaatacagtttttcaacagaccctaatttgcgtggagccccaacggggcatactgtgcctgtcagggaagtcagaataagcgcgggtgccggttttatagtcgttgtatgtggagaaataatgacgatgccgggtctgcccagagttcccgcagcagaatctatatatctcaacaagtttggtgaaatagaagggttgttctag

SEQ ID NO: 315705 - DNA, 1137 bp, Unknown
  Bacterial polypeptide expressing nucleotide sequence isolated from the Sargasso Sea
tggtagatctaggaggtgtagcgaatggatatcctagacaagatggttttgatattacagttgcttctgaaataatggccatcttttgcttatcaaatgatttaaaagatttagaaaatagaattggaaatattacagttgcgtacactagagataaaaaaccaatttacgctaaagatttaaatgctcatggaccaatgactgtcctattaaaagatgcaattagacctaatgtgacacaaacattagaaaacaacccagcaataatacatggaggaccgtttgcaaatattgctcatggatgtaattctgttattgcaacaaaaacaggattaaaattagcagattatgttgtaaccgaagctggttttggtgctgacttaggagctgaaaaatttatagatataaaatgtagaaaatcaaatttgaaacctgattgtgtagttattgttgcaaccataagagctttgaaaatgcatggtggtgtagctaaagatgatcttaaaattgaaaatgttaaagctttaaataaaggattagtaaatcttgaaagacatattaataatgttagaaaatttggtttaccagttgcagtggctgttaaccactttatcacagataccgataaagaagttagtgcacttatggacttttgtaaaacacaaggtgtaaaatcatctatttgtaaacactggtcagatggaggggaaggtacaaaagatctagcgaatattgttgtagatatatgtaataacaaaaatacttttaaatttttatatgaagataaaatacctttatttaaaaaaattgaaacaatcgcacaagaaatttatcatgcaagtgaagtagtggctgacacaaaaataagagatcaacttaaagattttgaatcaaaaggttttggaaatcttccaatatgtattgctaaaactcaatacagtttttcaactgacccaagtttaaaaggtgctccttcagggcatgtggttccaataagagaagtaagattgtcttcaggagcagaatttattgttgttgtttgtggagcaataatgacaatgccaggtcttccaagagttcctgctgcagattcaattaagttaaatgataaaggtgaaatagaaggtttattttaat

SEQ ID NO: 315706 - DNA, 1325 bp, Unknown
  Bacterial polypeptide expressing nucleotide sequence isolated from the Sargasso Sea
taccacatcagttggattaagcgacggtcttaataaaattggcaaaaagtcaattgtttgtttaagagaaccaagtcttggtccatcttttggaatgaaaggtggtgcagctggtggtggttatgctcaagtcgttccaatggaacaaatcaatttacattttacaggtgactttcatgcaattacttcggcgcataatttactttcagctcttatagataatcatatctattgggggaataaacttaacatagatattagaagagttgtctggaaaagagttatggatatgaatgatagatcattaagatctattgttgttgatttaggtggtgtcgcaaatggttaccctagacaagatggttttgacataactgttgcctcagaaattatggctatattttgcttagctacagatttacaagatttagaaaaaagaattggaaatattacaattgcatacactagagataaaaaggctatttatgcaaaagatttaaatgctcaaggtccaatgactgtgcttttaaaagaagcgattaggccgaatgtcacacaaactttagaaaacaatccagctattattcatggtggaccatttgctaatatagctcatggatgcaactcagttatagcaacgaaagctggtttaaaattatcagattatgttgtaactgaagcaggttttggtgctgatcttggtgcagaaaagtttttggatataaaatgtagaaaatctggaattaaaccagattgtgtagttattgttgcaactataagagcacttaaaatgcatggaggagttgcaaaagatgatttaaaaaaagaagatgtagaagcattaaaaaaaggattaattaatttagaaagacacattaataatacaagaaaatttggactcccagttaccattgctgtaaatcattttattactgatacagataatgaaatgaatgcactgcttgatttttgtaaaactcaaggagtaaaagcttcaaaatgtacacactggtctaacgggggagaaggaacaaaagaactagcaaataatgtagccgaaatctgtgaggaaaataaaaatacttttaaatacttatatgaagataaattatcattgtttaaaaaaatagaaaaaatcgctcaagaaatttatcacgcaagtgatgtagttgctgatactaaagttagacaacaattaaaagattttgaagagaaaggttatggcaaccttccagtatgtattgctaaaactcaatacagcttttcaacagatccaaatttaaaaggagcgccaactggtcatgttttgccagttgagaagtaag

SEQ ID NO: 315707 - DNA, 721 bp, Unknown
  Bacterial polypeptide expressing nucleotide sequence isolated from the Sargasso Sea
attgaatcttccaaagaactataatcctctagatatttatttgaaaataagaaggaaattaagagctccctttggaggaataataataaataacgataattataaagaggctgtattatctacctcgccagaaagatttataaaaatagataataaaaattttgtagaatcaagacctatcaaaggaactagatccagagataaagatttaaatcaagacgcacttaatgctatcgatttaataacgaacgaaaaagatagagccgaaaatattatgattgttgacctaataagaaatgatttaagtaaagtttgcgaaacaggaagtattatggtgccagaaatattaaaacttgaaagtttcttaaaagttcatcatctaacttcagtaatcagaggcaaattaaaaaaagacaagaactggattgatttactaaaagcttgttggcctgggggctctataactggagcacctaaattaagatcatgccagagactttttgaattagaagaatgtgaacgcggaccatactgtggctcatttttgaagcttgactggaatggagagtttgacagcaatatactaataagatcatttttaattaaagacaaaaaaatcaatatatatgctggttgcggaatagttattgactcaaaccctgaagaggaaactgatgaactaaagtggaaacttttaccgttaattgattcactaaaatga

SEQ ID NO: 315708 - DNA, 358 bp, Unknown
  Bacterial polypeptide expressing nucleotide sequence isolated from the Sargasso Sea
gagtcttagttcggcaacaattaaaatttcaggtataaatggaattgctctaacaaaattagatgttttggatgaattagatgaaattaaaatttgtattggatatgatttgaaaggtaataagatagattatttaccagctgctgttgaggatcaattgaaagtaaagccgatttacaagaactttaaaggctggaagacctctacaaaaggtataaaatcttttgaagatcttcctaaaaatgctcaagaatacgttaaaggtttagaaaaatttatagagacaaaagtagcgagtatttcaacaagtcctgaacgaaaagacactattttgatagaaaatcccttttcaatttaa

SEQ ID NO: 315709 - DNA, 355 bp, Unknown
  Bacterial polypeptide expressing nucleotide sequence isolated from the Sargasso Sea
cctcgtaagacaaactctaaaaatttcaggaattgatggaattgccttaactaaattagatgtgctagatcagctagatgaaattaaaatgtgcattgcttatgagataaatggtaaaaaatatgactaccttccagcctcagtggatgaccaatttatggctaagccaatatataaatcgtttaagggttggaaatcttcaaccaagggtataaaaaaatttgaagaactaccccactatgcaaaaaattatataaaagaattggaaaaatttgtagagaccagaatttcaagtatttcaactagcccagagagaaatgatacaatcttaattcaagatccttttaatgtttaa

SEQ ID NO: 315710 - DNA, 83 bp, Unknown
  Bacterial polypeptide expressing nucleotide sequence isolated from the Sargasso Sea
gatgaataatgtagtcgtagttggatcgcagtggggagatgaaggaaaaggtaaaatagttgattggttatccagcgaagcag

SEQ ID NO: 315711 - DNA, 351 bp, Unknown
  Bacterial polypeptide expressing nucleotide sequence isolated from the Sargasso Sea
tgaagcaaacaattcaaacttctggaattgatgggatagctttaactaagctagatgtacttgatgattttgatgaaataaaaatttgtatagcttacgatttaaaaggaaaaaaaatagaccatttgccagcatcatctgagcaacaattaaaagttaagcctatctataaaaactttaagggctggaaatcttctacatgtggaataaagaaattttctgaacttccaaatcaagcacaaatctatattaagtttattgaggaatttgttggagcaaaagtttcagcaatatctacgagtcctgagagaaatgacacaatacttattgaggatccatttaaggtttaat

SEQ ID NO: 315712 - DNA, 99 bp, Unknown
  Bacterial polypeptide expressing nucleotide sequence isolated from the Sargasso Sea
aatgaaaaatgtagttgttattggttctcagtggggagatgaaggaaaaggaaagattgttgactggctttcaagcgaagctgatattgttgtaagatt

SEQ ID NO: 315713 - DNA, 205 bp, Unknown
  Bacterial polypeptide expressing nucleotide sequence isolated from the Sargasso Sea
ttcaaaaaattaaaaggtggcaaatgttcaactgcggattgcagaaaactatctgatctcccagagaatgctatgaattatctaagatttttagccgaattaatggaggttccaattgccattgtctcgttgggggcaaatagagatcaaactatagtaattgaagacccaatacatggtcctaaaagagcattgctaaggtaat

SEQ ID NO: 315714 - DNA, 91 bp, Unknown
  Bacterial polypeptide expressing nucleotide sequence isolated from the Sargasso Sea
atgaaaaatgtagttgttgttggttctcaatggggcgatgaaggcaaaggaaagattgtcgattggctttcaagcgaggcagatatagtaa

SEQ ID NO: 315715 - DNA, 515 bp, Unknown
  Bacterial polypeptide expressing nucleotide sequence isolated from the Sargasso Sea
tgggcctttaaattttgatgaagttgttggtgtaaccaaagcctacatatctagagttggtactggtcctttcataactgaacaagaaaatgaaattggtgattacatgattgaaaaaggggctgagtttggaacagttactggaagaagaagacgttgtggatggctagatttagtttcattacagtattcgacaaggattaattctctaagtcaattatttattacaaaattagatgttttaagtggccttgaggaaatcaaggtatgcgttggatacagctttgaagataaaaaaattacatactatccattagttgatgagatattagataagtgtgaacctatttatgaatcatttaagggttgggatgaagatatttctggaattataaaatatgatgaacttcctgaaaatgctaaaaaatatattgaatttattgaagatttcatcgatgtgccaattaaatatatatctgttggaccagagagaaaccaaaatataattagataaa

SEQ ID NO: 315716 - DNA, 116 bp, Unknown
  Bacterial polypeptide expressing nucleotide sequence isolated from the Sargasso Sea
aactgcacagatttcaggtattgacatgattgcattaacaaaattagatgttttggacaccttcgaaaagattaatatctgcgtcgggtatgaattagattggaaaagagattgat

SEQ ID NO: 315717 - DNA, 373 bp, Unknown
  Bacterial polypeptide expressing nucleotide sequence isolated from the Sargasso Sea
tggatggttcgacggtgttttggtacgacaaacaattaaaatttctggaattgatggcattgcccttacaaaactcgatgttttagatgaactagatgaaattaagatatgtgtagaatacgaactaaatggaaaaaaaatagattatcttccagcagcagttgaagatcaacttaaaatcaaacctatatataagacattcgatggatggaagacttcaaccagcggagtcaaaaatattaatgacctccctgagaatgctaaaaaatatctatttgcaattgaagactttattggagcaaaaatatcaagtatatcaactagccctgaacgggatgatacaatcttagttgaaaatccttttgaggtttaa

SEQ ID NO: 315718 - DNA, 334 bp, Unknown
  Bacterial polypeptide expressing nucleotide sequence isolated from the Sargasso Sea
taagatttcaggcattgatggaatagcattaacaaaattagatgtattagatgaacttgatgaaataaatctttgtgtagcttatgaactaaatggtaaagaaatagactattttcctgccgccgtagaagatcagttaaatgtcaaaccaatttataaaacattcatgggttggaaatctaaaactcaaggaataaaaaaatttgaagatttacccgataatgcaaagatttatgtaaaagctgttgaagagttcattgagacaaaaatatccagtatttcaacaagcccagagagaacagataccattcttttaatagatccatttaagtaa

SEQ ID NO: 315719 - DNA, 287 bp, Unknown
  Bacterial polypeptide expressing nucleotide sequence isolated from the Sargasso Sea
gcttgtcagacaaacaataaaaatttcaggtataaatggaattgctttaacaaaacttgatgtattagacgaactagatgagattaaaatgtgcatagcttataaaatcaatggtaaagaaattgattatttaccaacaactattgaagatcagaaaaatgttgaaccaatttacaaaacttttaaaggatggaagtcgtctacaagtggaataaaagaatttaataaactgcctcaagaggctaaaatttatattaatgaattagtaaagttttatagagtctaag

SEQ ID NO: 315720 - DNA, 346 bp, Unknown
  Bacterial polypeptide expressing nucleotide sequence isolated from the Sargasso Sea
aatgaattttggagcaactacgggtaggcctagaagatgtgggtggctcgatcttgttgctttaaaaaaggctatttttataaattctgttgacagtttatgtatgaccaaagctgatgtgcttgatacttttgaaaatataagtgtttgcgtagcttatgatgacaacaacttaccgatctataagagattcgaagggtggcaagaggataccagtcaatgcagttcatatgacgaacttccaaaaaaattaaaagattatataaaattcattgaggaaactgttaactgcaaagttagcataatctctgttggcccttctagagagcaaagcatacatttataa

SEQ ID NO: 315721 - DNA, 157 bp, Unknown
  Bacterial polypeptide expressing nucleotide sequence isolated from the Sargasso Sea
ctattctgatctcccagagaatgctatgaattatctaagatttttagctgaattaatggaggtaccaattgccattgtctcgttgggggcgaatagagatcaaactatagtaattgaagacccaatacatggtcctaaaagagcactgctaaggtaa

SEQ ID NO: 315722 - DNA, 673 bp, Unknown
  Bacterial polypeptide expressing nucleotide sequence isolated from the Sargasso Sea
aataagaaaaaaattaagagctccctttggaggaataataataaataataattataaagaggctgtattatctacctcgccagaaagatttttaaaaatagataataaaaattttgtagaatcaagacctatcaaaggaactagatccagagataaagatttaaatcaagacgcacttaatgctatcgatttaataactaacgagaaagatagagccgaaaatattatgattgttgacctaataagaaatgatttaagtaaagtttgcgaaacaggaagtattatggtgccagaaatattaaaacttgaaagtttcttaaaagttcatcatctaacttcagtaatcagaggcaaattaaaaaaagacacgaactggattgatttactaaaagcttgttggcctgggggctctataactggagcacctaaattaagatcatgccagagactttttgaattagaaaaatgtgaacgcggaccatactgtggctcatttttgaagcttgattggaatggagagtttgacagcaatatactaataagatcatttttaattaaagacaaaaaaatcaatatatatgctggttgcggaatagttattgactcagacccggaggaggaaactgatgaactaaagtggaaacttttaccattaattgattcactaaaatga

SEQ ID NO: 315723 - DNA, 187 bp, Unknown
  Bacterial polypeptide expressing nucleotide sequence isolated from the Sargasso Sea
aaccttcgctgaaaaactgaaagaagtgatggaatatcacaacttccagctggtgaatttctataaagttgaagcagttgactaccagaaagtgctggatgatgtgatggctatcgccgacatcctgacctcgatggttgttgatgtttccgatctgctggaccacgcgcgtaagcgtggcgatttc

SEQ ID NO: 315724 - DNA, 257 bp, Unknown
  Bacterial polypeptide expressing nucleotide sequence isolated from the Sargasso Sea
tatgaacaattttatagaaaatgttgatatttgtattggattgtgttggggtgatgaaggaaaaggtaaaattgtatctcaacttataaaaagtaataattataattttgtttgtaggtggagtggtagtagtaatgcgggacacactatatatattgataaatcaaaatacagcactcacataattccagcaggtattttttacaatgtaccttctattataggtccagattgttatataaatgaaacagaattta

SEQ ID NO: 315725 - DNA, 103 bp, Unknown
  Bacterial polypeptide expressing nucleotide sequence isolated from the Sargasso Sea
atgaaaaatgtagttgtcgtaggaacacaatggggagacgaaggtaaaggaaaaattgtagactggttatctagtaaagcagatgttgtaataagatttcaag

SEQ ID NO: 315726 - DNA, 91 bp, Unknown
  Bacterial polypeptide expressing nucleotide sequence isolated from the Sargasso Sea
atgaaaaatgtagttgttgtaggttcgcagtggggagatgagggaaaaggaaaaatagttgattggctatctcgagaggcagatgtagttg

SEQ ID NO: 315727 - DNA, 440 bp, Unknown
  Bacterial polypeptide expressing nucleotide sequence isolated from the Sargasso Sea
aattgaatatccaaaagcttatgcaacaagagtcggagaagggccatttcccactgaagtttttgatcagattctcaaagagatctcgtctcgaggaaatgaattcggagcaacaactggaagaccaagacgctgtggttggctggatcttgtattactcaaaaaagcaatttttttgaattctgttgattcattatgtcttacgaagattgatattcttgatagttttgaggaaataaatctttgtattgactacaaagacaacaaacctatatataaaaggtttgatggttggatgcaaaatacatctcaaataaagaaatatgatgatttaccccaaaagttaaaagaatatatatcctttattcaagattttactaaaaccaaagttagcattctctcaattggaccttcaagagatcagagcatttatatataat

SEQ ID NO: 315728 - DNA, 345 bp, Unknown
  Bacterial polypeptide expressing nucleotide sequence isolated from the Sargasso Sea
agacaataaaaatttctggaattgatgggattgccttaacaaaactagatgttttagacgaactcgatgaaataaaaatgtgtgtagagtatgatctaaatggaaaaaaaatagactaccttcctgctgcagttgaggatcaacttaaaatcaaacctatttataaaacatttgaagggtggaaaacttcaaccaatggtatcaaaaacattaatgatcttcctaacaatgctaaaaaatacatattcgcaattgaggactttattggagcaaaaatatcaagtatatccactagtccagaacgggatgatactattttagttgaaaatccttttgaaatttaat

SEQ ID NO: 315729 - DNA, 231 bp, Unknown
  Bacterial polypeptide expressing nucleotide sequence isolated from the Sargasso Sea
tattaatgatcaactctgtgatagaggcagtgaatttggaaccactactgggagaaggagaatatgtgggtggtttgatggagttattggtaaatatgctgtatctgtaaatggtctggattgtttagccgttacgaaacttgatgtgttagatgaattagatgagattcaagtttgcattgcatatgatctcgatggagaggaaatagactactttcctacaaattcaga

SEQ ID NO: 315730 - DNA, 436 bp, Unknown
  Bacterial polypeptide expressing nucleotide sequence isolated from the Sargasso Sea
gaaacagggtgaaaaaattagacaattaggacatgaatttggagctactactggaagagaaagaaggtgtgggtggatagaccttcctgcgctaaagtatgcaataatgattaatggagttactgaactttccatgatgaaagctgatgttctagatgagtttgacaaaataaaagtatgtacacactatatacataaaggagaaaaaattgactactttccgtataatattgaccagagtgttcaacctgtatacgtagaatttgatggttggaataccgatttaacagaacttaccaattctgacaatctaccattagaacttgtaaattacattaattaccttgaaaaggaattagagactcctatttcaatcatttctgttggaccagaccgaaaacaaacgattgataattcaaagcctgtatccatatag

SEQ ID NO: 315731 - DNA, 103 bp, Unknown
  Bacterial polypeptide expressing nucleotide sequence isolated from the Sargasso Sea
gtgagaaggatagaggagttgattgactgtcctgtcgcgctactttcaacttcaccggagagagaagatacaatattggtaagggacccttttgaagattgat

SEQ ID NO: 315732 - DNA, 94 bp, Unknown
  Bacterial polypeptide expressing nucleotide sequence isolated from the Sargasso Sea
atgaataatgtagcagtaataggctctcaatggggagacgaaggtaaaggcaagattgttgattggctttctgaaaaggcagatgtgatagtta

SEQ ID NO: 315733 - DNA, 307 bp, Unknown
  Bacterial polypeptide expressing nucleotide sequence isolated from the Sargasso Sea
gctgactaagcttgatgttttagatgagttagatgaaattaaaatgtgtgttgcatacaaactagatggtaaacaattagactatttacctgcaggagccgaatatcaatttaaaattaaacctatatataaaactttttcaggctggaaaaaaagtactaaaggaattagaaatgttgaggatttacctgataatgcaagaaaatacatatatgctttagaagattttattgaagcaaaaatttcaagcatatcaaccagtcctgaaagggaagatacgattttaattgaaaatccttttgattaa

SEQ ID NO: 315734 - DNA, 88 bp, Unknown
  Bacterial polypeptide expressing nucleotide sequence isolated from the Sargasso Sea
gatgaaaaatgtagttgttgttggatctcagtggggtgatgaaggtaaaggaaaaattgttgattggttatcaagtgaagctgatgtt

SEQ ID NO: 315735 - DNA, 375 bp, Unknown
  Bacterial polypeptide expressing nucleotide sequence isolated from the Sargasso Sea
acaaactcacatgaaatgatcaatttcaaaaatataatcaacaatattaaaaatattgaagaagaaaatattatcaaaacaaatttgaattttgatttttcaaaaattaatttggacgaaatgtctgaaaaatttcagaaaaacattttaaaattgaaaagattaatttctaaaggagatttatttcaagcaaacctgacaactaaatgcgaaattgaatcttccaaaaactatagtcctttagatatttatttgaaaataagaatgaaattaagagctccttttggaggaataatagtaaataataatgataattataaagaggcggttttatctacctctccagaaagatttataaaaatagataataaaaat

SEQ ID NO: 315736 - DNA, 355 bp, Unknown
  Bacterial polypeptide expressing nucleotide sequence isolated from the Sargasso Sea
ttggtaaaacaaagtataaaaatttcaggtattaatggaattgcattaacaaaattagatgttcttgatgaattggaagaaattaaaatttgtgtggcttatgaaattaatggtaataaaatagattattttcctgctgaatctgaaaaacaaaatcaggtaaaaccaatttataaatcttttgaagggtggaaatgttcaactaaaggtataaataaatttcaagatttgcccaataacgcaaaaatttacatcaaatatttagaagattttattggaacaaaaatttctagtatttctaccagtcctgaaagagatgacactatactaatagaaaatccatttaaaatttaag

SEQ ID NO: 315737 - DNA, 340 bp, Unknown
  Bacterial polypeptide expressing nucleotide sequence isolated from the Sargasso Sea
tctaaaaatatcaggaattgatggaattgccttaactaaactagatgtactagatcaactagatgaaattaaaatgtgcatcgcttatgagataaatggtaaaaaatatgattatcttccagcttcagtcgatgaccaatttatggctaaaccaatatataaatcctttaaaggttggaaatcttcaacagtaggtataaaaaaatttgaagaactaccagaaaatgcaaaaaattatataaaagaattagaaaagtttgtagagaccacaatttcaagtatttccactagtccagagagaaatgatacaatcttaattcaagatccttttaatctttaa

SEQ ID NO: 315738 - DNA, 478 bp, Unknown
  Bacterial polypeptide expressing nucleotide sequence isolated from the Sargasso Sea
caaagcctacatatctagagttggtactggtcctttcataactgaacaagaaaatgaaattggtgattacatgattgaaaagggggctgagtttggaacggttactggaagaagacgacgttgtggatggctagatttagtttcattaaaatattcgaaaaggattaactctctaagtcaattatttataacaaaattagatgttttaagtggccttgaggaaatcaaggtatgcataggatacagctttgaagataaaaaaattacagactatccattagttgatgagatattagataagtgtgaacctatttatgaatcgtttgagggttggaatgaagatatttctggaattacgaaatatgatgcacttcctgagaatgctaaaaaatatattgaatttattgaagatttcagcgatgtgccaattaaatatatatctgttggaccagagagaaaccaaaatataattagataa

SEQ ID NO: 315739 - DNA, 313 bp, Unknown
  Bacterial polypeptide expressing nucleotide sequence isolated from the Sargasso Sea
tatgggtgctactgtagtaattggtggtttttttggagatgaaggtaaaggaaaaataatctcatatttagcacaaaaagataatcctgcaatagttgttagaggtggtgctggtccaaatgcaggtcatactatcaaagatggtgataaaactttcaaagtgagaatgcttccaagtggatttctaaataaaaattctagagtaatgattggtcctggcgtagttgttaatcctgatgtatttcttaaagaaattaatgattttggaactgatggtagatcatttcttgataataattgtggaataattgaa

SEQ ID NO: 315740 - DNA, 558 bp, Unknown
  Bacterial polypeptide expressing nucleotide sequence isolated from the Sargasso Sea
ttgtaacttcttcttcaacaatctctgctaatgcttcaattggcactggtataccttattcgaaaattactaaatcaataggcatttcaaagtcatatactacaagggtaggtcatggacctttccctacagaaatgttggacgataaaggacttacattaagggagtttggtgcagaatatggtgcaactacaggtaggcctcgaaggtgcgggtggcttgatttagttgcattaaaacattcagtaaacatatgtggactagatcaattagttattacaaaggctgatatactctcgatgtttgatacgattaaactttgtactggatataaaataggtaagcgacttattaaaaaatttcctcagaatttagacaatttagacaaagtagtgcccgtttataaaaactttaaatcatggaaatcagatgatttaaataaagaaaatcccccaaaaaatttaattaattttataaaatatattgagaattatcttaatgttgaaatttcaatggtttctgtaggtcctgaaagagaccagatactttacttgtagg

SEQ ID NO: 315741 - DNA, 113 bp, Unknown
  Bacterial polypeptide expressing nucleotide sequence isolated from the Sargasso Sea
tatggctattgatttattacttggcctccaatggggtgatgaaggaaaaggaaaaattgttgattttttaactaaatcctatgatattatagctaggtttcaaggagggccaa

SEQ ID NO: 315742 - DNA, 100 bp, Unknown
  Bacterial polypeptide expressing nucleotide sequence isolated from the Sargasso Sea
atgagaaatgtagttgtagttggaacacaatggggtgacgaaggaaaaggtaaaattgttgattggctatctagtaaagctgatgttgtagtgcgttcaa

SEQ ID NO: 315743 - DNA, 745 bp, Unknown
  Bacterial polypeptide expressing nucleotide sequence isolated from the Sargasso Sea
atgaaaataaaaaaaatagttctagaaaaatggatagatccagcactgatttcgcattatctaacaaaaaaatttggagataaaggattagcttggctagacagcgatggcaaagaaaatggggaatggtcaataataggcattaaacctaaaaaaataatccaatcaagagatatcaataacttagacaaaactaataatccatttaaaaatttaaaaaatattgaaaaaggattttggatgggatggttaagttatgaagctggagtttacatagaaccaaaaaacccatgggaaaaatctaatatggcaactttatggattgcatcatatgatccaatcattaaatgtaatctaataaaaaaagaaataattatcgaaggcacaaactcatctgaactgatgaattataaaaacataatcaacaatataaaaaatatcgaagaagaaaatattattaaaacaaagttgaattttgatttttcaaaaataaatttggacgaaatggctgaaaaatttcagaaaaatattttaaaattgaaaaaattaattttcttaggagatatatttcaagcaaacctaacaactaaatgcgaagttgaatcttccaaaaactataatcctctagatatttatttgaaaataagaaggaaattaagagctccctttggagggataataataaataataattataaagaggctgtattatctacctcaccagaaagatttttaaaaatagata

SEQ ID NO: 315744 - DNA, 352 bp, Unknown
  Bacterial polypeptide expressing nucleotide sequence isolated from the Sargasso Sea
aagatgtggatggcttgatctagaggctcttaaatattcagctaaattaaataacctaacaagtttatgcataacaaagttagacgttcttgatgattttaatcaaatcaaagtctgtatagggtatcaagtcgatggagaactatcctcttttaaatctcggttgctgcacaaatcaaagccaatatacaaaacaattgatggttggggatgttctttaaaggatgctaaaaatttcaatgaactaccaattgaagcaaaagcattcatagaactaatagaggaatttacaaaaataccagtgtcacttatttcaaatggacctaatcgagaagatttaatccttagataa

SEQ ID NO: 315745 - DNA, 108 bp, Unknown
  Bacterial polypeptide expressing nucleotide sequence isolated from the Sargasso Sea
tatgagtaatatagttgttgttggaacacaatggggagacgagggtaaaggtaagattgttgattggttatcaaacaaagctgatttagttgtaagatttcaaggtgg

SEQ ID NO: 315746 - DNA, 364 bp, Unknown
  Bacterial polypeptide expressing nucleotide sequence isolated from the Sargasso Sea
gatggtgtgcttggtgaagcaaactatcaaaacttcaggaataaacggaatagctttgactaaattagacgtacttgatgactttgatgagataaaagtttgtacagcttatgaactaaatggcgaaaaaatagactatttaccagcatcctcagaacaacaatttaaagttaagccaatttacaaatcctttgaaggttggaaatcttcaacatgtggaattgaaaaattttctaaattacctgtcaaggcacaaaactatattaactttattgaaaaatttgttgatgcaaaaatatcgacgatatctactagtccagagagaaaagatacaatattaattgaagatccttttaatacttaa

SEQ ID NO: 315747 - DNA, 226 bp, Unknown
  Bacterial polypeptide expressing nucleotide sequence isolated from the Sargasso Sea
gacatgttaattgataatggaattgatatctcaggattaaaaatttcatcaacatcacatgtaacaatgccctaccaccgaatattggatgaagcgatggaggctgatagaggttcaaacaaaatagggacaacagttcgtgggattggcccaacttatgcggataaatcacaaagaaatggcataaggataagagacttactcaataaggaaaggctaagtgatg

SEQ ID NO: 315748 - DNA, 734 bp, Unknown
  Bacterial polypeptide expressing nucleotide sequence isolated from the Sargasso Sea
aactaaatgcgaaattgaatcttccaaaaactataatcctctagatatctatttgaaaataagaaggaaattaagagctccctttggaggaataataataaataatgataataataaagaggctgtattatctacctcgccagaaagatttataaaaatagataataaaaattttgtagaatcaagacctatcaaaggaactagatccagagataaagatttaaatcaagacgcacttaatgctatcgatttaataacaaacgaaaaggatagagccgaaaatattatgattgttgacctaataagaaatgatttaagtaaagtttgcgaaacaggaagtattatggtgccagaaatattaaaacttgaaagtttcttaaaagttcatcatctaacttcagtaatcagaggcaaattaaaaaaagacaagaactggattgatttactaaaagcttgttggcctggggggtctataactggagcacctaaattaagatcatgccagagactttttgaattagaagaatgtgaacgcggaccatactgtggctcatttttgaagcttgactggaatggagagtttgacagcaatatactaataagatcatttttaattaaagacaaaaaaattaatatatatgctggttgcggaatagttattgactcaaaccctgaagaggaaactgatgaactaaagtggaaacttttacctttaattgattcactaaaatgat

SEQ ID NO: 315749 - DNA, 553 bp, Unknown
  Bacterial polypeptide expressing nucleotide sequence isolated from the Sargasso Sea
aatacaagtgcaggtaatgcagctactggatctggaattggtcctttaaattttgatgaagttgttggtgtaaccaaagcctacatatcaagagttggtactggtcctttcataactgaacaagaaaatgaaattggtgattacatgattgaaaagggagctgagtttggaacggttaccggaagaagacgacgttgtggatggctagatttagtttcattgaaatattcgaaaaggatcaactctctaagtcaattatttataacaaaattagatgttttaagtggccttgcggaaatcaagatatgcataggatatagctttgaagataaaaaaataacagactatccattagttgatgagatattagataagtgtgaacctatttatgaatcgtttgagggttgggatgaagatatttctggaattacgaaatatgattcacttcctgagaatgctaaaaaatatattgatttcattgaggatttcatcggtgtgccaattaaatatatatctgttggaccagagagaaaccaaaatataattagataaa

SEQ ID NO: 315750 - DNA, 531 bp, Unknown
  Bacterial polypeptide expressing nucleotide sequence isolated from the Sargasso Sea
ctaatgcttcaattggcactggtataccttattcgaaaattactaaatcaataggcatttcaaagtcatatactacaagggtgggtcatggacctttccctacagaaatgttggatgacaaaggacttacattaagagagtttggtgcagaatacggtgcaactacaggtagacctcgaaggtgcggatggcttgatttagttgcattaagacattcagtaaacatatgtggactagatgaattagtgataacaaaggctgatatactctcgatgtttgatacaattaaactttgtactggatatagaataggtaagcgacttattaaaaaatttcctcagaatttagacaatttagacaaagtagtacccgtttataaaaactttaaatcatggaaatcagatgattttaataaaaagaatcctccaaaaaatttaattaattttataaaatatattgagaattatcttaatgttaaaatttcaatggtttctgtaggtcctgaaagagaccagatactttacttgtagg

SEQ ID NO: 315751 - DNA, 367 bp, Unknown
  Bacterial polypeptide expressing nucleotide sequence isolated from the Sargasso Sea
gatgcagtgggtggcaaaatatgctatccaactcaatggaattgatgcattgatcttgacaaaaatcgatgtattggatgggttcaaaaccatcaaagtttgtacgggatacaagtttaagggaaaagtctttcaagatatgcctgcggattctgttattcttgggaactgcgagccggtttatactgagcatgaaggatggatggaaaaaacggctggggttaaagattttgaaaaattaccagaaaaagctagaagctatatcgaatatctcagtgatttactggaaactcctttccagataatttctactggcccagaccgcgaagagaccatcgagatggactccttgtttattgattcctga

SEQ ID NO: 315752 - DNA, 759 bp, Unknown
  Bacterial polypeptide expressing nucleotide sequence isolated from the Sargasso Sea
tgggcaagtacgacgacccgacgcggcgcgcgcggcgcggcaccgcgcggctgtgcctcgccttcatgcacggcgccgcggaggagacgcaagagacggtgcgccgcctcatcgacgcgtgcgacgcggccgccgccgcggggctgcgcgtggtgcgcgtcgtgctcgtgctgatggacggtgccaaggcggagctctcgtcgctcctcgccctcgcgccgcatcttctctccgccgtgccgtacaaggacagcgtacggcggcacgcgctcgcctcgcgcttccacgcgcgctcgcgccgcagcccctcggcggtgctgctggacgccaagggcttcctcgtgagcggcgacgcgctccgcccgctgcgcgccgacccgcagggccagcggctgcacctgtgggacgcgctgctctccgagcacgcgaggcggtgccgccgctacctgctcggctgcgagaacgccgacctcggctgcgcggcggtgctcacgcgcgaggaggtggagcagcacctgatccgctgcccgtacaagcggctcgcgtgcccgaacaagtgcggctgcgacccgctgcccgagaacaagatgggggagcacaagagggtctgccccaagcgcctcgtcgcgtgccccaaccgctgcggccacaagaagctcacggcgagcgagctggcgccgcccgagggcgacggctcgcacctgagagtctgcccgctgcacgtcgtgccgtgcccgcacggctgcggcgcgcgcatgg

SEQ ID NO: 315753 - DNA, 707 bp, Unknown
  Bacterial polypeptide expressing nucleotide sequence isolated from the Sargasso Sea
caacgccaacatcaaacctctggcgctctacaggcggttacggcgccattgccccgccccatttggtgggctgatgctggccagctgtgaggaagccgtgctgagcacatcaccagaacgtttcctgcaggtcagtgccacaggtctcgtggagacccggccgatcaaaggcaccagaccacgccatgacgatccaactcaagatgccgacgctgctgccgagctggtgtgcagcgccaaggaccgagccgaaaacgtgatgatcgtcgatctgatgcgtaacgacctcggcagggtctgccgcaacggcagcattgaggtgccgcaactggttgggctcgagagctaccggcaggtgcatcatctgacctccgtggtcaccggtcagctgaacgatcccagtgatttagctgggttactgcgagcttgctggccaggcggctcaatcaccggcgcccccaagatccgcacctgccaacaactcaatgctctcgagcctgtggcgcgcgggccctactgcggcagctttttccatcgccgccccgatggcagctttgatagcaacatcctgattcgcagcttgctgctgaaaggctcaaccgtgcgcatccatgggggctgcggcatcgtggccgactccgacccagctcaggaaaccgaagaactgggatggaaagttcaaccactgctgcaggcgctcagctgaa

SEQ ID NO: 315754 - DNA, 1258 bp, Unknown
  Bacterial polypeptide expressing nucleotide sequence isolated from the Sargasso Sea
tatgccgtctatcgtagttgtgggtgcaaattggggtgatgaaggcaaaggccgcatcgtagattatttagccgctgatgctgcagcgagtgtccgctttcaaggcggtaacaacgcgggccatacggtcgtcaacgactttggcaccttcaaattacaccaattacctagcggtattttcaatccaaactgcgtcgcagtacttggccctggcatggtgatcagccctgaaaaactcagtgttgaaatcgccgaagtcgaagcagcaggcattgaagttaaactgtgcatttctgaccgtgcgaccctgtgcttacctatccatgcactggaagataccttagaagaacaacgtttaggcgatctggcctatggttcaacccgtcaagggattgccccagcctacggcgaccgcgtgatgaagaaaggtattttggttggctggttaaaccaacctgaagtgctgcaagaacgcattcaatttatgctcgactggaaactgccccagttaaaagcactgtacccaagctgtgactttagccaaacggccgccgaaatgacccaatggttattggaagtgactgcgccatggcgtccatttatttgcaacgtcactgagccattaaaagccttacaaaaacaagatgctaacttgttatttgaagcgcaattaggcgcgggtcgtgacttgatttacggcgagtatccttacactacttcttctaacgtgacggcggctttcgcaggtctgggtagtggtttaccggctctgcgcccagagcgtgtaattgccgtagctaaagctttcagctcatctgtcggtacaggcactttagttactgcgatggaagaacaggatgatttccgtaaaaacgccaatgagttcggcgcaaccacgggtcgtccacgtgatatgggttacttcgatgcggttgcaacgcgtaacggtgttgaactgcaagcagcgactgaaatcgccctgaccaagattgactgcctgactggcatgaaagatcttaagatttgtgtagcctacgaaggcgaacacactgaaaacccgatttggccacagacggcggcattaagcccagtgtatgagcaaatggaaagctggagcgaagacatcacaggctgtcgcacctttgaaagcctgccaaaggcagcacaacattatgttgagcgcatcgaagccctgatgggtgtgcgcgtgagcatggtgtctgtaggacctgaacgcgatcagatgatcattcgctaa

SEQ ID NO: 315755 - DNA, 486 bp, Unknown
  Bacterial polypeptide expressing nucleotide sequence isolated from the Sargasso Sea
tatgggtgctactatcgtaatcggtggtttttttggagatgaaggaaaagggaaaatcatttcatatttggcacaaaaagatgatcctactatagttgttagaggtggcgctggtccaaatgctggtcatactatcaaagatggtgataaaaccttcaaggttagaatgcttccaagcggatttctaaataaaaattctagagttatgattggtcctggtgtagttgttaatcctgatgtttttctaaaagaaataactgattttggaactgatggtagatcatttcttgataataattgtggaataattgaaaagcatcatcttgaagatgattcaaaaggcagattaaaagaaaaaattggaagtactggttctggaactggtccggcaaatgctgaacgcgcaatgagaactttgaagatggccaaagaaattgattcattacaaaaatacattattgatgttccattagaaatcaataaggc

SEQ ID NO: 315756 - DNA, 316 bp, Unknown
  Bacterial polypeptide expressing nucleotide sequence isolated from the Sargasso Sea
tatcgcacttaccaagttagatgttttagatcaattggaagaaataaagatgtgtatcgcatatgaagtgaatggaaaacaaatagattatttgccagcagctactgaagaacaaataaaagctaaacctatttataaaaattttaagggctggaattgttcaactaaaggcataaagaaatttgatgatcttccgaataatgcaaaaaattatataaaagaagtggagaaatttatagaaactaaagtagctagtatttctacaagcccagaaagaaatgatactatattaatagttgatccttttagtaactaa

SEQ ID NO: 315757 - DNA, 373 bp, Unknown
  Bacterial polypeptide expressing nucleotide sequence isolated from the Sargasso Sea
tcgccgagttggctgggtttgatgcagttatggcgcgggcaggctgtgagattaaacgcctgcacggaaattgctctcacaaaactcgatgttctcgaccagttggagacaatcaaggtttgtgttgcctatgaagtagacggtcagaggtacgagtatcttccgcaccttcgccggatgcacgaccgagcaaagcccgtctatgcagaatttcctggttggcaaagggatctctcggaagtaacgaaacgcgaagatttgccgagagaggctgttgagtacatctcatttctagaacgccaaatgggggtaccagtgcgatttgtatgcgtaggtccaggacgcgagcaatatttgcggtttgcggcatgaa

SEQ ID NO: 315758 - DNA, 373 bp, Unknown
  Bacterial polypeptide expressing nucleotide sequence isolated from the Sargasso Sea
aatgatatattataaagaggctgtattatctacctcgccagaaagatttataaaaatcgataataaaaattttgtagaatcaagacctatcaagggaactagatccagagataaagatttaaatcaagacgcgcttaatgctatcgatttaataacgaatgaaaaagatagagccgaaaatattatgattgttgacctaataagaaatgatttaagtaaagtttgtgaaacaggaagtattatggtgccagaaatattaaaacttgaaagttacttaaaagttcatcatctaacttcagtaatcagaggcaaattaaaaaaagacaagaactggattgatttactaaaagcttgttggcctggggctctataa

SEQ ID NO: 315759 - DNA, 145 bp, Unknown
  Bacterial polypeptide expressing nucleotide sequence isolated from the Sargasso Sea
ccagagaatgctatgaattatctaagatttttagctgaattaatggaggtaccaattgccattgtctcgttgggggcgaatagagatcaaactatagtaattgaagacccaatacatggtcctaaaagagcactgctgaggtaat

SEQ ID NO: 315760 - DNA, 1258 bp, Unknown
  Bacterial polypeptide expressing nucleotide sequence isolated from the Sargasso Sea
tatgccgtctatcgtagttgtgggtgcaaattggggtgatgaaggcaaaggccgcatcgtagattatttagccgctgatgctgctgcgagtgttcgctttcaaggcggtaacaacgcaggccatacagtcgtaaacgactatggcacctttaaattacaccaattacctagcggtattttcaatccaaactgcgttgcagtacttggtcctggcatggtgatcagccctgaaaaactcagtgttgaaatcgccgaagtcgaagcggctggcattgaagttaagttatgcatttctgaccgcgcaaccctgtgcttacctatccacgcactggaagataccttagaagaacaacgcttaggcgatctggcctacggttcaacccgtcaaggtatcgctcccgcctatggcgatcgtgtgatgaaaaaaggcattctggttggttggttaaagcaacccgaagtactgcaagagcgcattcaatttatgcttgattggaagctaccacagttaaaggcgctctatccaagctgtgacttctcccaaactgccgccgaaatgactcagtggttattagatgtcaccgcgccatggcgtccctttatctgtaacgtgacagagccattaaaagcgctgcaaaaacaagatgctaacttactgtttgaagcgcaattaggcgcaggtcgtgacttaatttacggtgaatatccgtatacaacctcttctaacgtgacggcggctttcgcaggtttaggcagtggcttacccgcgctgcgcccagagcgcatcattgccgtagccaaagcctttagctcatctgtcggtacaggtactttagttaccgcgatggaagagcaggatgacttccgtaaaaacgccaacgagtttggtgcgactacgggtcgtccacgtgatatgggttacttcgatgccgttgcgactcgtaatggtgttgagctgcaagcagcaactgaaatcgccctgaccaagattgactgcctgacaggcatgaaagatctcaagatttgtgttgcctacgacggtgagcacactgagaacccaatttggccacaaacggctgcattaagcccagtgtatgagcaaatggaaagctggagtgaagacatcaccacttgccgtaccttcgaaagtctgccaaaggctgcacaacattatgttgaacgcatcgaagccctcatgggcgtgcgcgtcagcatggtgtcagttggacctgagcgcgatcaaatgatcattcgctaa

SEQ ID NO: 315761 - DNA, 457 bp, Unknown
  Bacterial polypeptide expressing nucleotide sequence isolated from the Sargasso Sea
atgtcattagatgttttactagggcttcagtggggagatgaaggaaaaggcaaggttgttgactatctttctaaaaagtataatttggttgcaagatttcaaggtggtcccaatgctggtcatactcttgaatttgataataaaaaacatgttcttcatcaaattccatcaggtatatttagtaataattcattgaatattattggaaatggtgttgtgcttgatcctgtaatttttaaaaatgagatagaaaaaatagaattaaaatttggattgacattatttgaaaatctttttatttctaataaagttcaactgataactccatctcatagatttattgataaaattttagaaaaagaaaaaggagacaaaaaaattggttctactttgagaggtaaagggccaacatatcaagataagataggcagacatggattaagagtaggtgatatta

SEQ ID NO: 315762 - DNA, 507 bp, Unknown
  Bacterial polypeptide expressing nucleotide sequence isolated from the Sargasso Sea
ttgatcgaataataggaataactaaggcttacacaacacgagttggagctggaccttttacggctgaattatttgatgaaattggcgatcatcttattgacgttggtcatgaatacggaactaatacaggtcgtagacgtcgtgtgggttggctagatctcgtaatgcttcgctacgcctgtcgtgttaattctttaactgagcttgcaattgcaaaattggatgttctagatgatttagattcaataaaaatttgtgttgcttatgaatttgagggcaaacgacacgattggttaccgcataaccagtctttacagaatcaggcagttcctatatatgaggaatttaaaggttggaagtgtgatttatcagagattaaaaacagatcggaacttccaaaagaagctgaaaactatttgaattttatagaaaattctttaaatattccggtcgacttagttggggtaggcccaggacgccatcaatatttcagacgtcagaaataac

SEQ ID NO: 315763 - DNA, 127 bp, Unknown
  Bacterial polypeptide expressing nucleotide sequence isolated from the Sargasso Sea
gatgaaaaatatagttgttgttggatcccagtggggtgatgaaggaaaaggaaagattgttgattggttatccagtgaggcagatattgttatcagatttcagggaggacacaacgcaggacatact

SEQ ID NO: 315764 - DNA, 235 bp, Unknown
  Bacterial polypeptide expressing nucleotide sequence isolated from the Sargasso Sea
atgaaaattgatatgattttaggtctccaatggggagatgagggtaaaggtaaaattgttgatgttctgacaagagattacgatattatagctaggtttcaaggtggtccaaatgcaggacatactctaatatttgatggtactaaacatgttctacacacgataccctctggaatatttcacgacaaaaagattaatgttgtaggaaaatggtgtggttatagacccccgtaat

SEQ ID NO: 315765 - DNA, 797 bp, Unknown
  Bacterial polypeptide expressing nucleotide sequence isolated from the Sargasso Sea
aaatattttaaaattgaaaaaattaatttctttaggagatttatttcaagcaaacctaacaacaaaatgcgaaattgaatcttccaaaaactatagtcctctagacatatatttaagaataagaagcaaattaagagctccctttggaggaataatagtaaataataatgataattataaagaggcggtattatctacctcgccagaaagatttataaaaatagataataaaaattttgtagaatcaagacccatcaaaggaacgagatccagagataatgatttaaatcaagacgcactgaatgctatcgatttaataacaaacgaaaaagatagagctgaaaatattatgattgttgaccttataaggaatgacttaagtaaagtttgtcaaacaggaagtattatggtgcctgaaatattaaaacttgaaagtttcttaaaagttcatcatctaacttcagtaataagaggcaaattagaaaaaggcaagaactggattgatttactaaaagcttgttggccagggggttctataactggagcacctaaattaagatcatgtcaaagactttttgaattagaagaatgtgaacgcggaccatactgtggctcatttataaagcttgattggaatggagagtttgacagtaatatactaatcagatcatttttaattaaagacaaaaaaatcaaaatatatgctggttgcggaatagtgattgactctaatcctgaagaggaaactaatgaactaaagtggaaacttttaccattaattgattcattaaaatgag

SEQ ID NO: 315766 - DNA, 376 bp, Unknown
  Bacterial polypeptide expressing nucleotide sequence isolated from the Sargasso Sea
tcggaggtgtggctggttcgatgcgatcgcaatgaagagggcggttaaattgtcgagcgtgtctggaatatgtctcacaaaaatagatgttttagatgatttagaagtagtcaagatttgcgttgattatgagtgtgagtacaaaagagaattattcgactttagttcggcttctttgtctggcgtaataccaaagtatattgaaatgcctggttggcaagaaagcacaagcggactgacccagtatgatcaactgcctgaggcagcgcgtaactatatcaaagtgttagagaagcaaattggtgttccaatatcgatgatttcaaccggccccgaccgggaagagacgatttttttgacaaatccgtttggttag

SEQ ID NO: 315767 - DNA, 226 bp, Unknown
  Bacterial polypeptide expressing nucleotide sequence isolated from the Sargasso Sea
cccttttgatgaaaatttgcatgataaattaaagccagtttatgaaacaatacctggttggcgtacatcgacttttggattaactggttggaatcaacttccaaaaaaagctagagattatatagattttttagaatcaaaaattgaaaacaatatttctattatctctacaggcccagatagagttcatacaattgatagaaaaaacttattgagtaatagttga

SEQ ID NO: 315768 - DNA, 488 bp, Unknown
  Bacterial polypeptide expressing nucleotide sequence isolated from the Sargasso Sea
agtttcatcaggtcttggaatagggccaaagcatattaataatgtaatcggaattgttaaagcatatgcaacaagagttggggaaggcccatttataactgagctttttgatgaagatggagaagaaatagctaaacgtgggaatgaatttggagcaactacgggtaggccaagaagatgtggatggctcgatcttgttgctttaaaaaaggctatttttataaattctgttgacagtttatgtatgaccaaagctgatgtgctcgatacttttgaaaatataagtgtttgcgtagcttatgatgacaacaacttaccgatctataagagattcgaaggatggcaagaggatactagtcaatgcagttcatatgacgaacttccacaaaaattaaaagattatgtaaaattcattgaggaaactgttgaatgcaaagtaagcataatctctgttggcccttctagagaacaaagcatacatttataaa

SEQ ID NO: 315769 - DNA, 1315 bp, Unknown
  Bacterial polypeptide expressing nucleotide sequence isolated from the Sargasso Sea
aatgaaaataaaaaaaataattctagaaaaatggatagatccagcactgatttcgcatcatctaacaaaaaaatttggagataaaggattagcttggctagacagcgatggcaaagaaaatggggaatggtcaataataggaattaaacctaaaaaaataatccaatcaagagatatcaataacttagacaaaactaataatccatttaacaatttaagaaatattgaaaaaggattttggatcggatggttaagttatgaagctggagtttacatagaaccaaaaaacccatggaaaaaatctaatatggcaactttatggattgcatcatatgatccaatcattaaatgtaatctaataaaaaaagaaataattatcgaaggcacaaactcatctgaactgatgaattataaaaacataatcaacaatataaaaaatatcgaagaagaaaatattattaaaacaaagttgaattttgatttttcaaaaataaatttggacgaaatggctgaaaaatttcagaaaaatattttaaaattgaaaaaattaatttccttaggagatatatttcaagcaaacctaacaactaaatgcgaagttgaatcttccaaaaactataatcctctagatatttatttgaaaataagaaggaaattaagagctccctttggaggaataataataaataataattataaagaggctgtattatctacctcgccagaaagatttttaaaaatagataataaaaattttgtagaatcaagacctatcaaaggaactagatccagagataaagatttaaatcaagacgcacttaatgctatcgatttaataactaacgagaaagatagagccgaaaatattatgattgttgacctaataagaaatgatttaagtaaagtttgcgaaacaggaagtattatggtgccagaaatattaaaacttgaaagtttcttaaaagttcatcatctaacttcagtaatcagaggcaaattaaaaaaagacacggactggattgatttactaaaagcttgttggcctgggggctctataactggagcaccgaaattaagatcatgccagagactttttgaattagaagaatatgaacgcggaccatactgtggctcatttttgaagcttgactggaatggagagtttgacagcaatatactcataagatcatttttaattaaagacaaaaaaatcaatatatatgctggttgcggaatagttattgactcagacccggaagaggaaactgatgaactaaagtggaaacttttaccattaattgattcactaaaatga

SEQ ID NO: 315770 - DNA, 1477 bp, Unknown
  Bacterial polypeptide expressing nucleotide sequence isolated from the Sargasso Sea
atgatcagcgcactcatcgaacgtcatttcgccgaagcgccgaaccgcattgtcgtgcgggagatggacggccgtgaatactcgctggacgaactgcgcgcggacgtcgcgcggatcgccggcaagctggaggaggtgtacggcgattgcagcggcctcgtgttcggtattgccgcgcgctccagctacacgtgggtggcgacgatgctcgcgattttccgcgtgaaggcggtgcttctgccggtgccgatcgagttttccgacgagcagatcggcagcctgctgcacaaggcaaccgcgatcttcgcgcaggatgcgaaaaccgccgcacgcatcggttcgatcctgccgggcatctcgtgcatcgacgccgcgagcgagcgcgaaggttggcccgcggcgggcgcacccaccggcgagcgaatcgagccgggcatctgcgggatcatccatacgtccggtacgacgtcgaagccgaagggcgtgaagatccgcgacgaggcggtcggcctgctcgtgacgaacgtgctgaagcgcgtgccggccgggccgctcgactacctgtcgatcgtgccgatgagcctgctgatcgaacaggtgctcggcgtgttcctgccggtgctgtccggcggctcgctgacgctgatgcccgcgaactacgcggagtacggcgcacgcagcggcaatgcgcgcgactacctggacctgatcgcccgcgtcgatccgaacttcctgtacctgccgccgaagctgctcgaggaggccgatgcgttgctggagtcgaccggtacgacgcaactgttcggccgccgcaatccgcacatcatcacgggcggcgcgaagattccggccaccgtgctcgaatcgctggacaagcgcggcgtgcaggtttacgaagcgtacgggctcagcgagaacagttcgatcatctcgctgaactacccggggcagcgccgcatcggctcggccgggacgctgctcgacgggatcgtgccggtgatcgtcgatggcgagctgcgcgtgcgcacgccgacgctctgcgcgggctattacaactcggacgatacgtcgtgcgagctgaccgacggctacctgcataccggtgacatcgccgagatcgtcgatggtttcctgtacatcacgggccgcaagaagcacgtgatcatcctgtcgacggcgcgcaacatctcgccggagtgggtggagacggtctacaaggaaagcgcgctgatcgacgacatcgtggtgttcggcgaagggcgcgaagagccggcggcgatcgtgctgtccgcgcacgacgaagcggcggtacgcgacgagatggcgcggctcgaaccgcggctcgcggatttcgcgcgcgtgcggcgcgtccgggtcgtgacggacatcgagcgtttccgcaaggattactacacggtcaccgggcggccgcgccgtcagctgatcgagcgcgatcacgcggcgtcgctttattgac

SEQ ID NO: 315771 - DNA, 330 bp, Unknown
  Bacterial polypeptide expressing nucleotide sequence isolated from the Sargasso Sea
aatgaaaaatgttgcagtagttggttcgcagtggggagatgaaggaaaaggaaaaattgtagattggctatcagaacaagctgatgttgtaattagatttcaaggtggtcataatgctggacataccttagtaatagatggagtaacttataaacttcgattgctcccttcaggaatagttagaaaaaataaagtttcaattattggaaatggtgttgttgtcgacccttgggcattactggatgaaatcaaggaaattggagaaaaaggtgtggatgtaaattcaaaaaacttcatgatttcagaggctgcaagtctaatcttaccatt

SEQ ID NO: 315772 - DNA, 198 bp, Unknown
  Bacterial polypeptide expressing nucleotide sequence isolated from the Sargasso Sea
aatgaaaaatgttgtagtagttggatcccaatggggtgacgaaggaaaaggtaaaattgtagactggttatctagcgaagctgatgttgtagttagatttcaaggagggcataatgcaggtcatacgttagtaattaatggtattacttataagttaagacttcttccatcaggtatagttagaaaagataaaatttc

SEQ ID NO: 315773 - DNA, 400 bp, Unknown
  Bacterial polypeptide expressing nucleotide sequence isolated from the Sargasso Sea
aacagtcactagtcgtaaaagaagatgtggttggtttgatggtgttttagttagacagacaattaaaatttctggaattaatggtatagctctcaccaaacttgatgttttagatgaacttgaagaaattaagatgtgtatagcttatgaaattaaaggcaaaaaaattaattatttacctgcgtcaaccgacgagcaattaaatattaaaccagtctataaaagcttcaatggatggaaatcatcgaccaaaggtattaaaaaatttgatgatcttccagataatgcaaaattatatgttacagaattagagaaatttctagaaaccaaagtttcaagtatatcaaccagcccagaaagaaatgacacgatattaatagaagatccttttaatatttag

SEQ ID NO: 315774 - DNA, 439 bp, Unknown
  Bacterial polypeptide expressing nucleotide sequence isolated from the Sargasso Sea
tttggagaaagtttggggaaaaagaggaaacgactatggaacagtcacagcaagaaaaagaagatgtggatggtttgacggagtattagtacgtcaaacaataaaaatttctggaataaatggaatcgctttaactaaactagatgttttagatgaattagatgaaataaaaatgtgtattcaatatgaattgaatggaaagaaaattgattatcttcctgcagcatcagaggatcaatttaatatcaagccaatttataaatcgttaccaggctggaaaacaaaaacccaaggtataagaaattttaaagatttacctgaaaatgcaaaaaaatatattcattcattggaagatttcataggtgcaaaaatatcaagtatttcgacaagcccagaaagagaagatacaattttagttaaagacccttttaatacttaa

SEQ ID NO: 315775 - DNA, 498 bp, Unknown
  Bacterial polypeptide expressing nucleotide sequence isolated from the Sargasso Sea
aatgaaaaatatagttgttgttggttctcaatggggtgacgaaggtaagggaaaaattgttgactggttatctgaacaggctgatgtagtaataagattccaaggaggtcacaatgctggccatacattagtgattgatggtgttacatataaattgagattactgccatctggaatagttagaaaaggtaaaatatcaattattggcaacggagttgtcgtagatccatgggctttattagaggaaatagaagaaataaaatctaaaggcgtagaagtaaatgtaaataattttattatttcagagtctgcaaatttaattttgccttttcatagagaaatggatgagattagagaggatgaggcaggaaaaagcaaaataggaactacaagacgtggaattggacctgcatatgaggataaagttggaagaagatctataagagttatggatctaagatctgaaaaaaatttagatcaaagactcgactatgtatt

SEQ ID NO: 315776 - DNA, 651 bp, Unknown
  Bacterial polypeptide expressing nucleotide sequence isolated from the Sargasso Sea
gatgttttatacaattattggaacacaatggggtgatgagggaaaaggcaagatagtagattggctggcttcaaaagctgatactgtagttagatttcaaggaggtaataatgctggacatacattaaagataaaagatgaaatatttaagttaaatcttttaccttctgggataatcagaggaaaaagatgtataataggtaatggagttattttagatccatgggcgctgcttaaagagattgaaaaactcaaaacacaaaatattttaattaatcattcaaattttatgattgcagaaaatatatgtttaattttaccaatacataaaattattgatgaacttaatgaaaaattaagaggaactgaaaatataggcactacaaaaagaggcattggaccagcatatgaagataaaataggaagaagatcaatcagattatgtgatttaggagataaagaaattttagaaaaaaaactaaacaatcttttaaaatttcatgaagatagattaaataaacataatataaatattgatattcctaatttattggcagaattaatttcaatagataaaaaaatatcttctttttctaaacctacttggaaaattttaaatgagctacaaaaaaaagaaactattctttttga

SEQ ID NO: 315777 - DNA, 670 bp, Unknown
  Bacterial polypeptide expressing nucleotide sequence isolated from the Sargasso Sea
aatgacaaatgtagctgttattggatctcaatggggagatgaaggtaaaggaaagattgttgactggctttctagcaatgctgatattgttgtaaggtttcaaggaggtcataatgcaggacatactttagttattgatggtataatatataaattaagattgttgccctcaggaattgtaagaaaaggcaaagtttcaattattggtaatggtgttgttgttgatccatgggctttgttagatgagatagaagaaataaagtccaaaggtgttgaaatagataaaaaaaatttgattgtttcagaagctgctaatttaattttaccatttcatagggaaatggatgaaattagagaagatgcagcaggtcaatctaaaataggaactacaagaagaggaattggtccagcgtatgaggataaagtaggtagaagatcaataagagttatggatttagcctctgaaaaaaatctggatcatagattggaaacagttttagctcatcacaacacaataagaagaggattaggaaaagaaatttttgaaaaaaataaactaaagcaagacttattaagtattgcaccagaaatactaaaatattcacaaccggtatggaaaaaattaaacgaatttaaatcaaaaggaaaaaaaatattatttgaaggtgcc

SEQ ID NO: 315778 - DNA, 535 bp, Unknown
  Bacterial polypeptide expressing nucleotide sequence isolated from the Sargasso Sea
gatgaataatgtagtcgttgttggatcgcagtggggagatgaaggtaaagggaaaatagttgattggttatccagtgaagcagacgttgtcgtaagattccaaggaggacataatgctggtcacacattagttatagatggtgttacttataaattaagattattaccatctggaattgtaagaaaaaataaaatttcaattataggaaatggagttgttgttgatccctgggcgcttctggatgaaattgaagaagcgaaatctaaaggtgtagaaatcaatgaaaataatctgattttatctgaggctgccacattaattttaccatttcatagagagatggatgaaataagggaagactctgctggtaaatcaaaaattggaactactagaagaggtattggcccagcctatgaggataaagtaggaagaagatctataagagtaatggatcttgcatcaaaacaaaatcttgaaaatcgattatcattagtacttgaacaccataatgcaatccgaaaaggattgggtaag

SEQ ID NO: 315779 - DNA, 421 bp, Unknown
  Bacterial polypeptide expressing nucleotide sequence isolated from the Sargasso Sea
atgaaaatagacttaattttaggccttcaatggggagatgaaggaaaaggaaaaattgttgatgttttaacagagaattataatataatagctaggtttcaaggaggacctaatgcaggacacacacttgaatttgacggtattaagcacgtgttacataccattccctcaggaatttttcataataataaattgaatataattggaaatggtgttgtaatagacccagttatcctaaaaactgaaattgataaattacatgaacttgatgttgatttaagtgaaaaacttatgatttctagaaaagctcacttgatactaccaactcacaggttaatagataaagcatctgaactttcaaaagggaagaagaagattggatctactcttaaaaggaattggtccaacttacatggataaa

SEQ ID NO: 315780 - DNA, 176 bp, Unknown
  Bacterial polypeptide expressing nucleotide sequence isolated from the Sargasso Sea
gatgaaaaatgtagttgttgtcggttcacagtggggagatgaaggaaaaggtaaaattgttgattggctatcaagtgaagctgacgtaattgtaagatttcaaggtgggcataatgctggtcatactcttgttatagacggtgtaggttataaattaagactgttgccatcaggaa

SEQ ID NO: 315781 - DNA, 415 bp, Unknown
  Bacterial polypeptide expressing nucleotide sequence isolated from the Sargasso Sea
ggaaaagaatttggaactgttaccagtagaaaaagaagatgtggttggttcgatggagttcttgtgagacaagcaataaaaatttctgggattgatggaatagcgcttacaaaattagatgttcttgacgaactagacgaaattaaaatgtgcgtttcttacgaactcaataaaaaaaaaatagattatttgccagcatcagcagaagatcagctaaaagttaagccagtgtataaagtgtttaaaggttggaaatcttccactaagggaatcaaagaatttgataaattaccagaaaatgcaaaaatctatgtgaaagaaatagaaaaatttgttgaagcaaagatatctagcatatcaaccagtcccgaaagggaagatactattcttatagagaatccttttaaaatttagt

SEQ ID NO: 315782 - DNA, 370 bp, Unknown
  Bacterial polypeptide expressing nucleotide sequence isolated from the Sargasso Sea
atgaaaaatgtagttgttgtaggatcgcaatggggtgatgaaggaaaagggaaaattgttgattggctctcttcagaggctgatatagttgttcgttttcagggtggtcataatgcaggccatacattagtaatagataaaaaaatatttaaacttagattgcttccatctggcatagtaagagagggaaaaatttcaattcttggaaatggggtagttattgacccttgggcattactatctgaaattaaagaaattaagaaacaaggtataaaagtcaccccggaaaattttatgatctcagagtctgcttcattaatcttgccgttccatcaagaaatggatgaaatacgtgaggatgtagctgaaa

SEQ ID NO: 315783 - DNA, 458 bp, Unknown
  Bacterial polypeptide expressing nucleotide sequence isolated from the Sargasso Sea
aatgaaaaatatagttgttgttggatctcaatggggtgacgaaggcaaaggaaaaattgttgattggttatctgaacaggctgatgttgtaataagatttcaaggaggtcataatgctggccatactttagtgattgatggtgttacatataaattgagattattgccatctggaatagtcagaaaaggtaaaatatcaattattggcaacggagttgtcgtagatccatgggctttattacaggaaatagaagaaataaaatctaaaggtgtagaagtaaatgtaaataattttattatttcggagtccgcaaatttaattttgccttttcatagagaaatggatgagattagagaggattcagcaggaaaaagcaaaataggaactacaagacgtggaataggaccagcatacgaagataaagttggaagaagatctataagagttatggatctaa

SEQ ID NO: 315784 - DNA, 248 bp, Unknown
  Bacterial polypeptide expressing nucleotide sequence isolated from the Sargasso Sea
gatgaaaaatgtagcagtaattggatcacagtggggagacgaaggaaaaggaaagatagtagattggctctccagcgaggctgatgttattataagatttcaaggcggtcataatgctggtcatactttggttattgatggcaaaacctataaattaagacttcttccttctggcatagttagaaaaaacaaaatatctatcattggaaatggtgttgtagttgacccatgggctttagtggatgaaa

SEQ ID NO: 315785 - DNA, 265 bp, Unknown
  Bacterial polypeptide expressing nucleotide sequence isolated from the Sargasso Sea
tgtgtcggctacgagttggacggcaagcgcctggattacctgcccaccgcgaccgatcagcagtggcgctgcaagcctgtgtacgaggaactgccggggtggagcgaatccaccgagggcgcccggagctgggccgacctgcccgccaatgcgatcaaatacgtgcgccgggtggaagagttgatcgaatgccctgtcgcgctactgtccacgtcaccggagcgggatgacacgatcctggtgacagaccccttcgccgactgag

SEQ ID NO: 315786 - DNA, 217 bp, Unknown
  Bacterial polypeptide expressing nucleotide sequence isolated from the Sargasso Sea
aatgaaaaatgttatagttataggaacacaatggggagacgaagggaaaggtaaaattgttgattggctttcaagtgaagctgatgttgttgttagatttcaaggtggacataatgctggccacaccttggtaattgacggtataacctataaattaagattgcttccctcaggcacagttagaaaaaataaagtatcaataataggaaacggtgta

SEQ ID NO: 315787 - DNA, 415 bp, Unknown
  Bacterial polypeptide expressing nucleotide sequence isolated from the Sargasso Sea
acaaggggaaaagagtttggaacagtgactagtagaaaaagaaggtgtggttggttcgatggtgttcttgtgagacagacaattaagatttctggcattgacggaatagctcttacaaaattagatgttcttgatgagcttgaagaaattaaaatgtctgtagcatacgaattaaatggaaaaaaaatagattatttacctgcagctgtagatgatcaacttaaagtaaaacctatatataaaacttttagaggatggaaatcctcaacaaaaggaataaaagaatttgaaaaattacctgaaaacgcaaagatttatattaaggagttggaaaaatttattgaaacaaaaatatcaagtatatcaaccagtccagaacgatctgatacaatacttatagaaaatcctttttaat

SEQ ID NO: 315788 - DNA, 521 bp, Unknown
  Bacterial polypeptide expressing nucleotide sequence isolated from the Sargasso Sea
aattaattatgttctaggaataccaaaagcttacacaactagagttggaagcggaccttttccttcagaactaaaagacgaaattggagaaagcttaggacgaagaggaaaagagtttggaactgttactgctaggaaacgaagatgcggctggtttgatggagttcttgtaagacaaacaattaaaatttctggaataaatggtatagctttaacaaaattagacgtactagatgatttagaagagatcaaaatgtgtgtaggttataatttaaatggaaaagaaatagactatttacctgcggcttcagaagatcaatttaacataaagccaatttataaaacttttaaaggatggaaaactaaaacccaaggagtaagaagttttaaggatttacccgataatgcaagaaaatatattcacgccttagaggattttgtgggtgcaaaaatctctagtatttctactagccctgagagagatgatacaattttagtagaggatccttttaataactagt

SEQ ID NO: 315789 - DNA, 314 bp, Unknown
  Bacterial polypeptide expressing nucleotide sequence isolated from the Sargasso Sea
aatgacaaaaacgcaaaattttgcagttctcggtcttcaatggggagatgagggaaaaggaaaaatagtaaacttcttgtccccaaattttcatgcaacttgtagattccaaggcggtcataatgccggccatactcttattgtgaacggcaaaaaattaattcttcatctactaccatcctctatctgtgaaaaagatgctctctcattgattggtaaaggtgtggttctttcacccaatgacttatttgaggaaatatcagaagccaatacttttttagaaggtgtagaagatagattaaaaataagttctg

SEQ ID NO: 315790 - DNA, 196 bp, Unknown
  Bacterial polypeptide expressing nucleotide sequence isolated from the Sargasso Sea
gaagtgaagccggtttacgaaagcctgccgggttggagtgaatccaccctgggcgtgaagtcggaagacgatctgccggccaacgccaaggcttacctgcagcgcatcgaagcaattaccggtgcacccatcgatattatttccacaggcccggaccgggtggaaaccattatcaagcgccatccgttctcctgaa

SEQ ID NO: 315791 - DNA, 455 bp, Unknown
  Bacterial polypeptide expressing nucleotide sequence isolated from the Sargasso Sea
tgagttaaataatgaaatcggagaaagtttaggtaggcgaggtaaagaatttggtacggtaacagcaaggaaaagaagatgtggctggtttgatggggtactagttagacaaacaattaagatttcaggaataaatggaatagctttgactaaacttgatgttttagatgaacttgaagaaattaaaatgtgcgtacagtatgaactaaatgaaaaaaaaatagactatttgccagctgcttcagaagatcagtttaatattaagcctatttataaaacatttaatggatggaaatctaatacacaaggtgttcgaaacttcaaagatttacctgataacgctaaaaggtatattcatgctttggaagattttataggtgcaagaatatcaagtatttctacaagccctgaaagagacgatacaattttggttgaagatccttttagtatttagt

SEQ ID NO: 315792 - DNA, 388 bp, Unknown
  Bacterial polypeptide expressing nucleotide sequence isolated from the Sargasso Sea
aatgaaaaatatagtggtagttggttcgcaatggggggacgaaggaaagggaaagatagttgactggctatctgagcaggcggatgttgtgataagatttcaaggaggacacaatgcaggacatacactagttatagaaggtgtgacttataaattaagattacttccatcaggaatagtaagaaaaaacaagatttcaatcatcggtaatggagtagtggttgatccttgggcactattagacgaaatggaggaaataaaattaaaaggagtcgatattaatgttgataattttattatttcagagtctgcaaatttaattttaccatttcatagagaaatggatgaaataagagaagactcagctgggaaaaggaaaaattggcac

SEQ ID NO: 315793 - DNA, 355 bp, Unknown
  Bacterial polypeptide expressing nucleotide sequence isolated from the Sargasso Sea
atgaaaaatatagtggtagtaggttcgcagtggggagatgaaggaaaaggtaaaattgttgattggttatctgatcaagctgacgttattattagatttcaaggtggacataacgctggccacacattagtaattgatggagttacttataaattaagattactcccatcaggaatagttagaaaagataaagtatctatcattggcaatggggtagttattgatccttgggctttattagatgaaatagaagaaataaaatcaaaaggagttgatgtaaatcaagataattttattatttcagagtcagcaaatttaattttaccatttcataaagaaatggatgaaattagag

SEQ ID NO: 315794 - DNA, 370 bp, Unknown
  Bacterial polypeptide expressing nucleotide sequence isolated from the Sargasso Sea
aaatatgctgtatctgtaaatggtcttgattgtttagccgttacgaaactagatgtgttagatgaattagatgagattcaagtttgtattgcatatgatctcgatggagaggaaatagactactttcctacaaattcagatgacttaaaaaaatgtaagccaatcttcaaaaaattaaaaggttggcaatgttcaactgcagattgcagaaaactatctgatctcccagaaaatgctatgaattatctaagatttttagctgaattaatggaggtaccaattgccattgtctcattgggggcgaatagagatcaaactatagtaattgaagacccaatacatggtcctaaaagagcactgctaaggtaat

SEQ ID NO: 315795 - DNA, 433 bp, Unknown
  Bacterial polypeptide expressing nucleotide sequence isolated from the Sargasso Sea
tgactttttaggtacacgtggaaaggaatttggaactgtcacaagtagaaaaagaagatgtggatggttcgatggtgttttggtgaggcaaactattaaagtttcagggattgatggtattgctttaacgaaattagatgtacttgacgaattagatgaaattaaaatgtgtgttgcttatgatcttgatggtagaagattagattatttacctgccgctgtagaagaccagataaaaataaaaccaatttatgaaacttttccaggttggaaagtttctacaagtggcgttaaaaatatggactcattacctgaaaatgcaaaaaaatatatttttgctgtagaagattttattggtgcaaaagtatcaagtatctcaactagtccagaaagagatgatactattttaattgaaaacccttttgaagtttag

SEQ ID NO: 315796 - DNA, 140 bp, Unknown
  Bacterial polypeptide expressing nucleotide sequence isolated from the Sargasso Sea
aatgagaaatattgcagttgtaggttcgcagtggggagatgaaggaaaaggaaaaattgtagattggttatctgaacaagcagatgttgtaatacgatttcaaggtggtcataatgcaggacatacacttgtgatagatg

SEQ ID NO: 315797 - DNA, 446 bp, Unknown
  Bacterial polypeptide expressing nucleotide sequence isolated from the Sargasso Sea
ttctgagatacataatgaaattgcagaaaatattcgaacgcaaggaaaagaatatggtacaacaactggcaggcctcgaagaatcggatggcttgaccttgtgcaagttaaacaagctgtaagagtaaatggccttacagaaatagccttaacaaagttagatatactttctggattgagggaggtaaaagtatgcactggttataagtataatagcgaaattatcaaagaaatgccttctagtcttactaaatatagaaatttacaaccagtttacagaactttacccgggtggtcaaaaatcaaccctgaaccttggaaggacggttatagcaaattaccaaaagatttgcaaaattacgttagctttattgaaaatgaaattgaatgtcctgttaaaatcatctctgttggtccacaaagacatgaaactataattatataat

SEQ ID NO: 315798 - DNA, 541 bp, Unknown
  Bacterial polypeptide expressing nucleotide sequence isolated from the Sargasso Sea
tctggttgcggacctaattcaataaattatgttttaggaataacaatagcctacactactagggttggagaaggtccttttccaacggaattgaaagatgatgtaggagaaaaactaggcactgtaggaaaagaatttggaacagtaacaagtagaaaaagacggtgtggatggtttgatggtgttttagtcagacaaacaattaaaattgcaggaatagatggtatagcattaactaaattagatgttttggatcaactagatgaaataaaaatgtgtgttggctatgaagttggtaataaaaaaatggattatttgcctgcagctgtagaagaccaattaaaagcaaaaccaatttataaaaattttaaaggttggaaatgttcaactaaaggtataaaaaattttgataaactacctcaaaatgccaaaatttacattaatgaattagaaaaatttatagaaacaaaagttgccagtatttctacaagtccagaaagaaatgatactatattaatagtcgatccttttagcaattaat

SEQ ID NO: 315799 - DNA, 389 bp, Unknown
  Bacterial polypeptide expressing nucleotide sequence isolated from the Sargasso Sea
aagaaaaagaagatgtggatggtttgatggagttttagtaaagcagactattaaaatttcaggaattaatgcaatagctttgacgaagttagatgtcttagatgatttagaagaaatcaaaatttgtgttcaatatgaacttaatggtaagaaaatagattacttaccctctgcatctgaagatcaatttaatataaaacctatttacaaaacttttccaggatggaaaactaagacccaaggaataagacatatgaaagatctacctgaaaatgcaaaaaaatatgtgtatgctatagaagattttataggtgcaaaaatttcaagtatttcgactagtcctgagagagatgatactattttattagaagacccttttaaaatttaat

SEQ ID NO: 315800 - DNA, 269 bp, Unknown
  Bacterial polypeptide expressing nucleotide sequence isolated from the Sargasso Sea
aatgaagaatatagttgttgttggctcccagtggggggatgaaggtaaaggtaaaatagttgattggctctctgaacaagcagatgtagtaattagatttcaaggaggtcataatgctggacatacattagttatagatggagtaacttataaacttagattattaccgtcaggaatagtcagaaaaaataaaatttcaataattggaaatggtgttgtagtagatccttgggctctacttgatgaaataaaagaaattaaattaaaag

SEQ ID NO: 315801 - DNA, 486 bp, Unknown
  Bacterial polypeptide expressing nucleotide sequence isolated from the Sargasso Sea
tatgtcaacttacgtagttgtaggtcttcaatacggagatgaagggaagggtaaaatcacagatgttttatctgcaaaatcagattatgttgtacgtttccaaggaggcgataatgcaggtcatacggtttatgtaggagatgaaaaatttgttttacatcttcttccttccggagttcttcagtgtaaaggcaaatgtattattgccaatggagtagttgttaatcctaaagccttcatgaaagaagtggggcagattgaagaaaaaggtcttaaaacggaccatatttttatcagcagaagagctcacgtaattatgccgtatcatattctcttggatacttaccgtgaagaagagcatggaggcacacagattggaactaccaaaaaggggatcggaccttgttacgaagataagattgcaagagtaggaataagaatggtagatttacttaatcctgaaattttaagagaaaaaattgaaaa

SEQ ID NO: 315802 - DNA, 154 bp, Unknown
  Bacterial polypeptide expressing nucleotide sequence isolated from the Sargasso Sea
aatgataataacaatagtaggcggccaatggggagatgaaggcaaaggtaaaattatagatcatatagctgaaaaagctgatgttattgctagatatgcaggtggaaataatgcaggccatactattgaaaacaaactaggaaaatttgcctta

SEQ ID NO: 315803 - DNA, 418 bp, Unknown
  Bacterial polypeptide expressing nucleotide sequence isolated from the Sargasso Sea
gatgaaagagtccctaatcctcgttggcactcagtggggagatgaaggaaaaggcaaaatagtagactacttttcacaaaagtttgatgctgtctgtcgttttcaaggcggccacaatgcaggccatacaatctattcacaaaacgagaagtttgttttacacctagtgccatctggtattttttacaatcatgttcaatgtttcattggtcaaggagtgattctttcgcttgattctcttctggaggaagttaataaactcaaagaaagaggaattaatcttgaaggaaaattacgtattagtaggtattgcagcttacttttgccaatacatgcaactattgaccagttaagagaggataataaaaactccataggcacaacaaaaagaggcataggtccagcctatgaagataaa

SEQ ID NO: 315804 - DNA, 136 bp, Unknown
  Bacterial polypeptide expressing nucleotide sequence isolated from the Sargasso Sea
attgtctgaaaatacaatcatccttggtctacagtggggagacgaaggcaagggtaaaattgtagacaatttaagtgcaaacattgatgctgtttgtagatttcaaggcggacacaatgctggccatacaatcaaa

SEQ ID NO: 315805 - DNA, 469 bp, Unknown
  Bacterial polypeptide expressing nucleotide sequence isolated from the Sargasso Sea
gatgaagaatgtagtagtagtaggttcacaatggggagatgagggaaaaggtaaaatagttgactggttgtcaagtgaagctgatgtaatagtaaggtttcaaggcggtcataatgcaggccacactctggtaattgatggtgtggtttataaattaagattactcccatcaggaatagttagaaaaaacaaaatatcaataatcggtaatggagtagtagtagatccatggtcgctgctagaagagattaatgaaattaaatctaaaggtgtagaagtaaattcaaataatttaattttgtctgatgcagcaactcttatcttgccttttcataaagaaatggatgagattagagaggacacggcaggaaaatcgaaaatagggactacaagaagaggaattgggccagcctatgaagataagattggcagaaggtcaatacgtgtaatggacctatcttcagagaat

SEQ ID NO: 315806 - DNA, 469 bp, Unknown
  Bacterial polypeptide expressing nucleotide sequence isolated from the Sargasso Sea
aatgaaaaatgttgtagtagttggttcccaatggggagatgaaggaaaaggtaagatagtcgattggctttcaagcaaagccgatgttgttgtacgatttcaaggaggccataatgcaggtcatactttagttatagataagattacatataaattaagattattaccttcaggaattgttagaaaaaataaagtatctattattggaaatggagttgttgttgatccatgggctttacttgatgaaattgaagaagtaaaatcaaaaggtgttgaaattaatgaaaataatttaattttatctgaagcagctacattaattttaccatttcacagagagatggatgaaataagagaagactctgctggcaatttaaaaataggaactaccagaagaggtattggcccagcttatgaagataaagtaggcagaagatctataagagctatggatctggcttctaaaaaa

SEQ ID NO: 315807 - DNA, 177 bp, Unknown
  Bacterial polypeptide expressing nucleotide sequence isolated from the Sargasso Sea
attgcctgagaatactttaatccttggactccaatggggtgacgaaggaaaaggtaagatagtagataacttaagtaaaactgtagatgcagtttgtcgtttccaaggtggtcataatgctggccatacaattaaagtcaatgatgagccaacagttcttcatttaataccatcttg

SEQ ID NO: 315808 - DNA, 374 bp, Unknown
  Bacterial polypeptide expressing nucleotide sequence isolated from the Sargasso Sea
tggtaaatatgctgtatctgtgaatgttcttgattgtttagccgttacgaaacttgatgtgttagatgaattagatgagattcaagtttgcattgcatatgatctcgatggagatgaaatagactactttcctacaaattcagatgatttaaaaaaatgtaagccaatcttcaaaaaattaaaaggttggcaatgttcaactgcagattgcagaaaactatctgatctcccagagaatgctatgaattatctaagatttttagctgagttaatggaggttccaattgccattgtctcgttgggggcgaatagagatcaaaccatagtaattgaagacccaatacatggtcctaaaagagcactgctaaggtaat

SEQ ID NO: 315809 - DNA, 484 bp, Unknown
  Bacterial polypeptide expressing nucleotide sequence isolated from the Sargasso Sea
agaacttacagataaaattggcaagatgctgggaacaagaggtaaggagtttggaacagtaactagtcgagagagaagatgtggatggtttgacggcgtattagtaagacaaacaattaagatgtcaggaattaatggtatagctttgactaaactggatgttcttgacgaactagatgaaatcaaggtttgtattgggtatgaattagagggtgagaatattgattatctacctgcggctgttgaagatcaattaaaagttaaacctatttataaaaattatgaaggttggaaatcttctacaaagggaattagaaattttgactcactcccagacaaagcaaaagtatacgtgactgaacttgaggattttattggtgcaaaaatttgtagtatttcaactagtccagaaagagatgataccatactaattgagaacccttttgataatgctgaaaagcgctctggtcattggaatatttaa

SEQ ID NO: 315810 - DNA, 540 bp, Unknown
  Bacterial polypeptide expressing nucleotide sequence isolated from the Sargasso Sea
gatgaaaaatgtagttgtagtaggttcccaatggggggatgaaggaaaaggaaagatagttgattggctctctagtgaggctgatgtaataataagatttcaaggtggtcataatgctggccatactcttgttattgatggtattgtttataaattaagattattaccatctggaattgtcagaaaaaataaaatatcaataattggaaacggtgtagtagttgatccatgggctctactagaagaaattgatgaaattaaatcaaagggcatcaaaataaactcagaaaatttaattttgtcagaagcagcgactctaatcttgccttttcataaggaaatggatgagatcagagaggacgcagctggaaattcaaaaattggaacaactagaagaggaataggaccagcttatgaagataaaataggcagaagatcaataagagttatggatcttgcatcagataaaaatttagataaaagattagaagcagtattacaacatcataatgctattagaaaaggtctaggtaaaactga

SEQ ID NO: 315811 - DNA, 466 bp, Unknown
  Bacterial polypeptide expressing nucleotide sequence isolated from the Sargasso Sea
gtaggagaaagtcctttgccatcagaaataacgggggaaaaagcacaaactcttcgtgaaaaaggtggagagtatggcacaacaactggtagacccagacgagttggatggcttgatcttgtccaaatcagacaggctgttcgcgttaatggccttactgatatagcattaacaaaattagacgttttgaataattttgacaaaatcaaggtttgtgttggttatgaagtgaatggtgaaaaagtttatcaaatgcctgcaagcctacggcaatataggctagccaaacctatttataagagccttcctggctggccagacctcccagaaaaagtatggaaaaaaggattttccgctttacctcaaacactcaagaattatgtttcctatatagaaagcgaaaccggttgtccgattaaaattgtttctgtaggcccacagagacatgaaaccattttgcgataat

SEQ ID NO: 315812 - DNA, 523 bp, Unknown
  Bacterial polypeptide expressing nucleotide sequence isolated from the Sargasso Sea
gatgaataatgtagtcgttgttggatcgcagtggggagatgagggaaaaggaaaaatagttgattggttatctagtgaggcagatgttgttgtaagatttcaaggaggccataacgctggtcataccttagtcatagatggtattacctataaactaagactattaccatctggaattgtcagaaaaaataaaatttctataataggaaatggagttgttgtagatccttgggcacttctagatgaaattgaggaagccaaatctaaaggtgtagagattaataaaaataatcttatactgtcagaagcagctacactaattttaccatttcatagagagatggatgaaataagggaagactccgcaggtaaatcaaaaattggaactactagaagaggaattggcccagcttatgaagataaagtaggaagaagatcaataagagtaatggatcttgcatcaaaacagaatcttgaaaatcgattatcattagtgcttgaacatcataatgcaatccgaaag

SEQ ID NO: 315813 - DNA, 487 bp, Unknown
  Bacterial polypeptide expressing nucleotide sequence isolated from the Sargasso Sea
aatgaaaaatgtagtcattgtaggttcgcagtggggtgatgaaggaaaaggaaaaatcgttgattggctttcaagtgaagccgatgtagtcattcgttttcaaggaggtcataatgctggtcacactttagttgtagatggagttacttataaacttagattgttgccatctggaatagttaggaaaaataaaatttcaataattggcaatggtgttgttgtggatccttgggcgttattagatgaaataaatgaaattaaatcaaaaggagtgaatgttgatgcaaaaaatttaatcttatctgagtctgctgatcttattcttccgtttcacaaagagatggatgaagtaagagaagatgccgctggaaaagacaaaattggaacaacaagaagaggaattggtcctgcctatgaggataaaatcggaagaagatcaattagagtgatggatttagcatctgaaagtaatatagatcaaaaatta

SEQ ID NO: 315814 - DNA, 547 bp, Unknown
  Bacterial polypeptide expressing nucleotide sequence isolated from the Sargasso Sea
atctaacacaacactatcaggagttatctctgggacaggtataaacatgggtttaataaattatggtcttggtattacaaaggcttattcaacaagggtaggtcatggcccattcccctctgaattgaataatgaacaaggagaaagaattggaaaaatcggtggagaggtaggggccacaactggtagaaccaggagatgtggctggttggacttaaaagttttaaaaaaagcaattcaaataaataatttatcaggaatagcattgactaaaatagacgttttagattacttcgacaaaatatccatttgtacgagttatggctcgattaattatgaaacatttgaagtagaagatcttgaatttattactttacctggctgggagtcatcaactgttggtattacagaatttaatagtttacctaaaaacgcaaaagcttacattgaaactattgaaaaattaaccaatacaccgatagatattatatccaccggtccagcaagagatgagattattcaaaaaaaaaatatattagatgattga

SEQ ID NO: 315815 - DNA, 583 bp, Unknown
  Bacterial polypeptide expressing nucleotide sequence isolated from the Sargasso Sea
gtatatacccttacccacttcatcaaacacggcagctgggcatatttcaacaggaacaggtgttagctttagagacattggaaggattattggtgttgtgaaggcctatctaagtcgcgtaggagagagccccctcccatctgaaatgcatggaaacgaggcagaagcgctaagagaaaaaggtggagaatatggaacaaccactgggagacccaggagggttggatggctagatctagtccaggtaagacaggccgtaagagtaaatggtttgacagagattgctcttacaaagttagatgtgttaagcggatttgagtctataaaggtttgtgtatcgtatgatgtcaacggggaaaatatattagagatgcctgcaagcctttcacagtatagacttgctaggccggtatatgaatccctccctgggtgggacaaccttcctggcaagatatgggaaaaaggattcagcgctctgccagaaaccttaaaagagtatatcaaattcgttgaagaccaagttggctgtccggtcaagctcatttccgttggccctcagcgacatgaaacaattttaagatag

SEQ ID NO: 315816 - DNA, 461 bp, Unknown
  Bacterial polypeptide expressing nucleotide sequence isolated from the Sargasso Sea
ggtaggaaatggtccattccctactgagttattcgatgaagatggcgagaaattacaaaatattgggaaagaatttggtgcaactacaggccgcccaaggagatgtggttggtttgatgctccattggcaagctatagtattatgataaatggatttaatgaaatcacaatgactaaacttgatattctagatgaatttgacgaaataaaagtttgtactgagtatgaatgtaatggtgagagatcaaaaaacttatcaacatttataaatcaattcgatgacattaagccaatttatacaaaattacccggctggaaatgttcaactttaggtattaattcgtttgaaaatcttcctcagaaagcccaagaatatattgaatacatcgaggaaattttatcaataccaataaagcacatatccactggtccaaagcgaaatgatatgataattagataat

SEQ ID NO: 315817 - DNA, 400 bp, Unknown
  Bacterial polypeptide expressing nucleotide sequence isolated from the Sargasso Sea
aactgtcacagctagaaaaagaagatgtggctggttctatggaattttggttcgtcaatcaataaaaatctcaggaataaatgggatcgcattgacaaaacttgatgtgcttgatgaattaaatgaaattaaaatgtgcgtaggttatgatttacatggaaaaaaattagattatttacccgcagcatctgaagatcaattcaacattaaaccaatatataaatcatttccaggctggaaaactaaaactcaaggtataagaaatatttctgatttaccagaaaatgctaaaaagtatatttatgctttggaggattttattggagctaaagtttcgagcatatctacaagtcctgaaagagaagacacaatattgattgaggatccttttaaatcttaa

SEQ ID NO: 315818 - DNA, 238 bp, Unknown
  Bacterial polypeptide expressing nucleotide sequence isolated from the Sargasso Sea
atgagcaataacaccctaatcttgggattacagtggggtgatgaaggcaaaggcaagattgtagacgctctcgcagaaactgcagaagcagtttgccgttttcaaggcggtcataatgcaggccatactttaaaggttgatggcgtccaaaaagttctacacttggtaccatctggaattctccatccttctgtccattgtgtcctaggcaatggtatcgtttttctcttcagccctc

SEQ ID NO: 315819 - DNA, 425 bp, Unknown
  Bacterial polypeptide expressing nucleotide sequence isolated from the Sargasso Sea
aggaacacgcggtaaagaatttggaaccgttacgagcagaaaaagaagatgtggatggtttgatggtgttttagttaggcaaactattaaagtttcaggaattgatggtatcgctttaacaaaattagatgtacttgatgaattagatgaaattaaaatgtgtgttgcttatgatcttgatggcaaaagattagattacttacctgcctctgtagaagaccagataaaaataaaaccaatttatgaaactttttcaggatggaaagtttctacagctggggttaaaaatatggactcgttacctgaaaatgcaaaaaaatatatttttgcagtacaagatttcattggtgcaaaagtatcaagtatttcaactagtccagaaagagatgatactatcttaattgaaaacccttttgaagtttagt

SEQ ID NO: 315820 - DNA, 496 bp, Unknown
  Bacterial polypeptide expressing nucleotide sequence isolated from the Sargasso Sea
gataaaatgtttcgcaatggtatcagaatggttgatcttttagagccggaagttttcagagaaaaactagaaaaaggtttttcgtttaataaaaaattgattgagacaatatcaggtgagtcactgaacttaacaattgaagagacttataaaacctaccttgaatacggtgagacgctttcaaaatacattatcgatatttctgtagagcttttcgaagaatacaaatcaggcaagagaatattatttgaaggagctcagggtataagcttagatgttgaccacggtgtatatccttttacaacttcctcaaacactgcaacaggtcatatatctatcggtacaggtgtaaattttcataaggttgatagagttattggggtagttaaagcatacttgagtagagtgggtgaaagtccattacccactgaatttttggatgctaccgctgaacgcattcgtgacgttggaaaggaatatggaacgactaccggtc

SEQ ID NO: 315821 - DNA, 316 bp, Unknown
  Bacterial polypeptide expressing nucleotide sequence isolated from the Sargasso Sea
atgaaaaatgtagttgtagtcggttcacagtggggagatgaaggaaaaggaaaaattgttgattggctatcaagtgaagctgacgtaattgtaagatttcaaggtgggcataatgctggccatactcttgttatagatagtatagtttacaaattaagattgttaccatcaggaatagttagaaaaaataaaatatcaattattggaaatggtgtagtggttgatccatgggcacttttagatgagattgatgaaattaaatctaaaggtgtagaagttaatccggataatttaattttatctgaagcagccactc

SEQ ID NO: 315822 - DNA, 373 bp, Unknown
  Bacterial polypeptide expressing nucleotide sequence isolated from the Sargasso Sea
atcgatctaaatgaattggtagatttaaatttgaaacaagctgaacaattgaagccttatattggaaatgtaataaatgaaataagagaattgcaaaaatctaaaaagaaaattctttacgaaggtgctcaaggtgctttattggatgtaagcttaggaacttatccttttgtcacatcaagtaacctaattgggggtgttccagctggcgcgggaattagtccatctgatattgattatacgataggaattaccaaggcttacactacaagagttggcgaaggaccttttcctactgagttgtttgatgagatgggaacttacttagctgaaacgggtggagaggttggagctactaccggaagaccgagaa

SEQ ID NO: 315823 - DNA, 544 bp, Unknown
  Bacterial polypeptide expressing nucleotide sequence isolated from the Sargasso Sea
catatatctactggaacaggtgtaactttccgaactataaatcgagtcattggtgtggtaaaaggttatttaagtcgtgttggggaaagtccattaccaacagaaataaatggttctgatgccgaatcattacgtacaaaaggtggggaatatggaaccactaccggcaggccaagaagagtcggttggttagatcttgtgcaagttcgacaagctgttcgtgtaaatggacttacagaaatagcattaacaaaactagacattctaaacaattacaaaactttaaaggtctgtatatcttatgatattaatggggaagcaataaatgaaatgcctgcaagtttaagaaaatatagaaaatctaaacctgtttataaaacattgcctggttggagttcacttcctgaaaaaatttgggaaaaggggtatgatagcttacctgtagaacttaaagactatatttcgtttatagaaaacgaagttaattgccctgtgaaaattgtttctgtcggaccacagcgacaccaaactattatacgataat

SEQ ID NO: 315824 - DNA, 208 bp, Unknown
  Bacterial polypeptide expressing nucleotide sequence isolated from the Sargasso Sea
atgaaaaatgtagttgtagtcggttcacagtggggagatgaaggaaaaggaaaaattgttgattggctctctagcgaggctgatgtaatagtaagattccaaggcggacacaatgctggtcatactcttgtaatagacggtgtagtttataaattaagactgttgccatcaggaatagttagaaagaataaaatatctataatgaaat

SEQ ID NO: 315825 - DNA, 388 bp, Unknown
  Bacterial polypeptide expressing nucleotide sequence isolated from the Sargasso Sea
aatggcgaatgtagtggttattggcacccaatggggcgatgagggcaaaggtaaaattgttgactggctctccagccgtgctgatgtcgtggtgcgatttcaaggtggtcataatgctgggcatacgctggtcattgatggtgtggaatataagttatcattgttgccatcgggaattgtgcgccccggaaaaatgtcgataattggcaatggcgtagttatcgatccgtcgcatttgcttgaggaaatagatttattacgtttgcaaggggctgaaataacgccacagacattgttggtgtctgactcagcacctttgattttgccagtacatcaggcagttgacgccgcccgggaagcgttgcgcggtgaacagaaaataggcaca

SEQ ID NO: 315826 - DNA, 291 bp, Unknown
  Bacterial polypeptide expressing nucleotide sequence isolated from the Sargasso Sea
aatgaaaaatattgtagttgttggttctcaatggggagatgagggaaaaggaaagatagtagattggctttctgaacaagcagatgttgttataagatttcaaggaggacataatgctgggcatacaattgtaattgatggtgtgacatataaattaagattacttccgtctggtatagttaggaaaaataagatttcaataattggtaatggggtagtagtcgacccatgggcattactcgaagaaatagaggaaataaaatcaaaaggagtagatgtaaatataaaaaa

SEQ ID NO: 315827 - DNA, 226 bp, Unknown
  Bacterial polypeptide expressing nucleotide sequence isolated from the Sargasso Sea
atgtcagataacacgtccaaagtaacagctattgtcggcgctcaatggggagatgagggtaaggggaagatcactgatttttttgcaggagaagcagaccttgttgttcggtttcatggcggaaataatgctgggcacactgttattgctgatggtaacacctacaagcttcatcttatcccttctggggtattatacaaacatccaaccagtgtgatagggaatg

SEQ ID NO: 315828 - DNA, 176 bp, Unknown
  Bacterial polypeptide expressing nucleotide sequence isolated from the Sargasso Sea
tatggctcaaagtcagtcaaaagttatagcaattgtcggtggtcaatggggagatgaagggaagggtaaaataacagatttttttgcctcaaaagccgattatgtaatccgttttcaaggcgggaacaatgctggacataccgttattgttgatggtaaaacgtttaaattgcatt

SEQ ID NO: 315829 - DNA, 509 bp, Unknown
  Bacterial polypeptide expressing nucleotide sequence isolated from the Sargasso Sea
aatgaaaaatatagtcgttgttggatctcaatggggtgacgaaggtaaaggaaaaattgttgattggttatctgaacaggctgatgtagtaataaggttccaaggaggtcacaatgctggccatactttagtgattgatggtgttacatataaattgagattactgccatctggaatagttagaaaaggtaaaatatcaattattggcaatggagttgtggtagatccatgggcattattagaggaaatagaagaaattaaatctaaaggagtagaagtaaatgtgaataattttattatttcggagtctgcaaatttaattttgccttttcatagagaaatggatgagattagagaggatgcagcaggaaaaagcaaaataggaactacaagacgtggaattggaccagcatacgaagataaagttggaagaagatctataagagttatggatctaagatctgaaaaaaaattagatcaaagactcgactctgtattagttcatcata

SEQ ID NO: 315830 - DNA, 241 bp, Unknown
  Bacterial polypeptide expressing nucleotide sequence isolated from the Sargasso Sea
aatgaaaaatatagtggtcgttggttctcaatggggagatgaaggaaaaggaaagatagtagactggctatcagagcaagcagatgttgttattagatttcaaggtggtcataacgcaggacatactttagttataagtggaattacttataaacttcgactgcttccatcaggaatagtaagaaaaataaaatttcattataggaaatggggtagtggtagacccatgggcattgcttga

SEQ ID NO: 315831 - DNA, 383 bp, Unknown
  Bacterial polypeptide expressing nucleotide sequence isolated from the Sargasso Sea
aagacgatgtggatggtttgatggtgtattggttagacaaacaattaaaatttcaggtataaatggaatagcgcttactaaactagatgttttagataatttagatgaaattaggatgtgtatagcttacgaaattggtggaaaaaaaattgattacctgccagcatccgtagacgatcaattcaaagttaaacctatttataaaaattttaaagggtggaattgttcaaccaaaggtataaaaaattttgatgatcttcctgaaaatgcaaaaatttatattaaagagttagaaaaattcgtagaagcaaaagttgcaagtatttcaacaagtccagaaagaaatgatactatattattagttaatccttttagtgactaat

SEQ ID NO: 315832 - DNA, 430 bp, Unknown
  Bacterial polypeptide expressing nucleotide sequence isolated from the Sargasso Sea
aattttaggaacaagaggaaaggaatttggaactgttacaagtagaaaaagaagatgtgggtggtttgatggtgttttagtccgtcaaacaataaaaatttcaggtattaatggaattgctttgaccaaattagatgttttagatgaattagacgaaataaaaatatgcattggttatgaattaaatgataaaaaaatagattatttaccagccgcggttgaggatcagctaaaggtgaaaccaatttataagtcatataagggatggaaaacttcaacaaaaggcattaaatcgtttaaaaatttacctaaaaatgctcaattatacataaaaggtttagaaaagtttattgatactaaagttgcaagtatctctactagtccagagcgaaaagatactattcttatagagaatccgttttcaatttag

SEQ ID NO: 315833 - DNA, 257 bp, Unknown
  Bacterial polypeptide expressing nucleotide sequence isolated from the Sargasso Sea
aatgaaaaatatagtcgttgttggatctcaatggggtgatgaaggtaaaggaaaaattgttgattggttatctgaacaggctgatgtagtaataaggtttcaaggaggtcataatgctggccatactttagtgattgatggtgttacatacaaattgagattacttccatctggaatagttagaaaaggtaaaatatcaattattggtaatggagttgttgtagatccatgggctctattagaggaaatagaagaaa

SEQ ID NO: 315834 - DNA, 235 bp, Unknown
  Bacterial polypeptide expressing nucleotide sequence isolated from the Sargasso Sea
atgaaaaatgtagtagtggttggatcacaatggggagacgaaggaaaaggaaaaatagttgactggctatctagtgaagctgatgtagttgtaagatttcaaggtggccacaatgctggacataccttagttatagatggcaaaacatataaattaagattgctgccctcaggaatagtaagagaaaataaaatatctataattggcaatggtgttgtagttgatccttgggctt

SEQ ID NO: 315835 - DNA, 211 bp, Unknown
  Bacterial polypeptide expressing nucleotide sequence isolated from the Sargasso Sea
aatgaaaaatgtagttgttgtaggttcgcagtggggagacgaaggtaagggaaaaatagtagattggctgtctagtgaagctgatgtagttgttcgttttcaaggaggacataatgctgggcatacactagttattgataaaaaagtttttaaattaagattgcttccatcaggtatagttagagaaggaaaaatttctatttttaggtaa

SEQ ID NO: 315836 - DNA, 535 bp, Unknown
  Bacterial polypeptide expressing nucleotide sequence isolated from the Sargasso Sea
atgggaaaagtagacgtgctacttggtcttcaatggggagacgaagggaaaggtaaggtcgtagatgtgctagcacctcactacgaaattgtagctagatttcaaggaggccctaatgcaggtcatacacttgagtttgaaggaaagaagcatgtattacaccaaatcccatctggtgttttcagggaaggagtattgaacattgtgggaaatggagtggtccttgatccaataacctttcagagagaaattgaagagttaaagccgttcaatcttgatttgaaaaagagtttggtattatcaaccaaaactcagctaatcatacctacccacaaacttttggatcaagcctacgagcgctcaaaaggggaggcgaaaataggctctacacttcgaggcatagggccgacttatgaggataagatggctcgagtaggtataagactaggcgaggtactttcctcagagttcgttgatagatatgcgaagcttaaggcaagacacgaagcaattctttccagttacaaattagact

SEQ ID NO: 315837 - DNA, 439 bp, Unknown
  Bacterial polypeptide expressing nucleotide sequence isolated from the Sargasso Sea
atgaaaaatattgttgttgtaggttcacagtggggagatgaaggaaaaggaaaaatagtcgattggttatcagagcaagccgatgttgtaataaggtttcaaggaggccataatgctggtcatacgcttgtcatagacggagttacttataaacttcgactattgccatctggtatagtaagaaaaaataaaatttctataattgggaacggcgtagtagttgatccttgggccttacttgacgaaatagatgaaattgaatcaaaaggtatcaaggtaaatatagaaaactttatcatttctgagtcagcaaatttgattttgccatttcatcgagaaatggatgagattagagaagactcagctggaaaagaaaaaataggtaccactagaagaggtataggaccagcatatgaggataaagtaggcagaaggtcaa

SEQ ID NO: 315838 - DNA, 151 bp, Unknown
  Bacterial polypeptide expressing nucleotide sequence isolated from the Sargasso Sea
atgaaaaatgtagttgtagtcggttcacagtggggagatgaaggaaaaggcaaaattgttgattggctatcaagcgaggctgatgtaataataaggtttcaaggtggacataatgctggccatacccttgttatagataatatagttacaa

SEQ ID NO: 315839 - DNA, 502 bp, Unknown
  Bacterial polypeptide expressing nucleotide sequence isolated from the Sargasso Sea
aaggattattggtgttgtgaaggcctatctaagtcgcgtaggagagagccccctcccatctgaaatgcatggaaacgaggcagaatctctaagagaaaaaggtggagaatatggaacgaccaccggaaggcccaggagggttgggtggctagacctagtccaggtgaggcaggccgtaagagtaaatggtttgacagaaattgctcttacaaagttagatgtattaagcggatttgaatctataaaggtttgtgtatcgtatgatgtcagcgggaataatatattagagatgcctgcaagcctttcacagtatagacttgctaagccggtatatgaatccctttctggatggggcaatcttcctgacaagatatgggaaaaaggatttgacgctctaccagaaaccttaaaagagtatatcaaattcgttgaagaccaaattgactgtccggtcaagctcatttccgttggccctcagcgacatgaaacaattttaagatag

SEQ ID NO: 315840 - DNA, 233 bp, Unknown
  Bacterial polypeptide expressing nucleotide sequence isolated from the Sargasso Sea
aatgaaaaatattgtagtagttggatcacagtggggagatgaaggaaaaggaaaaatagtagattggttatcagagcaagctgatgtggtagttagatttcaaggaggacacaacgcaggacatactcttgttatagatggagttacatacaagcttcgactattaccctcaggtatagtcagaaaaaataaaatctcaatcattggaaacggagtagtagtagatccttggg

SEQ ID NO: 315841 - DNA, 489 bp, Unknown
  Bacterial polypeptide expressing nucleotide sequence isolated from the Sargasso Sea
gatgaaaaatgtagttgttgtcggatcgcaatggggagacgaaggtaaagggaagattgtcgattggttatcaagtgaagcagacgtagttgttagattccagggcggtcacaacgcaggtcacactttagttatagatggtattacttataagttgagattactaccatcgggaattgtaagaaaaaataaaatatcaatcattggaaacggagtggttgtagatccttgggctttactcgaggaaattgaagaaattaaatctaaaggtgtggagatatcggaaaaaaatttaataatttctgaagcagcaaatttaattttaccatttcatagagagatggatgaaataagagaagatactgctggaaaagcaaaaattggaactacaagaagaggaattggcccagcttatgaagataaagtgggtaggcgatcaataagagtaatggatttaatatcagaaaaaaatttagaccaaagattaga

SEQ ID NO: 315842 - DNA, 505 bp, Unknown
  Bacterial polypeptide expressing nucleotide sequence isolated from the Sargasso Sea
catagaattattggtgttactaaagcttatttaagtcgagtgggggaggggcctctcccttctgaggttcatggcgaggaagcgattcagctaagagaaaagggtggagaatatggcactacaaccggtcgaccacgtagggttgggtggttggaccttgttcaggtaaggcaggctgtacgtgtaaatggattaacggaaattgcgctaacaaaacttgacatattatctaactcaaaggaactttcagtttgtaccgaatatgatataaacggtgtcaaagaatctgaaatccctgcaagcttacataagtttcgctctgcaaaacctatatataaacaactccctggttggggtgatattacaagctctatgcttaaagacgggtatgattcacttcccaatgaacttaggtcttacgttcaattcattgaaaaccaagttaactgtaaagtgtctattatatctgtagggcctgaacggcatcaaactataattagataag

SEQ ID NO: 315843 - DNA, 340 bp, Unknown
  Bacterial polypeptide expressing nucleotide sequence isolated from the Sargasso Sea
atgaaaaatattgtcgttgttggatctcaatggggtgacgaaggtaaaggaaaaattgttgattggttatctgaacaggctgatgtagtaataaggtttcaaggaggtcacaatgctggccatactttagtgattgatggtattacatataaattgagattactgccatctggaatagttagaaaaggtaaaatatcaattattggcaacggagttgtcttagatccatgggctttattagaggaaatagaagaaataaaatctaaaggcgtagaagtaaatgtaaataattttattatttcagactctgcaaatttaattttgccttttcatagagaaa

SEQ ID NO: 315844 - DNA, 241 bp, Unknown
  Bacterial polypeptide expressing nucleotide sequence isolated from the Sargasso Sea
aatgaagaatatagttgttgttggctctcaatggggtgatgaaggtaaaggtaaaatagttgattggctctctgaacaagcagatgtagtaattagatttcaaggaggtcataatgctggacatacactagttatagatggagtaacttataaacttagattattaccgtcaggaatagtcagaaaaaataaaatttcaataattggaaatggtgttgtagtagatccttgggctctactt

SEQ ID NO: 315845 - DNA, 319 bp, Unknown
  Bacterial polypeptide expressing nucleotide sequence isolated from the Sargasso Sea
gatgaaaaatgttgttgtagttgggtctcaatggggagatgaaggcaaaggaaagattgttgactggctatcgagcgaagctgatgttgttataaggtttcagggaggtcataatgcaggacataccttggtgatcgatgggataacatacaagttaagattattaccctcaggaattgtaagaaaagataaagtatctattattggaaatggtgtagttgttgacccgtgggctttattagatgaaattaaagaaattcaatctaaaggaattgaaattactcaaaataatttaattgtctcagaggctgcaaattta

SEQ ID NO: 315846 - DNA, 302 bp, Unknown
  Bacterial polypeptide expressing nucleotide sequence isolated from the Sargasso Sea
aatgagaaatgttgtagtagttggttcacaatggggcgatgaaggcaaaggaaaaatagttgattggctttcaagcgaggcagatgtagttattagatttcaaggcggacataacgcaggccatacgttagttattgatggagtaacatataaattaaggttattaccctctggtatagttagaaaaaataaaatttcaataattggaaatggtgttgtagtagatccatgggctcttttagaagaaataaaagagattaaatcaaaaggtatagaaatttctgaaaaaaatctaattttat

SEQ ID NO: 315847 - DNA, 474 bp, Unknown
  Bacterial polypeptide expressing nucleotide sequence isolated from the Sargasso Sea
gtgaaggtccttttccaacagaattaacagataacattggtaatcatttaggtgaaaagggacatgaatttggaactgtaactagtagaaaaagaagatgcggttggttcgatggagttttggtgagacaaactataaagatttcaggaattgatggaatagcattaacaaaattagatgtgttagatgaacttgatgaaataaatttttgtgtagcttatgagttaaatggaaaaaaaatagattattttcctgcagctgttgaagatcaattaaatgttaaaccagtttataaaaaacttgaaggatggaaatctaaaactcaaggtataaaaaaatttgatgatttacctaataatgcaaaaatttatgtaaaagctattgaagagtttattgaaacaaaaatatccagtatttcaacaagcccagagagaaaagatactattcttttaatagatccgtttaattattaaa

SEQ ID NO: 315848 - DNA, 432 bp, Unknown
  Bacterial polypeptide expressing nucleotide sequence isolated from the Sargasso Sea
aaaaattaggaagcagagggaaagaatttggaactgttactagtagaaaaagacgttgtggctggtttgatggtgttttagttagacagaccattaaaatttctggaataaatggaatagccttaacaaaacttgatgtactagatgatttcgatgaaattaaaatgtgtataggatatgaaataaatggaaaaaaaatagattatttaccaggatcaatcgaagaacaaatggaagtcagaccaatttataaaagttttaaaggatggaaatcttcaacagtgggaattaaaacttttgccgaacttcctaaagaagctaaaaattatattaataatttaaaagattttattgaaacaaaaatttctagtatatcaacgagtcctgaaagaaatgatactatattaattgaagacccttttaaaaattaat

SEQ ID NO: 315849 - DNA, 352 bp, Unknown
  Bacterial polypeptide expressing nucleotide sequence isolated from the Sargasso Sea
aatgaaaaatgtagtagttgtgggttctcagtggggagatgaaggtaaaggaaaaattgttgactggctttcaagtgaagcagatgtcgtagtcagatttcaagggggacacaatgcaggccacactttagttatagacggtgtgacttacaagcttagattgttaccatctggaatagttagaaaaaataaaatttcaataattggtaacggtgtagttgtagatccttgggcgcttttagatgaaataaaagaaattaaatcaaaaggtataaaagttgatgaatctaatttaattttatcagaatctgccaatcttattctcccctttcataaagaaatggatgaaaaa

SEQ ID NO: 315850 - DNA, 147 bp, Unknown
  Bacterial polypeptide expressing nucleotide sequence isolated from the Sargasso Sea
aatgttttatacaataattggaactcagtggggagatgaaggcaagggtaaaattgttgattggctttcatccatggcaaatactgtagtaaggtttcaagggggcaataacgctggacatacaattaaaataaaaaataaagtata

SEQ ID NO: 315851 - DNA, 412 bp, Unknown
  Bacterial polypeptide expressing nucleotide sequence isolated from the Sargasso Sea
ggaactgttactggaaggcaaagacggtgtggatggtttgattcaattttagttaaacaagcagtgatattgtcaaatattaatggtattgcttttactaaattagatgttcttgatggatttaaagaaattaaaatttgtgttggatatcttttaaatggaaaacatataaatcatttaccgtcttcagcagaagatcaaaaaaacttaaagccgatttatgaagtcataaagggttgggagggtagtgtcgcaggaatcaaaaatatagatcaattgcctaaacaagctaaatcttatattaaaagggtagaagaattaattggatgtaaaataataatgatttcaaccagccctgaaaggttggataccatctatttagaaaacccgtttaaagaaaataaattttaat

SEQ ID NO: 315852 - DNA, 181 bp, Unknown
  Bacterial polypeptide expressing nucleotide sequence isolated from the Sargasso Sea
attggatccccaatggggagacgagggaaaaggaaaaattgtagattggctctcaagtgaagccgatgttgtaataagatttcagggtggacataatgctgggcacactttagtgatcgagggtgttacttataagttaagactattgccatcaggaatagttagaaaaaataaaatatca

SEQ ID NO: 315853 - DNA, 541 bp, Unknown
  Bacterial polypeptide expressing nucleotide sequence isolated from the Sargasso Sea
tctggtatcggaccattggatatcgatggagtgctgggtatcactaaagcatatgctactagagttggctcaggcccattcccaacagaaattggtgatgattatggcaagcatatggcaaaggttggtgttgagtttggagcaacaacaggcagacctcgaagatgtggttggctagatcttgtcgcattacgtaaagcggtcaatatcaattcaatatcacaactctgcatcacgaaaatcgatgtgcttgatgggctagacaagattcttgtcgctgaagaatatgaaattgacgaaaagatatatgacactctccccgctatgagtcaaaatcgattcgaaagaatttcaccaatatacaaggaatacaaaggttggtcaggaatcacatctggactgcaatcttttgatcaactaccaactgaagctaagactttgataaaagggatagaggactcaatcggtgtacctatatctttgatatcaacagggcctgatagaaacgacatgattgtcattgatcaaattttttcatgag

SEQ ID NO: 315854 - DNA, 407 bp, Unknown
  Bacterial polypeptide expressing nucleotide sequence isolated from the Sargasso Sea
attcggaactgtaacagctagaaaaagaagatgtggctggttcgatggaattttggttcgtcaaacaattaaaatctcaggaataaatgggatcgcattgacaaaactcgatgtgcttgatgaattgaatgaaattaaaatgtgcgtaggttatgatttacatgggaaaaaattagattatttacccgcagcatctgaagatcaattcaacattaaaccaatatataaatcgtttccaggctggaaaactaaaactcaaggtataagaaatattaccgatttaccagaaaatgctaaaaagtatatttatgctttggaggattttattggagctaaagtttcgagtatatctacaagtcctgaaagagaagacacaatattgattgaggatccttttaaatcttaat

SEQ ID NO: 315855 - DNA, 417 bp, Unknown
  Bacterial polypeptide expressing nucleotide sequence isolated from the Sargasso Sea
taggaaatgagtttggtacagttacaagtagaaaaagaagatgtggatggtttgatggagttttagttaggcaaacaataaaaatttcaggcataaatggtatagcattaactaaattagatgttttagataaatttgatgaaattaaaatgtgtattgcatatgaagttgatggaaaaaaaatagattatttaccagcatctgtagaagagcaaataaaagttaaacctatatacaaaatttttaaaggatggaatagctctacaaaaggaataaaaaattttgatcaacttcctaataatgcaaaaatctatataaaagaattagaaaaatttatagaaacgaaagttgccagtatttctacaagcccagagagaaatgatacaattttaattgttgacccttttagtatttaat

SEQ ID NO: 315856 - DNA, 633 bp, Unknown
  Bacterial polypeptide expressing nucleotide sequence isolated from the Sargasso Sea
aatgaaaaatattgtagttgttggatctcaatggggtgacgaaggtaaaggaaaaattgttgattggctatctgaacaggctgatgtagtaataagattccaaggaggtcacaatgctggccatactttagtgattgatggtgttacatataaattgagactactgccatctggaatagttagaaaaggtaaaatatcaattattggcaatggagttgtcgtagatccatgggctttattagaggaaatagaagaaataaaatctaaaggcgtggaagtaaatgtaaaaaattttattatttctgagtctgcaaatttaattttgccttttcatagagaaatggatgagattagagaggatgaagcaggaaaaagcaaaataggaactacaagacgtggaattggacctgcatacgaggataaagttggaagaagatctataagagttatggatctaagatctgaaaaaaatttagatcaaagactcgactctgtattagctcatcataatgcgattagaaaaggtctaggaaaaaaaatttttgaaaaagataagcttaaatctgatttgcttaaaatagcatcaaaaatattagaattctctcagccagtttggttaaaattgatcaattt

SEQ ID NO: 315857 - DNA, 346 bp, Unknown
  Bacterial polypeptide expressing nucleotide sequence isolated from the Sargasso Sea
atggcaaatgtcacagtgattggagcacagtggggagacgaaggaaaaggcaagattgttgattggttatcaaatcaggcagatattgttctgagatttcaaggtgggaataatgcaggacatacaatagtagtaaataaaaaaaaaattgctttaagtctaatcccatcaggaattattagaaaaaatacagtatctattattggtaatggagttgtggtaaatcctgtagctttattggacgaaatagataaacttaaaaaatttggattaaaaataagtcccaaaaatttagttctttcagaaaatgcaaccataatttttagttttcacagaaaatattgac

SEQ ID NO: 315858 - DNA, 592 bp, Unknown
  Bacterial polypeptide expressing nucleotide sequence isolated from the Sargasso Sea
gatgttgaccacgtggctatacccttatactacgagcagtaacaccatagccggtcaaatagaagctggtggtggagtagggctaaattcatcaaaaaaaatcgtgggaattgctaaggcatatttaacatatgtaggtcgcggtccatttccgacagaaataaaaggagaattggaagataaaattcgtgatgttggccaagaatatggaactacaactggtcgcgccagaagagttggttggattgatctagtgcagcttaagtttgctaatcaactaaatgacttttctgaaattatattaaccaaagttgatgttttatctggtctaaaaaatataaagctttgtgttggttataaggtaggtggtaaagattttacgggcgttccttctgatattcataatttcaaaaacatcgagcctgtttatgaaacgcttcctggttggggttctttgcctaaccacattgaaagcctaaatcaatgtcccgctgagctaaagaactttgttgcaagagttgaagaggttgctggagttaaggtgtctttaatttcatatgggcctgatcgaaaccaaacttttaaaatataa

SEQ ID NO: 315859 - DNA, 601 bp, Unknown
  Bacterial polypeptide expressing nucleotide sequence isolated from the Sargasso Sea
atgaaaaacgtagttgtagtaggttcgcagtggggtgacgaggggaaagggaaaattgttgattggctttcaagcgaggcagatattgtcgttcgttttcaaggtggtcacaatgctggacacaccttggtaatagatggaattacttataaactaagattgttaccatctggaatagtaagaaaaaataaaatttcgataattggtaatggtgttgttgtagatccttgggctttacttgatgaaataaaagagattaagtcaaagggtgtaattgtcgatgaaaataatttaattttatcagagtcagcaaatcttatactccctttccataaggaaatggatgaaattagagaagatgcggcaggtaattcaaagataggaacaacaagaaggggaattggacctgcttacgaggataaaattggaagaaggtcaattagagtaatggatttagtttctgaaagtaacttagaccacagattagaaacagttcttattcaccataatgcaataagaaagggtttaggaaagcaagtttataaaaaagatcaattaaaaaaagatcttttaaaaattgcaccagaaattttgaaatttt

SEQ ID NO: 315860 - DNA, 484 bp, Unknown
  Bacterial polypeptide expressing nucleotide sequence isolated from the Sargasso Sea
tactagggtaggagaaggcccttttccgactgagctaaaagataaaacaggagaattattaggcaaaagaggaaaagagtttgggactgttaccagcagaaaaagaagatgtggttggtttgacggagttctagttagacaaacaattaaaatatctgggattaatggaatagctctcacaaaacttgatgtattagatgaattagaggaaattaaaatgtgcgttaaatataaaatcaacggaaaagaaatagactatcttcctgcagcagtggacgaccaattaaaagttgaaccagtatataaagtttttcccggttggaaagtatctactaaaggaacaaggaaaattgaagatcttcctgataaagcaaaaaaatacatcaatgctttagaagaatttattggagctagaatttcaagtatttcaacaagcccagaaagacaggatacaattcttttagaaaatccttttaaggattaa

SEQ ID NO: 315861 - DNA, 181 bp, Unknown
  Bacterial polypeptide expressing nucleotide sequence isolated from the Sargasso Sea
atgaaaaatatagttgttgttggatctcagtggggtgatgaaggaaaaggtaagattgttgattggttatctagtgaagcagatgttattatcagatttcaaggaggacataatgcaggacatactctagtaatagacggagtaacatacaaattaagattattaccttcaggagtgtaag

SEQ ID NO: 315862 - DNA, 202 bp, Unknown
  Bacterial polypeptide expressing nucleotide sequence isolated from the Sargasso Sea
aatgaaaaatattgttgtagttggttctcaatggggagatgagggaaaaggcaaaatagttgattggttatctgaacaagctgatgttgtagttagatttcaaggcggtcacaacgcgggccatactcttgtaataagtggtgtaacttataaacttcgactacttccatctggaattgtaagaaaaataaaatatcaataa

SEQ ID NO: 315863 - DNA, 658 bp, Unknown
  Bacterial polypeptide expressing nucleotide sequence isolated from the Sargasso Sea
atgaaaaatgttgtagtagttggctcccaatggggtgacgaaggaaaagggaagatagttgattggctttcgagcaaagctgatgtggttataagatttcaaggtggtcataacgcaggtcacactttagttatagatgggacaacatataaattaagattattaccttcaggaatagttagaaaaaataaagtatctattattggaaatggagttgttgttgatccatgggctcttcttgatgaaattgaagaagttaaatcaaaaggtgttgaaattaatcaaaataatctaattttatctgaagcagctacattaattctaccatttcatagagagatggatgaaataagagaagactctgccgggaattcaaaaataggaactaccagaagaggcattggcccagcttatgaagataaagtaggtagaagatctataagagtaatggatctcgcatctaaaaaaaatcttgaaaataggttaacagtagttttagagcaccataatgcaatccgtaaaggattaggcaaaccaatttatcaaaaagataaattagttgaagatttattaaaattagcacctaatattttaaaatactcagctccagtctggagaaaaatagatcaacttaaatcagaaaataaaaaaattttat

SEQ ID NO: 315864 - DNA, 178 bp, Unknown
  Bacterial polypeptide expressing nucleotide sequence isolated from the Sargasso Sea
aatgaaaaacatagttgttgttggctctcaatggggtgatgaaggtaaaggtaagatagttgattggctctctgaacaagcggatgtagtaattagatttcaaggtggtcataatgctggccatacattagttatagatggagtaacatataagcttagattattgcatcaggaatag

SEQ ID NO: 315865 - DNA, 139 bp, Unknown
  Bacterial polypeptide expressing nucleotide sequence isolated from the Sargasso Sea
aatgccggttgcagttgttgtgggattgcagtggggagatgaaggcaaaggtaagatcatcgacttatttgctgaaaatgtagatgcggtggcccgttttcagggaggtcacaatgccgggcataccatttggttttga

SEQ ID NO: 315866 - DNA, 253 bp, Unknown
  Bacterial polypeptide expressing nucleotide sequence isolated from the Sargasso Sea
atgaaaaatgtagtagttgtgggatcacaatggggagatgaaggaaaaggaaaaattgtagactggctttcaagtgaagcagatgtagttgttcgttttcaaggaggtcacaatgctggccacactttagtgatagacggtattacttataaacttagattgttgccatcagggatagtaagaaaaaacaaagtttccataattgggaatggtgtagtcgtggatccttgggcgctaatagatgagataaaag

SEQ ID NO: 315867 - DNA, 292 bp, Unknown
  Bacterial polypeptide expressing nucleotide sequence isolated from the Sargasso Sea
atgaaagctaaaaatcttgccgttctgggattgcaatggggagatgagggtaaaggaaaaatagtcaactttctttcggatcgagcagatgctgcttgcagatatcaaggaggtcataacgcaggccatactcttatagttgaaggaaagaaacttgttttgcatctgttgccttcttctatttgtcatcaaaatgcaagttcacttattggaaaaggagttgttatttcttgcgaagctctttttgcagaaatcgaagagatagaaccaattgccaatggaatactggaca

SEQ ID NO: 315868 - DNA, 532 bp, Unknown
  Bacterial polypeptide expressing nucleotide sequence isolated from the Sargasso Sea
tggtccaaatactctaaattacgtcttaggaataacaatagcatatacaacaagagttggagaaggaccttttccgactgaactaaaagacttaatcggagaaaaaataggagcaaaaggaaatgaatttggcacagttactagtagaaaaagaagatgtggttggtttgatgctgcgcttgttagacaatcaataaaaatttctggaataaatggagttgctttaacaaaattagatgttttagatgagttggatgaaattaaaatgtgcatagcttatgaaattaatggaaaaaaaactgactatcttcctgcatcattagatggtcaattaaaagctaaacctatatataaaatttttgaaggttggaaatcttccacaaaaggaataaaaaattttgaagatcttccagaaaaagcaaaaaattatataaaagaaattgaaaaatttattcaaacaaaaatatcaagtatatccactagtcctgagagaaacgatacaatattgatagagaatccttttgatatttag

SEQ ID NO: 315869 - DNA, 362 bp, Unknown
  Bacterial polypeptide expressing nucleotide sequence isolated from the Sargasso Sea
aatgaaaaatgtagctgttataggatctcaatggggagacgagggcaaaggaaagattgttgattggctttccagcgaagctgatgtcgttgtaaggtttcaaggaggacacaatgctggtcatactttagtaattgatggaatcacatataaactaaggttattaccttcaggcattgtaagaaaagacaaagtatcaattattggaaatggtgttgttatcgatccttgggctttattagaagaaattaaagaaattaaatcaaaaggtgttgaaataactaataaaaacctaatcatctcagaggctgcaaatttaattttaccatttcatagggaaatggatgaaataagagaagatt

SEQ ID NO: 315870 - DNA, 430 bp, Unknown
  Bacterial polypeptide expressing nucleotide sequence isolated from the Sargasso Sea
ttcaaaagcttatactactagagttggagaagggccattttttactgaattatttgatggagatggcgaattacttgctaaaaaaggtaatgagtttggtgctactaccggaagaccaagaaggtgcggatggctggatttggtagctcttaaaaaagcagtatttacgaattctgttacagatctctgcataactaaagtagatgtgttagatgaaacaaaaattataaaagtatgtattgattatgataacgataatccggtttataaagagtttgatggttggttgtgctcaacagagggtataaccgaatactcagaattaccagaaaaagccaaggcgtatattcaatatattgaaaactttatagattgctctgcttctattatttcaacaggaccttcaagagatcaaacaatttttagatag

SEQ ID NO: 315871 - DNA, 390 bp, Unknown
  Bacterial polypeptide expressing nucleotide sequence isolated from the Sargasso Sea
gtcgaaaaagaagatgtggatggtttgatggagtattagttagacaaacaattaagatctcaggtatagatggaatagcacttactaaactagatgttttagatgaattagatgagataaaagtttgtattgagtatgatttggaaggaaaaaagattgattatcttccagtagctgttgaagatcaattaaaaataaaaccaatttataaaacctttacaggatggaaaacctcaactaaaggaattaagaatttaaatgatttaccggaaaatgctaaaaaatatgtttttgcaattgaggattttattgaggcaaaaatatctagtatttctaccagtccagaaagagatgacacgatattaattgaaaatcctttcgaaatttaat

SEQ ID NO: 315872 - DNA, 199 bp, Unknown
  Bacterial polypeptide expressing nucleotide sequence isolated from the Sargasso Sea
actggtggctgaaaatactttaatcttaggtcttcaatggggagacgaaggtaaaggcaaaattgtagataacttaagtgagtctactgatatcgtttgtaggtttcagggaggacataatgctggtcacaccattaaagttaatggtgataaaactgttcttcatcttatcccgtcaggcatattacacgagaataca

SEQ ID NO: 315873 - DNA, 487 bp, Unknown
  Bacterial polypeptide expressing nucleotide sequence isolated from the Sargasso Sea
gtattctacgagggttggtagtggtccgatgcctacggagcttcatggtgaagcggccgaaaatcttcgtgaaatagcgcatgagtatggaactacgacgggtagagcccgaagagtcggttggtttgatgcagtagcaggccgttatagcagggttgtaaacggaatgacagggatagttttaacaagattggatattctagacggatttgatacggttaagatctgtaacgggtatcgtgctgcggggcatgagatagatagatttccgtctaatacggaccttctcgctcaatgcgaacctgtttacgaagattttcccggttgggacactcctacgtctggagcaaccacatgggaagcgttgcctgagaatgcccagaattatgttcggcgtatccaagatcttgtcggctgcccggtacagattatttctactggtccaaacagagatgagacgattttactcaatccaataattgggtga

SEQ ID NO: 315874 - DNA, 517 bp, Unknown
  Bacterial polypeptide expressing nucleotide sequence isolated from the Sargasso Sea
aattatgttctcggtatagttaaagcatataccactagagttggagaaggtccatttccaactgaattaagaaatgaaataggggataaaattggtagaaagggtaaagagtttgggactgttacaaatagaaaacgaagatgtggatggtttgatgctgttttagtaaaacaaacttgcataatatccggaacaaaaggcatagctcttaccaaaatcgatgttttggacggacttaaagacttatatatttgtgtagcatataaattaaatggaaaaaaaattgattattttccaagctctttacaagatcaaaataaagtaaaaccaatttacaaaagatttaatggctggttaacaagtacaaagggtattaaaaattggaaaaatctaccaaaaaatgctcaaaagtatattaaatttattaaaaattattgcggtgttagaatttctagtatttcaacaagccccaaaagagaagacactatacttttagaaaatccttttaaaaaataaa

SEQ ID NO: 315875 - DNA, 484 bp, Unknown
  Bacterial polypeptide expressing nucleotide sequence isolated from the Sargasso Sea
aaccagagttggctcaggcccatttccaacagaaattgatgatgattatggtaagcatatggcaaagattggtgttgagtttggagcaacaacaggcagacctcgaagatgcggttggctagacctcgttgcattacgtaaagcagtcaatatcaattcaatatcacaactctgcatcacgaagatcgatgtacttgatggattagataagattcttgttgctgaagaatatgaaattgacgaaaagatatatgacactctccccgctatgagtcaaaatcgattcgagagaatttcaccaatatacaaggaatacaaaggttggtcaggaatcacatctggactgaaatcttttgatcaattaccaactgaagctaagaccttaataaaaggaatagaggaatcaatcggtgttcctgtatctttgatatcaacaggacctgatagaaatgacatgattgtcattgatcaaattttttcatga

SEQ ID NO: 315876 - DNA, 478 bp, Unknown
  Bacterial polypeptide expressing nucleotide sequence isolated from the Sargasso Sea
aatgaaaaatattgttgttgttggctctcaatggggagatgaaggaaaaggtaaaatagtcgattggctatcagagcaagctgatgttgtagttagatttcaaggtggtcataatgctggccataccttagtgatagatggaattacttataaacttcgattacttccatctggcatagtaagaaaagataagatttcaataatcggcaatggtgttgtcgttgacccatgggctctactcgaagaaatcgatgagataaaatcaaaaggtgtacaagtagatattaaaaattttattatttctgagtctgcaaacttaatattgccatttcataaagaaatggatgaaataagagaagatgctgcgggtaaaggtaaaataggaacaacgagaagaggtataggacctgcctatgaagataaagtaggaagaagatcaataagagttatggatttaagatcagaaaaaaatcttgat

SEQ ID NO: 315877 - DNA, 232 bp, Unknown
  Bacterial polypeptide expressing nucleotide sequence isolated from the Sargasso Sea
atgaaaaatatagtagtagttggttctcaatggggagacgagggaaaaggaaagatagtagattggctttcaagtgaagctgatgttgttgtaagatttcaaggaggtcacaacgcaggacatactttggtcattgatggaattacatacaaattaagattattaccctcaggaatcgtaagaaaagataaaatttctattattggaaatggtgtagtaattgatccgtggc

SEQ ID NO: 315878 - DNA, 638 bp, Unknown
  Bacterial polypeptide expressing nucleotide sequence isolated from the Sargasso Sea
aatgaaaaatattgttgttgttggttctcaatggggagatgagggaaaaggcaagatagtggattggttatccgaacaagctgatgttgtagttagatttcaaggtggtcacaacgcgggccatactcttgtaattaatggtgtaacttataaacttcgactacttccatccggaattgtaagaaaaaataaaatatcaataattggaaatggagttgtcgttgacccctgggcactattagatgaaattgaggaaattaaatcaaaaggagttaaggtcgacgctgataattttataatttcagagtctgcaaatttaattttaccttttcatagagaaatggatgaaatccgtgaagatagtgcgggtaaaggaaaaattggaacaaccagaagaggtatcggaccagcatatgaagataaagttggtagacgatcaataagagtaatggacttgagatctgaaaaaaatctggatcaaaggttagagtctgttcttttacatcataatgcaattagaaaaggcttaggtaaaaaaatctatgagaaagatcaattaaaaaaagatttattaaaaattgcccccaaaatcttgaaattttcaaaaccagtttggttgaaacttgatgaatttaaaa

SEQ ID NO: 315879 - DNA, 211 bp, Unknown
  Bacterial polypeptide expressing nucleotide sequence isolated from the Sargasso Sea
ccggtccatggagaaagagaccgggcaagggaggcccaaaggggcatggccaaaatgggcacgacgggacgaggtatagggcctgctaacgaggacaaagtaggacgaagagcggtaagggccccggacctggcagacgagaccacctggccaaaacgaatggataggctcctgcagcatcataaaactctgcgaaagggcagggggtgag

SEQ ID NO: 315880 - DNA, 363 bp, Unknown
  Bacterial polypeptide expressing nucleotide sequence isolated from the Sargasso Sea
aatgaaaaatgttgtagttgtaggctcgcaatggggtgatgaaggaaaaggaaagatagtagattggctttctagtgaggccgatgtagttgtaagatttcagggaggtcataatgcaggccacactcttgttatagacggagttacatataaactaagattgttaccatctggaatagttagaaaaaataaaatttctattataggcaatggcgtcgttgtagatccctgggctctattagatgaaataaaagaaattaaagagaaaggcgttgacgtaaatgaaaataatttaattgtatcggaagctgcagacttaattcttccttttcatgaagaaatggatgaaattagagaagattc

SEQ ID NO: 315881 - DNA, 440 bp, Unknown
  Bacterial polypeptide expressing nucleotide sequence isolated from the Sargasso Sea
gatgaataatgtagtcgttgttggatcgcagtggggagatgaaggaaaagggaaaattgttgattggttatccagcgaagcagatgttgttataaggttccaaggaggacataatgctggtcataccttggtcattgatgatgttacttataaattaagattattaccatctggaattgtaagaaaaaataaaatttcaattataggaaatggagttgttgtagatccttgggctcttttagatgaaattgaagaaattaaatctaaaggtgtagaaatcaatgaaaataatctgatactatcagagggtgccacgttaattttaccatttcatagagagatggatgaaattagagaggactctgctggtaaatcaaaaattggaactaccagaagaggaattggaccggcatatgaggataaagtaggaagaagatcaa

SEQ ID NO: 315882 - DNA, 304 bp, Unknown
  Bacterial polypeptide expressing nucleotide sequence isolated from the Sargasso Sea
gatgaaaaatatagttgttgttggctctcaatggggagatgaaggaaaaggcaaaatagttgattggctttcagaacaagctgatgttgtagttagatttcaaggtggtcataacgcaggacatactctagttatagatggtacaacgtataaacttagattgttgccctctggaattgtaagaaaaaataaaatttctataattggaaatggtgttgttgttgatccttgggctttgctcgaagaaatagatgaaattaaatcaaaaggtgtgcaagttgatattgataattttattatttct

SEQ ID NO: 315883 - DNA, 371 bp, Unknown
  Bacterial polypeptide expressing nucleotide sequence isolated from the Sargasso Sea
tatgaatctaaatatttctttacttggtctgcagtggggtgacgaaggaaaaggcaaggtagtggattatcttgcaaatgatctagatgctgctgttaggtatcagggcggtcacaatgcaggtcacacgttaatagtgaatggaaaaaaaattgtttttcatttattaccttcagcaatatgtcacaaaaatataaaatgctttatcgcaagaggagttgttgtaagtctagatgctttattctcagagttagccgaagcgaatgaagttttaggagatattgaagacagactcataataagttcagcttgcagtcttattcagccttatcacataaagttagatcagcttagagagcagtctgctaatt

SEQ ID NO: 315884 - DNA, 466 bp, Unknown
  Bacterial polypeptide expressing nucleotide sequence isolated from the Sargasso Sea
gatgaaaaatgttgtagtagttggatcacaatggggagacgaagggaaaggtaaaattgtagattggctatctagcgaagcagatgtagttataagatttcagggtggtcataatgcaggacacactttagttatagatggcaagatttttaaattaagattattaccttcaggaatagtcagaaaaaataaaatatcaataatcggtaatggtgtagttgtagacccctgggcactcgttgatgaaattgaagaaattaaaaaagaaggtgtactaataaatgaagaaaatctctttttgtctgaagctgcaaccttaattttacctattcatagagaattagatgcattgagagaagataacgctaaaaactcaaaaataggaaccactagaagaggtataggcccagcctacgaagataaagttggacgaagatcaataagagtaattgatttattgtcagag

SEQ ID NO: 315885 - DNA, 247 bp, Unknown
  Bacterial polypeptide expressing nucleotide sequence isolated from the Sargasso Sea
aatgaaaaatattgcagtagttggttcgcagtggggagatgaaggaaaaggaaaaattgtggattggctatcagaacaagctgatgttgtgataagatttcaaggtggacacaatgctggacataccttagttatagatggagtaacttacaaacttcgattgcttccttcaggaatagtcagaaaaaacaaagtttcaaattattggaaatggtgttgtagtcgacccttgggcattattggatga

SEQ ID NO: 315886 - DNA, 487 bp, Unknown
  Bacterial polypeptide expressing nucleotide sequence isolated from the Sargasso Sea
atgaaaaatatagttgttgttggatctcaatggggtgacgaaggtaaaggaaaaattgttgattggttatctgagcaggccgatatagtaataagattccaaggaggccacaatgcaggccatactttagtgattgatggtgttacatataaattgagattattgccatctggaatagttagaaaaggtaaaatatcaattattggcaacggagttgtagtagatccatgggctttattagaggaaatagaagaaataaaatctaaaggcgtagaagtaaatgtaaataattttattatatcagagtctgcaaatttaattttgccttttcataaagaaatggatgagattagagaggatgcagcaggaaaaagcaaaataggaacaacaagacgcggtattggaccagcatatgaagataaagttggaagaagatctataagagtaatggatctaagatctgaaaaaaatttagatcaaagactcg

SEQ ID NO: 315887 - DNA, 167 bp, Unknown
  Bacterial polypeptide expressing nucleotide sequence isolated from the Sargasso Sea
tatgagtaatttaatctctctattaggccttcagtggggagatgaaggaaaaggaaaagttgttgatcacttggcaaaggatcttaaagcggcagttcgatatcaaggagggcataatgcaggacatactttgatcataggtggagataaagttgtattccacttac

SEQ ID NO: 315888 - DNA, 226 bp, Unknown
  Bacterial polypeptide expressing nucleotide sequence isolated from the Sargasso Sea
atgaaaaatatagtagttgttggatcgcaatggggagacgaaggaaagggtaagatagttgattggctatctgaacaggctgatattgttgtaagatttcaaggaggtcacaatgccggacatactcttgttattgatggcgtaacttataaattaagattattaccctcaggaatagtaagaaaaaataagatttcaattattggaaatggagtagtagttgatc

SEQ ID NO: 315889 - DNA, 202 bp, Unknown
  Bacterial polypeptide expressing nucleotide sequence isolated from the Sargasso Sea
atgaaaaatgtagttgtagtcggatcacaatggggggatgaaggaaaaggtaaaattgttgattggctatcaagtgaagctgacgtaattgtaagatttcaaggtgggcataatgctggccacactcttgttatagatagtatagtttacaaactaagactgttaccatcaggaatagttagaaaaaataaaatttcaatta

SEQ ID NO: 315890 - DNA, 304 bp, Unknown
  Bacterial polypeptide expressing nucleotide sequence isolated from the Sargasso Sea
aatgaaaaacatagttgttgttggatctcaatggggtgatgaaggaaaaggtaagattgttgattggttatctgaacaggcagatgtagttattaggtttcaaggtggtcataatgcgggccacactcttgttattgatggcgttacttataagctaagattacttccatctggcgttgttagaaaaggtaaaatatcaataattggtaatggtgttgttgtagatccttgggccttattggaagaaattgaagagattaaatctaaaggtgtagaagtagatgtaaataactttataatatca

SEQ ID NO: 315891 - DNA, 208 bp, Unknown
  Bacterial polypeptide expressing nucleotide sequence isolated from the Sargasso Sea
atgaaaaatgttgttgttgtaggttctcagtggggcgatgaaggaaaaggaaaaattgtagattggctttcaagtgaagcagacgttgtaattcgttttcaagggggccacaatgctggacatactttagttatagatggagttacttataaacttagattgttgccatcaggcatagtaagaaaaaataaaatttcaatcatcggca

SEQ ID NO: 315892 - DNA, 160 bp, Unknown
  Bacterial polypeptide expressing nucleotide sequence isolated from the Sargasso Sea
aatgaaaaatgtagttgttgttggctcacagtggggcgatgaaggaaaaggaaagattgtagattggctttcttctgaagctgacatagtggtccgttttcaaggaggccataatgcagggcataccttggttgtagatggcataacttataaactttag

SEQ ID NO: 315893 - DNA, 608 bp, Unknown
  Bacterial polypeptide expressing nucleotide sequence isolated from the Sargasso Sea
aatgtcagtagatgtattattaggtctccaatggggagatgagggaaaaggtaagatagttgattttttagctccaaaatatgatttaattgccagatttcaaggtggtccaaatgctggacacactcttgaatttgatggaattaaacatgtattacatcagatcccttctggaatttttagagaagataaacataatattattggaaacggtgttgttttagatccagtaatttttatgaatgaagtttctcaaatacataaaaaatttaatataaatcttgaagaaattttatcgatttccactagggctcaattaatttctcctgtacacagacttctagataaggttcttgaagaaaataaaggagaaaaaaaaataggatctactctgaaaggaattggaccaacttatcaagataaaattggtaggcatggtcttcgagtaggggaagttctatctaataattttaaagaaaagtataataaacaaaaagcttaccatgattactttctagaaggtcattataatgagaattttctaaaagaggaagaaaagttttttgaatcaattaatgaattaaaaaaatttaaaattttagacacag

SEQ ID NO: 315894 - DNA, 412 bp, Unknown
  Bacterial polypeptide expressing nucleotide sequence isolated from the Sargasso Sea
cgtaaaaagggatcagaatatggcacaacaacagggagaccgagacgtgttggctgggttgacctagtccaggtaaggcaagctgttcgcgtaaatgggctaactgaaatagcactaacgaaattagatgtcttgagcggcttcgaatctattaaagcatgcacaagctacagcattggtgaaacaaagatacatgaaattcctgctagcttgactgattttcgcaaggcaaaaccaatatactcagagatgacaggatgggaaagcattcccgatcatatttgggataagggttacaattttttcccagaaacactaaaacaatacatccgcttcattgaagaggaagttaactgtccaattaaaataatttctgttggcccacagcggcacgaaaccgtcataagatagt

SEQ ID NO: 315895 - DNA, 664 bp, Unknown
  Bacterial polypeptide expressing nucleotide sequence isolated from the Sargasso Sea
aatgaaaaatgtagttgttgttggttctcagtggggagatgagggaaaaggaaaaattgtggattggctttcaagccaagcagacatcatagtaagatttcaaggtggacataacgcaggtcatactcttgtcattgataatgttacatacaaattaagattacttccatcaggtattgttagaaaaaataaaatatcaattataggtaatggggttgtggttgatccatgggccttgcttgatgaaattgaggaaataaaatcaaaaggagtagatgtatctactaaaaatctaatcatatctgaagctgcaaatttaattttaccttttcataaagaaatggatgaattaagagaaaatgctgcaggtaaaaatcaaattggaacaacaagaagaggaataggccctgcatacgaagataaagtaggtagaagatcaatcagagtcatggatcttatatcagaaagaagtttagattccagattagataatgttctattacatcataatgttataagaaaaggccttggaaaagaattttataaaaaagataaactaaaaaaagatttacttaaaattgctcctgaaatattaaaatattctcaaccagtctggaaagtaattgataaatttaaatctgaaaaaaaaaaaatattattgaag

SEQ ID NO: 315896 - DNA, 496 bp, Unknown
  Bacterial polypeptide expressing nucleotide sequence isolated from the Sargasso Sea
gacgaggttataggtattactaaagcctacacgacccgggttggagaaggacctttccctacagaacttcactcccctcttggtgaaaaaattcaacaaattggtggtgagtttggtgctacgacaggaagaaaaagaagatgtggttggctagaccttccattacttaaatactccattaaatcttcctgtatcacttcaattgctttaacaaagcttgatgtattatctgaaattgaagagcttaaagtatgccgagcatataaatataaaggtcaggaaattgatattgcctacccaggaattgatctttctcaggttgagccaatatttgaatctttttctccatttaatgatcagtttgatggagctcctttatcaaatgaacttaagcgctatattgctttaatagaagatagttgccaggttgatgtgggaattattgctttcggtccagaaagaaatcagatacaatttagaaaagaattcttttaaa

SEQ ID NO: 315897 - DNA, 385 bp, Unknown
  Bacterial polypeptide expressing nucleotide sequence isolated from the Sargasso Sea
atgaaaaatgtagtagtagttggatcacaatggggagatgagggcaaaggaaaaatagtggattggctatctagtgaggccgatgttgtagtaaggttccaaggtggtcataatgcgggacatactttagtaatagatggaaaaacttacaaactaagattgttaccttcaggaatagttagaaaaaataagatatcaataattggtaatggtgttgtagttgatccatgggcattaattgatgaaattgaagaaattaaaaaagaaggtattgatataaacgagaaaaatttatttttgtctgaggctgcgactttaattttgccaattcatagggaaaaagattcgatcagagaagatagtgataaaaatttaaaaataggta

SEQ ID NO: 315898 - DNA, 587 bp, Unknown
  Bacterial polypeptide expressing nucleotide sequence isolated from the Sargasso Sea
aatgaaaaatgtagctgttgtcggatctcagtggggcgatgaaggaaaaggaaaaattgttgattggctctcaagtgaagcagatgtagttgtaagatttcagggcggacataatgctggacatactttagtaatagatggagttacctacaaattaagattacttccatcaggaattgttagaaaaaataaaatatcaattattggtaacggggttgtggttgatccatgggcgttattagatgaaataaaagagataaaatcaaaaggagtggagatatctgaagaaaatttaattttgtcagagtcagctaatttaattttaccttttcacaaagaaatggatgaaataagagaagatgcagcaggaaaagcaaaaattggcacaacaaggaggggtataggaccggcatatgaagataaagtaggcagacgatctatcagagtaatggatttaatttctgaaaaaaatttagatcataggcttgaaactgttttaatgcatcacaatgcaattagaaaaggtttaggaaaagaaatgttcgaaaaagataaattgaaaaaggaacttcttgaaattgcacccc

SEQ ID NO: 315899 - DNA, 449 bp, Unknown
  Bacterial polypeptide expressing nucleotide sequence isolated from the Sargasso Sea
aaaagatgaaataggagaattattggggactcgaggaaaagaatttggaactgttactagcagaaaaagaagatgcggttggttcgacggtgttctggtgagacaaaccattaaaatttctggtattgatggaattgcacttactaaattggatgtattagatgaattagatgaaattaaaatgtgtatacattatgagttagatggaaaaaaaattgattatttaccagcagctgtagaggatcaattaaaaataaaaccgatatttaaaactttcccaggatggaaagctacaacaagtggaataaaaaatatggttgatttaccagaaaatgcaaaaaaatatatttttgcaattgaggatttcataggtgcaaaaatttcaagtatatctactagtccagagagagaagatacaatattagttgaaaacccttttgatgtttaat

SEQ ID NO: 315900 - DNA, 652 bp, Unknown
  Bacterial polypeptide expressing nucleotide sequence isolated from the Sargasso Sea
aatgaaaaatgtagttgtagttggatcccagtggggtgacgagggaaaagggaagatagttgattggttgtccagtgaagctgatattgtagtcagatttcaaggcggacataatgcaggtcatacattagttatagatggtattacttataagttaagacttcttccatcgggtatagttagaaaagacaaaatttcaataatcggaaacggtgttgtggttgatccatgggcactgttagacgaaattgaggaaatcaaattaaaaggtgttcaagttagcccagaaaatctaataatatctgaatctgcaaatttaatattaccttttcataaagagatggatgaaattagagaggatgctgcaggaaaagctaaaattggaactacaagaagaggcatcggacctgcctatgaggataaagtaggaagaagatctataagggttatggatttaatctctgaggaaaacttagaccatagacttgagactgtgttaatgcatcataatgcaataagaaaaggtctaggaaaggaaatttatcaaaaaaacaaattaaaaaaagatttattaaaaattgctccagaaattttgaaatactcaaaaccagtgtggaaaaaaattgatgagtttaaaacaaaaaggaaaaaa

SEQ ID NO: 315901 - DNA, 598 bp, Unknown
  Bacterial polypeptide expressing nucleotide sequence isolated from the Sargasso Sea
gatgaaaaatgtagttgtagtcggttcacaatggggagatgaaggaaaaggtaaaattgttgattggctctctagcgaggctgatataattgtaagatttcaaggtggacataatgctgggcatactcttgttatagatagtgtagtttataaattaagactgttgccatcaggaatagttagaaaaaataaaatatctataattggaaatggagtagtggttgacccattggcactattagaagagataaatgaaattaaatctaaaggcgtagaagttaaccctgataatttaattttatctgaatcagccactcttattttaccatttcataaagaaatggatgacatcagagaagatgctgcaggaaaatcaaaaataggaactacaagaagaggaattggaccagcgtatgaagataagattggaagaagatcaataagagtaatggatctagcatcagaaaataatttggataaaagattagacgtagtattaagtcatcacaatgctataagaaaaggcttaggaaaaactaaatttaaaaaagagcaattaaaaaaaaatcttttaaatattgcaccacataatacttaa

SEQ ID NO: 315902 - DNA, 422 bp, Unknown
  Bacterial polypeptide expressing nucleotide sequence isolated from the Sargasso Sea
aatgaaaaatatagtcgttgttggatctcaatggggtgacgaaggcaaaggaaaaattgttgactggttatctgaacaggctgatgtagtaataagattccaaggaggtcacaatgctggccatactttagtgattgatggtgttacatataaattgagactactgccatctggaatagttagaaaaggtaaaatatcaattatcggcaatggagttgtcgtagatccatgggctttattagaggaaatagaagaaataaaatctaaaggcgtagaggtaaatgtaaataattttattatttctgagtctgcaaatttaattttgccttttcatagagaaatggatgagataagagaggattcagcaggaaaaagtaaaataggaactacaagacgtggaattggacctgcatacgaagata

SEQ ID NO: 315903 - DNA, 598 bp, Unknown
  Bacterial polypeptide expressing nucleotide sequence isolated from the Sargasso Sea
aatgagaaatgttgtagtagttggctcacaatggggcgatgaaggtaaaggaaaaatagttgattggctttcaagcgaggcagatgtagttattagatttcaaggtggacataacgcaggccatacactagttattgacggagtcacatataaattaaggttattaccctctggtatagttagaaaaaataaaatttcaataattggaaatggtgttgtagtagatccatgggctctattagaagaaataaaagagattaaatcaaaaggtatagaaatttctgaaaaaaatctaattttatctgaggcagcaaacttaattttgccttttcatagagaaatggatgaaatcagagaagatacagctggaaaagcaaaaattggaacaacacgaagaggaataggcccagcgtatgaagataaagttggaagaagatcaattagagtaatggatttaatttctgaggaaaacttaaatcacagattagagactgttttaatgcatcataatgctataagaaaaggtcttggaaaagagatattccaaaaagatcaacttaaaaaagaattacttgaaattgcaccaaaaatattaaaa

SEQ ID NO: 315904 - DNA, 481 bp, Unknown
  Bacterial polypeptide expressing nucleotide sequence isolated from the Sargasso Sea
atgaataatgttgttgttataggttcccaatggggagatgaaggtaaaggcaaaattgtagattggctttcaagtaaagctgatgttgtaataagatttcaaggcggacacaatgccggacatacattggttgtagatggcgttacatataaattacgacttcttccttctggaatagtaagaaaaaatacaatttcaataataggaaatggagtggtagttgatccatgggctttgttagatgaaattaaagaaataagttctaaaggtatagagataactccaaaaaatttaattatatcagattctgcaaatttaattcttccttttcataaagaattggatgaaataagagaggatgcagctggaaaagcaaaaattggaactacaagacgaggaataggccctgcttatgaggacaaagtaggaagaagatctataagaataatggatttagcctctgagaaagatttagataaaa

SEQ ID NO: 315905 - DNA, 528 bp, Unknown
  Bacterial polypeptide expressing nucleotide sequence isolated from the Sargasso Sea
gagttggtatagacccaagaatgatagattattccctaggtatagctaaggcatatactactagagtaggagaaggtcctttccctacggaattggatgattcagttggagagcacatagctaaagtaggaggagaagtcggagcaactacaggcagaccaagaagatgtggttggctagatgctgtacttttatctcacacagtaaaattaaatggaattgatggtctctgtcttacaaagattgatgtcttagatggattagatgaaattaaaatttgcaccgattatgaaggaaattctctaaatgatcttttggaaaccatgtctattgaagaggtaaagccatcatatatttctatgccaggatgggaaaaaccatgcgcaggaatcagggattatgagcagctagatggtaaggctaaatcttatatagaaaagatagaatctctatgtggagctcctattgttatgatttctacaggccctagacgagaggatactattgttagacaataccctctatgat

SEQ ID NO: 315906 - DNA, 435 bp, Unknown
  Bacterial polypeptide expressing nucleotide sequence isolated from the Sargasso Sea
gtgcgcttctaggtaatcgaggaaaagaatttggcacagttactaacagaaagagaagatgtggatggtttgatggtgttttagtgagacaaacaataaaaatatcaggcattgacggtattgctttgactaaattagatgttttggatgaattagaagagataaaaatttgtattgcctacgatctggagggtaaaaaaattgactatttaccaacatcagttgatgagcaattaaaagtgaaaccaatttataagatctataaaggttggaaatcatcgactgaaggtattaaaaactttgatcaattgcctgaaaatgcaaaaatttatattaaagatcttgaaaaatttatagaaactaaaatttctagcatttctactagtcctgaaagaaacgatacaattcttttagaagatccttttaaaatttaat

SEQ ID NO: 315907 - DNA, 365 bp, Unknown
  Bacterial polypeptide expressing nucleotide sequence isolated from the Sargasso Sea
aatgtctgtagatttaatattagggcttcagtggggtgatgaagggaaaggaaaaattgtagattttcttacaaattcttatgaaattatagctcgttttcagggaggtccaaatgcgggacatacacttgaatttgatggtataaagcacgttttacatactatcccctctgggattttccactcaaatgtccaaaatttaattggtaatggtgtagttattgatcctgtgatttttaaaaaagagatagaaaaccttaatcaatttaaaatagatttatattccaaacttttaatttcaaataaagctcatattatattaccaactcatcgaatacttgatgctgtctctgaaagatcaaagc

SEQ ID NO: 315908 - DNA, 487 bp, Unknown
  Bacterial polypeptide expressing nucleotide sequence isolated from the Sargasso Sea
attactaaggcttacactacaagagttggcgaaggaccttttcctactgagttgtttgatgagatgggaacttacttagctaatacgggtggagaggttggagctactactggaagacctagaagatgtggatggctagatggtttccttctaaagaatatggtcaaagtcagtggagtagacggactgtgcttaactaagatagatgttttggacggattagaaaaaataaagatttgtaatgcttattctggtgaccttactgaagctgaaatgattgaaactatggatctagagcttgctcagccagaatatctagagatgccaggctggtctaaacttacagcaggacaaacttcatatgaagaactcgatgataatgctaaagcttttgttgagaaaatagaagaaatttcaggagttcctgttattatgatttcaactggtcctaagcgcgaagatacaattattagaaaatatatataag

SEQ ID NO: 315909 - DNA, 184 bp, Unknown
  Bacterial polypeptide expressing nucleotide sequence isolated from the Sargasso Sea
attgataggtaaatatgtgagcaatatagtagttgtcggaagtcaatggggtgatgaaggtaagggaaaaattgttgattacctgtcagaaaatgctgatgtaattgttaggtttcagggaggccataatgcaggccatactcttgtaattaatgaaaaaacttacaaattgtctatattacct

SEQ ID NO: 315910 - DNA, 298 bp, Unknown
  Bacterial polypeptide expressing nucleotide sequence isolated from the Sargasso Sea
ttgtctgagaatactttaatccttggactccaatggggtgacgaaggtaaaggtaagatagtagacaacttaagtaaatctgttgatgcagtttgtcgtttccaaggaggtcataatgctggccatacaatcaaagtcaatgatgagcaaacagtccttcatttaataccatctggcattcttcatgataatgcaaaatgtttaattggaaatggagtagttcttgctttagatgcattgcatgacgagattgctaaacttagagataagggtataaattttcataatagattttata

SEQ ID NO: 315911 - DNA, 547 bp, Unknown
  Bacterial polypeptide expressing nucleotide sequence isolated from the Sargasso Sea
atgaaaaatgtagtcgttgttggatctcagtggggagatgaaggaaaaggtaaaatagttgattggttatccagcgaagccgacgtagttataagattccaaggaggacataatgctggtcatactctggtaatagacggtgttacttataaattaagattattgccttctggaattgtaagaaaaaataaaatttctattataggaaatggagttgttgtagatccttgggcgctactagatgaaattgaagaagctaaatccaaaggtgtagaaattaatgaaaataatctcatattatcagaggctgctacattaattttaccatttcatagagagatggatgaaataagagaagactctgcaggtaaatcaaaaataggaactactagaagaggtattggtccagcatacgaagataaagtaggaagaagatctataagagtaatggatcttgcatcaaaacaaaatcttgaaaatcgattatcgctcgtacttgagcaccataatgccatccgaaaaggattgggaaagcccaatatatgaa

SEQ ID NO: 315912 - DNA, 484 bp, Unknown
  Bacterial polypeptide expressing nucleotide sequence isolated from the Sargasso Sea
aacacgagttggtgaaggcccattccctacagaattaacagatgaaaccggagaagaacttggtaccaaaggtaatgagtttggaacagtaaccagcaggaaaagacgttgtggttggttcgatggtgttttggttagacaaacaattaaaatttcaggtataaatggaattgccttaacaaagctcgatgttttagacgatcttgatcatattaaaatgtgtgttggatatgagttaggaggaactaaaattgattatttaccagctgcagtggatgaccaattaaaagtaaagccaatttataaaatttttgaaggttggaaatcatcaacaaaaggtattaaaaactttaaagatttacctgaaaatgcaaaaaaatatattaatgagttagaaaaatttattgagactaaagtatcaagtatatcaacaagcccagaaagaaatgatacaatcttgattgaagacccttttaaaaattag

SEQ ID NO: 315913 - DNA, 142 bp, Unknown
  Bacterial polypeptide expressing nucleotide sequence isolated from the Sargasso Sea
tatgccagctgacgtagttattggtggacaatggggggatgagggaaaaggtaaagtaattgatttattagcttcaaaatactctgttgttgcaaggttttcgggaggtaataatgctggacataccgttatcaatgatcag

SEQ ID NO: 315914 - DNA, 343 bp, Unknown
  Bacterial polypeptide expressing nucleotide sequence isolated from the Sargasso Sea
aatgaaaaatgtagttgttgttggatcccagtggggagacgaaggaaaaggaaaaattgttgattggctttccagtgaagctgatgtggtaataagattccaaggtggacataatgctggtcatactttagtgatagatggcattacatataaattaagattattgccctcaggaatagttagaaaaaataaaatatcaattattggcaatggagtagttgttgatccttgggccttacttgatgaaattgacgaaataaaatctaagggggtagaaattaatcaaagaaatttaattatatctgaggcagcaaatttaattttacctttccataaagaaaaa

SEQ ID NO: 315915 - DNA, 533 bp, Unknown
  Bacterial polypeptide expressing nucleotide sequence isolated from the Sargasso Sea
tggaacctatccctatgttacttcatcaagcactacaataggtggggtctcatcaggtcttggaataggcccaaagcacattaaaaatgtaatcggaattgttaaagcatatgcaacaagagtcggagaaggaccatttatgactgagctttttgataaggatggagaagaaatagctaaaagaggtaatgaatttggagcaactaccggcagaccaaggaggtgtggatggcttgatgttgttgctctaaagaaagctatttttataaactctgttgacagtttatgcatgaccaaagccgatgtgctagatacttttgaaaatataaatgtttgcatagcctatgatgataaggacttaccaatttataagaaatttgaaggatggcaagaggatactagtcaatgtagctcatatgatgaactaccaaaacaattaaaggactatataaaatttattgagcaatctgttaactgtaaagtgagtataatttctgtcggaccttcgagggagcaaagcattcatctttaga

SEQ ID NO: 315916 - DNA, 145 bp, Unknown
  Bacterial polypeptide expressing nucleotide sequence isolated from the Sargasso Sea
aatgccaaatgttacagttgtaggagctcaatggggtgacgaaggtaaaggcaaaatagttgattggctttccaacgaagcagatatagttgttagatttcaaggaggaaataatgcaggacacacaattgttgtggataaaaaa

SEQ ID NO: 315917 - DNA, 295 bp, Unknown
  Bacterial polypeptide expressing nucleotide sequence isolated from the Sargasso Sea
atgggaaatgtaacagttataggtgctcagtggggtgatgaaggaaagggaaaaatagtagattggttatcaaatcaagcagatatagtttttagattccaaggtggaaataatgctggtcacacaattgttatcaaaaagaaaaagatcgcattaagtttaattccatcaggaattatcaggaagggaacggtatcaataataggtaatggtgttgttgtaaaccctctagcacttttagatgaaataaaaagtttaagaagacacggtgtgaatataaatttcaaaaaatttt

SEQ ID NO: 315918 - DNA, 547 bp, Unknown
  Bacterial polypeptide expressing nucleotide sequence isolated from the Sargasso Sea
atgaaaaatatagtcgttgttggatctcaatggggtgacgaaggtaaaggaaaaattgttgattggttatctgaacaggctgatgttgtaattagattccaaggaggtcacaatgctggccatactttagtgattgaaggtgttacatataaattgagattattgccatctggaatagtcagaaaaggtaaaatatcaattattggcaacggagttgtcgtagatccatgggctttattacaggaaatagaagagataaaatctaaaggagtagaagtaaatgtaaataattttattatttcggagtctgcaaatttaattttgccttttcatagagaaatggatgaaattagagaggattcagcgggaaaaagcaaaataggaactacaagacgtggaataggaccagcatacgaagataaagttggaagaagatctataagagttatggatctaagatctgaaaaaaatttagatcaaagactcgactctgtattagttcatcataatgcgattagaaaaggccttaggaaaaaaaatttttgaa

SEQ ID NO: 315919 - DNA, 379 bp, Unknown
  Bacterial polypeptide expressing nucleotide sequence isolated from the Sargasso Sea
tatgttttatacagttataggaactcaatggggcgatgaaggaaagggaaaaattgttgattggctttcttctaaggctgaagctgtagttaggtttcaaggaggaaataatgcaggccatacattaaaaattaaaaacaaagtttttaaacttaatttattaccttcaggtatcattagaggcaaaaaatgcattataggaaatggagtcgtgcttgatccatgggctttgcaagaagaaattctaaaactaaaaaaacaagggatcaaaattaattctaaaaatttacaaattgctgaaaatatttgtttgatattaccattgcacaagattttagatacaataaatgagtctaatagaggtaaagaaagtttagga

SEQ ID NO: 315920 - DNA, 375 bp, Unknown
  Bacterial polypeptide expressing nucleotide sequence isolated from the Sargasso Sea
aatgaaaaatgtagttgttgtaggatcgcaatggggtgatgaaggaaaaggaaaaattgttgattggttatcaagcgaagcagatgtagttgtaagatttcaaggtggtcataatgctggtcacacactagttattgatggagttacttataagcttagattgttaccatcgggaatagtcagaaaaaataaaatatcaattattggaaatggtgttgttgtagatccttgggcactattagatgaaatcaaagaaataagagaaaaaggtattgaagttgacgaaaacaattttattatatctgagtctgcaaatctaattcttccatttcataaagaaatggacgaaataagagaggactctgctggaaaagc

SEQ ID NO: 315921 - DNA, 193 bp, Unknown
  Bacterial polypeptide expressing nucleotide sequence isolated from the Sargasso Sea
aatgaaaaatgttgttgtagtaggttctcagtggggtgacgaaggtaagggaaaaattgtagattggctttcaagcaaagcagatgttgtagttcgttttcaaggcggtcacaatgctggacatactttagttattgacggggttacttacaaactaagattactaccgtctggtatagtcagaaaaaataaa

SEQ ID NO: 315922 - DNA, 487 bp, Unknown
  Bacterial polypeptide expressing nucleotide sequence isolated from the Sargasso Sea
atggtctgcggtatcacaaaggcttattcaacaagagtgggtcacggtcctttcccctccgaattgaataatgagcaaggtgaaaaaattggtaaaattggtggagaagtaggagccacaactggcagagcaagaagatgcggctggttagacttaaaagttttaaaaaaagcaatccaaataaataatctatcaggaatagcattgactaaaatagatgtcttagatcactttgacaaaatatcaatttgtacaaattatggctcgattaattatgaaacatttgaagtagaagatcttgaattcattactctacctggttgggagtcatctactgttggcgttaaagaatttaatagtttacctaaaaatgcaaagacatatatagaaactattgaaaaattaactgatactcccatagatattatttccactggcccagctagagaggagattattcaaaaaaaaaatatattaaatgattgat

SEQ ID NO: 315923 - DNA, 442 bp, Unknown
  Bacterial polypeptide expressing nucleotide sequence isolated from the Sargasso Sea
atgaaaaatgtagttgtagtcggatcacaatggggagatgaaggaaaaggtaaaattgttgattggctatcaagtgaggctgatgtaattgtaagatttcaaggtggtcataatgctggccacactcttgttatagatagtatagtttacaaattaagactgttaccatcaggaatagttagaaaaaataaaatatcaattattggaaatggcgtagtggttgatccatgggcacttttagatgagattgatgaaattaaatctaaaggtgtagaagttaatcctgataatttaattttatctgaagcagccactcttatattgccatttcataaagaaatggatgagattagagaagatgcagcaggaaaatcaaaaataggaactacaagaagaggaataggaccagcgtatgaagataagattggtagaagatcaataa

SEQ ID NO: 315924 - DNA, 406 bp, Unknown
  Bacterial polypeptide expressing nucleotide sequence isolated from the Sargasso Sea
atgaagaatgtggtagttgttggttcgcaatggggtgacgagggtaaaggtaaaattgtagattggctttctagtgaagcagatgtagttgttaggtttcaaggaggacacaatgctggccacacactagtaatagatggtattacttataaactaagattgctaccatcaggaatagttagaaaagataaaatttcaataattggcaatggtgttgtagtagacccatgggcatttcttgatgagataaaagagattaggtcaaaaggtgtaactgttgatgaaaaaaatttaattttatcagaatcggcaaatctaattcttccttttcataaggagatggatgaaattagagaggatgcagccggtaaagctaaaataggtaccacaagaagaggaattggtc

SEQ ID NO: 315925 - DNA, 530 bp, Unknown
  Bacterial polypeptide expressing nucleotide sequence isolated from the Sargasso Sea
tattggatctggagttggtccaaaaaatatagatcgtattgttggagtaacaaaagcttacatatctcgagttggaagtggaccatttataacagaacaaaaaaatcaaattggtgactacctaatcgaaaagggtgcagagtttggtgtagttacaggtcgtagaagaagatgtggttggcttgatctaatttctttgaaatattcagtaagagttaattctttaactgagctatttataactaaacttgatgtcctctctggactagaaaaaataaatttatgtgttggatataaatatgaaaatgaagttttcacagattatccatataaagaaagtgttcattataaagctgagcctgtttatcaagcttttgatggctggacagaagatatttcctctgtaaagagtttcgaagacttaccaaaaaatgcacaaaattacatcaaaacaattgaagactttactaaagtacccataacgttcatctctgttggacctgagagaacagaaaatataataatttaaa

SEQ ID NO: 315926 - DNA, 408 bp, Unknown
  Bacterial polypeptide expressing nucleotide sequence isolated from the Sargasso Sea
aatttggaactgttacaagtagaaaaagaagatgtggttggtttgatggagttttggtaagacaaacaataaaaatatcaggtattcatggtatagcactcacaaaattagacgttttagatgaattagatgaaataaatctatgtgtagcttatgaattaaatggaaaaaaaatagattattttcctgcatcagtagaagatcaattaaatgttaaaccagtttataaaaaatttgagggatggaaatctaaaacacaaggtattaaaagatttgatgatttaccagaaaaagcaaaaatttatataaaagctattgaagaatttattgaaacaaaaatatctagtatttccacaagtcctgaaagaaaagatactattcttattgaagacccctttaatccttaat

SEQ ID NO: 315927 - DNA, 133 bp, Unknown
  Bacterial polypeptide expressing nucleotide sequence isolated from the Sargasso Sea
aatgttttatacaatcgttggaactcaatggggggatgagggtaaaggaaagattgtagattggttatcttctaaagctgatcttgtggcaaggtttcaaggcggtaacaatgcaggccatacgataaaagtt

SEQ ID NO: 315928 - DNA, 241 bp, Unknown
  Bacterial polypeptide expressing nucleotide sequence isolated from the Sargasso Sea
atgagtaatttgatctctctattaggtcttcagtggggtgacgaaggtaaaggaaaggttgttgatcatctagcgaaagatcttaaagccgccgttcgttatcaaggaggacataatgcgggacataccttgatcatagatggagataaagtagtttttcatttattaccttcagcaatttgtcatcaagagataaagtgttatttaggtaggggagttgttgttagtttagatgctcttt

SEQ ID NO: 315929 - DNA, 412 bp, Unknown
  Bacterial polypeptide expressing nucleotide sequence isolated from the Sargasso Sea
aaagaatttggaactgttacaagtagaaaaagaagatgtggatggtttgatggtgttttagtgaggcaaactattaaagtttcagggattgatggtattgctttaacgaaattagatgtacttgatgaattagacgaaattaaaatgtgcgttgcttatgagcttgatggtaaaagattagattatttacctgctgctgtagaagaccagataaaaataaaaccaatttatgaaacttttccaggctggaaagtttctacaagtggaatcaaaaatattgactcgttacctgaaaatgcaaaaaaatatatttttgcagtagaagatttcattggcgcaaaagtatcaagtatatcaactagtccagaaagagatgatactattttaattgaaaacccttttgaagtttagt

SEQ ID NO: 315930 - DNA, 142 bp, Unknown
  Bacterial polypeptide expressing nucleotide sequence isolated from the Sargasso Sea
ctgtattggttcggcaaacttgtgcaacttctcggtgtgactggtatttctcttacaaaacttgatgttttagatggttttaaaaagctgaaaatctgtattggatatgaacttgatggagaaaatcttgattacttaccca

SEQ ID NO: 315931 - DNA, 461 bp, Unknown
  Bacterial polypeptide expressing nucleotide sequence isolated from the Sargasso Sea
ggaggggcctctcccttctgaggttcatggcgaggaagcgattcaactaagagaaaaaggtggagaatatggcactacaaccggtcgaccacgtagggttgggtggttggaccttgttcaggtaaggcaggctgtacgtgtaaatggattaacggaaattgcgctaacaaaacttgacatattatctaacacaaaggaactttcagtttgtaccgaatatgatataaacggtgccaaagaatctgaaatccctgcaagcttacataagcttcgctctgcaaaacctatatataaacaactccctggttggggtgatattacaagctctatgcttaaagacgggtatgattcacttcccaatgaacttaagtcttacgttcaattcattgaaaaccaagttaactgtaaagtgtctattatatctgtagggcctgaacggcatcaaactataattagataag

SEQ ID NO: 315932 - DNA, 364 bp, Unknown
  Bacterial polypeptide expressing nucleotide sequence isolated from the Sargasso Sea
gaagcaaaacacttgttagaaaaaggtcacgaatttggaactactactggcagagaaagaagatgcgggtggttcgatattcagtctgctaagcactcaataatgacaaatggctttaataaaattgcaattatgaagcttgatgttttagatggaatgaaagaaataaaagttttaaatggtgtagggtatgacactttccctggttggaatgaatcaacttttggaataaaaaactcttctgcattacctgaaaatgctaataaatatcttaattatctcaaaaaagaattgaaggttgatattgatataatttcaacaggcccagaaagagaccaaacaatatcaactatacgttggtaac

SEQ ID NO: 315933 - DNA, 559 bp, Unknown
  Bacterial polypeptide expressing nucleotide sequence isolated from the Sargasso Sea
agcagtaacactatagccggtcaaatagaagctggtggtggagtggggctaaatacatcaaaaaaaatcgtgggaattgctaaggcatatttaacatatgtaggtcgcggtccttttcctacagaaataaagggagaattggaagataaaattcgtgatgttggccaagaatatggaactacaactggtcgcgccagaagagttggttggattgatctagtgcaacttaagtttgctaatcaactaaatgacttttctgaaattatattaaccaaagttgatgttttgtctggtctaaaaaatataaagctttgtgttggttataaggtaaacggtaaggactttgcgggcgttccttctgatattcataatttcaaaaacatcgagcctgtttatgaaacgcttcctggttggggttctttgcctaaccacattgaaagcctaaatcaatgtcctgatgagctaaagaactttgttacaagagttgaaaaggttgctggagttagggtgtctttaatttcatatggccctgatcgaaaccaaacttttaaaatataat

SEQ ID NO: 315934 - DNA, 853 bp, Unknown
  Bacterial polypeptide expressing nucleotide sequence isolated from the Sargasso Sea
gtttacaaactaagactgttaccatcaggaatagttagaaaaaataaaatatcaattattggaaatggtgtagtggttgatccatgggcacttttagatgagattgatgaaattaaatctaaaggggtagaagttaaccctgataatttaattttatctgaggcagctactcttatattgccatttcataaagaaatggatgagattagagaggatacagcaggaaaatcaaaaataggcactacaagaagaggaataggaccagcgtatgaggataagattggtagaagatcaataagagtaatggatcttgcatcagaaaataatttggataaaagattagacgcagtattaagtcatcataatgctatcagaaaaggtctaggaaaaactgaatttaaaaaagagcaattaaaaaaaaatcttttaaagattgcaccacaaatacttaaattttcacagccagtatggaaaaaaatagatgaatttaaatatcaaaacaaaaaaatattatttgaaggtgctcaaggagttcttttagacgtagaccatgggacttatccatttgtaacttcctctaatactgtcgcctcgtctgcggcgactggctcaggctgtggcataaactctattaactatgttttaggtattacaaaagcatacactacaagagttggagagggcccatttccaacagaattaactgatgagataggtgacttacttggaacaagaggaaaagaatttggaactgtaacaagtcgaaaaagaagatgtggttggtttgatggggtccttgtaagacaaactctgaaaatttcaggaattgatggaattgccttaactaaactag

SEQ ID NO: 315935 - DNA, 991 bp, Unknown
  Bacterial polypeptide expressing nucleotide sequence isolated from the Sargasso Sea
aatggagttgttattgacccttgggctttactagaagaaattaaggaaattaattctaaaggaataagcttgaacaaaaataattttataattgctgagtctgcaagtttaattttgccgtttcacagagatttagacgaaattagagaagacgcatcaaaaaaaaatatgatagggactacaagaagaggcataggcccagcttacgaagataaagtcgggagaagatcaataagagttatggatttgaaatcaaagagaagtttagaagatagacttaagactgctttaaaacatcacaatgatattagaaggggattagggaaaaaaatatataataaagataagttaataaaagaattaacaaaaatagccccgactattttaaaattttcacaaccggtctggcttaaaattgaccaatttaaaaaacaaaaaaaaaaaatattatttgagggtgctcaaggaattttattagatatagatcatggaacttatccctttgttacttcgtcaaatactgttgcagcaaacgctgcgattggaacaggctgtggtgcaaattcaatagattatgttttgggtattaccaaatcttatattacaagagttggggcaggaccatttcctactgaattaaaagataaagtaggagaacatcttggaacaaaaggtaaggaatttggaaccgttacaagtagaaaaagaagatgtggatggtttgatggagttttagttcgtcaaacaattaaagtttcaggtatcaacggcattgcattaactaaattggatgttttagatgaattaaaaattataaaaatttgtgtaaagtatgaattagatggaaaaaaaattgaccatcttccctcgggagctgatgaccagttaagagttaaaccaatatataaaatatttaaaggatggagatcttctaccaaaggaataaaaaattttgatgaattgcctgaaaatgcaaaaaaatatatttatg

SEQ ID NO: 315936 - DNA, 778 bp, Unknown
  Bacterial polypeptide expressing nucleotide sequence isolated from the Sargasso Sea
aatgaaaaatgtagttgttgttggatctcaatggggagatgagggtaaaggaaagattgttgattggctttctagtgaagctgatattgttgtaagattccaaggaggacataatgcaggacatactttagtaattaatggagtaacatataaacttagattgttaccttcgggaattgtaagaaaagataaagtttcaattattggtaatggtgttgttgttgatccatgggctttattagacgaaattgaggaaattaaattaaaaggtattgaaataaatcaaaaaaatttaattgtctcagaggctgcaaatttaattttaccatttcatagagaaatggatgagataagagaggatgccgctggaaaagctaaaataggaacaaccagaagaggaattggcccagcatatgaagataaagtaggcagaagatcaataagagtgatggacttagtttctgaaaaaaatctggaccacagattagaaacagttttatcgcatcataacgcaataagaaaaggattaggaaaagaaatttttaaaaaagataaactaaagcaagatttattaaatatagcaccagaaattttaaaatactctcagccagtatggaaaaaaatagatgagtttaaattacaaggaaaaaaaatattattcgaaggtgcccaaggtgttttgcttgacgttgatcatggaacatatccatttgtaacatcttcgaacacagtagcttcagctgcagcaacgggctctggttgtggtcccattcaataa

SEQ ID NO: 315937 - DNA, 445 bp, Unknown
  Bacterial polypeptide expressing nucleotide sequence isolated from the Sargasso Sea
aatgaaaaatattgtagttgtaggttctcagtggggtgatgaaggaaaagggaaaatagtagattggctttcagagcaagcagatgttgtcattcgttttcaaggtggacataatgcaggccatactttagtaattgatggagtcacttacaaacttcgattgcttccatctggtatagtcagaaaaaataaaatttcagtcattgggaatggagttgtagtagatccgtgggcttttctagatgaagttgaggaaataaaagcaaagggagttgaaatcaattcagaaaatttaataatttctgaatcagcaaatttaatattaccgttccatagagagatggatgaaattagagaagatgcagctggtaaagaaaaaattggcactaccagaagaggtattgggcctgcatatgaggataagggtgggcagaagatctattag

SEQ ID NO: 315938 - DNA, 508 bp, Unknown
  Bacterial polypeptide expressing nucleotide sequence isolated from the Sargasso Sea
aatgaacacagctgttataggacttcaatggggtgatgagggtaagggtaagatagttgattatctctcagaagactttgatttggttgtaagatatcaaggtggcaataacgcgggccatactgttattgttgatgatactacttataaattaaaccttatcccgtccggcataattcgtggaaaagtttgttatttaggtcagggtgttgtacttgatcctaatcatttttatagtgagtttgatcaaattaccaaaaagattgagaatcctaagatatatttatcttcaaatatatctcttatcttagaatatcataagcaactagataaaattaatgaattaattttaaaaaacgaaaaaaaaattggaactacttctaaaggcattggacctgcataccaagataaagttggaagaaagagtatcaaactttatgatttaaaatctaaaaatttaattgaagaaaaattaaaaacacttaagaggttttatgaccctattctt

SEQ ID NO: 315939 - DNA, 790 bp, Unknown
  Bacterial polypeptide expressing nucleotide sequence isolated from the Sargasso Sea
atgaaaaatgtagtagtagtaggctcgcaatggggagacgaaggaaaaggaaaaattgttgattggctttcaagccaagctgacattgtagttcgttttcaaggtgggcataatgctggacacactttggtaatagacaaaaaagtattcaaactgagactgctaccttctggaatagttagaaaaggaaaaatttctattcttggaaatggagttgtaattgatccttgggctcttctcagtgagattgatgaaattaaaaaacaaggcatcgaagtgactcctgaaaattttatgatttctgagtcagcttctttaatactaccatttcatcaagagatggatgaaataagagaagatgcagctggagcaagtaaaattggaacaactagaagagggattggcccttgttatgaggacaaggtaggaagaagatcaattagggcaatggatttaaggtcagaaagtaatttagataaaagattagaaaatgttttattacaccataatgcaataagaaaaggtcttaataaaaaaatttatgaaaaaaaagagttaaaaattaaattattaaagattgctccagaaattttaaaatttacaaaacctgtttggttaaaattaaatcagtttaacaacgatagaaaaaaaattctatttgaaggtgctcaaggtatccttttagatgtagatcacggcacctatccatatgtaacttcctctaacacagtgcccgcaatggctgcgactggatctggtttaggcccaaactcgattaaaatatattagg

SEQ ID NO: 315940 - DNA, 541 bp, Unknown
  Bacterial polypeptide expressing nucleotide sequence isolated from the Sargasso Sea
ttctggttgtggaccaaattcaataaattatgttcttggaattacaaaagcatacacaacaagagttggagctgggccttttccaacagaactaaaagataaaataggacaagagttaggaacaaaaggaaaagaatttggaaccgtaacaagtcgacaaagaagatgtggatggtttgatggtattttagttagacaaacaataaaaatatctggaattaatggaatagcattaactaagttagatgtgcttgatggattagatgaaattaagatgtgtattgcttacgaacttaatggcaaaaaaattgattatttgcctgcagctttagaagatcaattaaaaattaagccaatttataaaaaatttaaaggatggaaaacatctacaaagggtataaaaaattttaaagaacttcctgaaaatgcaaaaaattatattaatgaattagagaagtttgtagaaagtaaaatctcaagcatatctacaagcccagagagggaagatacaatactggttgaagatccatttaatatttaa

SEQ ID NO: 315941 - DNA, 888 bp, Unknown
  Bacterial polypeptide expressing nucleotide sequence isolated from the Sargasso Sea
ggctttattagaggaaatagaagaaataaaatctaaaggcgtagaagtaaatgttaataattttattatttcagagtctgcaaatttaattttgccttttcatagagaaatggatgagattagagaagacgcagcaggagaaagcaaaataggaactacgagacgtggaattggaccagcatatgaagataaagttggaagacgatctataagagttatggatctaagatctgaaaaaaatttagatcaaagactcgactctgtattagttcatcataatgcaattagaaaaggtctaggaaaaaaaatttttgaaaaagatcagcttaaatctgatttgcttaaaatagcccctaaaatattagaattctctcagccagtttggcttaagattgatcaatttaaaaaaaaaaaaaagaaaattttattcgaaggagctcaaggtattttacttgatgtagatcatggaacttatccttttgtgacatcatctaatactgttgcatcaagcgcagcgacaggaactggttgtgggcctaattcgataaattatgttcttggcattacaaaagcttatacaacaagagttggagagggaccttttcctacagagttaacagatgatatcggtgaacttttaggaacacgcggaaaagaatttggaactgttacaagtagaaaaagaagatgtggatggtttgatggtgttttagtgaggcaaactattaaagtttcagggattgatggtattgctttaacgaaattagatgtacttgatgaattagatgaaattaaaatgtgcgttgcttatgagcttgatggtaaaagattagattatttacctgctgctgtagaagaccagataaaaatcaaaccaatttatgaaac

SEQ ID NO: 315942 - DNA, 691 bp, Unknown
  Bacterial polypeptide expressing nucleotide sequence isolated from the Sargasso Sea
ttggccaatgttgttgtaatcggagcccaatggggtgacgaaggaaaaggtaaaataacggatttacttagtcgttcggcagatgttgtcgttcgctatcaagggggagtaaatgcaggtcatactatagtcgtagatgataaagtcttaaaattacatttaattccctcagggatactttataaaaatacttcttgtctaattggttcgggaactgttgtagatccaaaaatcttgcttaaagaaattgacatgttaattgataatggaattgatatctcaggattaaaaatttcatcaacatcacatgtaacaatgccctaccaccgaatattagatgaagcgatggaggctgatagaggttcaaacaaaatagggacaacaggtcgtgggattggcccaacttatgcggataagtcacaaagaaatggcattaggataagagacttgctcaataaggaaaggctaagtgatgtgatcgaaattccattaagagaaaaaaacggtctactagaaaaaatctatggcattaaaccacttaaattagaagatattgttgaagaatatcttgactatggggaaagattatcaaagcatgttgttgactgtacgaggactatccatacagccgcaaaaaacaagaagaatattcttttcgaaggtgctcaagggactctacttgacttagacc

SEQ ID NO: 315943 - DNA, 625 bp, Unknown
  Bacterial polypeptide expressing nucleotide sequence isolated from the Sargasso Sea
cgtggagggcgcgaacgcgacgatgctcgatctcgacttcggtacgtaccctttcgtcacctcctccaatccagcgttgggcggtgtgtgcaatggtctcggtttagcgccgagaaagtttgaaaccgtcatcggcgtcgccaaggcgtacaccacgagagtcggtgcgggtccataccccaccgagctcttcggcgacgtcgccgataagcttcgcgaactcggatacgagtacggtacgacgacgggtcgcccgagacgcatcggctggctcgacatggtggcgctcaactacgccaacaaaatcaacggtttcacccacttgaacatcaccaagctggacgtcttgagcgagatggaagagctcaagatcggtaccgcgtacaagcttccgaacggtaagaccaccacagcctttccggcggatatcgccacgctcgagcaagtcgaagtcatctacgaaaccctcccgggttggaagtccgacatctccaaggttcgcacctgggacgacatgcccgaaaacgccaaaaagtacgttttgcgttgcgaagagctatctggcgtcgagtgcaggtacatcggcgtcggtccgggtcgcgacgccatggtcgtcaagccgtag

SEQ ID NO: 315944 - DNA, 499 bp, Unknown
  Bacterial polypeptide expressing nucleotide sequence isolated from the Sargasso Sea
agcgtttatgcagtatgcagattccaaggtggtcataacgctggacacacaataaaagtagatggggttcaaacagttcttcacttgataccgtcaggagttcttcataaaaatgttaagtgccttataggaaatggagtagtcctatctcttgaagcaattaaaaaagaaattgaaggattggaggaatttggtgttgaaatacgtgaccgattatttataagtgaaaactgcccattaattctcccaagtcatataaagattgatcaagtaagagataaagatgaatttattggcaccacaggaagaggcattggaccaacctatgaagataaggttggacgaagagcaataagattcggtgacctaaaagatgagactttattaagaaaaaaagtttcaaggttaattaagattcataataaattgctggagcatttttatgatgcagaacccttttctgaagaaggaaatcctaaacaatcttctatcttttaaa

SEQ ID NO: 315945 - DNA, 460 bp, Unknown
  Bacterial polypeptide expressing nucleotide sequence isolated from the Sargasso Sea
tctgaagaaggaaatcctaaacaatcttctatcttttaaaaactttgctggagctttctcagttaacacaacagacttattaatgaattggtctgagaagggaaaagaggttttgtttgagggtgcgcaagggactttccttgatattgatcatggaacctatccctatgttacttcatcaagcaccactataggtggagtttcatcaggtcttggaataggaccaaagcatattaataacgtaatcggaatagttaaagcatatgcaacaagagttggagaaggcccatttataactgagctttttgatgaggatggtgaagaaatagctaaacggggaaatgaatttggagcaactacgggtaggccaagaagatgtgggtggctcgatcttgttgctttaaaaaaggctatttttataaattctgttgacagtttatgtatgaccaaagctgatgtg

SEQ ID NO: 315946 - DNA, 892 bp, Unknown
  Bacterial polypeptide expressing nucleotide sequence isolated from the Sargasso Sea
acatttaataatgccctatcacaaattactagatgagttaatcgaagagagtcttggagaaaataaaataggaacaacaaaaaaaggaattggaccttgttatgcggacaaaatacagagacgtggcataagggtacaagacttgttagacaaagaagtatttgaaaataaagtaaaatcaaatattgaagaaactaacctcactctgataaaaatctacaagcgacctcctttggtagctgaggaaataattaaagaatttaatggttatagagatattgtcgctaaccatgtaaaagacacctcacttttaattgaaaatgctattaaagagaaccaaacaattttatttgaaggagctcagggaacactgctcgacatagatcacggaacttatccatttgtaactagctcaaatacttcagcgggtaatgctgctattggatccggagttggtccaaaaaatatagatcgtattgttggagtaacaaaagcctatatatctagagttggaagtggaccgtttataacagaacaaaaaaatgaggttggtgattacctaatcgaaaagggtgcagagtttggtgtagttactggtcgtagaagaaggtgtggttggcttgatttaatttctttgaagtactcagtaagagttaattctttaactgagctatttataactaaactagatgttctctcaggactagaagaaataaatttatgtattggatacaagtatgaaaatgagctttttacagattatccatataaagaaagtattcattataaagctgagcctgtttatcaagcttttgatggttggacagaagatatttcctctgtaaagaattttgaagacttaccaaaaaatgcacaaacttacataaatgca

SEQ ID NO: 315947 - DNA, 853 bp, Unknown
  Bacterial polypeptide expressing nucleotide sequence isolated from the Sargasso Sea
gtaaacgaagacaatttatatattgctgataatatttgtttaatcttacctattcataaacttcttgatgaaataaatgaaaccactagaggaaaaaaagaactaggaacaactaagaaaggcattggtccagcatacgaggataaagtaggtagaagagcaataagaatttgtgatttaaaagatccaatatttttaaaacaaaaaattgataacctttatgaatttcataaagataaaatttcaaaacatattcataaaattacacataattattatgaagaacttttgtccatgtctaattatcttaactcttttagtgttccattatggaaaataataaatgaattaggtcaaaaaaataaaaacattgtttttgaaggggcgcaaggttcaatgttagacattgattttggaacatatccttatgttacatcatcaaatacaatatcaggtcagatattttctggcacaggttttagttatagaaatgaccacaaaattttaggaattacaaaagcatatactactagagttggatcaggcccatttccaacagagttaatggatgagattggagaacatcttggtgaaaaaggtcaagaatttgggacagtcacaaaaagaaaaagaaggtgtggttggtttgatagtgtacttttgaaacaatcaattaaacttaatggcattacagacattgtacttactaaacttgacgtcttagatgaattaaaagaaattaatgtatgtactggatatttaattgataacaaacactatgattatttacctagtgaagaatttttatttgataaaatcaaacctatttataaaaaagttgctggctgggaaa

SEQ ID NO: 315948 - DNA, 739 bp, Unknown
  Bacterial polypeptide expressing nucleotide sequence isolated from the Sargasso Sea
tatgggggaaagattatcaaagcatgttgttgagtgtacgaggactatccatgcagcctcaaaaaacaagaagaatattcttttcgaaggtgctcaaggaactctacttgacttagatcatgggacttatccttttgttacctcatcaaaccctatatcaggaggggcatgtattggggctggagtgggtccaactttaattgatagagtaataggtgtcgcaaaagcttacaccacaagagtaggtgaagggccattcccaactgaattacaaggaagtattaatgatcaactctgtgatagaggcagtgaatttggaaccactactgggagaaggagaagatgtgggtggtttgatggagttattggtaaatatgctgtatctgtaaatggtcttgattgtttagccgttacgaaacttgatgtgttagatgaattagatgagattcaagtttgcattgcatatgatctcgatggagaggaaatagactactttcctacaaattcagatgacttaaaaaaatgtaagccaatcttcaaaaaattaaaaggttggcaatgttcaactgcagattgcagaaaactatctgatctcccagagaatgctatgaattatctaagatttttagctgaattaatggaggttccaattgccattgtctcgttgggggcgaatagagatcaaactatagtaattgaagacccaatacatggtcctaaaagagcactgttaaggtaa

SEQ ID NO: 315949 - DNA, 682 bp, Unknown
  Bacterial polypeptide expressing nucleotide sequence isolated from the Sargasso Sea
atgaaaaatatagtcgttgttggatctcaatggggtgacgaaggtaaaggaaaaattgttgattggttatctgaacaggctgatgtagtaataagatttcaaggaggtcataatgctggtcatactttagtgattgatggtgtcacttataaattgagattattgccatctggaatagttagaaaaggcaaaatatcaattattggcaacggagttgtcgtagatccttgggctttattagaggaaatagaagaaataaaatctaaaggtgtagaagtaaatgtaaataattttattatttcagagtccgcaaatttaatattgccctttcatagagaaatggatgagattagagaggatgccgcaggaaaaagcaaaataggaactacaagacgtggaattggaccggcatatgaagataaagttggaagaagatctataagagttatggatctaagatctgaaaaaaatttagatcaaagactcgactctgtactagttcatcataatgcaattagaaaaggtctaggaaaaaaaatttttgaaaaagatcagcttaaatctgatttgcttaaaatagcacccaaaatattagaattttctcagccagtttggctaaagattgatcaatttaaaaaacaaaaaaagaaaattttattcgaaggagcccaaggtattttac

SEQ ID NO: 315950 - DNA, 892 bp, Unknown
  Bacterial polypeptide expressing nucleotide sequence isolated from the Sargasso Sea
attgaccacaataatctaattatttctgagtctgcaaatcttattcttccattccataaagaaatggatgagattagagaagatgctgctggaaaagctaaaattggaacgaccagaagaggaattggaccagcgtacgaggataaagttggcagaagatctataagagtcatggatttgctctcagaaaaaaatctggataatagattaaagacagttttaatgcaccacaatgcaataagaaaagggttaggaaaatctatttatcaaaaagataaattaaaaaaagatttaatgaaaattgcacctgaaattctgaaatactctcaaccagtatggaaaaaaattgatgaatttaaaaaaaatggaaaaaaaattttatttgagggtgcgcagggaattttattagatgtagatcatggaacttatccgtttgtaacttcatcaaatactgttgcatcagcagcagctactggaactggttgtggcccaaattcaattaattatgtcttaggtattacaaaagcatatactactagagttggagaaggtccttttccaactgaattaaaagactcaattggtgaacaccttggaaccaaaggaaaagaatttggaactgttacaagtcgaaaaagaagatgtggttggtttgatggagtattagtaagacaaacaatcaaaatttcaggtatagacggtatagcacttacaaagttagatgttttagatgaacttgacgagattaaaatgtgtatagcatatgaacttaaaggaaaaaagattgattatttaccagcagctgttgatgatcaaatagatgtaaaaccaatatttaaaacttttaaaggatggaagtcttctaccaaaggtataaaaaaatttagtgatt

SEQ ID NO: 315951 - DNA, 662 bp, Unknown
  Bacterial polypeptide expressing nucleotide sequence isolated from the Sargasso Sea
aagcaaaacaaaatttattttatttgagggcgctcaaggttcattattggatatagactttggcacttatccatatgtaacttcttcaaatacatcttcaggtcaaattttttcaggtactggttttggcataaaagaaaatcataacatcttaggcataacaaaggcgtatacaactagagttggttctggcccatttgctactgagctaaatgatgaaataggggatcattttgtagacaaggggcaagagttcgggactgtaacaaaaagaagacgcaggtgtggatggtttgatagcgttctagtaaaacaatcaatagcaattaatggtattaccaacattgtgttaacaaaacttgatgttttagatgatttagaagcaataaaggtttgtattggttatgatgatggcaaaaaaaaatacaattatcttccttttgatgaaaacattcaaaaaaatttatatccaatatacgaaactttgcctggatggcaatcttcaacttatggattaactagctggagtgatcttcctaaaaatgctcaaaattatataagttttttggaaaaaatgattgaaaaaaagatatcaattatttctacaggaccagatagaattcatacaattgatagaaataatttattgaataataactgaa

SEQ ID NO: 315952 - DNA, 294 bp, Unknown
  Bacterial polypeptide expressing nucleotide sequence isolated from the Sargasso Sea
catgaaatccgttcaatctaaaataactacaattgttggtgctcaatggggagatgaaggtaagggcaagataactgatttctttgcaggcaaagctgattatgtagttcgttttcatgggggaaacaatgcagggcatactgttatagttgacggaaaagtattcaagcttcatcttattccttccggtgttatttatgctgaccccctcattgttattggtaatggtgtagttgttgacccaaaatcattgattaatgagatcgaataccttaaagaaaaaggcattaatcc

SEQ ID NO: 315953 - DNA, 840 bp, Unknown
  Bacterial polypeptide expressing nucleotide sequence isolated from the Sargasso Sea
catgagcaataacacccttattttgggcttgcagtggggtgatgagggtaaaggaaaaatcgtagatgctttggcagaaagttctgaggcagtatgtcgttttcaaggtggtcataacgcaggtcatacactcaaagttgatggtgaacaaaaagtccttcatctagtcccatcaggtatccttcacccttcagttcattgtgtattgggtaatggtcttgttttatctcttccagctttagctaaagaaataaaggaattacaagagagtgaaattaattttaaagatcgtttttatatcagtgaagattgctcattaatcttgcctactcacatagcaattgatcaggttcgagataaagaagaaggtattgggacaaccggaagagggattggcccagcttatgaagacaagattgctagacgtgcagtgcgttttggagatttaaaaaatcttgaagagctcaacataaaattattaacattggttaattatcacaatcaaattttacagaatttatataatgcccaacctatagcttttgaggatgtcttggaagagctgaccagcaacattgatctttataataaatatcattgcaaaactcaggatcttttaaagctttgggtaaaacagggcaagagcattctttttgaaggtgcgcagggttctatgttagacattgatcatggcacctatccatatgtcacttcttcaagtactactgcaggtggcttatcttcaggtttgggagtgggcccgcgacatattgattctattttgggcattaccaaagcatatactactcgtgttggtgagggcccttttgctactgagtt

SEQ ID NO: 315954 - DNA, 638 bp, Unknown
  Bacterial polypeptide expressing nucleotide sequence isolated from the Sargasso Sea
aataaaggaaattgaatatctcgaatcaaaaggcattgatgttcaaagtaaactcatgatcagttctcagtgtccattgataatgcccagccatatagccattgatgaagccagagagaagtcattaggaaaaaatgcaatcggtactaccggaagaggtattggaccggtatatgaagacaaggttgcgagaagggcagttcacgtaatggatttgtttgaagaggatttatttagatcaaaattaacttcattgacgacttatcataactttcttcttgaaaaactttatgaatccgaaggaacagatcttgacggaacatacaaagactggatgaatcatttcaataagatcaaaaatcttattgttgatagctcagaggtagtaaataacttaaagtcacaaggctccaacattctttttgagggcgctcagggctcaatgcttgatattgatcaaggcacttacccattcgttacttcatcaaatacactatctggtgcagcatcgctcggctcaggttcaggtccgctggatatagacggggtacttggaatcacaaaagcttatgctacaagagtaggctctggaccatttccaacagaaattgaggacgattacgggaaacacatggcaa

SEQ ID NO: 315955 - DNA, 898 bp, Unknown
  Bacterial polypeptide expressing nucleotide sequence isolated from the Sargasso Sea
aaatgtgccataggtaatggagttgttttagatccctgggcacttgttaatgaaatagataatctaaaaaaagaaggaattgatgtaaattgtgataatttatttattgctgataatacatgcttaattttacccatacataaattacttgatgaaataaatgaaacctccagaggtcaaaatgaaattggtacaacaaaaaaaggcataggacctgcgtatgaagataaagtgggaagaagagcagtaagaatttgtgatttaaaatatccaagttacctaaaacaaaaaattgaagatctacatcgatatcatagtgacaaattattagctcaaaatttagataaaaaattaagtaattatttcgatgaattattatccatggctgattatctaaattcatttacagttccaatgtggaaaatgattaatgaattaggatcaaataacaaaacaatagtttttgagggtgcgcagggatcaatgctagatattgattttggaacttatccttatgtaacatcatctaatactatatctggtcaagttttttctggaacaggttttagtttaaaaaataatcataaaattttgggaataactaaagcctatacaacaagagttggatctggaccttttcctacagagttgaaagataatataggtaatcacttaggtgaaaaaggtaaagagtttggtactgttacaaaaagaaaaagaagatgcggatggtttgatagtgtgcttctcaaacaatcaattagattaaatggtgtcacagatattgttcttacaaaattagatgttttagatgaattgaaagaaattaaaatttgcataggttataatattgaaggtaaagaatacgattacttaccaagtggaagaatttttattt

SEQ ID NO: 315956 - DNA, 952 bp, Unknown
  Bacterial polypeptide expressing nucleotide sequence isolated from the Sargasso Sea
ctaggcaatggtatcgttttatctctttcagccctcgcaaaggaaataaaagaattgcaagagagtgaaattaattttaaggaccgtttttatgttagtgaagattgcgcattaatccttcctactcatatagcaattgacaaagttcgagataaatctgaaggcattggcacaactggtagaggaattggtccggcatatgaggacaagatcgcaaggcgagcagtgcgttttggagatcttaaagatcctcaagaactagaagttaaattgtcaaaattagtcaattatcataatcaaattttagagaacttatatgcagctcaacctatcaagtatgaggatgtcttggaggagttaactggaaacatagatttatacaataaatataattgcaaaacccaagatcttttaaagctatggataaaacagggaaagaagatcctttttgaaggtgctcaaggctcgatgttagatattgatcatggatcttacccgtatgtcacttcttccagcacaactgcaggtggtctatcctcaggtttgggagttggtccgcgatatctcgattcaattattggaattactaaggcatataccactcgagttggcgaaggcccctttgccactgagttatttgattccaatgcagagcagttagcaaaagttggtcatgaatttggtgcaacaactggtcgaccaaggagatgtggatggctagatctgaaagctttagaaaccatagttttcattaattctgtttcaaatctttgcctaacaaaattagacgtattagatagctttgaagaaattaaagtctgtattgattatgatgacactcaacagccaatctataaaactttttctggctggaagcaggacacatctagggccagatcttttgaagatttacctaaagcggctcaggactatatactatttatgaagagac

SEQ ID NO: 315957 - DNA, 862 bp, Unknown
  Bacterial polypeptide expressing nucleotide sequence isolated from the Sargasso Sea
ttcgattataggcaatggtgtagtagttgatccatgggctttattggatgagattaaagaaataagatctaaaggggttagtgttgatgaaaaaaatttaatattatcagagtctgcaaatcttattcttccttttcataaagagatggatgaaataagagaggattcagctggcaaagcaaaaattggaaccacgagaagaggtatcggcccagcttatgaagataaaattggaagaagatcaataagagtaatggatttaatttcagaaaaaaatcttgatcacaggttagaaacagtccttattcatcacaatgctattagaaaaggtttaggaaaaaaaatatacataaaagatcaattaaaaaaagatttgcttaaaattgctccagagatactcaaatattctcaaccagtatggaaaaagattgacgagtttaaaagaactggcaaaaaaatattatttgaaggtgctcaaggaattttattagacgtagatcacggcacttacccatttgttacatcctctaatactgtagcgtcagcagcagcaactggcacaggatgtggtttgaataccattaattacgtgctaggtattacaaaagcttataccacaagagttggtgaaggcccttttccgactgaacttaaagatgaaattggtgaacttttaggtaaaagaggaaaagaatttggcacagtcactagcagaaaaaggagatgtggatggtttgatggaattcttgttagacaatcaatcaaaatttctggaataaatggtattgcactcactaagcttgatgtactagatgaagtgagcgaaatcaaaatgtgtgtaggttatgaattaaaaggaaaa

SEQ ID NO: 315958 - DNA, 715 bp, Unknown
  Bacterial polypeptide expressing nucleotide sequence isolated from the Sargasso Sea
tgccccagaaattttgaaattctcacaaccagtttggttaaaaattgatgattataaaaaagaaaaaaaaagaatattatttgagggagctcaaggtattatgcttgatgttgaccatggaacatatccatttgtgacctcttctaatacagttgcttcaagcgccgcaactggaactggttgtggacctaattcaattaattatgtcttaggtattactaaagcgtatacaaccagggttggtgaaggtccatttccgacagagctaaaagataatattggggagatgcttggaaatagaggaaaagaatttggtactgtgacaagtagaaaaagaagatgtggatggtttgatggagtgttagtcagacaatctataaaaatctcaggaattgatggaattgcacttacgaaattagatgtattagatgaattagatgaaattaaagtatgtgtaaagtatgagttgaatgaaaataaaattgattatttacctgcatcagttgaggatcaattaaagataaaaccaatttataaaatattccctggctggaaagcttccactaaaggaataaaaaaaattgatcaactacctgaaaatgcaaagaactatatttatgctctagaggattttactggaacgaaaatttcaagtatttccacaagtccagagcgtgaagacactatattacttgaaaatcctttcgaactttaa

SEQ ID NO: 315959 - DNA, 469 bp, Unknown
  Bacterial polypeptide expressing nucleotide sequence isolated from the Sargasso Sea
attggctaatgttgttgtaatcggagcccaatggggtgacgaaggaaaaggtaaaataaccgatttattaagtcgttcggcagatgttgttgttcgttatcaaggtggtgtaaatgcaggacatactatagttgtcgatgataaggttttaaaattacatttaattccatctggaatactttatagagatacaatttgcctaattggatcgggaacagttgtagacccaaagatattactcaaagaaatagatatgttgattgataatggaatagatatatcaggattaaaaatttcatcaacctcacatgtcaccatgccctatcatcgtttattagatgaagcaatggaagctgatagaggttccaataaaattggaacaacaggtagagggattggcccaacatatgctgataaatcacaaagaaatgggataaggataagagatttgcttaatgaagatagataa

SEQ ID NO: 315960 - DNA, 367 bp, Unknown
  Bacterial polypeptide expressing nucleotide sequence isolated from the Sargasso Sea
atgtctaacaatacccttatccttggtctgcaatggggagacgaaggaaaaggaaaaattgttgatgccttaagcgaaagcatttatgcagtatgcagattccaaggtggtcataatgctggccacacaataaaagtagatggggttcaaactgttcttcacttaataccatcaggagtccttcataaaaatgttaagtgccttataggaaatggagtagtcctatctcttgaagcaattaaaaaagaaattgaaggattggaggaatttggtgttgaaatacgtgaccgattatatattagtgaaaaatgcccattaattctcccaagtcatataaagattgatcaagtcagagataaagatgaat

SEQ ID NO: 315961 - DNA, 566 bp, Unknown
  Bacterial polypeptide expressing nucleotide sequence isolated from the Sargasso Sea
ttttgttacttcttcaaatacaactactgcaggggcttgtataggtttaggtgtttctccaaaaaaagtagataaagtttttggtatatttaaagcatattgcaccagagttgggaaaggaccttttcctactgaactatttgacaaagaaggtgagaaaattgctaaaaaaggaaatgagtttggttcaactactggaagagcgagaagatgtggttggttagatctattagcacttaagtatgcagttatgttaaatggagtcacagaattattcatgatgaaagcagatgttttatctgggtttgataaagtttttttatgtactaaatatttatttgaaggaaaagaaattgattattttccatctactattggtgattctactattgaacctatttatgaatcatttgatggttggaaaaatgatatatcagaatgtaaagaaaaatctgattttcctatagaattaattaattatatccaatttatagaaaataatctaaaaatacctattaagttagtttctgttggtccagataggaatcaaactgtattagtatagt

SEQ ID NO: 315962 - DNA, 886 bp, Unknown
  Bacterial polypeptide expressing nucleotide sequence isolated from the Sargasso Sea
gtaattgtaagatttcaaggtggacataatgctggtcacactcttgttatagatagtatagtttacaaattaagactactaccatcaggaatagtcagaaaaaataaaatatcaattattggaaatggtgtagttgttgatccatgggcacttttagatgagatcgatgaaattaaatctaaaggagtagaagttaatcctaataatttaattttatctgaagcagccactcttattttaccatttcataaagaaatggatgagattagagaagatgcagcaggaaaatcaaaaataggaactacaagaagaggaataggaccagcgtatgaagataagattggtagaagatcaataagagtaatggatcttgcatcagaaaataatttagataaaagactagacgtagtattaagtcatcataatgccataagaaaaggtttaggaaaaactgaatttaaaaaagagctattaaaaaaaaatcttctaaaaattgcaccacaaatacttaaattttcacagccagtatggaaaaaaatagatgaatttaaatctcaaaacaaaaaaatattatttgaaggtgcccaaggagttcttttagacgttgaccatgggacttatccatttgtaacgtcctctaataccgttgcatcatctgcggcaaccggctcaggctgtggtataaattcaattaactatgttttaggtattacaaaagcatacactacaagagttggagagggcccttttccaacagaactaacagatgagataggtgacttacttggaacaagaggaaaagaatttggaactgtcacaagtcgaaaaagaagatgtggttggtttgatggagtgttagtaaggcaaactttaaaaatttcaggaa

SEQ ID NO: 315963 - DNA, 822 bp, Unknown
  Bacterial polypeptide expressing nucleotide sequence isolated from the Sargasso Sea
gttctcaatggggagacgaaggaaaaggtaagattgttgattggttatctgaacaagcagatgtagttattagatttcaaggtggccacaatgcgggccatactcttgttattgatggtgttacttataagctgagattactcccatctggtattgttagaaaagggaaaatatcaataattggtaatggtgttgttgtggatccttgggctttattggaagaaattgaagaaattaaatctaaaggtgtagaagtagatgtaaataacttcataatatcagaatctgcaaatctgattttgccttttcatagagaaatggatgaaattagagaagatagagcaggaaaaagcaaaataggaactactagaagaggaattggacctgcttacgaggataaagtaggaagaagatcaataagggttatggacttaagatcagaaaaaaatttagatcaaaggttagattctgtattgatacaccataatgcaatcagaaaaggacttggaaaaaaaatttttgaaaaagaccaacttaaatctgatttacttaaaattgctcctaaaatattaaaattttcacagcccgtgtggcttaaaattgatcaatttaaaaagcaaaaaaagaaaattttatttgaaggtgcacaaggtattttgcttgatgtagatcatggaacttatccttttgtaacttcatctaatacagttgcttcgagtgcagctaccggaacaggctgtggtcctaattcaataaactatgttttaggaattacaaaagcttatacaacaagagtaggggaaggaccttttcctaactgaa

SEQ ID NO: 315964 - DNA, 580 bp, Unknown
  Bacterial polypeptide expressing nucleotide sequence isolated from the Sargasso Sea
aatgaaaaatattgttgttgtgggctctcaatggggagatgaaggaaaaggtaaaatagttgattggctctcagaacaagctgatgttgtagtaagatttcaaggaggtcataatgctggtcatactttagttatagatggggtcacatataaacttcgattgcttccatcaggaatagtcagaaaaaataaaatttctgtaattggaaatggtgtagttattgatccatgggcttttttagatgaaataaaagaaattaaacttaaaggtgttcatataaatacagaaaatttaataatttcggagtctgcaaatttaatattaccgtttcacagagagatggatgaaataagagaagattcagctggaaaaggaaaaataggaacaacaagaaggggcattgggcctgcgtatgaagataaagtaggcagaagatcaattagaattatggatttaagatctgaaaaaaatttagatcaaagattagaattagttttattacatcataatgctatcaggaaaggattgggaaaaaaaatttttgaaaaaaaagaattaaaaaaaaatttgttagaaatt

SEQ ID NO: 315965 - DNA, 714 bp, Unknown
  Bacterial polypeptide expressing nucleotide sequence isolated from the Sargasso Sea
tttgcatttagtgccttccggtattttgcatgctggagttcgatgcctaattggaaatggggttgtttttgagcccttcgcttttatgcaagaggttgagcttttagaaacaagagggttttcgatccgggagcgattaactgtttcgccagcagcgcaactgattatgccttatcacgctcttctcgatagtgcacgtgaagaggccttaggggggaaaaaaattggaacgacagggcgaggcattggtcctgcttatgaagacaaggtagctaggagaggtattcgggttggcgatctttataatttgagtagctttaaagaaaagatagctgtagcactagattttcataatttcgttttaaccaaatactttagtaaagacccggtcgattcagaaaatgttttcgattcctatgcttccgttgccgaggatcttaagcctatggtagctgatgtggtgcccattctagaaaaactccaggatgcaggagataacatactgctcgaaggagcccaggggtcgttgcttgatgtagatcttgggacttatccctacgtgacttcatccaatacgactgcttcgagtgctggtctaggctctggtctgggtccgaaggacatagattatgtattgggcattgccaaggcttatacaactcgtgtcggcgaagggcctttccccactgagcttatggattccactggagaaac

SEQ ID NO: 315966 - DNA, 871 bp, Unknown
  Bacterial polypeptide expressing nucleotide sequence isolated from the Sargasso Sea
caaggtggtcataatgcaggacacactctagttattgacaatgtaacatataaattaagattattaccttcaggaatcgtaagaaaagataaagtgtcaattatcggaaacggtgtggttgttgatccatgggctttattagatgaaattgaagaaattaaatccaaaggcgttgaaataaatgaaaaaaacttaattgtttcagaagctgcaaatttaattttaccatttcatagagaaatggatgaaattagagaagatgcagctggcaaagctaaaataggaacaacaagaagaggaattggtccagcatatgaagataaagtcggtagacgatcaataagagtcatggatttagtttccgagaaaaatctagaacatagattagaaatagttttaatgcatcacaatgctattagaaaagggttaggaaaagatatgtttgaaaaagataaattaatgcaagatttattaaagatagcaccagaaatattaaaatactccaagccagtatggaaaaaaatagatgaatttaaatcaaaaggtaaaaaaatattatttgaaggtgcacaaggcattttgcttgatgttgatcatggaacatatccatttgttacatcttccaatacagtcgcttcggctgcagcaactggttctggttgtggccctaattcaataaattacgtattaggcataacgaaagcttatactactagagttggagaaggtccttttccaacagaacttaaaaatgagataggtgaaaaattaggaactataggtaaagaatttggaacagttacaagcaggaagagaagatgtgggtggtttgatggagttttggttagacaaacaattaaaatttctggaa

SEQ ID NO: 315967 - DNA, 685 bp, Unknown
  Bacterial polypeptide expressing nucleotide sequence isolated from the Sargasso Sea
tgtttggaaaaaaattgatgaatttaaatcccaaaataaaaaaatattgtttgaaggtgcacaaggcgttcttttagatgttgatcatggaacctatccatttgttacatcatctaatacagttgcctcatcagctgcaactggaacaggttgtggtattaattcaatcaactatgttttagggataacaaaagcttatacaacaagggtaggagagggtccatttccaacagaattaacagatgaaatcggagagactctaggcactagaggaaaagagtttggaacagttacaagtagaaaaagaagatgtggttggtttgatggagtgttggttagacaaactcttaaaatttcaggcattgatgggattgcattaacaaaattagatgttcttgatgaacttgatgaaataaaaatgtgtatagcatatgagattgatggaaaaaaatttgattatttacctgcctcagcagaggatcaattaagggctaaaccaatttataagtctttcactggttggaagtcttcaacagtaggtatagaaaaatttgaagatttaccagataatgccaaaaaatatataaaggagttagaaaaatttgttgaaactactatttcaagtatttcaaccagtcctgaaagaaatgatacaatcttaattaaggatccttttaaaatttaa

SEQ ID NO: 315968 - DNA, 646 bp, Unknown
  Bacterial polypeptide expressing nucleotide sequence isolated from the Sargasso Sea
aatgttttatacaatagtaggaacccaatggggtgatgaaggcaaaggaaagatagttgattggttatcttcaaaagcagatttggttgttaggtttcaaggtggtaataatgctggacatacaattaaagttaaagagaatacatacaaacttaatttattaccttctggtataataagaaataaaaaatgttttattggcaatggtgtagttttagatccttgggctttaattaatgaaatttctgaattaagaaatcagaatattcttgttagtaaaaacaatttattcatcgcagaaaatatttgtttaattttaccaatacataagttgattgatgaaattaatgaagaagccagaggtaataatttaataggaacaactaaaaaaggtattggtccagcctatgaagataaagtgggaagaagagccattagattatgtgatttaaatgataaagaaaagcttaaaaaaaagataaaagctttgtatgaatttcataaaccaagattagataaatacaaaaaaaatattgattttgataaaatttttgatgatttattagaaatatcaaaacaaattataatatatactgctccagtttggaaattaataaatgaagcgggtagagaaaataaatttatt

SEQ ID NO: 315969 - DNA, 908 bp, Unknown
  Bacterial polypeptide expressing nucleotide sequence isolated from the Sargasso Sea
cgtggatgcacttactaaggattcttcagttgtgtgccgatttcaaggtgggcataatgcaggacacacaattaaggttgacggagaatctcatgttttgcaccttgtaccttcaggcataatcaatcctaaatctaaatgtctaattggtaatggagtagtgatatcacctcaggcgctggaagaggaaattcaaatgctaaaaaatgccggaattagcgttgaaaaccgattatttataagtgctaaatgccccttaattttgccgacacatattgctattgatcaagctagagacaaacaagaaaatattggtacaacgggcagaggcattggccctgcttatgaagataaggttggtcgaagatcgattaaattcagtgatttattggatcttatgtcaattaaggagaaattatttaacattctagattttcataataaggtcttaacaaaactgctaaacgcagaagaactagatccccaaattatttttactgacctcaaaaagtttcaatatttagctaagagctattcatgcaataccaatgaacttgtagaggatttttataaaaacggagatgatattatttttgagggcgcacaaggttctatgcttgatattgatcacggtacatatcctttcgtaacatcctccaatacaaccgctggtggtgtatcttctggccttggtataggtccaaaatttattgataatattcttggcatttcgaaggcatacacaacaagagtaggcgagggcccatttcccacagaattatttgattcaacagcagaagaaatctcgagaattggaaatgaatttggcgcaactacaggtagacctaggaggtgcggttggcttgatttaaaggcgcttagagaagtaatttttataaattctgtaa

SEQ ID NO: 315970 - DNA, 391 bp, Unknown
  Bacterial polypeptide expressing nucleotide sequence isolated from the Sargasso Sea
caagagacggtgtggctgtttgatgctgttatggttcgacaggccggtaatttggctggcatccacggcatggcattaactaagctcgatgttcttgacgggttcgagactctgaaaatttgcattggttatcagatcgacggcagcgataccattattgattattttccgtccaatgccgatttgcaggcagcgtgcaagccggtttatgaagaaatgcctgggtggttagagccaacttttggagcgcgtagttggaccgagttgccgaacaatgcggtagattatattcgccgcattgaaacactcactcatttgccagttacggtgctttcaaccagcccagagcgcgatgatactattttggttagcgatccttttggaggctaag

SEQ ID NO: 315971 - DNA, 592 bp, Unknown
  Bacterial polypeptide expressing nucleotide sequence isolated from the Sargasso Sea
ttatccatattttacttcatcaaataccgttgcttctgccgcatccactggtacaggctgtggaccaaacacaattaattatgttttaggaattacaaaagcatatacaactagagttggacaaggtccttttccaactgaactagaaaatgaaataggagaacatattggaaataaaggtaaagaatttggaacagtaacaagcaggaagcgaaggtgcggatggtttgacggagtacttgtaagacaaacagtaaaaatttctggaataaatggaattgcattaacaaagttagatgttttagacgaactagaagagattaaaatgtgcataggttataagttaggtaaagaggaaatagattattttcctacaacagcagatgatcaaaaaagaattgtaccaatatacaaaacttataaaggatggaaatcttctacagagggcattaaaaattttaacgatttacctgaaaatgctaaaatttacattaatgatttagaaaaatttatagaaaccaaaatttcaagtatatctacaagtccagaaagaaatgatactatactgatacaagatccttttaaaaattaa

SEQ ID NO: 315972 - DNA, 354 bp, Unknown
  Bacterial polypeptide expressing nucleotide sequence isolated from the Sargasso Sea
catgacagcactggtagtggtaggcacccaatggggggatgaaggtaaagggaaaatcgtggatctgctcaccgaacaggcagatgctgtggtgagataccagggggggaacaacgccggtcatacggtgatgttcggagacgaaacacatatcctgcacctgattccctcaggtattttacgggacacgatgtcgatcctgggtaacggggtagtcatcgatctgcctgaactcctcaaggaaatcgaagaacttcgagaaaacggggtcgaagtccagggcaagcttcatgtcagtgccggcagccacctggtcatgccctggcattggctgatcgaccaactttcgcgaaa

SEQ ID NO: 315973 - DNA, 697 bp, Unknown
  Bacterial polypeptide expressing nucleotide sequence isolated from the Sargasso Sea
tctaaccgaaaccccggtcctggtccattctctggtggaacaaggccgacgactgcttttcgagggatcacaggggacattccttgatatcgatcacggaacctatccttttgttacttcatccaatacggtttccggaaatgcctgtgccggggggggaatcggcccgaggcatatttcagatgtgataggcatcgttaaggcctacacaacacgtgtcggcagtggtcccttccccacggaactgctggatcaaaccggtgagttccttcgcagcgaaggtcaggaatttggcgcgaccaccggacgaccccgccgttgcggctggtttgacgcggtgttggtgcgttatgccgtgcgcctgaacggtatcacttcgctagcgttgaccaaactcgatgtgcttgacaaacttgaaaccctgaaactttgtgtcggttatcgcatgaaggatggcagcatccaaatcgattttcccttcgaggggcatgatgaggttgaaccggtttataaggaactgccaggctggaacacaaaaaccgcgggcatcacggaatacgatcaactgccgaaaaacctgatcgactacctggcccggatcgaggaactcgtggaggctcctgcatcgatcatctccaccggtcccaaacgggaggatacgattgtgcttcaacccgaccgattctggaagtcatga

SEQ ID NO: 315974 - DNA, 910 bp, Unknown
  Bacterial polypeptide expressing nucleotide sequence isolated from the Sargasso Sea
cgctgaaagcacgcgcagaggcatcgcacctgtatatgctgataaaatgtttcggaatggaattagaattatcgaccttttagagccagaagtttttaaagaaaaactttccaagggctatgctttttctaagggaataattgaacgtgtgcttggtggcaaccttagtatatcaatggatgaggtttttattacttacaccgcatacggaaaaagattagaaaaatatatatcagacacttccattgagctgttcaatgcacataaagaaggtaaatctattttgttcgagggcgcgcaggggattagcttagatgttgatcacggtatctatccatacacaacatcaagcaacactgtctctggacatatttcaactggatcaggattagggtctcatagcgtagaacgtataattggagttgtcaaatcatatttaagcagagttggacaaggccccttgccctctgaaatccacgatagcattgccgactctctcagaaaaaaaggcaaagaatatggaacaacaacaggaagaccaaggagggttggttggcttgatctggttcaaataaggcaggcggtgagggttaacggattaacagaaatagctctaacaaaattagatattttggatggttattcaactatccctgtttgcgttaactataatattgatggagaaactataagcgaaatgcccgcaagccttacaaaatatcgaaaagcaaagccagtttataaaaacttacccggttgggataaaatcgatttagataaaatagacaatggctatgagagtttgccttctgagttaaaaaactatgttggttttatagaggaccaagttgagtgtcctattaaaataatatcagttggtccacagagacatgaaactattattaggtct

SEQ ID NO: 315975 - DNA, 760 bp, Unknown
  Bacterial polypeptide expressing nucleotide sequence isolated from the Sargasso Sea
aatatcaattattggcaacggagttgttgtagatccatgggctttattagaggaaatagaagaaataaaatctaaaggtgtagaagtaaatataaataattttattatttcggagtctgcaaatttaatattgccttttcatagagaaatggatgagattagagaggatgcagcaggaaaaagcaaaataggaactacaagacgtggaattggaccagcatatgaagataaagttggaagaagatctataagagttatggatctaagatctgaaaaaaatttagatcaaagactcgattctgtattagctcatcataatgcgattagaaaaggcctaggaaaaaatatttttgaaaaagatcagctaaaatctgatttgcttaaaatagcacccaaaattttagaattctctcagccagtttggctaaagattgatcaatttaaaaaacaaaaaaagaaaattttatttgaaggagcccaaggtattttacttgatgtagatcatggaacttatccttttgtaacctcatctaatactgttgcttcaagcgcagcaacaggaactggttgtggccctaattcgattaattatgttcttggaattacgaaagcttacacaacaagagttggggaaggtccttttcctacagagttaacagatgatgttggtgaacttttaggaacacgtggtaaagaatttggaactgttacaagtagaaaaagaagatgcggatggtttgacggtgttttggtaaggcaa

SEQ ID NO: 315976 - DNA, 957 bp, Unknown
  Bacterial polypeptide expressing nucleotide sequence isolated from the Sargasso Sea
cacaaagaattagacgaaataagagaagatgcagctggcaaagctaaaataggacaaacaaggcgaggaataggcccagcctatgaagataaagctgggagaagagctattagagtaatggatttagtttctgaaaaaaatttggattataagttggatgttgttcttgcccaccataatgccataagaaagggtttaggaaaaaatctttttgaaaaagataaattaaaaaaagatttgttagaaatagctcctcaaatactaaaattttctaaaccagtgtggaaaaaaatagaagaatataaattaaaacaaaaaaaaatattatttgaaggtgctcaaggtattttactcgatattgatcatggcacatatccttttgttacttcttctaatacagtagcttcatctgcagctacaggatcaggatgtggtccaagtagtataaattatgttttaggtataacaaaagcttacacaactcgagttggagcaggaccgtttccaactgaattaaatgataaaactggcgaatttataggtattaagggaaaagagtttggaactgtaactagtagaaagagaagatgcggctggtttgatgcagtcttagttaagcaaagtataaaaatttcaggaattaatggcatagcgcttaccaaattagatgttttagatgaattaagtgaaattaaaatgtgtattaaatatgaaatagaaggaaaggaaattgattatttgccagcagcgactgaagatcaattaaaaattaaacctatttacaaaacgtttccaggttggaaaacatctattcaaggatttaaaaacataaaagatcttccagataatgctaaaaattatattagtgctatagaaaattttataggtgctaaagtttctagtatttcaactagccccaaaagggaagacacaattcttataaaaaatcctttgaaa

SEQ ID NO: 315977 - DNA, 832 bp, Unknown
  Bacterial polypeptide expressing nucleotide sequence isolated from the Sargasso Sea
atgaaaaatgttatagttgttggaacacagtggggagacgagggaaagggcaagattgttgattggctctcaagcgaggctgatgttgtagttagatttcaaggtggtcacaacgcaggacatactctagtcatcgatggaaaaacttacaaattgagattattaccatctggaactgttagagaaggtaaaatttctataattggaaatggcgttgttgtagatccctgggctttaattgatgagataaaagaaatgaaatccaaaggagttgaagtagatgagaataatctaatactctccgaggcagcaaaccttatattgccataccataaggaaatggacgaaataagagaagatgtagccggaaacgcgaaaattggaactacaagaagaggtataggtccggcttacgaagataaagttggcagacgatcaattagagttatggatttagcttcagaaagtaatttagataaaagattagaagcagcactgatccaccacaatgcattgaggaaaggtttaaaacagaaggtttttaagaaggataaattaaaaaaagatttattaaaaatagcaccacaaattttaaaattttcacaaccagtttggaaaaaattaaatgaatacaaatcaaaaggaaaaaaaatattgtttgaaggtgcccaaggtatactcctagatgttgatcatggtacttatccttttgtaacttcttcaaacactgttgcgtctacagctgcaacaggatctggattcggatctaatagcgaaagttatgttttgggtattacaaaagcttatactacaagagtaggtgagggaccat

SEQ ID NO: 315978 - DNA, 790 bp, Unknown
  Bacterial polypeptide expressing nucleotide sequence isolated from the Sargasso Sea
gatgttaactttagtaatttaatattatctgagtcagctacccttatcatgccatttcacaaagaaatggatgagattagagaagacgcagcaggtaaatcaaaaattggcacaacaagaagaggtattgggccagcctatgaagataaaattggaagaagatcaataagagtaatggatcttgcatctgaacataatttaaataagagattagatgtagcactaaatcatcataatgctattagaaaaggtttaggaaaacctcaatttaaaaaagatcaattaaaaaaagatttattaaagattgcaccagatatactaaaattttcacaaccagtttggaaaaaaatagaccaatttaaatctcaaaataaaaaaatattatttgaaggtgctcaaggagttcttttagatgttgatcacggcacttatccatttgtaacctcgtcaaatacagttgcttcttctgcggctactggctcaggttgtggtataagctcgataaattatgttctaggcattacaaaagcttataccacaagagttggagaaggcccttttcctacagaactaaaagatgagataggtgacttactaggaacaagaggaaaagaatttgggactgttacaagtcggaaaagaagatgtgggtggtttgatggagtacttgtaagacagacacttaaaatttcaggaattgatggaattgcattaactaaattagatgtactagacgaactagatgaaattaaaatgtgtattgcttatgagattaatggcaaaaaatttg

SEQ ID NO: 315979 - DNA, 765 bp, Unknown
  Bacterial polypeptide expressing nucleotide sequence isolated from the Sargasso Sea
ataagagttatggatctaagatctgaaaaaaatttatatcaaagactcgactctgtattagttcatcataatgcaattagaaaaggtctaggaaaaaaaatttttgaaaaagaccagcttaaatctgacttgcttaaaatagcacccaaaatattagaattctctcagccagtttggctaaagattgatcaatttaaaaaacaaaaaaagaaaattttgtttgaaggagcccaaggtatattacttgatgtagatcatggaacttatccttttgtaacttcatctaataccgttgcttcaagcgcagcaacaggaaccggttgtggccctaattcgataaattatgttcttggcattacaaaagcttatacaacaagagttggagagggcccttttcctacagagttaacagatgatatcggtgaacttttaggaacacgtggaaaagaatttggaactgttacaagtagaaaaagaagatgtggatggtttgatggtgttttagtgaggcaaactattaaagtttcagggattgatggtatcgctttaacaaaattagatgtgcttgacgaagtagatgaaattaaaatatgtgttgcttacgatcttgatggcaaaagattagattatttacctgcagctgtagaagaccagataaaaataaaaccaatttataaaacttttccaggttggaaagtttctacaagtggagttaaaaatatggactcgttacctgaaaatgcaaaaaaatatgtttttgctatt

SEQ ID NO: 315980 - DNA, 863 bp, Unknown
  Bacterial polypeptide expressing nucleotide sequence isolated from the Sargasso Sea
agatgagggtaaagggaagattatagatattctcacagacaaagcagaagctgttgtcagatttcaaggagggcataatgctgggcacactcttgttattgatggcgataaaactgtgcttcatctcataccatcgggtattttcaacaatgccaaatgtctgattggtaatggggttgttcttcatttgccaacacttatagaagaaattgaatatcttgaatcaaagggtattgatatccagagtaaactaatgattagctctcagtgtccattgatactgccgagtcatatactcattgatgaagcaagagagaagtcattaggaaaaaatgcaatcggaaccactggaaggggaattggacctgtttacgaagataaggttgccagaagagcgctgcatgtaatggatttgtttgaaaaagacttattcaaatcgaaactgacctcattaaccgcttatcacaactttcttcttgaagagctttataaatccgttggaacagattttgaagaaacatacaaagagtggatgggttatttttctaaaattaaggaccttgttgttgatagctcaaaagaattgaacaatttgaagttaaatcagtcaaatatactctttgaaggagctcaaggctcaatgctagatattgatcaaggtacatacccatttgttacatcatcgagtactctatctggagcttcatcattaggttctggtatcggaccattggatatcgatggagtattgggtatcaccaaagcatatgctaccagagttggctcaggcccattcccaacagaaatcgatgatgattatggcaagcatatggcaaaggttggtgttgagtttggagcaacaa

SEQ ID NO: 315981 - DNA, 745 bp, Unknown
  Bacterial polypeptide expressing nucleotide sequence isolated from the Sargasso Sea
tatggatccttctgaaattgctaaaacatatttagatgagtacgcgccgcgcatagttccacatatagaggacacgattaatttggttcatgaacagttgaatgcaaaaaaacgaatactactcgaaggggctcaggcaacttttcttgatttagattatggaacatatccttttgtaacttcttcaaacccagtggcaggaggagcctgcacaggatctggtgtaggtccacttgatatcgatcgaataataggaatcactaaggcttatacaacacgagttggtgctggaccttttactgctgaattatttgacgaagttggtgaacatcttgtagatgttggtcatgaatatgggacaaatactgggcgtagacgcagggtggggtggttagatttggtgatgcttaattacgccagtcgcgttaactccttaactgagctagcaattgcaaaacttgatgttttagacaatttggatgtaataaaaatatgcgttgcttatgaatttgaaggtcaaagatacgattggttgccccatcaacaatctgtacagaaccaagcagttcctatatacgaggaatttccaggttggaaatgtgatttgtcagaagtaaaaaatagatcggaacttcccgaagaagctgaaagttatttgaattttattgaaaattctttaaatattcctatcgacttagttggtgtaggtccagggcgcaatcaatatttcagccgtcagaaataa

SEQ ID NO: 315982 - DNA, 880 bp, Unknown
  Bacterial polypeptide expressing nucleotide sequence isolated from the Sargasso Sea
cttgttatctgaaaaatctgaaataatagtaaggtttcaagggggtcataatgctggtcatactttagtaataggtgagaatcaatataaattatctttattgcctagtggtataatcagaaaaaacaaaatatctataattggtaacggagtagttgttgatctattacatctttctaaagaaattaatgaattaattgctagaggtattaatattaccccaaaaaatctttatttatcagaaaattgttttttaattttacctattcacaaatacatagatgaattaagagaggcaatcaaatcagataagaaaataggcacaacgggaagaggtattggtccagcttatgaggataaggttggcagaagagggttacgagtatccgatctaaagaataagaaaaattttaaggaaaagtttatagctctttatgaatactataatttttggattttgggattaggttatgaaaaacttgattataaattagatttagatttagtcttaaaatcatatgaaaagattgaaacttatgtttcaaatacttggttagagctaaacaaatatattaaagaaaataagaaaattttgtatgaaggagcacaaggaacttttttggatatagatcatggcacttatccattcgttacaagtagtaatactatttccggtaatgcaacagtgggatctgggatcggaccaactttaattaattatgtattaggtataactaaagcatatactacaagagttggtaatggtccatttccaacagaagaaaaaggaaatattggaaaaaaacttgcaaaaataggaaaggaaattggaactgttactggaagaaatagaagatgtggttggtttgatgcagtttta

SEQ ID NO: 315983 - DNA, 514 bp, Unknown
  Bacterial polypeptide expressing nucleotide sequence isolated from the Sargasso Sea
tataaattatgttctaggtataacaaaagcttataccactagagttggtgaaggaccttttccaaccgaactcaaagatgctattggagaacaactcggaactagaggaaaagaatttggaactgttactagcagaaaaagaagatgtggttggtttgacggggttcttgtaagacaaacaataaaaatttcaggtattaatggaatagcacttacaaaactagatgttttagacgaactagatgaaattaaaatgtgtattgcctatgaaataaatggaaaaaaaatagactatctgccggcagcagcagaagatcaattaaaagttaaacctgtttacaaagtttttaaaggatggaaatcctcaactcaaggaataaaagaatttgataaattacccaaaaatgcaaaaatttatgtaagagaacttgaaaaatttgttcaagcaaaaatttcaagtatttcaactggcgctgaaagaaaagacaccattcttattgaaaatatattttaa

SEQ ID NO: 315984 - DNA, 577 bp, Unknown
  Bacterial polypeptide expressing nucleotide sequence isolated from the Sargasso Sea
ggtttgaaaaaaaaaattttcaaaaaagaggtgcttaaaaaaaaattattagaaatagcgcctaaattactgtgtttcgctcaaccaatttggctaaaacttgatgaatttaaaaaagagagaaaaaaaatattatttgaaggtgctcaaggcatcttattagatgttgatcacggaacttatccatatgtgacttcctcaaatactgtaccagccacagcagctacaggttctggatctgggccaaatgaaataagttatattttaggtattactaaggcttatacaacaagagttggaagtggaccattcccaacagagttaaaaaataaaattggagaaattcttggaaaacgtggaaaggaattcggtacagtaacagcaagaaaaagacgttgtggatggtttgatggagttttagtacgtcagacaattaaaatttctggtattaacggaattgctttgacaaaacttgatgtacttgatgagttggaagagattaaaatttgtgtaggatatgaattgaatggaaaaaaattgaattaccttcctgcagctacagaagatcagtttaata

SEQ ID NO: 315985 - DNA, 868 bp, Unknown
  Bacterial polypeptide expressing nucleotide sequence isolated from the Sargasso Sea
atttcaaactctgctccattaatactaccagtccattctcaaattgatgaagctcgtgaaaaacaaagaggtgataataaaattgggacaacaggaagaggaattggtcctgcatacgaagataaggtagcaagaagagctataagagtttcagatttaaaagataaaattcaccttaaggagaaggttcacaaacttttaaatcatcataatatttggcttaaagccaataattttgaaactttagacccagataatattattgaaaatatacttgagatttctcaggatattttggagtttgcagatgaaacttgggttactctcgataactataattcaaaaggtaaaagaattttatttgaaggtgcccagggtacaatgttagatattgatcacggaacatacccatttgtaacatcatcttccacagtctcaggtaatgctgctagtgggactggttttggatttttaaatataagtaaagtactaggtataacaaaagcatatacaaccagagttggatcaggaccatttccaactgaacaaaataatgagattggaaataaacttggcgaattggggcatgagtttggaactgtaactggacgtaaaagaaggtgtggttggtttgatgctgttatggttaaacaagctattaaaatttcaggcatttcttcaattgcattaacaaagttagacgtattagacaaatttgaagaattgaaagtttgtacatcttataaaattggggatcaggaaataaatttttttccttcctgtcaattagatcaaaacaaaattaaacctagctacgaaactattgaaggatggaacattaaaactgagggtataagtgtttttgatg

SEQ ID NO: 315986 - DNA, 682 bp, Unknown
  Bacterial polypeptide expressing nucleotide sequence isolated from the Sargasso Sea
gtccaatagattatttgatatccgtaataaaggcggaaatattttatttgaaggtgctcaaggctctcttcttgatattgatcatggtacatacccatatgtgactagttcaaatactactgccggatgtacggctactggctctggatttggtcctctatatctagattatgttctcggtataacgaaagcatatacgacgagagtgggttcagggccatttcctactgaactttttgatgaagttggagaacacttaagtaaacaaggaggggaggttggtgcaactacggggagacctcggcgatgtggttggtttgatgccgttgcgataaaaaatgcggttagtataaattcggtaactggaatttgtctcaccaagatggatgttttggatggattggactatataaatatttgcgttggttataaagatgtggagggcgctgctatccaaaaccctatggatgctgacgattatgaaaatcttattcctatatatgaaactttaccaggttggtctgaaagcacttcgggtataaaacatatggatgatcttccatttaatgctcttacctatatagagaaaatagaaaatgtcactggagttccaattgacattatttctactggacctgatcgagtagatacgattgttttgagcgatccttttggggtttaa

SEQ ID NO: 315987 - DNA, 686 bp, Unknown
  Bacterial polypeptide expressing nucleotide sequence isolated from the Sargasso Sea
gagaacacgcctcttatactaccctttcacaaagatctagatcttttgcgcgaacagaaagctggaaaagaaaaaataggcacaactggaagaggaatagggccagcttatgaagataaagttggaagaagggcattaaggaccggtgacctgaaagacccaaaccaagtgaagagaaaattaaatattattaaagagcatcacgatattttgagggcaggatttggcgccactgatatagatgaagaacaactttttgatgaattgatgatagtgggtaaaaaaattaatatgttcataaagcccgtttggaaaattcttaacgaacagattaaaaaaaataaaaatattttatttgaaggcgcgcaaggttctatgctcgatgtagattttggcacttatccatttgttacctcttcttcaacaattgcggcagcagcagcaattggaagcggtgttgctcataataaaatcaactcagtattaggaataacaaaagcatacaccactcgggtaggagagggtccaatgcctaccgagcttactgatagtattggacgttatctgtcagaagagggaaatgaaaagggaacggtgacaggtagagacagaagatgtggttggtttgatgcaccgctggttagaagaagttgtttgcttaatggagttactagtcttgctctcac

SEQ ID NO: 315988 - DNA, 781 bp, Unknown
  Bacterial polypeptide expressing nucleotide sequence isolated from the Sargasso Sea
gatgaataatgtagttgttgttggatcgcagtggggagatgaaggaaaaggtaagatagttgattggttatcaagcgaagcagacgtagttgtaagattccaaggaggacataacgctggtcataccctagtcatagatggtgttacttataaactgagattgttaccatctgggattgtcagaaaaaataaaatttctattataggaaatggagttgtagtagatccatgggcgttgctagatgaaatcgaggaagctaaatccaaagctgtagaaatcaatgaaaataatctgattttatctgaggctgccacactaattttaccatttcataaagagatggatgaaataagagaagactctgctggtaaatcaaaaattggaacaacaagaagaggaattggcccagcttatgaagataaagtaggacgaagatctataagagtaatggaccttgcatccaaaaaaaatctagaaaatcgattatcactagtacttgaacatcataatgctatccgaaaaggattgggtaagccaatatatgaaaaagataaactaattggagaattattaaaaatagctccaaaaattttaaaatattctgcacctgtttggagaaagatagatcaatttaaatcagaaaataaaaaaatattattcgagggagctcaaggaatattacttgatgttgatcatggaacatatccatatgtaacttcatccaatacggttgcagcttcagcagcaacaggatctggatgcggtccaaactcaataaat

SEQ ID NO: 315989 - DNA, 811 bp, Unknown
  Bacterial polypeptide expressing nucleotide sequence isolated from the Sargasso Sea
gcccaactagtgatgccttggcataaaagtattgatcaattgcgtgaacaaaaaaaagggaaatctaaaattggcacaaccggtcgtggaataggtcctgcttatgaggataaagcagaaagagctggaatcagggtgggtgatttacttgaccaggaaaaatttagttctcgtttaagagaacttgcgaatgaaaaaaatatttttcttaaaaaatattttgatataaatgaaacattattttcttcagcagatatcttttctgaatatgcagattatataaagaagcttgaacattgtattgtagacacctcttttattatcaatcaacttattaaagatgggaaaaatattttatttgaaggcgctcaaggtacattcttggacttagaccatggaacatatccatttgtaacatcatctaatactttgtcaggtaatgcttgtgttggttccggaattggaccaacttgtattactggcgtacttggtatcgttaaagcttataccacccgggttggaaatggaccttttcctactgaactattagatgatgatggaaaaattttgcagactgaaggaaatgagtttggtgcaacaactggccgttctcgcagatgtggctggtttgatgcattacttgtaaaacaggcagttcgactgaatggaattactagtattgctgttacaaaattagatgttctagataattttagcacactcaaaatagcaactggatatcaattacctaatggaaaggaatgtgatagttttcccagatcactagaaaatgttacgcctgtttatcatg

SEQ ID NO: 315990 - DNA, 694 bp, Unknown
  Bacterial polypeptide expressing nucleotide sequence isolated from the Sargasso Sea
gatgaaaaatgttgtagtagtaggtagtcaatggggagatgaaggaaaaggaaagattgtagactggttatctagtgaagctgatgtggtcataagatttcaaggcggtcataatgctgggcatacactagtaattgatggtgttacttataaacttcgattgcttccttcaggaatagtaagaaagaataaaatttctgttataggaaatggtgttgttgtagatccatgggcattattagatgaaatagatgagataaaatcaaaaggagttgaagtagatgacaaaaatttaattttatccgagtctgcaactttgattctaccttttcacagagaattagatgaaattagagaagatgctgcaggtagcaataagataggaacgacaagaagagggattggtccagcttatgaagacaaaattggaagacgatctattagagttatggacctatcttcagaaaaaaatttagatatgaaattggaagatgctttattgcatcataacgctataagaaaaggtttaggaaaagaaatttttgaaaaagataagataaaaaaagaattattaaaaattgctcctaaaatactcaaattttctaaaccagtatggaaaaaaatagatgaatttaaagatcaaaaaaaaaaaatattatttgaaggtgcccaaggcattctgttagatgttgat

SEQ ID NO: 315991 - DNA, 919 bp, Unknown
  Bacterial polypeptide expressing nucleotide sequence isolated from the Sargasso Sea
tgaacttgcttcaactgcacatgtaactatgccttatcatcgccttcttgatatggcaatggaacaaaaaagaggtctacaaaaaattggtactactggaagaggaattggaccaacatatgctgataaatctcaaagaaatggtatcagaataattgatctactgagcagagaaaagcttcaagagagattaaaggtaccattagcagaaaagaatggcttgcttcaaaagatttatggaattgagccattaattcttgatgaaataattgaagaatatcttcagtatggaaaacaactagagaagcatattgttgactgtaatagaacaattcaccaagctgctaagaagaaaaagaatattttgtttgaaggggctcaagggactcttttagatcttgatcacggcacctacccttatgtaacttcatctaatccagtatcaggaggagcctgtattggtgctggggtaggcccaaccctcatagatagagttattggagttgcaaaagcatatacgactagagtgggagaggggcctttccctaccgaattgcaaggaagtattaatgatcaactttgcgatagaggtggtgagtttggaacaactacaggacgaagaagaaggtgtggctggtttgatggggtgattggcaaatacgcagttgaagtaaatggcttggactgccttgctattacgaaattagacgttttagatgaacttgatgaaattcaaatttgcatagcatatgagttaaatggtacaaaaattgattatttcccaagtagtgttgaagattttgaaaaatgtactccagtttttaaaaagcttcctggctggaaatgctctacggaaaattgtcgtcgactcgaagatcttcctccctctgcaatgagttacttaagggtccttgctgag

SEQ ID NO: 315992 - DNA, 905 bp, Unknown
  Bacterial polypeptide expressing nucleotide sequence isolated from the Sargasso Sea
aggaattcaatctaaaggtattgaagttaatgaaaaaaatttaattatttctgaagctgcgaatttaattttaccttttcatagagaattggatgaaataagggaggattttgctggtgatgaaaagattggaaccacaagaagaggaattggtcccgcatatgaagataaagtaggcagaagatctataagacttatggacttaacctcaaaaaaaagtttggagccaagattagaaacggcattgttacatcataatgcaattagaaaaggcatgaataaagacatttttaacattgatgagcttaaaaaagagctattaaaaattgctcctagaattttaaaatattcacaacctgtttggaaaagaatagatgaatatagagctcaaggaaaaaaaatattatttgaaggagcccaaggaatattgcttgatgtagatcatggaacttatccatttgttacttcctccaataccgtagcatcttctgctgcaataggatcaggttgtggacctcatatgattaattatgttctaggaattaccaaagcatatactactagagttggaaaaggtcctttcccaacagaattaactaatcaaattggagaacaactaggaattataggaaaagaatttggtactgttaccagtcgaaagagaagatgtggatggtttgatggagtacttgtaagacaaactataaaaatttcaggaataaatggaattgctttaacaaaactagatgtaatggatgaacttaatgaaattaaaatgtgtattgcatatgaaatcgatggaaaaaaaattgattatttacctgctgcgaccgaagatcaattaagagtaaagccaatttataaatcatttgatggatggaaaagtttcgacagtggaataaaaa

SEQ ID NO: 315993 - DNA, 568 bp, Unknown
  Bacterial polypeptide expressing nucleotide sequence isolated from the Sargasso Sea
acttatccatatgttacttcatctaatactttagctacttctgtaggaattggttcagggtttcctaaaagcatctattcagatgttcttggcgttgcaaaagcctatacaacgagagtaggtgcaggaccatttccaactgaattattctgtgatgtggggcagaaaattgcagagcttggccatgaatttggtgcaacaactggtagacctagaagatgtggttggcttgatcttattgcacttaaatattcagcaaaattaaataatttaactgagctttgtattacaaaacttgatgttctggatgcttttgatgagataaaagcttgcatagggtataaagtagatggtgaggagactccctttaaatcgagattacttcacaaagctacacctatttataaagactttaaaggatggaattgttctctagcagattgtgaaaattatgattcgcttccagacaaagcaaaagattttttaaactttattgaaaactttgttggagtaaagatcagtttaatttctaatggcccaaatagagaagatttaatccatagataaa

SEQ ID NO: 315994 - DNA, 870 bp, Unknown
  Bacterial polypeptide expressing nucleotide sequence isolated from the Sargasso Sea
gtagttagaaaaaataaaatttcaataattggaaacggtgttgttgtagacccatgggcattacttgaagaaataaaagaaattaaatctaaaggtgtggaaattaatgaaaataatttgatactatctgagtctgcgaatttaattcttccttttcataaagagatggatgaaatgcgagaggatgcagcagggaaatcaaaaattggaacaacaagaagaggaattggcccagcctatgaggataaagttggccgaagatctgttagagttatggatctagtttcagaaaaaaatttgaatcatagattggacgttgctcttgcacatcataattcaataagaaaaggtttgggaaaaaatatttttgaaaaagatcaattaaaaaaagaattgttaaaaattgctcctaatatattaaggttttcaaaacctgtatggaaaaaattatatgaatacaaatcaaaaggaaaaaaaatactattcgaaggagcgcaaggtattttattagatgtagatcacggtacatatccatttgttacttcctctaatacagtagctgcatctgcagcagttgggtctggttgtggaccaaatacaataaattatgttctgggtataaccaaggcttacactactagagttggagaaggaccatttccaactgaattaaaaaatgaaacaggaaaaatattaggagaaaaaggtaaagagtttggaactgttaccagtagaaaaagaagatgtggttggtttgatggagttcttgtaagacaaagtgtaaaaatatctggaattagtggtatagcccttacaaaattagatgtactggatgaattaaaagaaattaaaatgtgtatacaatatgaa

SEQ ID NO: 315995 - DNA, 748 bp, Unknown
  Bacterial polypeptide expressing nucleotide sequence isolated from the Sargasso Sea
ggtaaaataacggatttacttagtcgttcggcagacgttgtcgttcgctatcaagggggagtaaatgcaggtcatactatagtcgtcgatgataaagtcttaaaattacatttaattccatcagggatactttataaaaatacttcttgtctaattggttcgggtactgttgtagatccaaaaattttgcttaaagaaattgacatgttaattgataatggaattgatatctcaggattacaaatttcatcaacatcacatgtaacaatgccctaccaccgaatattagatgaagcgatggaggctgatagaggttcaaacaaaatagggacaacaggtcgtgggattggcccaacttatgcggataagtcacaaagaaatggcattaggataagagatttactcaacaaggaaaggctaagtgatgtgatcgatattccattaagagaaaaaaacggtctactagaaaaaatctatggcattaaaccacttaaattagaagatattgttgaagaatatcttgactatggcgaaagattatcaaagcatgttgttgactgtacgaggactatccatgcagcctcaaaaaacaagaagaatattctttttgaaggggctcaagggactttacttgacttagatcatgggacttatccttttgttacctcgtcaaaccctatatcaggaggggcatgtattggggctggagtgggtccaactttaattgatagagtaataggtgtcgcaa

SEQ ID NO: 315996 - DNA, 304 bp, Unknown
  Bacterial polypeptide expressing nucleotide sequence isolated from the Sargasso Sea
atgtctaacaataccctcatccttggtctgcaatggggagacgaaggaaaaggaaagattgttgatgccttaagcaaaagcgtttatgcagtatgcagattccaaggcggtcataacgctggccacacaataaaagtagatggagttcaaactgttcttcacttgataccatcaggagttcttcataaaaacgttaagtgccttataggaaatggagttgtcctatctcttgaagcaattaaaaaagaaattgaaggattggaggaatttggtgttgaaatacgtcaccgaattatatattagt

SEQ ID NO: 315997 - DNA, 736 bp, Unknown
  Bacterial polypeptide expressing nucleotide sequence isolated from the Sargasso Sea
atttcacagagaaatggatgaaacaatggaggagctagcaggaaaatcaaaaattggaacaacaaaaagaggaattggcccagcttatgaagataaaattggcagaagatctgttagaattatggatcttgcttcagaagaaagtttagataaaagattagattctgctttatcatatcataatgttttaagaaaaggtctaggaaaagaaaaattaataaaggaaaatttaaaaatagaattattaaaaatagctcaaaagatccttaatttttcacagccagtttggaagaaaattgatgaattcaaaaagagaaaaaaaaaaattttatttgaaggagcgcaagggatcttattagatgtagatcatggtacttatccttttgtaacttcatcaaatacggttgcatcatctgcagctactggttctggatgtgggcctgactcaataggttatgtgcttggaattacaaaagcatatacaaccagagtaggcgcaggtccctttcctacagaattaaaagacgatataggagattttctgggaaataaaggcaatgagtttggaacagtaacaagcagaaaaagaagatgtggatggtttgatgcagttttagttcgacaaactgtaaagatttcaggagttaatggaattgcactaacaaaattagatgtattggatgatttagatgaaataaaaatgtgtgttgcttatgaaattgacggtaagaaaatt

SEQ ID NO: 315998 - DNA, 604 bp, Unknown
  Bacterial polypeptide expressing nucleotide sequence isolated from the Sargasso Sea
tgatcatggaacttatccatatgtaacctcttcaaatactgtcgcctcgtcagcagcaaccggctctggctgtggtataaattccataaattatgttctaggcattacaaaagcatacactacaagagttggcgaaggtccttttccaacagaactaaaagatgaaattggcgaaatccttggaactagaggaaaagaatttggaactgtcacaagtagaaagagaagatgtggttggtttgatggagtgcttgtaagacaaactctaaaaatttcaggcatagacggaattgcattaaccaaattagatgtgctagatgaactagaggaaattaaaatgtgtattgcttatgagataaatggtaaaaaatatgattacctccctgcttcagttgatgaccaatttacagctaaaccaatatataaatcctttaaaggttggaaatcttcaacagtaggtataaaaaaatttgaggaattacctgagaatgcaaaaaattatataaaaggattagaaaagtttgtagataccagaatctcaagtatttctactagtccagagagaaacgatacaatcttaattcaagatccttttaatctttaa

SEQ ID NO: 315999 - DNA, 718 bp, Unknown
  Bacterial polypeptide expressing nucleotide sequence isolated from the Sargasso Sea
attgttggagcatttttatgatgcagaacccttttctgaggaagaaatcctaaataatctactttcttttaaaaactttgctgaagctttctcagttaatacaacagacttattaatgaattggtctgaagagggtaaagaggttttatttgagggtgcgcaggggactttccttgatattgatcatggaacctatccctatgttacttcatcaagcactacaattggtggagtttcatcaggtcttggaatagggccaaagcatattaataatgtaatcggaattgttaaagcatatgcaacaagagttggagaaggcccatttataactgagctatttgatgaagatggagaagaaatagctaaacgtggaaatgaatttggagcaactacgggtaggccaagaagatgtggatggctcgatcttgttgctttaaaaaaggctatttttataaattctgttgacagtttatgtatgaccaaagctgatgtgctcgatacttttgaaaatatacgtgtttgcgtagcttatgatgacaacaacttacctatctataagagattcgaaggatggcaacaggatactagtcaatgcagttcatatgacgaacttccacaaaaattaaaagattatgtaaaattcattgaggaaactgtaaactgcaaagttagcataatctctgttggcccttccagagagcaaagcatacatttataa

SEQ ID NO: 316000 - DNA, 454 bp, Unknown
  Bacterial polypeptide expressing nucleotide sequence isolated from the Sargasso Sea
atgaatcgtaatgttgtagtagtaggcactcagtggggcgatgaaggtaaaggtaagattgtcgatcttttaaccaatcacgtttctgctgttgtcaggtttcaagggggtcataacgcggggcatacccttgtcataggaaatgaaaagatcgttttgcatttagtaccctctggtattttgcatgctggcgttcgatgccttattgggaatggggttgtttttgagcccttcgcttttatgaaagaggttgagcttttagaaacaagaggtttttcgattagggaacgattaactgtttcaccggcagcgcaattgattatgccttatcacgcgctgatcgacagtgcgcgtgaagaggccttaggaggaaaaaaaattggaacgacaggacgaggcattggtcctgcttatgaagacaaggtggctaggagaggtattagagttggcgatc

SEQ ID NO: 316001 - DNA, 652 bp, Unknown
  Bacterial polypeptide expressing nucleotide sequence isolated from the Sargasso Sea
taaaaaaaaaatattatttgaaggtgctcaaggaattttactagacgttgatcatggaacctatccttttgtaacatcttccaataccgttgcatcttcggcagcaacaggatcaggttgtggaatttcaacaataaactatatattaggaataacaaaagcctatactactagagtaggccaaggtccatttccaacagaacttaaaaatcaaataggagaaaaactaggagaaaggggtaaagaatttggaactgtaactagtagaaaaagaaggtgtggttggtttgatggagtgcttgttagacaaacaatcaaaacttctggtattaatggaatagccctaacaaaattagatgtacttgatgaatttgatcaaataaaaatttgtgtaggttatgaattagatggtaaaaaaatcgattatttaccagcttcttccgaacagcaatttaaagttagacctgtttataaaacttttgaaggttggaatacatctacttgtggtataaaaaaattttctgatttacctaaaaatgctcaaagctacataaattttatagaagagtttgtagaaacaaaagtatcaactatatctacaagtccagagagaaatgatactattttgattgaaaatccttttaaagattaa

SEQ ID NO: 316002 - DNA, 946 bp, Unknown
  Bacterial polypeptide expressing nucleotide sequence isolated from the Sargasso Sea
atttctttattaggacttcaatggggtgacgaaggtaagggaaaagttgtagatcatctagcaaaagatctcgatgcagctattaggtatcaaggtggccataatgctggacatacgctaatagttggaggaaagagaatagtttttcatctattaccctcagcaatatgccatgacgatattcattgttatataggcagaggagtggtagttagtttagatgcactttttgaagaaattgaagaagctcaagaggttataggaaatatcgaagacagattaacagtcagctcagcttgtagtcttatacagccttatcatattaagctagatcaattaagagaaggatcaaaaaaacttacgaaaatcggtaccacaggcagaggaataggtacggcttatgaggacagggtaggtagacgctctatcagggtggcagacttatacaatgaaaaaaaacttaaagataagctcgaagaggttttagatttttacaattcaatttttgtgcattcatttaattcagaagaaatcgatttaattgaattgtttgaaaaaaatctaattcaaggagacaaactcaaaccttatgtgggcaatgttattcaggaggtaagagatttacaggaatcaaataaaaaaatattatttgaaggtgctcaaggtgctttattagacgttagcctaggaacttatccttacgtaacatccagtaactcttcagttggaggtatagcttcgggaataggtattagtccaaccaacatagatttttcacttggaatagctaaagcctatacaacaagagttggagaaggaccttttccaactgaattatttgatgctgtaggtacttttttagctgagaaaggtggagaggttggagccacaactggaaggccaaggagatgtggttggttggatgcttttttactttctcatactg

SEQ ID NO: 316003 - DNA, 920 bp, Unknown
  Bacterial polypeptide expressing nucleotide sequence isolated from the Sargasso Sea
ttatactttctatcatagagagctagacactgctagagagcacgaattagatggtattaaaattggaactactggcaggggcataggtccagcatatgaagacaaagtaggtagaagagctataagactgtgtgatatttttgataaaaaaaatttaaaaaaaaagatagagaacgctctttttcatcataatcccataagaaaaggtctaggcataaaggaagtaaaatctgataatattctcaatcaattatatgatataacagattttataaaaccttacgttaccaatatatggaatgatttaataaaattacaaagtgaaaataaaaatattctatttgagggtgctcaaggtatgctattagacaatgatcatggaacttatccttttgttacttcttctaatacaataagtgctcaagcatctataggaagcggtttaggcaatattaaaaattgttatactcttggaattactaaagcatatttgactagagtaggagaaggaccgttcccaaccgaacaaaataattcaataggtgaaaaactaggcttaattggaaatgaatttggcacagtgactggaagaaaaagaagatgtggttggttagatttagttttattaaaacaatctgtagatatatgtggtatacatggattagctttaacaaaactcgatgttttagatgagtttgaaaaaattaatatctgtacttcatataatttcaatggaaaaaaatataattatttacctcctattatttcatctacagatgccttaaaaacagaatatattgagcttgatggctggaataaaagcacaagaggctgtagaagctataatgagctacctagaaatgctaaaaaatatattcaaattttaaaagaaattacgggagtggaagttagtttgcttt

SEQ ID NO: 316004 - DNA, 547 bp, Unknown
  Bacterial polypeptide expressing nucleotide sequence isolated from the Sargasso Sea
ataggctctggttgtggcccaagttcaattcaatatgttttaggtataactaaagcttatactacgagagtaggagaaggaccttttcccactgagttaaaagacaaaattggccaatcaataggcaaaagaggaaaagagtttggaacagtgacaagtagaaaaagaagatgtggatggtttgatggagtacttgttagacaaactataaaaatttctggtattaatggaattgcattaacaaaactagacgtcttagacgaattagaagaaataaagatttgcactaaatatgaattaaatggaaatgttattgattatttacccgcagctcatgaagatcaattaaaagttaaaccaatttacgaaaagtttgaaggttggcaaagttcaactcaaggaataaaaaatattgactcattacctgaaaaagcaaaaaagtacatatatgcaatagaggattttattggtgcaaaaatatgtagtatttcgacaagtcccgagagagaagatacaattcttatagaaaatccttttgaattataaa

SEQ ID NO: 316005 - DNA, 814 bp, Unknown
  Bacterial polypeptide expressing nucleotide sequence isolated from the Sargasso Sea
cgattatcattagtgcttgaacaccataatgcaatccgaaaaggattgggtaagtcaatatatgaaaaagataaactagtcgaggacttattaaaaatagctccaaatattttaaaatattcagcacctgtttggagaaagatagatcaatttaaatcagaaaataaaaaaatattatttgagggagctcaaggaatattacttgatgtagatcacggaacatatccatatgtaacttcttctaatacagtagcagcttcagcagcaacaggatctggatgtggtccaaactcaataaactatgtattaggaataacaaaagcatatacaacaagggtaggtgaaggacccttcccaacagaattaacagatgaaattggtaatcatttaggtgaaaagggacatgaatttggaactgttactagtagaaaaagaagatgtggctggtttgatggagttctagtaagacaaactataaagatatcgggcattgatggaatagcattaacaaaattagatgtgttagatgaacttgatcaaataaaaatttgtgtagcttatgagctaaacggaaaaaaaatagattattttcctacagcagttgatgatcaaataaatgttaagccagtttataaaatatttgagggatggaaatctaaaacccaaggaataaaaaaatttcaagatttacctaataatgcaaaaatttatgtaaaagctgttgaagaattcattgaggcaaaaatatcaagtatttcaacaagtccagaaagaaaagatactattcttttaatagatccatttaataattaga

SEQ ID NO: 316006 - DNA, 544 bp, Unknown
  Bacterial polypeptide expressing nucleotide sequence isolated from the Sargasso Sea
cagacgaggtattggaccagcatatgaagacaaagttggcagaagatcaataagagtaatggacttagtatctgagggaaatttagaccataggcttgaaactgtattgctacatcataacgctataagaaaaggactggggaaaaaggtctacaaaaaagataagttaaaaaaggatttattaaaaattgctccagaaattttaaaatattcaaaaccagtatggaaaaaaatagatgaatttaaatctcaaaacaaaaaaattttatttgaaggtgcacaaggggttcttttagatgttgatcacggtacctatccatttgtaacttcttccaatactgtcgcgtcttcagctgccactggttcaggttgtgggccaaattccataaattatgttttaggtataacaaaagcttacacaactagagttggagaaggaccttttcccactgaattgaaagataaaattggtgaagaacttggtactaaaggtaaggagtttggaacagtaactagcagaaaaagacgttgtggttggtttgat

SEQ ID NO: 316007 - DNA, 898 bp, Unknown
  Bacterial polypeptide expressing nucleotide sequence isolated from the Sargasso Sea
aaacttaattatttcagaatcggcaaatttaattttaccattccatagagaaatggatgaaataagagaagatgcagcaggcaaatctaaaataggaacaacaagaagaggaattggacccgcatatgaagataaagttgggagaagatcaataagagttatggatttagtttccgaatcaaatcttgatcataggttagaagcagttttgatgcatcataatgcaataagaaaaggactaggaaaagaaatttataaaaaagataagctaaagcaagatttactaaagatagcaccagaaatattaaaatattctcaaccagtatggaaaaaaatagatgaatttaaatcagaagaaaaaaaaatattatttgaaggcgcacaaggtattttgcttgatgttgatcatggtacatatccgtttgttacatcttcaaatactgtagcttcggccgcagcgacaggttctggttgtggtcctagtacaataaattatgttttaggcattacaaaagcttatactactagggttggagaaggccctttcccaacagaattaatagatgagacaggagaaaaactaggcgctattggaaaagagtttggaacagttacaagtagaaaaagaagatgtggatggttcgatggagttttagtcagacaagcaattaaaattagtggaatagacggaatagcacttaccaaactagatgtattagatcagttagatgaaattaagatgtgcatcgcatatgaagttaacggagaaaaaatagattatctacctgcatcagtagacgatcagcttaaagcaaaacctatttataaaaattttaagggatggaattgtccaaccaacggtataaaaaaatttgatgtcttcctgaaaatgcaaaaa

SEQ ID NO: 316008 - DNA, 547 bp, Unknown
  Bacterial polypeptide expressing nucleotide sequence isolated from the Sargasso Sea
atgaaaatagacttaattttaggactccaatggggtgatgaaggtaaaggtaaaattgttgatgttttaactaaagattatgatatcattgctaggtttcaaggtggaccaaatgccggacacacacttgaatttgatggaataaaacatgttttacatacaattccatcaggtatttttcacgacaacaaattaaatattattggtaacggagttgtaattgatccagtcatttttcagaacgagatagaaaaattagatgaacttaaagttgacctaaatgataaacttctcatatcaagaaaagcccatttaatcttacctactcacagactaattgacaaagcatctgaactttcaaaaggtaagaaaaagattggatctacattaaaagggataggtcctacctacatggataaaactggaagaaatggattgagagttggtgatttagaattagatggttgggacgaaaaatttgaagctttaactaataaacatgttaacattataaataattttaatgtcgatattgaatttaatatag

SEQ ID NO: 316009 - DNA, 655 bp, Unknown
  Bacterial polypeptide expressing nucleotide sequence isolated from the Sargasso Sea
gttgatctgctggagcctaatatttttcatgagaaattgaataaatcttttattttcgcaaccaatcttttgtccgctatatcttcatcagatttcgatttagattttgattctgtttataatgattatttaaagatgggtaaacttttatctccttatatatctgatatttctcttgaactttataatgcttacaataataataaaactatcctttttgagggcgctcaaggtatttcgctagatgttgatcatggcgtatatccttatacaacatctagcaatactattgcaggaagcatttcaacgggcaccggagtaagctatagagacatacatagaattattggtgttactaaagcttatttaagtcgagtgggggaggggcctctcccttctgaggttcatggcgaggaagcgattcagctaagagaaaaaggtggagaatatggcactacaaccggtcgaccgcgtagggttgggtggttggaccttgttcaggtaaggcaggctgtacgtgtaaatggattaacggaaattgcactaacaaaacttgacatattatctaacacaaaggagctttcagtttgtaccgcatatgatataaacggtgtcaaagaatctgaaatccctgcaagcttacataagtttacgc

SEQ ID NO: 316010 - DNA, 879 bp, Unknown
  Bacterial polypeptide expressing nucleotide sequence isolated from the Sargasso Sea
aataaattatttaaaagataaaggtgtaaaccccaagttgaaaataagtgacagggcgcatgttattatgccatatcacattgaaatggatacagcgctaacaaagcaccaggggaaattagcggcaggcagtacaaaacgaggtattgccccggtgtatggagacaaaatgtaccggcatggtatacgtatgatcgatcttacagagcctgatgttttcagtgaaaaactagacaaagcatatagctttaatcaaacaatgatagaagcatttggtcacagcattgaacaaaataaaaaaagcatttatgagcaatacatcaaatatggcgaaatactaagcccctatatatctgacatttctgtagatctttttaatgctcacaaaaagggtgcttcaatactttttgagggtgcgcaaggtattagcctagacattgaccatggtgtttatcctcacacgaccagtagcaacacagtcgctggtcatgtagccgcagggacaggtgtaagcttcagagacatccacagaattatcggtgtcaccaaggcatacctcagtagagttgggcaaagccccctccccacagagctcagtggcgttgaggctgaaacgctgcgcgaaaaaggaggagaatatggtacaactacaggtaggccacgcagggttggctggctagaccttgtccaagttagacaagctgtaagaacgaatgggctaacagaaatagcccttacaaagctagatattttatctgggttttcaagtctcccagtttgtcattcatacaaaattgattcaaaagaggtaagagaaatgcccgcctcactttctcagtttagatcagcaaaaccaatctatgaaacgctagagggttg

SEQ ID NO: 316011 - DNA, 664 bp, Unknown
  Bacterial polypeptide expressing nucleotide sequence isolated from the Sargasso Sea
tatgaaaaataatatatttctaatcggaacacattggggtgacgaaggaaaagggaaagttgttgatgtactatcagaaaatgcatcggcatgtgttagatttcaaggtggacataatgctggtcataccctggtaattaatgataagaaatttgttttacatctcattccatcgggcatacttcgagataatgtaaaatctataattggtaacggagttgttgtctccatagatgcactcataacagaaattgatgagcttacaattaataaaataccgcttaatgataaattgtttattagtcaaaactgtcatcttatattgcctacccacatagctcttgataaagctcgcgaaaccagtctcggcaaaaagtctataggaaccacaggcaggggcatcggaccttgttatgaggataaggtctcaagaaaaggtatcagatttttagatcttcaaaacgttgacatctttcaaaaaaaacttgctcaacttatggaattccataacttcattttgaaagaatattacaaagaggaacctatagatattagttttgtcagagatgatattttaaataagtataaaaaaatatcatcattcattattaatactgatgaatatataaatcagctctgtaaatcaggaggagtagtgttcgag

SEQ ID NO: 316012 - DNA, 607 bp, Unknown
  Bacterial polypeptide expressing nucleotide sequence isolated from the Sargasso Sea
tatgaaaaataatatatttttaattggaacacattggggtgatgaaggaaaagggaaagttgttgatgtactctcagaaaatgcatctgcatgtgttagattccagggtggacataatgctggtcataccctagtaattaatgataagaaatttgtattacatctcattccatcgggcatacttcgagacaatgtaaaatctataattggcaatggagttgttgtctccatagatgcactcataacagaaattgatgagcttacagttaataaaatatcgcttcatgataaattgtttattagtcaaaactgtcatcttattttacctacccacatagctcttgataaagcccgtgaaatcagtcttggcaaaaagtctataggtactacaggtaggggtataggaccatgttatgaagataaagtttcaagaaaaggcattagattttcagatcttcaaaacgttgacatctttcaaaaaaaactgactcaattaatggaattccataacttcattttgaaagagtattataaagagaaacctatagatattatttttgttagagatgatattttaagtaagtataaaaaaatatcgtcattcatt

SEQ ID NO: 316013 - DNA, 630 bp, Unknown
  Bacterial polypeptide expressing nucleotide sequence isolated from the Sargasso Sea
gtgctcagggagttcttttagacgttgaccatgggacttatccatttgtaacctcatctaatactgtcgcgtcatctgcagcgactggctcaggctgtggtataaactccattaattatgttttaggcattacaaaagcctacaccacaagagttggagagggaccttttccaacagaactaacagatgagataggtgagttacttggaatgagaggaaaagagtttggaactgtcacaagtcgaaaaagaagatgtggttggtttgatggagttttggtaagacaaactctaaaaatttctggaattgacggtattgccttaactaaactagatgtactagacgaactagatgaaattaaaatgtgtatagcttatgagataaatggtaaaaaatatgattatcttccagcttctgtcgatgaccaatttaaagctagaccaatatataaattttttaaaggttggaaatcttcaacagtgggtataaaaaaatttgaagaattaccagaaaatgcaaaaatttatataaaagaattagaaaagtttgtagagaccagaatttcaagtatctctactagtccagagagaaacgatacaatcttaattcaagatccttttaatctttaat

SEQ ID NO: 316014 - DNA, 727 bp, Unknown
  Bacterial polypeptide expressing nucleotide sequence isolated from the Sargasso Sea
aatgaaaaatgtagttgttgtaggttcgcagtggggagacgaaggcaaagggaaaatagttgattggttatctagtgaagcagatgtagttgttcgtttccaaggaggccataatgccggacatactttggttattgataaaaaagtatttaaattaagattattaccatcaggcatagttagggagggaaaaatttcaattttaggaaatggcgtagttatagatccttgggctttattagatgagattaaagaaataaaaaaaaaaggaataaatgtaagtccagacaattttatgatttcagagtcagcttcactaatacttccatttcatcaagagatggatgaaataagagaagatgctgcaggaaaaaggaaaattggaacaacaagaagaggtatcggtccttgctatgaagataaagtcggaagacgttctattcgtgtgatggatttaagatcagaaagcaatcttgatagtagattggaaaatgtattgttgcatcataatgctattagaaaaggtttaaaaaagaaggtttataaaaaaaatgatcttaaaaaaaaattgttaaaaattgctcctgaaattttaaaatttgcaaaacctatatggttaaaattagatgagtttataaaagatagaaaaaaaatattgtttgaaggagcgcaaggaatacttttggacgtagaccatggaacatatccctatttattcatcaaatac

SEQ ID NO: 316015 - DNA, 909 bp, Unknown
  Bacterial polypeptide expressing nucleotide sequence isolated from the Sargasso Sea
gtgtagaggtaaacgtaaatatttttgctatttcagagtctgcaaatttgatcttgccttttcataaggaaatggatgagattagagaggatgcagcaggtaaaagtaaaataggaactactagacgtggaattggacctgcatatgaagataaagttggaagaagatctataagagttatggatttaagatcagaaaaaaatttagatcaaagactcgactctgttttagttcatcacaacgcaattagaaaagggcttggaaaaaaaatttttcaaaaagatcaacttaaatctgatttacttaaaatagcacctaaaatacttgaattctcccagccagtttggctcaaaattgatcaatttacaaaacaaaaaaagaaaattttatttgaaggagcacagggtattttgcttgatgtagatcatggaacttatccctttgtaacttcgtctaatactgttgcttcaagtgcagctacaggaaccggatgtggtccaaattcaataaattatgttcttggtattacaaaagcctacacaacaagagttggagaaggtcctttccctacagaactaaccgatgatatcggtgaacttttaggagcgcgtggaaaagaatttggaactgttactagtagaaaaagaagatgtggatggtttgatggtgtattagttagacaaacaattaaagtatcgggtattgatggaattgctttaacaaaattagatgtgctagatgaattagatgaaattaaaatgtgcgttgcctatgatcttgatggtaaaaaattagattatttaccagctgctgtggaagatcagataaaaataaaaccaatctatgaaacttttccgaggatggaaagtttctacaagtggagtcaaaaatatggactcgttacctgaa

SEQ ID NO: 316016 - DNA, 814 bp, Unknown
  Bacterial polypeptide expressing nucleotide sequence isolated from the Sargasso Sea
atgaagaaatcccttatccttgtaggaactcaatggggggacgagggtaaaggaaaaatagttgactatttttcaaaaaaattcgatgccgtatgtcgtttccaaggcggacataacgcaggacatactatttataaagaagaagaaaaatttgttttgcatttaattccctccggtgtattttacgatcatgtctcatgctttattgggcagggagtaatactttctctagattcattattagaagaaatagaacaattagaatcaaaaggcgtagaactagaaggaaaattacgtatcagtcgttattgcagtttgcttctaccaatacatgcaaaaattgatcagctaagagaagataaaaaaaatgcaataggcacaactcgaagaggcattggtccagcttatgaagataagactgccagaagaagtatcaaagctttcgatctagaagataatgaattacttgaagaaaaattaaagaatttagttgattattataattttcagatagaaacaattcatgagtctgaatgttttgtttatgaggaagtattggataacctcaaaaaatcatatcagaaagcatcaaaatactttggtgatgttacagattcattggaagaaatttatgaaggtggaggtaatatactttatgaaggagctcaagggactttacttgatgttgattatgggacttacccatatgttacttcatcaaatacactagctacatcagttggtgtaggttctggatttccaaaaagtatatattctgatgttttaggagttacaaaggcttacactacaagag

SEQ ID NO: 316017 - DNA, 863 bp, Unknown
  Bacterial polypeptide expressing nucleotide sequence isolated from the Sargasso Sea
tgattggctttcaagtgaagcagatgtagtagtaagatttcaaggaggccataatgctggatatactttagtcatagataaaaaaatatttaaattaagattattaccctcaggtattgtaagaaaaggaaaaatttctattcttgggaacggagttgtaattgatccttgggcattattaaaagaaatcgaggaaattaaaaaacaaggagtcgaagtcactccagaaaattttatgatttcagagtcagcttctctcatcttgccatttcaccaagagatggatgaaatcagagaggatgccgctggaaaagaaaaaattggtactactagacgaggtataggaccctgttatgaagataaagttggtagaagatcgattagagtcatggatttaagatcagaaagcaacttagatagcaggctagaaaatgtcttattacatcataatgctattagaaaaggccttaacaataagatttacgaaaaagataagcttaaaaaagaattattgaaaatagcacctagtatccttaagtttgcccaacctgtgtggttaaagcttgataaatttaataatgaaagaaaaaaaatcttgtttgagggtgctcaaggtatacttttagatgttgatcatggtacttatccttacgtaacatcatccaatacagtgcccgcaatggcagcgactgggtcaggctctggtcctaataaaattgattacattttaggaataacaaaagcatatactactagagtaggaagcggaccatttccaacagaattaaatgatgatattggtgaaagtttaggcaagagagggaaagaatttggaactgtaactgcaagaaaaaggagatgcg

SEQ ID NO: 316018 - DNA, 616 bp, Unknown
  Bacterial polypeptide expressing nucleotide sequence isolated from the Sargasso Sea
tctactacttgatgttgactttggaacgtatccgtatgttacatcctcaaatacgcttcctggtcaggcctcaattggcactggtgtgggtcctaaattccttgatcaaattattggtataacaaaagcatacacgacccgagttggaagcggtcccttccccaccgaattatttgatgaatctggtgaaaagcttggacggatcggaaatgaatttggtactgtcacgggaagagaaaggcggtgtggttggtttgatgcagtgctcgtgcggcaaactgcacagatttcaggtattgacatgattgcattaacaaaattagatgttttggactccttcgaaaagattaatatctgcgtagggtatgaattagatggaaaagagattgattaccttccgttatctgagcccttacagaataaaattatacctatatatgaagagcatgatggctggctcactgatacttcgggtattaatgaatttaatgaacttccattaaaagcattggaatacataaaacgtattgaggagataatctcaacaccaattagcataatatccactagcccaaacagagaggacattatttttttggaaggtatattcaattaa

SEQ ID NO: 316019 - DNA, 817 bp, Unknown
  Bacterial polypeptide expressing nucleotide sequence isolated from the Sargasso Sea
aatgaaaaatgtagcaattgttggatctcaatggggagatgagggcaaaggaaagattgttgattggctttctagtgaggccgatgttgttgtaaggtttcaaggagggcacaatgcgggacacactttagtaattgatggggtaacatataaactgagattattaccctcaggaattgtaagaaaagataaagtatcaattattggaaatggtgttgttgttgatccttgggctttattagatgaaattaatgaaattaaattaaaaggcgttgaagtaaatcaaaaaaatttaattgtttcagaggctgcaaatttaattttaccatttcatagagaaatggatgaaataagagaagatgcagctggaaaagccaaaataggaacaacaagaagaggaattggtccagcatatgaagataaagtaggcagaagatcgataagagtgatggacttaatttctgagaaaaatttagatcatagattagaaactgttttaatgcatcataatgcaataagaaaaggattaggaaaagaaatttacaaaaaagataaattaaaggaaaatttattaagtatagcaccagaaattttgaagtattcacaaccagtatggaaaaaaatagatgagtttaaatcacaaggaaaaaaaatattatttgaaggtgcacaaggtattttacttgatgttgatcatggcacttatccattcgttacatcatcaaatactgttgcttcagctgctgcaacaggctccggctgtggtactaattcgataaactatgttttgggaattacaaaagcttatacgactaga

SEQ ID NO: 316020 - DNA, 649 bp, Unknown
  Bacterial polypeptide expressing nucleotide sequence isolated from the Sargasso Sea
atggcaaatgttgcagttgtagggtcgcagtggggagacgagggaaaaggcaaaattgtagattggctatctgatcaggccgacatagttatacgttttcaaggtggacataatgcaggccatacacttgtgattaatggtatcacatataaattaaaacttcttccatctggaattgtcagacctggtaaagtttctgttattggaaatggtgttgtagttgatccatgggcattattagatgaaataaaatcgattgaaaaacaaggagtaaaagtttctgaagaaaatttaatcattgctgaaacagcaaatttaattttaccctatcatagagaaatggatgaaataagagaagatgcagctggacaaggaaaaattggaacaacaagaagaggaattggaccagcttatgaggataaagttggaagacgagcaatacgtgtaatggatttaagatcagaaacaaatttagatcagagactagatatagttcttcaacatcataatgctataagaaaaggcttaagtaaaaaagtttataaaaaagaggaattaaaaaaagaattaatgaaaattgcaccggaaattttaaaattttcacagccagttggaaaaaaattgatgagtttaaagagcaaaataaaaa

SEQ ID NO: 316021 - DNA, 811 bp, Unknown
  Bacterial polypeptide expressing nucleotide sequence isolated from the Sargasso Sea
caatgcactttccaatcaccaaggacaattagcagcaggaagtacaggaaaaggtatcgctcccgtatatgcggataaaatgttccggaacggtattcgaatgatagaccttttggatcccaacgtgtttgaagagaagctaaaaaaaggctatttattttcaaaacaaattattgaaggagccctccttcaaaaacttgatgtctcaatgcctgaaattttgaaaaattacttacattatggagaacagctcgcttcatatatatgtgacacttctgttgaactttatactgcctatcaaaatggaaaatcaattctttttgaaggagcgcaggggatcagcttggatgtagaccatggtatatatccattcacaacatcttcaaacacggctaccggccacatatctactggaacaggtgtaactttccgaactataaatcgagtcattggtgtagtaaaaggttatttgagtcgcgttggggaaagcccattgccatcagaaataaaaggtgctgatgctgaatcattgcggaaaaagggcggagaatatggaaccactaccggaaggccaagaagaatcggttggttagatcttgtgcaagttcgacaggctgttcgtgtaaatggacttacagaaatagcattaacaaaactagatattctaaataattacaaagctttaaatgtctgcgtatcttatgatatcgaaggggaaatagtagatgaaatgcccgcaagtttagaaaaatatagaaaatctaagcctgtttataaaacattacatggttggtgttctctccctgaaaaa

SEQ ID NO: 316022 - DNA, 760 bp, Unknown
  Bacterial polypeptide expressing nucleotide sequence isolated from the Sargasso Sea
agaaatttttaaaaaagacaaacttaaaaaagaattattaactattgctccagaaattttaaaatactcacaaccagtttggaaaaagatagatgaatttaaatcacaaaaaaaaaaaatactctttgaaggtgctcaagggattttgcttgatgtagatcatggtacttatccatttgttacatcttcaaatactgtagcttcagctgcctcaacaggatcaggctgtggtcctaattctattaattatgttttaggaattacaaaagcatatactactagagttggagaaggtccattcccaacagaattaaaagaccatgtaggtgaaacgcttggaaaaagaggaaatgaatttggaacagttacaagtagaaaaagaagatgcggatggtttgatggagttttagtcagacaaacaattaaaatttcaggtatagatggaatagcgttaacaaaactagatgttcttgatgaattagaagaaattaaaatgtgtgttgcttacagtgttgatggggaaaaaatggattatctacctgctgcagttgacgatcagttaaaagctaaaccaatatataaaacttttaaaggatggaaaagttcaacaaagggaataaaaaaatttgatgatttgccagctaatgcaaaaaattatgtaaaggaattagaaaaatttattgaaactaagatttctagtatttcaacaagtcccgaaagaaatgatactatattgatagttgatccatttaatttttaa

SEQ ID NO: 316023 - DNA, 880 bp, Unknown
  Bacterial polypeptide expressing nucleotide sequence isolated from the Sargasso Sea
atgaaaaatgtggttgtagttggatctcaatggggcgatgaaggaaaaggaaagattgttgattggctttctagcaaagccgacgtaatcgtccgtttccaaggaggtcataatgctggtcatactttagttatagacggagtaacttataaacttagattgttgccatctggtatagttagaaaaaacaaagtttcaataataggaaatggtgttgtcgttgatccttgggcacttcttgaagagatcaaagaaattaaattaaaaggagtagatgttagtgaaaaaaatttaatcttgtcagaatctgcaaatcttatcctgccttttcataaggaaatggatgaaataagagaggatgctgccggaaaggcaaaaattgggaccacaagaagaggaattggtcctgcttatgaggacaaaattggaagaaggtcagttagagtaatggatttagcctcagaagataacttagatcaaagattagaagcagctcttattcatcacaatgcaataagaagaggtttaggaaaagatatttataaaaaagatcagttaaagaaagatctattaaaaatagctccagaaatattaaaattttctcaaccagtttggaagaaaatagacgagtacaaatcaaagggtaaaaaaatattatttgaaggagcgcaaggtattttgttagatgttgaccatgggacatatccatttgttacatcttctaatactgtggcttcatcagctgcaacaggaacaggctgcggaccaaatacaataaattatgttttgggtataacaaaagcgtataccacaagagttggacaaggaccttttccaacagaattaactgatgatgttggtgaaaaaaattggaactagg

SEQ ID NO: 316024 - DNA, 515 bp, Unknown
  Bacterial polypeptide expressing nucleotide sequence isolated from the Sargasso Sea
ctatgttcttggaattacaaaggcttatactactagagttggagaaggtccctttccaacagaattaacagataaagtaggagatttattaggaacgcgtggaaaagaatttggaactgtaactagtagaaaaagaagatgtggatggtttgatggagttttggttagacaaacaattaaaatttcaggtatagacggtattgccttaactaaactagatgttcttgatgaactagatgaaattaaaatgtgtgttgaatatgaacttgatggaaaaaaattagattatttacctgcagctgtagaagatcaattaaaaataaaacctatttataaaactttccctggatggaaaacttctactaatggaattaaaaatatggatttacttcctgaaaatgcaaaaaaatatatatttgcagttgaaaaatttataggtgcaaaagtatctagtgtttctactagcccggaaagagacgatacaattttagttgaaaatccttttaatatttaat

SEQ ID NO: 316025 - DNA, 864 bp, Unknown
  Bacterial polypeptide expressing nucleotide sequence isolated from the Sargasso Sea
cgcaggccacacattaattgtagatggtaaaaaggtagtttttcacttgttaccctcggctatttgtcacccaaacatacaatgcttcattggtagaggtgttgtcgtcagtttagatgctttattctctgagattaatgacgcagctgaagtgctgggaaatttagaaggaagactgacaattagctctgcctgcagtcttattcagccataccacatcaagttagatcaactcagagaacaatccaataatctcaccaagatcggaactacgggtaggggcataggtacttcctatgaagatagagttggaagaagatccatacgcattgctgacttatatgatgaatctaaattaaaagaaaaaatcactcaggccttagatttttacaattcaatttttacacattcttttggcgaaaaagaaatcaatatcaatcaactctacgaccaaaatttacaacaagctgagaaacttaagccatatgttggtaatgttattgaagaaataagaaacctacaggaccaagataagaaaatactttttgaaggagctcaaggtgcactattggatattagtttgggcacttatcccttcgtcacatcaagtaatctaataggtggaataacttctggggctggagtaagtcccgccgatgttgactatacaattggaataacaaaggcttatacaactcgggttggagaagggccttttcccacagaactgttcgatgaagtaggtacctatttagcggagactggcggtgaggtgggtgcaactactggcaggccaaggagatgcggctggttagatggaatgctattagaaaacatgactaggttaagtggagtaaacggtct

SEQ ID NO: 316026 - DNA, 631 bp, Unknown
  Bacterial polypeptide expressing nucleotide sequence isolated from the Sargasso Sea
catggcaaagaacgttgtggtactcggcactcaatggggtgacgagggtaaaggaaaggtcgtagacctactcactgatcgcgcaaaatatgttgttcgctaccaaggcggacacaacgcaggtcacactctagtaatcgacggtgaaaaaaccgttcttcacttaatcccatcaggcatcttacgtgacaacgttacctgcataattggtaatggtgttgtgttaagcccagacgcacttatgaaagaagtcactatgctagaagagcgtggtgttcctgtgcgtgagcgtttgaaaattagtgaagcttgtcctctgattcttccttatcacgtagcacttgatgttgctcgtgaaaaggcgcgaggcgctaaagccatcggtacaaccggtcgcggcattggtccagcttacgaagacaaagtggctcgtcgcggtcttcgcgtgggtgatttgtttaatgctgaagactttgctgccaagctaaaagaagtgctagatgtgcataactttacgctgactcaatattacggtgaagaagcggtcgattttgacgaaacgttgaaaggcgcgatggcagttgccgatattcttaaagcaatggttattgatgttaccgacgaacttgat

SEQ ID NO: 316027 - DNA, 859 bp, Unknown
  Bacterial polypeptide expressing nucleotide sequence isolated from the Sargasso Sea
atgaaaaatgtagtagtagttggatctcaatggggagatgagggaaaaggaaagatagtagactggctttctagcgaagctgatgttgtaataagattccagggtggtcataatgctggacacaccttagtaatcgatgacaaaatatataaacttagactgctgccatctgggattgtcagaaaaaataagatatctataattggtaatggtgttgttgttgatccctgggcattattagatgaaattgaagaaataaaaaaagaaggagtagaaattaatgaaaaaaatttatttttgtctgaagcagcaactttaattttaccaattcatagtgagcttgatacctttagagaggataacgctaaaaatgaaaaaataggaacaacaaaaagaggaattggacccgcttatgaggataaagttggacgaagatcaataagagtaattgatttattatcagaaaaaaatttagatactaaactaacaacccttcttaaacatcacaactttttaagaaagggaatgggcaagacagaatattctaaagaaaaacttaaagaaaaccttttaaaaattgctccaaaaatattaaaatatagtaaaccagtatggaaaaaaattgaagaatttaaaaaattaaataagaaaatattatttgaaggtgctcaaggaatattacttgatgtagatcatggaacctatccatttgtaacatcttctaatactgttgcctcttctgcggcaactggatcaggatgtgggttaggaacaataaactatatattaggaataacaaaagcttatacaagaagagtaggtgaaggaccatttccaactgagctaaaggagaaatagg

SEQ ID NO: 316028 - DNA, 493 bp, Unknown
  Bacterial polypeptide expressing nucleotide sequence isolated from the Sargasso Sea
attgggtatttttaaagcctatacaactagagtaggtagcggtccatttccaactgaattacatgataaaactggggaaaaattaaggaaaataggaaaagaatttggagcaacaactggtcgtccaagaagatgtggctggtttgatgcggtggcagctaaatacagctgcatgattaatggactcactgatatagctttgacaaaattagatatattagaccattttgataatcttaagatttgtataggatatgaatacaatggtgttgaattaaataattattctgaatctattgatattgaagataatataaagcccatatataaagaattcaaaggttggaatactaatttaaatggtataagtgattataatatgttacctttagagtgccgtgaatatattgaatatattgaagattttcttgaaacaagaatatctattatatcaataggcccaggtagaaatgaaatcataaataggttataa

SEQ ID NO: 316029 - DNA, 490 bp, Unknown
  Bacterial polypeptide expressing nucleotide sequence isolated from the Sargasso Sea
tatgtctttagatctattactaggtcttcaatggggagatgaaggtaaaggaaaaatagttgatgcaataacctctaattatgatattattgctagatttcaaggaggacctaacgctggacatactatagagtttgacggaaataaacatgttctccatacaattccatcaggcatcttcaacaaagattctattaatttaattggaaatggagttgttattgatcctggaatcttcctaaaagaaattgaaggactagataaatataagattgatcttagaaaaaatttatttatttctaaaagagctcatataatattgccaactcataaaattatagatgcagcatcggaagcatcaaaagggaaaaaaaagattggatcaacactaaaaggaataggacctacttatatggataaaacaggaagaaatggtattagagtaggagatattattgatagttcatggcaattaaaatataatagtctt

SEQ ID NO: 316030 - DNA, 592 bp, Unknown
  Bacterial polypeptide expressing nucleotide sequence isolated from the Sargasso Sea
atgttttatactatagttggaacccaatggggagatgaaggaaaaggcaaaattgttgattggatttcttctaaagctgacttgattgttagatatcaaggaggaaataatgcaggacatacaattaaagtagataatgatgtttataaacttaatttattaccctcaggaataattaataataaaaaatgtgcaattggtaatggcgttgttttagatccttgggcactgatcaatgaaattgataatctaaaagaacaaggtatagaagtaaacgaggataatttatatattgccgacaatatatgtttgatcttgcctattcacaaacttcttgatgaaataaatgaaacttctagaggaaaaaaagaactaggaacaactaaaaaaggtattggtccagcttatgaagataaggtaggcagaagagcaataagaatttgtgatttgaaagatccaacatttttaaaacaaaaaattgataacctttatgcgtttcataaagataaaatttcaaaacatattaataaaattacacataattattatgaagaacttttatccatgtctagttatcttaactcctttagtg

SEQ ID NO: 316031 - DNA, 913 bp, Unknown
  Bacterial polypeptide expressing nucleotide sequence isolated from the Sargasso Sea
gggactacgagacgaggaattggaccagcatatgaggacaaagtaggtagaagatctattagagtaatggatttaagatctgagcaaaatttagatcataggttagaatcagttttgatacaccacaatgctattagaaagggtttaggaaaaaaaatttttgaaaaagaacaattaaaagaagaactattgaaaattgccccaaaaatactccaattttctcaacctgtatggcttaaaattgatcaatttaaaaaacaaaaaaagaaaattttatttgaaggggctcaaggaattttattagatgtagatcatggaacctatccctatgtcacctcatctaatactgtagcctcaagtgctgcaacaggaactggttgtgggccaaattcaattaattacgtattgggaataaccaaagcatacacaactcgtgtaggagaaggaccttttccaacggagttaaaagatgatataggagaattattaggcactagaggaaaagaatttggaactgttactagcagaaaaagaagatgtggttggttcgacggtgttctggtgagacaaactattaaaatttctgggatagatggaattgcacttactaaattagatgtattagatgaattggatgaaattaaaatgtgtatacattacgagctagatggaaaaaaaattgattatttaccagcagctgttgaggatcaattaaaaataaaaccgatattcaaaactttcccaggatggaaaacttcaacaagtggaataaaaaatatggctgctttgccagaaaatgcaaaaaagtatatttttgcaattgagaattttataggtgcaaaaatttcaagtatatctactagtccagagagggaagatacaatattagttgaaaaccctttaaatatttaat

SEQ ID NO: 316032 - DNA, 709 bp, Unknown
  Bacterial polypeptide expressing nucleotide sequence isolated from the Sargasso Sea
atatatctgtcttcaaatattcctttgatattaccttaccataaacaattagataaaattaacgaatctatcttatctggagaggataaaattggtactacagctaagggcataggccctgcttaccaagataaagtcggaagaaaaagcattaaattatatgatcttaaaagctcggacaaagttatagaaaaacttgaaaatattaagaaattctatgatccagttttaatagcatatcaagaagaacccataaatgttgagaaatacttatctattcttgatagtttttatacaaagattggtacgctaattgtcgataatagttttataaaaaagaattttaatcaaaataaaattctgtttgagggcgctcaaggtgctttgctagatttagatcatggatcttatccttttgtcacttcctcaaatacaatttcttcaaatattatgattggttctggtctacaagtcgattatcagacagtcggtattttcaaagcatacgcaactagagtgggtaatggcccatttccctcagaactttttaatgaaattggagattatatagctgaaactggtgtagagtttggaacagttacaaaaagaaaaagaagatgtggttggttagatttagtatctttgaaatatagttgtcaggttaatcgagtaaatgagctttgtatcactaaaatagatgtattgaata

SEQ ID NO: 316033 - DNA, 843 bp, Unknown
  Bacterial polypeptide expressing nucleotide sequence isolated from the Sargasso Sea
aaccacaagaagagggataggtcctgcatacgaagacatggtaggcagaagagggattcgtttaattgacctcgctagtaaaaaaaatctatcaaaaaaaattgagacagccttacttcatcacaatattataagaaaaggtttaggaaaaaataaaataagtaaaaaaaaattagttaaggatctaatggcaatttccccaaaaatattaaaatattcacaaccagtatggaaaaaaattgaggaatttaaaaagaaaaaaaaaacaatcgtttttgaaggagctcagggcattctattggatgtggaccatggcacatacccttttgttacttcttcaaacactgttgcaggatcgatatttgccggcactggttgtggtccaaatacagttaattatatccttggtatagttaagtcttatactactagagtagggaaaggcccttttcctactgagttaaaaaatgaatcaggaaataaaatgggtcgaaagggaaaagaatttggtactgttactaatagaaaaagaagatgtggatggtttgatgcggtaattgttagacaatcatgtgcaatatctggaattaatgcgattgctttaacaaaaattgatgttctagatgagtttaaagatttgtatatttgtgtagcttataaacttaatggaaaaaaaattaactattttccaagttcgacggaggaccaaaataaagtaaaacctatttataaacgatttgatggttggatgaaaaatactagcggtattaaacaatggaaaaaactgccaaaaaatgctcaaaagtatgtatcttttattaaaaagttttgtaatgtcaggat

SEQ ID NO: 316034 - DNA, 864 bp, Unknown
  Bacterial polypeptide expressing nucleotide sequence isolated from the Sargasso Sea
gcggagaagggggttaacatagaagataactttctcattagttcgcaatgcccattaatacttcccacccatattcttttggataatgctagagaaagagcattaggtaataaagccattggcaccacaggaagaggtattggcccagcttatgaagataaggtgggaagaagaactattcacctgatcgatcttctagatccgaataagtttagagaaaagcttcaacatttgatggaataccataattttttattaaaaaaccattttcatagtgacacatcagacattaaagaggtggaagagttatggctgtcatttgcatcaaaaatcagcccctttgttgcagatacttcactcgagataaatgatttattaagcaatgataagaagatactttttgagggtgcacaaggcagtatgcttgatattgatcacggaacgtacccttttgttacatcttcaaacacagttgctggagcagcctctacaggcagtggagttggcccaggcgtgctcaacaagatccttggaattaccaaagcttacaccactagagtaggctcaggacctttcccaactgaattagatgatgccaatggaaaacatcttgcagatgttggagtagagtttggggcaaccactggaagacctagaagatgcggttggcttgatttggtagcattaaggagagcaatagttaacaactcaatttcacacttgtgcctaacaaaattagacgttttagatgggctagaggaaattaacgtggcggttgaatataaactttcagggaaagttttttcaatcatgcctaatcttaatgatcatgatctagaaaaatgtaaacccatatacaaaagc

SEQ ID NO: 316035 - DNA, 810 bp, Unknown
  Bacterial polypeptide expressing nucleotide sequence isolated from the Sargasso Sea
gatacaaaattaaatgaaatgttgttacatcataacgctataagaaaaggattaggaaaacaaattattaaaaaaaatcatttaaaagaagaattattaaaaatagctcccaaaattctccagtttgcacaaccagtgtggaagaaaatcgatgaatttaaaattcaaggaaaaaaaatattatttgaaggggcccagggaattcttcttgatgttgatcatggaacctatccatttgtaacctcatccaatacggttgctgcatctgcggcaataggatctggatgtggtccaaattctatcaattatgttcttggcatcacaaaagcctatactactagagttggagaaggtccattcccaacagagttaaaggacgagattgggaaaaaacttggaagtagaggaaaagaatttggaacagtaactagtcgaaaaagaagatgtgggtggttcgatggagtattggtaagacaaacggtaaaaatttcaggtatagatggaatagctcttacaaaactggatgtgttagatgaacttgaagaaatcaaaatgtgcgttgcttatgatattgatggaaaaagaatcgattatttaccaaccgcagcagatgagcaattaaaaattaaaccaatttataaaacttttaaaggatggaaatcttcaactgtcggtattagagaatttgaaaaactgccagaaaacgctaaaatatatgttaacgaactacaaagctttattcagtcaaatatatctagcatttcaacaagtccagaaagaaatgatactatattgattaaagatccgttt

SEQ ID NO: 316036 - DNA, 706 bp, Unknown
  Bacterial polypeptide expressing nucleotide sequence isolated from the Sargasso Sea
tccacaaaatttaaaaatagctgaaaacatatgcttgatacttcctttacataaagatctagatggcattaatgaagatagtagaggcaatgaaagtattggaactacaaaaaaaggcattggcccagcatatgaagataaaataggaagaagatctataagactatgtgatttatcagatgaaaatcttttgaataaaaaaatagagaacttaattgcatttcattccttaaaactaaatttttttgataaaaaatttgatagtaataaattgcttaatgaacttttggatgtttataaagatatatctaaatatgctttcccaatatggaaaacaatcaatgattttggcagtcaaaataaaacaatattatttgaaggcgcccagggagctcttttagatattgattttggtacatatccttatgttacttcttccaatacttcctctggacaaatatttgctggaacaggatttggtattaaaaataatcacactgtattcggaatttcaaaagcatatacaaccagagttggttcagggccatttccaacagagctttttgatgaaataggtgaatatttagttaacaaaggacaagaatttggaacagtgacgaaaagaaaaaggagatgtgggtggtttgatgcaaatttggttaaacaaagtgtaaaaataagtggtattgataatttaattctaaca

SEQ ID NO: 316037 - DNA, 970 bp, Unknown
  Bacterial polypeptide expressing nucleotide sequence isolated from the Sargasso Sea
aggaaaggtagtagatcatttagcaaaagatcttgatgcagctattaggtatcaaggtggtcataatgctgggcatacactaatcgtggaaggaaagaagatagtttttcatctattgccttcagcaatatgccatgacgatattcattgttatatcggtagaggcgtggtcatcagcttagatgcactttttgaagaaattgaggaagctcaagaggttataggaaatatcgaagacaggttaacagttagttccgcttgcagccttatacagccttatcatattaagctagatcaattaagagaagggtcaaagaaactcaccaaaataggcaccactggaagaggaataggtacggcctatgaggacagagtgggtagacgttccattagagtggctgacttatacgacgaaaaaaaactcaaagataaactaaaagaggtcttagatttttacaattcaatttttaaacattcttttggctctgaagaaattgatttaaatgaattatttgaaaaaaatttaattcaaggagagaaacttaaaccttatgtaggtaatgttattcaagaagtaagggatttgcagcaagcaaacagaaaaattttattcgaaggtgctcaaggtgctttgctagacgtaagcttaggaacttatccttacgtaacatccagtaactcttcagttggagggatagcttctggaataggcatgagtccaaccgacatagattattctcttggcatagctaaagcttatacaacaagagttggagaagggccttttccaactgaattatttgatgatgtaggagcttttttagcagagaaagggggagaggtcggggcaaccactggaagaccaaggagatgtggttggttggatgcttttttactttctcataccgttaaactaaatggcattgacggtctttgtataaccaagatagatgtattggatggcctagag

SEQ ID NO: 316038 - DNA, 821 bp, Unknown
  Bacterial polypeptide expressing nucleotide sequence isolated from the Sargasso Sea
gatgaaaaatgtagtagtagtcggatcacaatggggagacgaaggaaaaggtaaaattgtagactggttatccgatagggctgatgcaattataagatttcaagggggcaacaatgctggacacactttagttattgatggtgtaacttataaattaaggctattaccttcaggaattgtaagaaaaaataaagtatcaatcattggaaatggtgttgttgttgatccttttgctttacttaaagaaatagatgaaattaaattaaaaggaattgatatatcagaaaataatttgattatatctgagtctgcaagtttaatattgccttttcataaagaattagatgaaattagagaagatttagctggcaaaaaaaatattggaaccaccaaaagaggaattggtcctgcatatgaggataaaataggaagaagatcaattagaataattgatctaaattctaaaaaaagtttggatgaaaaattagaaacagctttaaatcatcataatgcgataaggaaaggttttggaaaagaaccatataataaagaaaaaattaaaaaagatttaatcaaaatagctcctaaaattttaaaatattctcaacctgtttggaagaaaatagcagaatttaaatctcaaggaaaaaaaatattatttgaaggagcacaaggaattctgcttgatgttgatcacggaacatatccgtttgttacgtcttctaatactgttgcttcttcagctgccacgggttctggttgtggacctggcttgataaattatgttttaggtattaccaaagcatataccaccagagttg

SEQ ID NO: 316039 - DNA, 462 bp, Unknown
  Bacterial polypeptide expressing nucleotide sequence isolated from the Sargasso Sea
gggttggagaaggtccgtttcctacggagctatttgatgatgatggcaaaaaactacaggatataggtaatgaatatggtgcaactacaggtcgccctagaagatgtggctggtttgatggtgttgctgctaaatatagttgcatggttaatggcctaactgaaattgcactgactaaattagatattttagatcattttgatacaattaaaatttgtactggttatgaaatcgatggtcaagttactacatgcttttcaaaagtattacataatttagataaagtaactcctgtttatactgaatttaaaggatggaaaactcctaccactggcatagaaaattttgaagatttgccaggaaacacaaaagaatatataaattatatttctgattttataaaaactccaataaatattatttcaactggacctgggagaaatcaaataatcaagagataac

SEQ ID NO: 316040 - DNA, 616 bp, Unknown
  Bacterial polypeptide expressing nucleotide sequence isolated from the Sargasso Sea
atgaaaaatgtagttgttgttggaacgcagtggggtgacgaaggtaaaggtaaaattgtagactggctttcaagtgaagcagatgtagttgttcgtttccaaggcggccataatgcgggtcatactttagttatagatggaattatttacaaacttagacttctaccatctggaatagttagaaagaataaaatctcagtaattggaaatggggtagtcgtagatccttgggctttgcttgatgaaataaaagaaattaagtcaaaaggtataagcattgataaaaataatttaattttatcggaatccgcaaaccttattcttccttttcataaggagatggacgaaataagagaagacgctgctggtgaggaaaaaattggaacaacaagaagaggtattggtcctgcttacgaagataagattggtagaagatcaattagagtgatggatttagctaatgaaaataatttaaattccagactacaaactgctcttattcaccataacgcaataagaaaaggattaggaaaaaagatttttgagaaagaacagttaaaaaacaatctattaaaaatagctccagaaatattaaaattttctcaaccagttggaa

SEQ ID NO: 316041 - DNA, 835 bp, Unknown
  Bacterial polypeptide expressing nucleotide sequence isolated from the Sargasso Sea
tcgagggactctccgggagaagatcaactgctggagacgatctacggcgtcgaccccctcgatcccgaggcggtaatcaaggagtacttgggctacggcaagcgcttggctccccatgtggtggagtgcacccaggccattcatcaggcggcccgcgaccgcaagaacattctgttcgaaggtgcccagggcactctgctggacctcgatcacggcacctatccctacgtcacctcctccaatccagtgtccggtggggcctgcatcggtgccggtgtgggacccaccctgatcgaccgggtgattggcgtggccaaggcctacaccacccgcgtcggcgaagggcctttcccgacggaactcagcggccgactcaacgaccagctgaccgagcgaggcggcgaattcggaaccaccacgggacgacgacgtcgctgcggttggttcgacggcgtgatcggccgctatgcggttcaggtgaacggcctggactgcctcgccgtcaccaagctggatgtgctcgatgaattggatgccatccaggtgtgcgtcgcctacgagctggacggggaacgcatcgagcatttccccagcagcgccgaggattttgcccgctgcaccccgatcttcgagacccttcccggctggcagtgttccaccgaggactgccgcaagctcgaggatctcccggaggcggccatggcctacctgcgcttcctcgctgacctgatggaggtgccgattgcaatcgtctccctgggtgccagccgcgaccagaccatcgttgtggaggacccgatccacgggcccaaacgggcgctgctcagcgcctgat

SEQ ID NO: 316042 - DNA, 932 bp, Unknown
  Bacterial polypeptide expressing nucleotide sequence isolated from the Sargasso Sea
gggattgttagaaagaataaaatttcaattattggaaatggcctctttgtagatccatgggctttattagacgaaataaaagaaataggagaaaaaggtgtagaagtaaactctgaaaattttatgatctccgaagctgcaaatttaattttgccctttcatcgtgaaatggatgaaataagagaggatgctgctggaaaaagtaaaattgggactacaagaagaggtattggacccgcatatgaggataaagttggaagaagatcaattagagtcatggatttaagatcagaaaaaaatttagatcaacgtctagaaactgtgttattgcaccataacgcaattagaaaaggattaggcaaaaaaatatttgaaaaaaaacaacttaaggaagatcttttaaaaatagctccagaaattttaaaattttctgaaccagtatggttgaaaattgacaaatttaaaaaacaaaagaaaaaaatattgtttgaaggtgcgcaaggtattttgcttgatgttgatcatggcacatatccttttgtaacttcatcgaacacagttgcttcaagcgctgcaactggcactggatgtggaattaattcgattaattatgttttaggtataactaaggcatatactactagagtcggtgagggaccgtttccaacagaactatcaaacgaaattggcgaattattaggcacaagaggcaaagaatttggaactgtaactagtcgaaaaagaagatgcggatggtttgatggtgttctagtcagacaaactatcaaggtttccggtatagatgctattgctttaaccaaacttgatgttttagatgaattagaagaagttaaaatgtgtgtagaatacgatctagatggaaaaaaaatagactatctgcctgcagctgttgaaagatcacttaagatcaa

SEQ ID NO: 316043 - DNA, 806 bp, Unknown
  Bacterial polypeptide expressing nucleotide sequence isolated from the Sargasso Sea
actaatttaggtaagagattagaaaatgttcttttacatcataacgctataagaaaaggtttaaagaaaaaactctataaaaaagaggaattaaaaaaaaaattacttaaaattgctccagaaatattgaaatatgcaaaaccagtttggcttatacttgatgaatttaaaaaagatagaaaaaaaatattatttgaaggagcccaaggtatattgttggatgttgatcatggtacttatccctatgttacttcctccaatacagtaccagctatggcagctaccggttcaggattgggaccagataaaataaattatattttagggattaccaaagcatatacaactagagttggcagtggtccattccctacagaactaaaaaataaaataggtgaaagcttaggaaaaagaggaaaagaatttggtacagttacagctaggaaaagaagatgtggttggtttgatggtgttttagtccgtcaaactataaagatctcaggaattgatggtattgcgctcaccaaattagacgtattagacgatttagaggaagttaaaatttgcgttcaatatgatcttaatggaaaaaaaatggactatttacctgcaacctcagaggatcaatttaagattaagcctatatataaaacttttccaggttggaaaaccaatactcaaggtattaggaacatgaaagatttacctgaaaatgcaaaaagatatatttatgcactagaggattttattggtgcaaaagtttctagtatttccactagcccggagagagatgatactattttgat

SEQ ID NO: 316044 - DNA, 697 bp, Unknown
  Bacterial polypeptide expressing nucleotide sequence isolated from the Sargasso Sea
atgcctaacatagcaattataggttctcagtggggagacgaaggaaaaggtaaaattgtagattggctttccgaaaaagctgatgtgattgtaagatttcaaggtggacataatgcagggcatacgcttgtagttaacaatataacctacaaactgaaattactgccttcaggaataattagaaaaaataaaatttcaattattggaaatggagtggtaattgacccttgggcattacttgaggaaatcaaacaattagaaaaattaggaataaaaattactaacaaaaatttattcatagcagaaaacgccactttaattttgccgccacacaaagagctagacgcaattagagaagattcaaaaaatactgataaaataggaacaactcgaaggggtataggaccagcatacgaggataaggtaggaagaagagccatacgcttaatggatctagcaaataaaaaaaatctatcaaaaaaaataaatatgatgttatttcatcacgattctataagaaaaggactaaaaaaaaataaaataaataaaaaaaaattgattaaagatctagtaaaaatttcttcaaaaattttaaaatattcaaagccagtttggaaaaagttagaagaatttaaaaaaaaaaagaaaaaaatcctttttgaaggtgcgcaaaggtatacttttggatatagatcat

SEQ ID NO: 316045 - DNA, 610 bp, Unknown
  Bacterial polypeptide expressing nucleotide sequence isolated from the Sargasso Sea
atgaataatgtagcagtaataggctcacaatggggagatgaaggaaaaggtaaaattgttgattggctttcaagtgaggcagatattgtagtacgatttcaaggtggacataatgcaggtcatactttagttataaatggaattacttacaaattaagattacttccttcaggcatagttagaaaaaataaaatttcaatcattggaaatggggtagttatagacccatgggcgctcttagaggaaatagatgaaataaaatctaaaggtgtaaaagtagatacagataatttaattatttcagaatctgcaaatttaattttaccttttcataaagaaatggacgaaataagagaagatgcagcaggtaaagccaaaattggaacaactagaagagggattggtcctgcttatgaagataaggttggacgaagatcaataagagtgatggatcttatttcagagagtaaccttgatcataggttggaaacagttctaatgcaccataatgcaattagaaagggcttaggcaaaaacatttttcgaaaagataaattaaaaaaagaactgttaaaaattgcaccagaaaattttgaaattttcacaacca

SEQ ID NO: 316046 - DNA, 411 bp, Unknown
  Bacterial polypeptide expressing nucleotide sequence isolated from the Sargasso Sea
aatgttttatactgtagtaggaactcaatggggagacgaaggaaaaggaaagattgttgattggatttcttctaaagcagaccttattgtaaggtatcaaggaggaaataatgcaggccatactataaaagtagatgataaagtttataaattaaatttattaccctctggaataataaacaataaaagatgtgcaattggtaatggagttgtacttgatccgtggtctttgataagtgaaataaataatcttaaaaaagaaaatattaatgttgataattccaatttgattatagccgataatgtttgtttaattttacccatacacaaattgcttgatgaaattaatgaaacctcaagaggacaaaatgaaataggaacaacaaaaaaaggaataggaccagcctatga

SEQ ID NO: 316047 - DNA, 760 bp, Unknown
  Bacterial polypeptide expressing nucleotide sequence isolated from the Sargasso Sea
aagaaagtttttaagaaggatcaattaaaaaaagatttactaaaaattgcaccagaaatattaaaattttctcaaccagtttggaaaaaattagacgaatacaaatcacaaggaaaaaaaatattatttgaaggcgcacaaggaattttgttagatgttgatcatggaacatatccatttgttacatcatctaataccgtagcttctgccgctgcaactggaacaggatctgggataaatgctataaattatgttttaggtattaccaaagcttacactactagagttggagcaggtccctttccaacagaactaaaagataaaattggaaatatactaggcactagaggaaaagaatttggaactgttaccagcagaaaaagaaggtgtggatggtttgacggtgtcttagtaagacaaactgtaaaaatttcaggagtaaatggaattgcacttactaagctagatgttcttgacgaattagatgaagttaaaatgtgtattgcctatgaaatgaacggaaaaaaaatagactatttacctgctggattagataatcaactaaaagttaagccaatatatgaaactttcccgggatggaaaaaatcaacaaaaggaatcagaaatgtagaaaatcttcctgataaagccaagaaatatatttatgctttagaagattttataggagcaaaaatttcaagcatttccactagccctgaaagggaagatacaattttagtagaaaatccgtttgcttaat

SEQ ID NO: 316048 - DNA, 856 bp, Unknown
  Bacterial polypeptide expressing nucleotide sequence isolated from the Sargasso Sea
gtagtgatagatccatgggcgcttctaaatgaaatttcagagattaaaaaacaaggaattaatgtaacacctgaaaatttcatgatttcagaatctgcttcattaatacttccatttcatcaagaaatggatgaaattcgagaagatgcagctggaggagagaaaattggaactacgagaaggggaattggcccttgttatgaagataaagtaggtagaagatcaatccgagtaatggatttgagatcaatgactaatcttgaaaatagattggaaaatgttcttttacatcacaatgctattagaaaaggtttaaaaaaaaaagtttttgagaaggaagagcttaaaaaaaaattacttcaaatcgctcctgatattttgaaatatgctaaaccagtttggcttaaaattgatgaattcaaaagagatagaaaaaagatattatttgaaggtgctcaaggaattcttttagatgttgatcatggtacttacccatacgtgacatcctctaatacagttccggctatggcagcaactggcgtgggaataggcccagataaaattggatatattctaggaataacaaaagcgtatacaacaagagttggtagcggcccttttcctacagaacttaatgatgacataggtgaaattttaggtagaagaggaaaagaatttggcacagttactgcaagaaaaagaagatgtggttggtttgatggagttttagtgcgccaaacaattaaagtttcaggcataaatggcatagcattgactaagttagatgttctagatgaacttgacgagattaaaatgtgtattaattacgatttaaatggcaagataatggattatt

SEQ ID NO: 316049 - DNA, 910 bp, Unknown
  Bacterial polypeptide expressing nucleotide sequence isolated from the Sargasso Sea
gattgttaccatcagggaattggtgagaaaaaataaaatatcaattattggaaatggcgtagtggttgatccatgggcacttttagatgagattgatgaaattaaatttaaaggtgttgaagttaatcctgataatttaattttatctgaagcagcaactcttattttgccatatcataaagaaatggatgagattagagaagatgcagcaggaaaatcaaaaattggcactacaagaagaggaatagggccagcatatgaagataaggttggtagaagatcaataagagtaatggatcttgcatcagagagtaatttggataaaagattagacgcagtattaagccatcataatgccataagaaaaggtttgaaaaaaaatgaatttaaaaaagagcaattaaaaaaagatttgttaaaaattgcgccacaaatacttaaattttcacagccagtatggaaaaaaatagataattttaaatctcaaaacaaaaaaatattatttgaaggagctcaaggagttcttttagacgtcgatcatgggacttatccatatgtaacctcttctaatactgtcgcttcgtctgctgcgactggatcaggttgtggaattaacaccattaattatgttttaggcattacaaaagcatataccacaagagttggagaaggtccttttccaactgaactaagagatgagattggcgacttacttggaataagaggaaaagaatttggaactgttaccagtcgaaagagaagatgtggctggtttgatggagtccttgtaagacaaactctaaaaatttcaggaattgatggaattgcactaactaaactagatgtgttagacgaactagatgtaattaaaatgtgtattgcttatgagataaatggtaaaaaaatttga

SEQ ID NO: 316050 - DNA, 736 bp, Unknown
  Bacterial polypeptide expressing nucleotide sequence isolated from the Sargasso Sea
aatgttttacacaataataggtacacaatggggagatgaaggaaagggaaaaattgtagattggatttcttcaaaagcagatttggtggttagatttcagggaggtaataatgctggacatacaataaagattaataaaaaaatttataagttaaatttgttaccatcaggtataattagaaataaaaaatgtgttattggaagtggtgttgttttagatccttgggcattgattaaagaaatcaaaaatttaaaaaagcaaggaataaagataaataataagaatttattcatagctgaaaatatatgtttaattttaccaattcataaaattattgatgaaattaatgaaaataacagaggtagagaaacaattggtacgacaaaaaaaggtattggacctgcatatgaagataaggtaggcagaagagcgataagattatgtgatctaaatgatcgcaaattattaaataagaaaattaataaattatataattttcatcaggtaaggctaaaaaaatataataaaaaagtagattttaataaaatttttaaagaattagttataatttctcgatacataacaaaattttcattccccgtttggaaactaataaataaagttggaagtgctaataaatttattctttttgaaggtgcacaaggagcattacttgatattgattttggtacttatccttatgttacttcatctaacacatcatcaggtcaaatt

SEQ ID NO: 316051 - DNA, 664 bp, Unknown
  Bacterial polypeptide expressing nucleotide sequence isolated from the Sargasso Sea
caaaaaaacataaaaaaaaaaatattgtttgagggtgctcaaggtattttacttgatgtagaccacggcacatatccttttgtaacctcttctaacacagttgcctcaagcgctgccacaggaactggatgtggaccaaattcgattaattatgtattaggtattaccaaagcatatactacaagggttggtgaaggaccttttccaacagaattggtggataaaattggtgaattattagggactagaggtaaagaatttggaactgttacaagtcgtaaaagaaggtgtggatggtttgatggggttttagtcagacaaacaataaaaatttcagggatcaacggcattgcattaaccaaattagatgtattagatgagttagatgaaattaagatgtgtgttgaatacgaactagatggaaaaaaaatagattacttacccgcagctgttgaagatcaattaaagataaaacctgtttataggacatttgatggatggaaaagttcgactagtggagttaaaatcatcgatgatctaccagagaatgcaaagaaatatatatttgcaattgaggattttataggagcaaagatttcaagcatatcaacaagtccagaacgtgacgatacaattttagttgaaaatccctttgaaatttaat

SEQ ID NO: 316052 - DNA, 913 bp, Unknown
  Bacterial polypeptide expressing nucleotide sequence isolated from the Sargasso Sea
ttgatagatgaaattaaagaaattagagaaaaaggtgtagatgtagagccagataattttatgatttccgaggctgcaaatttgattttaccatttcacagagagatggatgaaattagagaggacgctgctggaaaaggtaaaataggaacaactagaagaggtattggacctgcatatgaggataaagttggcagacgttcaattcgagtcatggatttaagatcagaaaaaaatttagataaaagacttgaaattgtattattgcaccataatgcaataagaaaaggattaggaaaaaaattatttaaaaaagatcaattaagaaaagatctaataaaaattgctccagaaattttaaaattttcccagcctgtttggctaaaaattgatcaatttaaaaaacaaaaaaaaaagatattatttgagggtgcacaaggtattttactagatgttgatcatggtacttatccttttgtaacttcatcaaacactgttgcttcaaatgcttctactggaactggttgtggacctaattcaattaattatgtgcttggaataactaaagcctatacaactagagttggggaaggtccattcccaacagaactattagatgaagttggtgagctattaggaacgagaggaaaagaatttggaacggtcacaagtcgaaaaagaagatgtggatggtttgatggagttttagttagacaaacaataaaagtatcgggcattaatggaattgctcttacaaaattagatgttttagatgaattagatgaaataaaaatttgtatagagtatgatttggacggtaaaataatcaactatttaccagcagcagttgaagatcaattaaaaattaaacctatttataaatcgtttcttggatggaaaacctcaacaaaag

SEQ ID NO: 316053 - DNA, 597 bp, Unknown
  Bacterial polypeptide expressing nucleotide sequence isolated from the Sargasso Sea
aggagcattactagatgttgataatggattttatccttatgttacttcaagtaattcatccgcagctggtattgcttcaggttcgggcataggaccgctatcggtaagtaatattttaggtattgtgaaagcttatactaccagggttggagaggggccaatgcctacagaattgtttgatgacattggtattcatattgcaaagaaaggtggcgaggtaggggcgactacaggaagaccaagaagatgcggatggtttgatgctgttgctatgaaaaaagttattcaatctaacagcattaagagcctttgtattacaaaacttgatgtttttgatggaatggaaagtattaaaatttgcgatagctatgataattcagatgaattctttgaggaatctctcaatttggatcacgtaaagcctcaatacattgagttatcaggatggaaaaaacccatttatggtttaaaaaccttggatgattttccaaaagaggctattgaatttatttctaaaattgaagaggtttgcggcgtatctgttgatatcatttcaactggtccagaaagagaaagcactattttcaagaacgatat

SEQ ID NO: 316054 - DNA, 580 bp, Unknown
  Bacterial polypeptide expressing nucleotide sequence isolated from the Sargasso Sea
aaatctctatatttctgatcgagcaacaataatattgcctcttcatcagcacttagatgagttaagagaaaataataatctgattaaaattggtacgactaaaagaggtattggcccagcctatgaagataaggtagcaagacgtgctctgcgtctgtgtgatttatttgataagtcaaaattattacataaagttgaaatacttttgaatcatcataatgctttgttgagaggttttaataaaaaggaatacgatgtaaatgaagttgctgaagatatatacaaactaggtcagaaagttaagccatttgctaaaactattaatgagctatcaaatgagattgacaacgaaaatcaacatatcttatttgaaggcgctcaaggtttcttgcttgatatagatcatggaacatacccttatgttacttcttcgaatgttcatgccagttatgcatctattggtagcggtttaagtcccaagctgataaatcacattctaggtattacaaaagcttatacaacaagggttggcaatggtccttttccaactgaacaagataatgaaattggcaataagtta

SEQ ID NO: 316055 - DNA, 886 bp, Unknown
  Bacterial polypeptide expressing nucleotide sequence isolated from the Sargasso Sea
aatgaagaatatagttgttgttggctctcaatggggtgatgaaggtaaaggtaaaatagttgattggctctctgaacaagcagatgtagtaattagatttcaaggaggtcataatgctggacatacactagttatagatggagtaacttataaacttagattattaccgtcaggaatagtcagaaaaaataaaatttcaataattggaaatggtgttgtagtagatccttgggctctacttgatgaaataaaagaaattaaatcaaaaggtgttcaagtagatgttgataattttataatttctgagtctgcaaatttaatattgccatttcatagagaaatggatgaaataagagaagatgctgctggtaaaggaaaaataggaaccactagaagaggcattggtccagcttatgaagataaagttggaagaagatctattagagtaatggacctaagatctgaaaaaaacttagatcaaagactggagtcagttttgttgcatcataatgcaattagaaaaggattaggtaaaaaaatttttaagaaaaatcagctaaaaaaagatttgttaaaaattgctccagaaattttaaaattttcacagccagtatggttaaagattgaccaattcaaaagacaaaaaaaaaagattttatttgaaggagcacaaggtattttattagatgttgatcatgggacatatccgtttgtaacttcctctaataccgttgcatcaagtgctgcaactggtactggttgtggaccaaattcaataaattacgttttaggaataactaaagcatatacaacaagagtaggtgaaggaccctttccaacagagcttagggatgacattggtgaatttataggaactcgggggtaa

SEQ ID NO: 316056 - DNA, 750 bp, Unknown
  Bacterial polypeptide expressing nucleotide sequence isolated from the Sargasso Sea
aagtggagtaacatacaaattaagattgctgccttcgggcatcgtaagaaaagaaaaagtttcaattattggaaatggtgttgttgtcgatccatgggcccttttagaagaaattaatgaaattaaatcgaaaggtgttgaaataaatcaaaaaaacttaattgtctcggaggctgcaaatttaattttaccattccatagagaaatggatgaaataagagaagattcagcaggcaaatctaaaattggaacaacaagaagaggaattggcccagcatatgaagataaagttggaagaagatcaataagagttatggatttaatttctgagaaaaatttagaccatagattagaaacagttttaatacatcataatgcagtaagaaaaggattaggaaaagaaacttataaaaaagataaactaaagaaagaattattaaaaatagcaccagaaatattaaaatattcccaaccagtttggaaaagaatagatgaatttaaattacaaggaaaaaaaatattatttgagggcgcacagggcattttgcttgatgttgatcatggcacatatccatttgttacatcttcaaatacagtagctgcagctgcagcgacaggttctggttgtggccctaattcaataaattatgttttaggtattaccaaagcttatactactagagttggagaagggccttttccaactgaattgacagatgaaataggtgaaaaattaggaacggtaggtaa

SEQ ID NO: 316057 - DNA, 526 bp, Unknown
  Bacterial polypeptide expressing nucleotide sequence isolated from the Sargasso Sea
ggaaaagcaaaaattggaactaccagaagaggtataggaccagcatacgaagataaggttggaagaagatcaattagagtaatggacttagcatctgaaagcaacctggagaccaggcttgaagctgctttgatacatcataatgctttacgaaaaggtctaaaaaaaaaggtttttaaaaaagataaattaaaaaaagacttattaaaaattgcaccggaaattttaaaattttcacaaccagtttggaaaaaattaaatgaatataagtctaaaggaaaaaaaatattatttgagggtgctcagggaatacttcttgatgttgatcacggtacttatccttttgtaacttcttcaaatacagttgcatctgcagctgctacaggatctggattcggatctggcagtacaaattatattttaggtataacaaaagcatacacaacaagagtaggtgaaggtccatttccaacagaacaaaaaaataaaattggaaatcttttgggaagtagaggtaaagaatttg

SEQ ID NO: 316058 - DNA, 839 bp, Unknown
  Bacterial polypeptide expressing nucleotide sequence isolated from the Sargasso Sea
aggaaattcagattgggtcgcgcgattccaaggaggaaataatgcaggacatactgttgtaattggtgataggacaattaaattacacctactaccaagtggaattacaagaacttcatgccaattaattttaggagatgggatggtaatagatccatgggttcttgatcaagaattagaaaaatggaaaagtgagacgggagaagaaccagataaaaatcgtttgtatatttctgatcgtgcacatattattttaaaattccacagattagttgatggcttagataaaaaaatcggtactacgggaagaggaataggacccacatattctgataaaattaatcgtgttggattaaggtttgcagacctaaagcatattgttaataattctgaatggatttctgaaatgtgttcattgtataacagaattttaagttctttagaaatagatgtagaaattacagagcatgatttgaaaaatgatttagagtggatacaaaatagatttggtcacacaattaaaaatacgggtttaatgttggataatgcattaaaaatgaaggaaaatgtacttttagagggtgctcagggttgtttattagatattgatcaaggaacatatccttttgttacatcatcagtaaccagtagatctaatgcatcacatggagttggaattcaccctggccatattgacgaagttattggaattgtaaaagcatacacaaccagagttggacacggaccgtttccctgtgaattaaaggatgaggttggagattacctaacagaaaaaggtcatgaatttgggactactacaggaagaagaagaagatgcg

SEQ ID NO: 316059 - DNA, 813 bp, Unknown
  Bacterial polypeptide expressing nucleotide sequence isolated from the Sargasso Sea
aatgaccaaaactatttcgttattaggattgcagtggggagacgaaggcaaaggaaaggtagtagaccatttagcgaaagatcttgatgcagctattagatatcagggaggtcataatgcaggccacactttgatagtagatggaaaaaagatagtttttcatttgctaccttctgcaatatgccatgatgatattcattgttatataggtagaggagttgtagttagtttagatgcccttttcgaagaaatagaagaagctcaagaagttataggaaatatagaaaatagattaactataagttctgcctgcagccttatacagccttaccatattaagttagatcaattaagagaaggatccaaaaaactgaccaaaattggcactacaggaagaggaattggtacgtcgtacgaagatagagttggaagaagatctatcagagtagctgatttatacaatgaaaataagcttaaggataaactcgaagaagtcttagatttttacaattcaatttttacacactcttttaactctgaagagatagatttaaatgaattgcatgataagaatttaaagcaaggagaaaagctgaaaccttacgtcggtaatgttatccaagaagtaagagatttgcaggaagcaaataaaaaaatattatttgagggtgctcaaggagctctactggacgtcagcttaggcacttatccgtttgtaacatccagtaattcttctgtcggtggtatagcttctggaattggaatagtcctacaatatagatttttctcttggatagctaaggcttatactac

SEQ ID NO: 316060 - DNA, 822 bp, Unknown
  Bacterial polypeptide expressing nucleotide sequence isolated from the Sargasso Sea
aatgaaaaatattgcagttgtaggttcgcagtggggagatgaaggaaaaggaaaaattgttgattggttgtcggatcaagcagatgtaatagttcgttttcaaggtggacataatgcgggccacaccttggttattgatggtaatacatacaaattaagattattgccatcaggagtggtaagaaaaaataaagtttcaataatcggtaatggagttgttgtagatccatgggcattagtagatgagattgaagaaattaaattaaagggtgttgaaataaacaaagataattttattatttcagagtccgcatgtcttattctaccttttcataaagaaatcgatgaaattagagaggatctttcagaaaacaaaaaaattggcactaccagaagaggaatagggccagcatatgaagataaagttggacgaagatcaattcgtataatggatttaaaatcagaaagttctctagattttaaattagaaaatgctttcttacatcataatattgttagaaaaggattaggaaaaaaggcttataaaaaagatgaactaaaaaaaaagttattggatattgcaccaaaaattttagaattttcacaaccagtttggttaaaaattgacgaatataaaaaaaggaaaaaaaaaattcttttcgaaggtgctcaaggaattttattggatgtagatcatggaacatatccttttgtaacttcatcaaatacagtcgcagcaaatgcagctattggcacaggctgtgggccaaatttaattcaatatgttttaggtataaccaaatcatataccacaagagtagg

SEQ ID NO: 316061 - DNA, 820 bp, Unknown
  Bacterial polypeptide expressing nucleotide sequence isolated from the Sargasso Sea
aacgtttatgcagtatgcagatttcaaggcggtcataatgctggccacactataaaagtagatggagttcaaactgttcttcacttaataccatcaggagtccttcataaaaatgttaagtgcctaataggaaatggagtagtcctatctcttgaagcaattaaaaaagaaattgaaggattggaggaatttggtgttgaaatacgtgaccgattacatattagtgaaaactgtccattaattcttccaagtcatataaagattgatcaagtaagagataaagatgaatttattggcacaacaggaagaggtattggaccagcctatgaagataaggttggaagaagagcaataagattcggtgacctaaaagatgagaccttattaagaaaaaaagtttcaagattgattaagattcataataaattgttggagcatttttatgatgcagaatccttttctgaggaagaaatacttaataaccttctatcttttaaaaactttgctgaagctttctcagttaatacaacagacttattaatgaattggtctgaagagggaaaagaggttttatttgagggtgcgcaggggaccttccttgatattgatcatggaacctatccctatgttacttcatcaagcaccacaattggtggagtttcatcaggtcttggaatagggccaaagcatattaataatgtaattggaattgttaaagcatatgcaacaagagttggagaaggcccatttataactgagctttttgatgaggatggagaggaaatagctaaacgtggaaatgaatttggagcaactacgg

SEQ ID NO: 316062 - DNA, 310 bp, Unknown
  Bacterial polypeptide expressing nucleotide sequence isolated from the Sargasso Sea
atggcctgtctgataattgttggaactcaatggggtgatgaaggtaaaggaaaagttgtggatttgcttacagagcgtgcggatgcggtggtaagatatcaggggggaaacaatgcaggacatactgtaatgtttggaagtaaaactttcatcttacatatggtcccatcaggaattcttcgtgagaccacttcaatcttaggaaacggtgtggtaattgatttgtctgaatttattaaggaaataaatgatttagaaaaaataggaattaatgtagagaaacatcttcgcattagtgacagagctcaac

SEQ ID NO: 316063 - DNA, 662 bp, Unknown
  Bacterial polypeptide expressing nucleotide sequence isolated from the Sargasso Sea
tgatcaaggccgacgactgcttttcgagggtgcccaggggacattccttgatatcgatcacggaacctatccttttgttacttcatccaatacggtttccggaaatgcctgtgccggggggggaatcggcccaaggcatatttcagacgtggtaggcatcgttaaggcctacacaacacgtgtcggtagtggtcccttccccacggaactgcttgatcaaaccggagagttccttcgcagcgaaggagaggaatttggcgcgaccacaggacgaccccgccgctgtggctggtttgacgcggtgttggtgcgatatgccgtgcgtctgaacggtatcacttcgctggctttgaccaaactcgatgtgcttgataaatttgaaactctgaaactttgtgtcggttaccgcatgaaggatggcagcatccagaccgattttcccttcgaggggcatgatgaggttgaaccggtttatgaggaactgcccggctggaacacaaaaactgcgggcatcacggaatacgaacaactgccgaaaaacctgatcgactacctagcccgcatcgaggaactggtggaggcacccgcatcgatcatctccaccggtcccaaacgggaggatacgattctgcttcaacccgaacggttttggaagtcatgag

SEQ ID NO: 316064 - DNA, 634 bp, Unknown
  Bacterial polypeptide expressing nucleotide sequence isolated from the Sargasso Sea
ttgtctgaaaatactttaatcctaggtcttcagtggggagatgaaggtaaaggcaaaatagtagataacttaagccaaagtgttgatgtggtttgtcgttttcagggaggtcataatgctggccatacaatcaaagttaatgatgagcaaacagtacttcatttaataccctcaggcattttgcatgataatgctaaatgcttaattgggaatggggtagtgctcgctttggatgcattggatgaagaaatcacaaaactcaaagataagggtataaattttcaagatagattttatatcagttcagcatgttccttaattctcccaagtcacatatcaattgataaagttcgagataaaaaagaatcaattggaaccacgggtagaggaattggacccgcttacgaagataagatcggtagaagggcagttagatttggagacattggtaataaatctattttgaaagaaaaaattgaattattagttgggtatcacaataggttattaaaagaattatacaatcatgaaccctatgatgtagatgaaatttttgaatcagttttaaaatataaggatttatatgatcaattttgtgttgattctcaagaccctttatgtatgaatgggtaaa

SEQ ID NO: 316065 - DNA, 754 bp, Unknown
  Bacterial polypeptide expressing nucleotide sequence isolated from the Sargasso Sea
aatgaagaatcttacaattattggcgctcaatggggagatgaaggtaaaggaaagatcgttgattatttatgtaacgattatgatattgttttaagatttcaaggtggacacaatgctggacacacaatagttgttgataataaaaaatttattttaagtattttaccttctggattaataagaaataaaatgtgtgttattggcagcaatgttgtcattgatccagtacattttgttaatgaaataaatttacttaaaaaaaaaaatattaaaatatcaaatgctaatttaaaaattgccaataacgcatcaattcttttaccatttcattcagttattgataaattaagagagaaaagtttatcaaaaaaaaaaattggaacaacaggtagaggtattggcccatgttatgaagataaaatagctagaagaggtttaaaaatttatgatttagaagatttgaaagctctaaaatttagattaaaaaatttgattaattttcataatatgtttcttaaaaattcctcaataaagaaaaaaatttcttttaatgaaaattttactttattaaaatcattaagaaaaaaaatattatctttttctgttgatattggagattttataaacgataaaaaatttcttaataaaaagtttttattcgaaggtgctcaaggtttaatgttagatattgatcatggaacttatccatttgttacctcaagtaatacactgccagctgttgcagctttaagc

SEQ ID NO: 316066 - DNA, 628 bp, Unknown
  Bacterial polypeptide expressing nucleotide sequence isolated from the Sargasso Sea
attttagcagaaggggcccagggatctctattagatattgattttggaacatatccatttgttacatcttctaatacaacttcatcaggtgcatgctctggattaggtgttcctccaaataaaattaaaaatataagaggtatttttaaggcttataccactagggttggatctggccccttccccactgaattatttgattcaactggagaaaaaatcagagaaacaggtcacgagtatggtgcaactacaggtagagacagaagatgcggatggttagatctagttgctttaaaatattcaatacaaattaacggtgtaactgagttgaatattatgaaatcggatgtactaagttcaattgataaactatatgtttgtacctcttataatttaaatggagaggaaattaatttttttccttatgatattacttcaaataaaataactcctaattataaagaatttgatggatgggacgatgatattactcaactaaaaactgaagatgaccttcctgacgaacttataagctatataaattttattgagaattttgttaatgtaccaattaaattaatatctgttggtcctgatagaaatcaaacaattatgagaaacagatgaa

SEQ ID NO: 316067 - DNA, 343 bp, Unknown
  Bacterial polypeptide expressing nucleotide sequence isolated from the Sargasso Sea
cacccaatggggtgatgagggcaaaggcaagatcgttgatctgctgaccgaacatgctgccgccgtagtgcgctaccaaggtggccacaacgctggccacaccctggtcatcgatggcgaaaaaactgtcttgcacctgatcccgtcgggtgtcctgcgcgaaggcgtgcagtgcctgatcggcaacggcgtggtggttgcacctgacgctctgctgcgcgagatcaccaagctggaggagaaaggcgtaccggtgcgcgagcgcctgcgtatcagcccgtcctgcccgctgatcctgtccttccacgttgcgctggaccaggcccgtgaaaaggcgcgtggc

SEQ ID NO: 316068 - DNA, 978 bp, Unknown
  Bacterial polypeptide expressing nucleotide sequence isolated from the Sargasso Sea
acttacaaattaggattatgccctctggaattgttagaaaaaataaaatttctataataggtaatggtgtagtaattgatccttgggcacttattgatgaaatagatgagataaagtcaaaaggaatttctgtagatgaaaaaaacttaataatttctgagtcagcaactctaattcttccttttcatgtagaaatggacgaaatacgagaggacgcagctggaaatgcaaagattggaactactagaagaggaataggacctgcatacgaagataaagttggaagacgatcaataagagtcatagatttagtatctgaagaaaatctcgataaaagactagataatgttttgatccatcacaatgcaattagaaagggattaggaaaaaaagtttttgaaaaagaaaatctaaaaaaagaattattaaaaatagcaccaaaaatactaagattttgccagccagtttggaagaaaattgaagaattcaaaaaggaaaataagaaaatattattcgagggagcccaaggaattttgctagatgtagatcatggaacatatccatttgtaacatcttcaaatacagttgcttcatcggcggcgacaggatctggatgtggtctaaattccataaattatgttttaggcataacaaaagcatatacaacaagagttggtgaaggaccttttccaacagagttaaaagatgagattggaaatcatctaggtgataagggtcatgaatttggaactgtgacaagtagaaaaagaagatgtggttggtttgatggagtgttagtaagacaaacaattaaaatttcaggtattgacggtatagctcttacaaaattagatgttttagatgaattagatgaaataaatttatgtgtagcatatgaattaaatggaaaaaaaatagattattttcccgcagctgtagaagatcaattgaatgtcaaaccagttttaaaaaattgag

SEQ ID NO: 316069 - DNA, 634 bp, Unknown
  Bacterial polypeptide expressing nucleotide sequence isolated from the Sargasso Sea
gaaggagcacaaggtattttgcttgacgttgatcatggaacgtatccatttgttacctcttctaatacagttgcttcagctgcagctactggcactggttgtggtcccaattcaattaattatgttttgggtattacaaaagcatacactactagagtaggagaaggtccttttccaacagaattgaaaaatgatataggagaaaaactaggaacattaggaaaagaatttggaactgttacaagtagaaaaaggagatgtggttggttcgatggagttttggtaagacaaacaattaaaatctcaggaatagatggcatagcattaaccaagttagatgttttagatgaattagatgaaattaagatgtgtattgcatatgaagttgatggaaaaaaaatagactatttgcctgcagctgtaaatgatcagataaaagcaaaacctatttacaaaagttttaaaggatggaattgttcaaccaaaggtataaaaaaatttgatgagcttcccgataatgcaaaaaattatattaaagaattagaaaaatttatagaaacaaaaattgccagtatttctacaagtcctgaaagaaatgatacaatattgataattaatccttttagtagttaat

SEQ ID NO: 316070 - DNA, 805 bp, Unknown
  Bacterial polypeptide expressing nucleotide sequence isolated from the Sargasso Sea
gacaatgtcctaatacatcataatgcaatcagaaatggtttaggaaaaaaaatttttgaaaaagaaaatctaaaaaaagaattattaaaaatagcacctaaaatacttagattttcccaaccagtttggaagaaaattgaagaatttaaaaaggtaaacaaaaaaatattatttgagggagcccaaggaattttgttagatgttgatcatggaacatatccttttgtaacatcctccaatacagtagcatcatctgcggcaacaggatctgggtgcggtctaaattctataaattatgttttaggaataacaaaagcttacacaacaagagttggcgaaggaccttttccaacagagctaaaaaatgagattggagatcatattggtgaaaaaggacatgaatttggaactgtgaccagtagaaaaagaagatgtggttggtttgatggtgttttagtaaaacaaacaataaaaatttcaggtattgatggtgtggctttaacaaaattagatgttctagatgaactagatgagataaatctttgtatagcttatgaattaaatggaaaaaaaatagattattttcctgcagctatagaagatcaattaaatgttaaaccggtttataaaaagtttgatggatggaaatctaaaacgcagggtattaaaaaatttgaagatttaccaaataatgcaaagacttacgtaaaagctattgaagaatttattgagacaaaaatatccagtatttcaacaagtcccgaaagagaagatactatccttttgatagatcctttcaattaat

SEQ ID NO: 316071 - DNA, 810 bp, Unknown
  Bacterial polypeptide expressing nucleotide sequence isolated from the Sargasso Sea
aatctaaaaaaattatcgaagaaaaaatgcattcgataaagaagttttatgaccctatcttagaaagttttaatgagagtaacattaatatagaacaaacaattcaagatttacttagtttttatgatgtagtcaatgagctaatagttgataattctcaaataaaaaaagaatttaaaaataaaaaaattttatttgagggtgctcaaggtgcattacttgatttagatcatggatcatatccttttgtgacttcatcaaatactgtttcatcaaatattgtcattggttcagctttacaagttgattatcaaacagttggaatatttaaagcctactctaccagagtcggaaatggtccatttccatctgaattatttgatgatattggtgattatatagctgaaaaaggtgttgagattggaacagtaacaaaaagaaaaagaaggtgtggttggcttgacctagtatctttaaaatatagctgtgaaataaaccgtgtaaatgaactttgcatcactaaagctgatgttttaaataatctttcagaaattaaagtatgcaaaagctataattcaaaaaaatatgaagatgtaaattttagtgaaagcgatattttggagtcattgtccttagaaaacagtgattttgaattattctcaacttggggtgagattaaagatttaagtaactttgaaacactcccggacaatctaaaaaaatacatctcgtatattgagaattatttgaacatccccattaaaattatttcactgggacctgaaagaaatcaaacaattattagataac

SEQ ID NO: 316072 - DNA, 970 bp, Unknown
  Bacterial polypeptide expressing nucleotide sequence isolated from the Sargasso Sea
gcacatgtaataatgccatatcataaattacttgatgagctaatagaagaaagcttaggagaaaacaaaatcggaacaacaaaaaaggggattggaccgtgttatgcagataaaattcaaagaaaaggaataagaatccaagatctattagataaaacgaatttagaaataaaaattagacaaaatgtagatgatgtaaacctaactcttacaaaaatctataaccagcctccactgatagctgacgagattattgacgagtttagtgcctacaaagatattgtaactagccatgtagcagacacatctttattaatcgcaaatgcaatgaaaaataaaaaaacaattttatttgagggagctcaaggaactttattagatattgaccatggaacgtatccttttgtaacaagctcaaatacttcctctggcaatgcagctattggttcaggcataggccctaaaaatctagataaaatcgttggtgtaacaaaagcatatatttctcgtgttggtagtggtccttttattacagaacaaaaaaacgaaattggtgactatttaatagaaaagggagcagagtttggtgtagttaccggaagaaggagaagatgtggatggcttgatttaatctctctaaaatattcagcgagagttaactctttaacagaactttttatcactaaacttgatgtgctttcaggccttgaagaattaaagctttgtgtaggttacaaaaataacggcgaagttattacagactatccatatgatcaaaacatcttaaattcagctgagccggtgtatgaaatctttgatggttggatggatgacatttcaacagttaagtcctatgaagatttaccagataatgcaaaaagttatataaaagcaattcaaacctttatagatgtacccattacgtttatctctgttggaccagagagaacagaaaatataataattttaa

SEQ ID NO: 316073 - DNA, 922 bp, Unknown
  Bacterial polypeptide expressing nucleotide sequence isolated from the Sargasso Sea
tagaaaaaataaaatttcaattattggaaatggtgttgttgtggacccttgggcactattagatgaaattaaagaaattggagaaaaaggtgtcgatgtaaattcagaaaattttatgatttctgaggctgcaaacctaattttaccatttcacagagaaatggatgaaataagagaggatgcagctggtaaaagcaaaataggaactaccaggagaggtattggacccgcttatgaggataaagtcggaagacgttcaataagagtaatggatcttagatctgaaaaaaacttaaatcaacgattagaaacagttttattacatcataacgcgatcagaaaaggtttaggaaaaaaaatatatgaaaaaaatcaactcaaagaagatcttttaaaaattgcacctgatattttaaaattttcagccccggtatggcttaagattgatcaatttaaaaaacaaaagaaaaagatattatttgagggtgctcaaggaattctgttagacgttgaccatggaacatatccttttgtcacttcttctaatactgtggcctcaagtgctgcaacgggaactggatgtggacccaattcaattaattatgttttaggaataaccaaagcatacacaacaagagtaggcgaaggaccttttcctacagaattagttgatgaaataggcgagttattaggaacaagaggtaaagaatttggaactgtgacaagccgaaaaagaagatgtggatggtttgatggtgttttagtaaggcaaacaattaaagtttcaggaattgatggcattgcccttacaaaactagatgttttggatgaactagatgaaattatgatgtgtgtagaatatgatctcaatggaaaaaaaatagactatcttccagcagcagtgaagatcaacttaaaatta

SEQ ID NO: 316074 - DNA, 772 bp, Unknown
  Bacterial polypeptide expressing nucleotide sequence isolated from the Sargasso Sea
aagaaaaggtttaacaaaaagtatttttaaaaaagatcaattattgaaagatttattaaaaatcgctccagaaatattaaagttttcaaaacccgtttggaaaaaattagaagaatatagactaaaacaaaaaaaaatattatttgaaggagcgcaaggaattctacttgatgtggatcatggaacatatccatttgtcacttcttccaacactgtagcttcttctgcagctactggatcaggttgcgggcctagcaatataaattatgttttaggcataacaaaagcttacaccactagagtaggagaagggcccttccctacagaattaaaagataaaattggtgaacaattaggaacaaaaggaaaagaatttggaactgttacaagcagaaaaagaagatgtggttggtttgacggagttcttgtaaaacaaagtataaaaatttcaggcataaatggaattgctcttactaaattagatgttcttgacgagttagatgaaattaaaatgtgtgttgcttataaattaaatggaaaacaaatagattacttacctgcagctgcagaagatcaattaaaagtcgaaccagtatataaaatatttaaaggttggaaaacttctacaaatggaattaaagagtttgataaattaccaaataatgcaaaaatttatgttaaagagttagaaaaatttgttgaaacaaaagtttctagcatttcgactagtccagaaagaaatgatactattcttatagaaaaccctttttaa

SEQ ID NO: 316075 - DNA, 831 bp, Unknown
  Bacterial polypeptide expressing nucleotide sequence isolated from the Sargasso Sea
tttgcataataaagtaaaatgtattatcggcaatggtgttgttctatccttagaagcactaagcgaagaaataaatattttagaaaaaaataatatagaaatagaaaatagattacttatttccgacggttgtccattaatcctcccagttcacgttgaaattgataaagctcgagagaaaaaaaaaggtaaaagtaaaattggtacaacaggcagaggtataggtccagcatatgaagataaaatatcaagaagaggtattaggttaggtgatttatccaatcaagaaattcttttagaaaagcttaaagaactttttgattatcataattttattttaaaaaattattataaagtagatatttttgaagtaaacgaggttcatgaaaaattattagaatactttgataattataaaaactttacaattgacgtacctgaatatataaatcaatctattaaagaaaataaaaaaatagtttttgaaggtgctcagggaaccttattagatattgatcatgggacatatccttatgtaacatcttcaaacacaacagttggcggaatatttactggatcaggagtagcgcctaaaaatttaagctatattttagcaatagtaaaggcttatacaacaagagtaggagctggcccatttatgacagagttatttgatgatgatggtaaaatattgtcagaaagaggccatgaatttggagctaccactggcagagagagaagatgtggctggttagatttagttgcattaaaaaggtctattatcataaatggatttacaggtatttgtttaacgaaacttgatgtattaga

SEQ ID NO: 316076 - DNA, 883 bp, Unknown
  Bacterial polypeptide expressing nucleotide sequence isolated from the Sargasso Sea
ttgatgaagcaaagggagaagtcattaggaaagaatgcaatcggaaccactggaaggggaattggacctgtttatgaagataaggtcgctagaagagcgctgcatgtaatggacttgtttgaaaaagacttattcaaatcgaaactcacctcattaaccacttatcacaactttcttcttgaagagctttataaatccgatggaacagatttagaagaaacacacaaagagtggatgggtcatttttctaaaatcaaggaccttgttgttgatagctcaaaagagttgaacaatttgaagttgaaacagtcaaatatactctttgaaggagctcaaggctcaatgctagatattgatcaaggtacatacccatttgttacatcatcaagcactctatctggagcctcttcgttaggttctggtatcggaccattggatatcgatggagtgctgggtatcaccaaagcatatgctaccagagttggctcaggcccatttccaacagaaattgatgatgattatggtaagcatatggcaaagattggtgttgagtttggagcaacaacaggcagacctcgaagatgcggttggctagacctcgttgcattacgtaaagcagtcaatatcaattcaatatcacaactctgcatcacgaagatcgatgtacttgatggattagataagattcttgttgctgaagaatataaaattgacgaaaagatatatgacactctccccgctatgagtcaaaatcgattcgagagaatttcaccaatatacaaggaatacaaaggttggtcaggaatcacatctggattgaagtcttttgatcaattaccaacggaagctaagattctgattaaaggaatagaggactccattg

SEQ ID NO: 316077 - DNA, 250 bp, Unknown
  Bacterial polypeptide expressing nucleotide sequence isolated from the Sargasso Sea
catgacagcactggtagtggtaggcacccaatggggggatgaaggtaaagggaaaatcgtggatctgctcaccgaacaggcagatgctgtggtgagataccagggggggaacaacgccggtcatacggtgatgttcggagacgaaactcatatcctgcacctgattccctcaggaattttacgggacacgatgtcgatcctgggcaacggggtggtcatcgatctgcctgaattcctcaagggaatcgaa

SEQ ID NO: 316078 - DNA, 897 bp, Unknown
  Bacterial polypeptide expressing nucleotide sequence isolated from the Sargasso Sea
aatggagttgttatagatccctgggcattactagaagaaattgaagacgttagaaaacaaggagttgagattaataataaaaatttaattatttcagaatcagcaactcttattttgccacttcataaagaaatggatgaaattagagaaaatgctgctggccaaagcaaaattggtactacaaaaagagggattggtcccgcttacgaagacaaagttggaagacgatcaatccgagtcatggacttagcttccgagaataacttggaaaaacgtttagaaagtgttttagctcatcacaacacaataagaaaaggtttagggaaggctgtctataaaaaggatagtttaaaaaaggaacttttaaaaattgctccagaaattttaaaattttcacaaccagtttggcaaaagatagacgaatataagaaaaaaaagaaaaaaatgttatttgagggtgcccagggagttttgctagatgttgatcatggaacctatccatttgttacttcttcgaatactgttgcgtctacagcatcaacaggatcaggctgtggtcctgacacaatcaattatgttttggggattaccaaaacttacacaacaagagtagggagcggccccttcccaacagaattaaaagataatattggtgaacaacttgggaccgtaggaaaagaatttggaacagttactagtcgcaaaagaagatgcggatggtttgacggtgtattggtaagacaagccataaaaatttcaggaataaacggaattgcacttacaaagctagatgttcttgatcagctagacgaagtcaaaatgtgtattgcttatgagcttaatggaaaaaaaatacatcatttaccggcagcagtggaggatcagttaaaagtaaac

SEQ ID NO: 316079 - DNA, 823 bp, Unknown
  Bacterial polypeptide expressing nucleotide sequence isolated from the Sargasso Sea
tatgccatatcataaaatgttagatttagctcttactaaccatcaacaaaaacttgctgctggcagcactaagcgcggtattgcacctgtttatggcgacaaaatgtttcgtaatggtattaggatggttgatctgctggagcctaatatttttcatgagaaattaaataaatcttttattttcgcgaccaatcttttatccgctatatcttcatcagatttcgatttagattttgattctgtttataatgattatttaaagatgggtaaacttttatctccttatatatctgatatttctcttgaactttataatgcttacaataataataaaactatcctttttgagggcgctcaaggtatttcactagacgttgatcatggcgtatatccttatacaacatctagcaatactattgcaggaagcatttcaacgggcaccggagtaagctatagagacatacatagaattattggtgttactaaagcttatttaagtcgagtgggggaagggcctctcccttccgaggttcatggcgaggaagcgattcagctaagagaaaaaggtggagaatatggcactacaaccggtcgaccgcgtagggttgggtggttggaccttgttcaggtaaggcaggctgtacgtgtaaatggattaacggaaattgcgctaacaaaacttgacatattgtctaacacaaaggagctttcagtttgtacagaatatgatataaacggtgtcaaagaatctgaaatccctgcaagcttacataagtttcgctctgcaaaacctatatataaacaactccctggttggggtgat

SEQ ID NO: 316080 - DNA, 852 bp, Unknown
  Bacterial polypeptide expressing nucleotide sequence isolated from the Sargasso Sea
aatgcaggacatactattgaatttgaaggcaataagcatgttttacatactattccttcaggaatttttaatactaatgctattaatttaataggtaatggtgtggtaattgatccagtaatctttgaaaatgaaataagtggactacagaagtttaatcttgatataaatagtaaacttctaatctcaaatagagctcatattattctccctacacataaaatgatagatgcttcctcagaggcatcaaaggggaagaagaagattggttctacattaaaaggaattggacctacatatatggataaaacaggaagaaatggaataagaattggtgatttaaaaagtgataattggactgataaatataatgctcttaaggataaacatctaacgattctatcaaattttagaacaaagattgatatagacctggataaattagaagctgattttatgggaagtattgaaatattaaaaaaatttaattttattaatagtgaagattttttaaattcatcattaatatcaggaaaaaaagttcttgcagaaggtgcacaaggatctcttctagatatagattttggaacttatccatttgttacatcatcaaatacaactgtttcaggagcatgttctggtttaggcatagcccctaacagaataaaaagtgttattggaatatttaaagcttatacaactagggttgggtctggtccctttccaactgaattagataatgagataggttataatataagaaaaattggaaatgaatacggtgcaactacagggagagatagaagatgcggatggttagatttggtagcattaaaatactctataactatt

SEQ ID NO: 316081 - DNA, 516 bp, Unknown
  Bacterial polypeptide expressing nucleotide sequence isolated from the Sargasso Sea
aatgaataatgtagtagttgttggatctcagtggggagatgaaggtaaaggaaaaattgttgactggctatcaagtaaagcagatgtagttgtaagatttcaaggtggtcacaatgcaggacatactttagttataaacggttctacatataaattaagattactaccatctggcatagttagaaaaaataaaactaccattattggaaatggggtagtgatagacccttgggctttgctagaggaaattgaagaaattaaaggcaaaggagttgagataaacccaaaaaatttatatatatctgaagctgcaaatctgattttaccaattcatagagaactggatgagataagagaagatttagcaggaaaagcaaaaattggcacaacaaggagaggcataggaccaacatacgaagacaaagctggaagaagatctattagagtaattgatttagcctcagaaaaaaatttagatcatagactagaattagcattaactcaccataatgctat

SEQ ID NO: 316082 - DNA, 613 bp, Unknown
  Bacterial polypeptide expressing nucleotide sequence isolated from the Sargasso Sea
attagatgtagatcatggtacttatccttatgtcacctcatctaatactgtagcatcttgtgctgcaacaggaacaggttgtggaccaaattcaatcaattatgtattaggaataaccaaagcatatactactcgtgtaggagagggaccttttccaacagagttaaaagatgatgtaggagaattactgggcactagaggaaaagaatttggaactgttaccagcagaaaaagaagatgcggttggttcgacggtgttctcgtaagacaaacgattaaaatttctgggattgatggaatagcacttactaaattagatgtattggatgaattagatgaaattaaaatgtgtatacattatgagttagatggaaaaaaaattgattatttaccagcagctgttgaagatcaattaaaaataaaaccgatattcaaaacttttccaggatggaaggtttcaacaagtggaataaaaaatatggataaattaccagaaaatgcaaaaaaatatatttttgcaattgaggattttataggtgcaaaaatttcaagtatatctaccagtccggagagagaagacacaatattagttgagaacccttttgagatttaa

SEQ ID NO: 316083 - DNA, 832 bp, Unknown
  Bacterial polypeptide expressing nucleotide sequence isolated from the Sargasso Sea
aaaaatttaattttatcggaagccgcaaatcttatacttccttttcataaggaaatggatgaaataaaagaggatgatgcaggcaaaggaaaaataggaactactagaagaggaatagggcctgcatatgaagataagattggaagaaggtcaataagagtaatggacttgatctcagaaagtaatttagaccagagacttgaagttgttcttacgcatcataatgcattacgtaaaggtttaggaaagaaagcttttaaaaaagaacagcttaaaaaagatcttattaatatagcccctgaaattttaaaattttctcaaccggtatggaaaaaattggatgaatataaaaaagagggaaaaaaaatattatttgagggtgcccaaggtattttgttagatgttgatcatggaacttacccctttgtaacttcttctaatactgtagcttcaactgcagctactggaactggatgtggattagatacaataaattacgttttaggaattaccaaagcttatactacaagagtaggcgaaggaccttttcctacagaattaaaagataaaactggtgaactgcttggttcaagaggaaaagagtttggaacagtcactagtagaaaaaggagatgtggatggttcgacggagttcttgtaagacagtctataaaaatttcaggaattaatggtattgctcttacaaaattggatgttttagatgaaatggatgaaattaaaatgtgcatttcttacgaacttaatggaaaaaaaatgaattatttaccgcgctgcgctcaacgaccaactaaaaataaaacccaatttataa

SEQ ID NO: 316084 - DNA, 472 bp, Unknown
  Bacterial polypeptide expressing nucleotide sequence isolated from the Sargasso Sea
attgcagggaagtatcaatgatcaactctgtgatagaggtagtgaatttggaaccactactgggaggcggaggagatgcgggtggtttgatggtgttattggtaaatatgcagtatctgtaaatggtcttgattgtttagcagttacgaaactagatgtattagatgaattagatgagattcaagtttgcattgcatatgatctggatggagaggaaatagactactttccaacaaattcagatgacttaaaaaaatgtaagcctatcttcaagaaattaaaaggctggcaatgttcaacggcaaattgcagaaatctatctgatctacctcaaaatgccatgaattatctcagatttttggctgaattaatggaagttccaattgctattgtctcgctaggggcaaatagagatcaaaccatagtaattgaagacccaattcatggacctaaaagagcacttctaaggtaa

SEQ ID NO: 316085 - DNA, 700 bp, Unknown
  Bacterial polypeptide expressing nucleotide sequence isolated from the Sargasso Sea
aaaatattcacaaccagtttggaaaaaaattgatgaatttaaatcacaagaaaaaaaaatattatttgaaggagcccaaggaattttacttgatgtagatcatggaacttatccatttgtaacttcttcaaatacagtagcagctgcagccgcaacaggttcaggttgtggtccaaattctataaattacgtgttaggaattaccaaagcatacaccacaagagtaggtgcaggcccttttccaactgaattgacagataaaataggtgaagaacttggaaccataggaaaagaatttggaacagttactagtcgtaaaagaagatgcggatggtttgatggagttttagtgagacaaacaattaaaatttcaggaattgatggaattgccttaacaaaattagatgtattagatgaacttgaggaagttaaaatgtgtattgcttatgagcttgacggaaaaaaaattgattacctgcctgcagctgtggatgatcaattaaaagtaaaaccagtttataagacttttaaaggttggaaatcttcaactaaaggtattaaaaaatttgataatttaccagataatgcaaaaaattatatcaatgaattagaaaaatttatagaatctaaaatatctagcatttcaactagcccagaaagaaatgatacaatattaatcgaagatccctttaaagtttag

SEQ ID NO: 316086 - DNA, 860 bp, Unknown
  Bacterial polypeptide expressing nucleotide sequence isolated from the Sargasso Sea
acgatcaattagagttatggatttagcttcagaaaataatttagataaaagattagaagctgcattgatacaccacaatgcattaaggaaaggtttaaaacagaaggtttttaaaaaggataaattaaaaaaagatttattaaaaatagcaccacaaattttaaaattttcacaaccagtttggaaaaggttaaatgaatacaaatcaaaaggaaaaaaaatactgtttgagggagcccaaggtatactcctagatgttgatcatggcacttatccttttgtaacctcctcaaatactgttgcgtccacagctgcaacaggatctggattaggatctaatagcgaaagttatgttttgggtattacaaaagcttatacaacaagagtaggtgagggaccatttcccacagagcaaaaaaataaaattggagatttattaggcacaagaggaaaggagtttggaacagttactagcaggaagagaagatgtggatggttcgatgcagtattagtaagacagactataaaaatatctggtattaacggaatagcattgactaagttagatgttttagatgaattagatgagattaaaatgtgtacctcatacaagcttaatggtaaaaaattagactatttacctgcaggcgcagaagatcaatttaaaatcgaaccaatttatgaaacatttccaggttggaaagaaagtactaaaggtgtaagaaatattgaaaaccttccagataaagcaaaaaaatatatttatgctcttgaggattttatcgaagccaaaatatcaagtatttcaactagccctgaaagagaagacactattctacttgaaaatccattttcttaat

SEQ ID NO: 316087 - DNA, 544 bp, Unknown
  Bacterial polypeptide expressing nucleotide sequence isolated from the Sargasso Sea
cggtctaggctctggtttgggtccgaaggatatagattatgtgttgggcattgctatagcctatacaacccgtgttggggaaggcccgtttcccaccgagcttatcgactctacgggtgaggctttagctaaaaaaggtcaagaatttggagcaacaactggcaggcctaggagatgtggttggttcgacgccgtcgcaatgaggagagcggttaaagtgtctagcgtatccggactatgccttacaaaaatagatgttttagatgatttagaagtagttaagatttgtgtggattatgagtgcgattataaaagggaattattcgactttagttcagcttctttgtccgatgtaacgccaaattatattgaaataccaggttggcgcgaaagcacaagcggactgacggaatatgatcaattgcccgaagcagcacgcaactatgttaaagttatagaggaaaaagttggtgttccaatatcgatgatttcaaccggccccgatcgagaagagactattattttggagaatccgtttagatag

SEQ ID NO: 316088 - DNA, 472 bp, Unknown
  Bacterial polypeptide expressing nucleotide sequence isolated from the Sargasso Sea
atgaaaaacgtaatagttgtaggaacacaatggggagacgagggaaaaggtaaaattgttgattggctatcaagtgaggctgatgtagttgtgcgatttcagggtggtcacaatgctggccatacattagtaattgatggtgtaacttataagctaaggttattaccatcaggtacagtaagaaaagacaaagtttcaattataggaaatggcgttgtagtagatccttgggcattaattgctgagataaaagagatgaaatcaaaaggaattgaaatagacgaaaagaacctaatactttcagaggcagctaatcttattttaccatatcatcaggaaatggacgtaataagagaagatgcagcaggaaaagcaaaaattggaactacacgaagaggcattggtccagcatacgaagataaagttggaaaaagatccataagggttatggatttggcatcagaaaagtaat

SEQ ID NO: 316089 - DNA, 925 bp, Unknown
  Bacterial polypeptide expressing nucleotide sequence isolated from the Sargasso Sea
agacacttcaaaattaaagctctcatcgaatgcacatttaattatgccctaccacaaacttctagatgaattaatcgagaccaaattaggaaaaaatatgataggcacaacaaagagaggaattggtccttgctatgcagataaaattcaaaggcaaggaatccgagtgcaagatttatttgatgaaaaaatttttgaagaaaaagtttcaaccattttggatgataagaatgagattattacaaaaatatataatgacaaacctttcgttcttgaagagatattaagtgaattcaatgaatacagagatacggtaaaagagataatgactgacacctccctcttaatttctaatgccattactgaaggaaaaaatgtattatttgagggagctcaaggaactttattagatattgatcatggaacatatccttttgtaacaagttcaaacacaacttccggcaacgctgcaataggttctggaataggacctcgtgatatagataaaattgtaggagttactaaagcttacatatcaagagttgggactggacctttcttaactgagcaagaaaatgaagttggtgattttctaattgaaaaaggtgcagaatatggagtggtaacgggaaggaaaaggagatgtggttggttggaccttgtttcacttaagtattccgtaagagtgaactctttaactgaattatttattacgaaacttgatgtgctttcaggtttgaatgaattgaaattaaacattgcttatgaaataaacggctctgaggtaacagattttcctagacagcaaagggtcctctatgatgggaagccaatttataaaaatttcaaaggctgggaagaggatatatcagacacaacgtctttcgaagaactgccaaacgaagcaaaagagtatataaagttt

SEQ ID NO: 316090 - DNA, 685 bp, Unknown
  Bacterial polypeptide expressing nucleotide sequence isolated from the Sargasso Sea
gcctcaaaaaacaagaaaaatattctattcgaaggtgcccaaggtactctccttgacttagatcatgggacttatccttttgtcacctcatcaaacccaatatcaggaggggcatgtattggggctggagtgggccccaccttaattgatagagtcataggtgtggcaaaagcttataccacaagagtaggtgaggggccattcccaacggaattacaaggaagtattaatgatcaactctgtgatagaggcagtgagtttggaaccactactggaagaagaagaagatgtggatggtttgatggagttattggtaaatatgctgtatctgtaaatggacttgattgtttagcagttacgaaactagatgtattagatgaattagatgagattcaagtttgcatcgcatatgatctagatggagaggaaatagactactttcccacaaattcagatgacttaaaaaaatgtaaaccaatcttcaaaaaattaaaaggttggcaatgttcaactgcagattgcagaaaactatctgatctcccagagaatgctatgaattatctcagattcttagctgaactaatggaggttccaattgccattgtctcgttaggggctaatagagatcaaaccatagtaattgaagacccaattcatgggcctaaaagagcacttctaaggtaat

SEQ ID NO: 316091 - DNA, 837 bp, Unknown
  Bacterial polypeptide expressing nucleotide sequence isolated from the Sargasso Sea
agctaaaataggaacaacaagaagaggaattggaccagcatatgaagataaagttggtagaagatcgataagagttatggatttagtttctgataaaaatttggatcatagattagaaacagttttaatgcatcataatgcaataagaaaaggattaggaaaagaaatttataagaaagataaactaaaggaagatttattaaagatagcaccagaaattttaaaatattctcaaccagtatggaaaaaaatagatgagtttaaatcacaaggaaaaaaaatattatttgaaggtgcacaaggtgtcttgcttgatgttgatcatggtacatacccatttgttacatcttcaaacacagtagcttcagctgctgcgactggctctggttgtggtcctaattcaataaattatgttttgggcattacaaaagcttatactacgagagttggtgaaggtccttttccaacagaactgacagatacaataggagaaaaattaggaactataggaaaagaatttggaactgtcacaagtagaaaaagacgatgcggatggtttgacggagttctggtaagacaaacaattaaaatttcaggaatagatggaatagcattaaccaaactagatgttttagatcaattagatgaaattaaaatgtgcattgcatatgaagttgatggaaaaaaaattgattatttgcctgcagcggtagatgatcaattaagagcaaaacctatttataaaaattttaaaggttggaactgttcaactaaaggtataaaaaattttgatgaccttcctgatgatgcaaaaaattatgttaaagaattagaaaa

SEQ ID NO: 316092 - DNA, 763 bp, Unknown
  Bacterial polypeptide expressing nucleotide sequence isolated from the Sargasso Sea
agatattcatcaaaaaatagatttggctcgagaaaaaaaacgagggaaaaataaaatagggaccacaggtaggggtataggtcctgcgtacgaagataaagtggcaaggcgtggtattagagttgcagacttagacagtcccgatcaagtgttatcgaaattagaagatcaattcacatatcacaatatttttctcaaggatgcggacgaagaaatagcctccgcagaagaaacttttaaagatctaatggcaattagtgatgatatacggcagtttgcacaaccagtgtggaaaaagatggatgaacttcgagcgcaaggttccaggattttgtttgaaggtgcgcagggtgtaatgttagatgttgaccatggaacctaccccttcgttacttcttcgaacacagtcgcaggacaagctgctgctggatcaggcacgggaccaacttctatcaattatgttttaggaattactaaagcctacaccaccagggttggtagtggcccatttcctaccgaattactggacaagattggcgaaactcttggagagagaggccatgaatttggggtggtaacaggtcggaaacgccgatgtggttggtttgatgccgtaatggtcaagcaggctatcaagacttcggggataactgggattgcactgacaaaaatggatgtactagacggtttcgaaacactgaaagtttgtgatggatatgaacttcagggaagtagaatcgactattttcccagttcttctaag

SEQ ID NO: 316093 - DNA, 223 bp, Unknown
  Bacterial polypeptide expressing nucleotide sequence isolated from the Sargasso Sea
atgagtaagaatgttgttgtaattggaactcagtggggcgatgagggaaagggaaaaatcgtagatctgttaacagaagatgtggcagccgtcgtccgatttcaaggagggcataatgctggtcatacacttgttatagagggaaacaaaaccgtcctccatctaattccctctggtattttacatgaaaatgttcattgcctgataggtaatggcgtagtta

SEQ ID NO: 316094 - DNA, 418 bp, Unknown
  Bacterial polypeptide expressing nucleotide sequence isolated from the Sargasso Sea
cctggatatttataactttttaattaaaagacatgatgaatctcaacaagaagatttgaatgaattatttgaaaataatttaaagcaatctgagagattacaacccttcgtaggaaatgtaatttcattactaaaagacctacaagagtcttcaaagacagttctttttgaaggagctcaaggagctcttctagactacagtttgggcacttacccttttgttacatccagtaattcttctttagggggtattgcatccggagcaggcgtaagcgcaaccaacatagattattctcttggtatatgcaaagcatatacgaccagagttggagaaggtccttttcctactgaactacaagatgagacgggtgattacatcgccgagaaaggaggtgaggttggagctacaaccggaaga

SEQ ID NO: 316095 - DNA, 892 bp, Unknown
  Bacterial polypeptide expressing nucleotide sequence isolated from the Sargasso Sea
atgaaaaatgttgcagtagtaggttcacaatggggagatgagggaaaaggaaaaattgtagactggttatcagaacaagcagatgtggtaattagattccaaggtggacacaatgcaggacatactctcgttatagagggagttacttataaacttcggttacttccatcaggcattgttagaaagaataaaatttcaattattggaaatggtgttgttgtagacccttgggctctattggatgaaataaaagagatcaaagaaaaaggtgtagatgtaaattcagaaaactttatgatttctgaggctgcaaatttaattctaccatttcaccgtgaaatggatgaaattagagaagatgctgcaggaaaaggtaaaataggaactacaagacgcggtattggacctgcttatgaggataaagttggtagacgctcaattcgagtaatggatttgagatcagaaaaaaatttagatcaaagacttgaaacagttttattgcatcataatgcaataagaaaaggattagaaaaaaaaatttttgaaaaaaaccaacttaaaaaagaccttttaaaaattgccccagaaatacttaaattttctaaacctgtttggttaaaaattgatcaattcaaaaaacaaaaaaagaaaatattgtttgaaggtgcccagggtattttattagatgtcgatcacgggacgtatccatttgtaacttcttcaaatactgtagcttcaagtgcagcaacagggactgggtgtggaccaaattcaattaattatgttctaggtattactaaagcttatacgacaagagttggtgaaggtccttttccaactgagctagtggatgagataggcgaattacttggtacgagaggtaaagaattgg

SEQ ID NO: 316096 - DNA, 829 bp, Unknown
  Bacterial polypeptide expressing nucleotide sequence isolated from the Sargasso Sea
agggaaatagttgattggttatccagcgaagcagacgttgttataacattccaaggaggacacaatgctggtcataccttagtcatagatggtattacttataaactaagattgttaccgtctgggattgttagaaaaaataaaatttcaatcataggaaatggagttgttgtagatccttgggctcttttagatgaaattgaagaagcgaaatctaaaggtgttgaaatcaatgaaaataatctgattttatccgaggctgccacattaattttaccatttcatagagagatggatgaaataagggaagactctgctggtaaatcaaaaattggaactactagaagaggtattggcccagcctatgaggataaagttggacgaagatctataagagtaatggatcttgcatcaaaacaaaatcttgaaaatcgattatcattagtacttgaacaccataatgcaatccgaaaaggattaggtaagccaatatatgaaaaagataaactggttgaggacttgttaaaaatagctccaaatattttaaaatattcagcacctgtttggagaaagatagatcaatttaaatcagaaaataaaaaaatattatttgagggagctcaaggaattttacttgatgtagatcacggaacatatccatatgtaacttcttccaatacagtagcagcttcagcagcaacaggatctggatgtggtccaaactcaataaactatgtattaggaattacaaaagcatatacaacaagggtaggcgaaggacctttcccaacagaattaacagatgatattggcaatcatttgggtgaaa

SEQ ID NO: 316097 - DNA, 853 bp, Unknown
  Bacterial polypeptide expressing nucleotide sequence isolated from the Sargasso Sea
aatggtatccggaccatcgatcttttagaaccaaaggttttaaaagagaagcttgagaagggctactcgtttgcaaaaggactgatagaaaaagcactcgaaaggtctctagatataaaagaggaagagatctatgattcctacttgagttatggagaacagctaaaaccgtacattcatgacacctctgttgaattatatgatgccttaaaggcaggaaaatcaatactgtttgaaggtgctcaaggaattagcctagatgtagaccatggtgtttacccttttacaacatcatcgaatactgcagcaggtcatatctctacgggtaccggtgttagctttcgtgatattggaagaataattggtgttgtaaaagcttacctaagtcgcgttggagaaagcccattgccatcggagatccatggggatgaggccgaagacctaagacaaaaaggtggggaatatggaacaacaacaggtcgcccaagaagagtggggtggttggacctggtccaggtacgccaagcagtaagagtgaacggacttacagagatcgctttaacaaagctggatgttttgaatggttttgaagttcttaaggtctgtacagcatatgatattgatggtgaacaaataactgaaatgcccgccagcttaacaaaataccgcaatgctaaacccaaatataaatcactgcccggctggaaaacgttaccagatcaggtctggacaaaagggtttaacgcactcccagaaacattaaaagactatatttcatttatagaagatgctgttgattgctcagtgaaaatcgtatccgttgggcctcaacgccacgagaccattattcgtt

SEQ ID NO: 316098 - DNA, 125 bp, Unknown
  Bacterial polypeptide expressing nucleotide sequence isolated from the Sargasso Sea
catgacagcactggtagtggtaggcacccaatggggggatgaaggtaaagggaaaatcgtagatctgctcaccgaacaggcagatgctgtggtgagataccagggggggaacaacgccggtcaca

SEQ ID NO: 316099 - DNA, 508 bp, Unknown
  Bacterial polypeptide expressing nucleotide sequence isolated from the Sargasso Sea
tttaggtataacaaaagcgtacactactagagttggtgcgggcccatttccaactgaattgatagataaaattggtgatgaactgggaactaaaggaaaagaatttggaactgtaactagcagaaaaaggagatgtggctggtttgatggagtattagttcgacaaacaatcaaaatatctggaataaatggcatagcactaactaaattagatgttttggatgaactttcggaaattaaaatgtgtgtagcttatgaacttgatggaaaaaaaattgattattttccaacatcaatagaagatcaaatgaaattaaaaccaatttataaatcttttaatggctggaaaacatcaactaaaggaataaaaaattttaatgatctacctgaaagggcaaaaacttacgtaacagagcttgaaaaatttattaattcaaaaatctcaagtatatcaactagtcctgaaagaaaggacactattttaatggtaaatccgtttaatatttaa

SEQ ID NO: 316100 - DNA, 812 bp, Unknown
  Bacterial polypeptide expressing nucleotide sequence isolated from the Sargasso Sea
actaatactccccacacatatatcaattgaccaaagaagagataaaaaagaatccataggaaccaccggcagaggcattggtccagcatatgaagataaggttggtcgaagagctattaggtttggagatataggagacaataaattattaagaaaaaaagtagagcttttagttgattatcataatcgactattaaaggatttatataaagattcacctcatgatgttgatgaagtctatgattatgttatgaagtataaacatctatatgatgaatattgtgttgattcacaagatcaaatgtacgaatgggttgaaaataaaaaatctatcttattcgaaggcgcccaagggacattgcttgatatagatcatggtacttatccatatgtaacatcttcaagtactactgccggaggtgtatcgacaggattaggcattggtccaaaatatatagacaaaatcattggaatttcaaaggcatatacaactagggttggagaggggccatttttaactgaattgtttgatgaggatggtgaattacttgctaaaaaaggtaacgaatttggtgctactaccggaagaccaagaaggtgtggttggttggatttggtagctcttaaaaaagcagtatttacaaattctgttacagatctatgcataactaagctagatgttttagatgagacaaaaattataaaagtgtgtatcgagtatgataatgataatccagtttataaaaaatttgatggttggttatgctcaacagagggtataactgaatactcagaattacctgaaaaagcta

SEQ ID NO: 316101 - DNA, 796 bp, Unknown
  Bacterial polypeptide expressing nucleotide sequence isolated from the Sargasso Sea
aaaaattaaagataatatttataaattgaacctattaccatcagggataatcagaaataaacaatgtttaataggtaatggcgtagtattagatccatatgcattaataaatgaaatagaaagtttgaatagtcagggcatagcggtttctacaaaaaatctttttattgcagaaaatgtttgcttaattctaccaatacacaaagttatagatgaagtgaatgagcttgatagaggtaataaaacaattggcactacaaaaaaaggaataggaccagcttatgaagataaagtaggaagaagggctattagattgtgtgatttaaaaaaccataaaactctaaaaaataaattagaaaagctaatcatttttcatgaattaagattgaagaagtacaataaaaatattgatttagatgaaatttataattctcttgtcaggatttcagaatatttaattaaattttccactccaatatggaaaatcattaatgaagcaggagttaaaaataaatttatactttttgaaggagcacaggggtctcttttagatatagattttggaacatatccttatgtaacttcatctaatacttcttcaggacaaatatttgctggaactggatttggtattaaagaaaatcacaaaatcttaggtataactaaagcatatactacaagagtaggttcgggaccgtttgcaacagaacttaatgataagataggagattattttgttgaaataggaaaagagtatggaaccgttaccaaacgtagaagaagatgtgggtggttt

SEQ ID NO: 316102 - DNA, 823 bp, Unknown
  Bacterial polypeptide expressing nucleotide sequence isolated from the Sargasso Sea
tttcaaggtggtcataatgctggccatactctagttattgataaaaaagtttttaagctaagattactgccgtcgggtatcgtaagagatggaaaaatctctattcttggtaatggtgttgttatagatccatgggcacttcttagtgagattgaagaaattaagaaaaaaggtgtaaaagttacgcctgaaaattttatgatttctgataccgcatcattaattctaccatttcatcaagaaatggatgaaataagagaggatgctgctggcaagtctaaaattggaaccactagacgtggtattggaccatgttacgaagataaagttggaagaagatccataagagtaatggacctaggatctgaaagtaacttagatgcgcggttagaaaatgttttaatgcaccataatgccataagaaaaggcttaaagaagaaaatttataaaaaagaaattttgaaaaaaaaacttttagatgtagctccaaaaattttaaaatttgcaaagcctatttggttagagcttgacaaatttcaaaataatagaaaaaaaatactatttgaaggtgcgcaaggcattcttttggatgtggatcatggcacatatccttatgtgacttcatctaatacagtcccatcatcagccgcaacaggatctggttctggtccagataaaattggatacgttttaggtatcactaaagcatacacaactagagtaggtagcggaccatttcctacagaattaaaaaataagattggtgaaaccttaggtaagagaggtaaagaatatggaactgttacagctcgaaaaagaaggt

SEQ ID NO: 316103 - DNA, 397 bp, Unknown
  Bacterial polypeptide expressing nucleotide sequence isolated from the Sargasso Sea
acaggtcgtaagcgccgcacaggttggttcgatgcagttgcgatgaaacgcgcagttcaaatcaactctattacagggttctgcttaactaagcttgacgtactagacggtcttgaaagcctacaaatttgcgttggctacaaagatgcagacggcaacgtgaaagatgtaccaccaatggcggctgacggttacgagaaagtaacgccagtatatgaagaaatgccaggttggacagacaacacctttggtgtaactgagtttgaagcgcttcctcaagcagcgaaaaactacattaagcgtcttgaagagctaacaggtgtgccggttgatatcgtttcaacaggcccagacagaaacgaaactatcgttttgcgcagcccttacgacgcctaat

SEQ ID NO: 316104 - DNA, 901 bp, Unknown
  Bacterial polypeptide expressing nucleotide sequence isolated from the Sargasso Sea
ttaccaatccataaaattattgatgaagtgaatgaaattgaaagaggtaatgaaaatataggaacaacaatgagaggaataggtccagcatatgaagataaggttggaagaagggcaattaggttgtgtgatatacaaaattttgatcttttaaaaaacaaattagataaattgcataaatttcatcaaccaagattagaaaaatataacaaaaatatagatgtcgatatagtttacaaagatattctctctataggcaagcacattataaaatttgcatcaccagtatggaaaattattaatgaagcaggagaaaaaaaaaatataatcctttttgaaggagctcaaggttctttacttgatattgattttgggacatatccttttgtaacatcatcaaatacttcttcaggtcaagtatttgctggaactggttttggcattaaagataaccacaaagtttttggcataactaaagcttatacaactagagttggttcaggcccatttccaacagaattaaaggatgatattgcaatatatttaactgaaaaaggaaaagagtttggaacagtaacaaagcgtaaaaggagatgtggatggtttgatgcaagtttagtcaaacaatctctaaaaattagtggggtaactgatattgttttaacaaaattggatgtcttagatgaattagatattattaaaatatgcacaggttacaaaattaatggcaagaattatgactatcttccatttgatgaaaaattacaagaacatattgagccaatttataagagtttggatggttggaatcaaacaacttttggtattacaaaatgggaaagtcttccagaaaatgcaaaaaaatatattttgtttattgaaaaaatacttaaaagaaaat

SEQ ID NO: 316105 - DNA, 854 bp, Unknown
  Bacterial polypeptide expressing nucleotide sequence isolated from the Sargasso Sea
agctggaaaagaaaaaattggcactacaagaagaggtattgggccatgttatgaggacaaagttggaagaagatctataagagtaatggaccttagatcagagagtaaccttgatagtagactcgaaaatgttttgttacaccataatacaattagaagaggattaaaaaaaaaagtttataaaaaaattgatattaaaaaaaaacttatgaaaattgcacctgaaattcttaaatatgctaaacctatatggttaaaattagaggaatttaaaaaagatagaaaaaaaatcctttttgaaggagctcaaggaattcttttagatgttgaccatggcacatatccttatgtcacatcatcaaatactgttccagctatggcagcaacaggatctggattaagtccagataaaataggatatattttgggaattactaaggcctatacaactagagttggtagtggaccattcccaacagaattaaaaaataagattggcgatacccttggacgtagaggaaaagaatttggaacggtaactgctagaaaaaggaggtgtggttggtttgatggagttttagtgaggcaaactataaaaatttctggtattaatggtatagcccttacaaaacttgatgttttagatgaacttgatgaaattaaaatgtgtatcaaatacgatcttaacggaaaaaaactagactatctacccgctgcaacagaagatcaatttaaaattaaaccagtttataaaaccttttcaggttggaaaagcaataccaaaggagtaagaaatatcagagatttaccagaaaatgcgaaaaaatatatatttgctttagaagactttattg

SEQ ID NO: 316106 - DNA, 981 bp, Unknown
  Bacterial polypeptide expressing nucleotide sequence isolated from the Sargasso Sea
ctctcaagtcaggctgatgtaatagtaagatttcaaggtgggcataatgctggccatactcttgttatagatggtgtagtttataaattaagactgttaccatcaggaatagttagaaaaagtaaaatatctataattggaaatggagtagtggttgatccatgggcactattagaagagattgatgaaattaaatctaaaaaggtagaaattaattctgacaatttaattttatctgaagcagctactctcatcttgccatttcataaagaaatggatgagattagggaagatgcggcaggaaaatcaaaaatagggactacaagaagaggaataggaccagcatatgaagataagattggtagaaggtcaataagagtgatggatcttgcatcagaaaacaatttggataaaagattggacgtagtattaaatcatcataatgctataagaaaaggtttaggaaaacctgaatttaaaaaagaaaaattaaaaaaagatctattaaacattgcaccacaaatacttaaattttcacagccagtatggaaaaaaatagatgaatttaaatctgaaaataaaaaaatattatttgaaggtgctcaaggagttcttttagacgttgaccatggtacttacccatttgtaacctcttcaaatactgttgcttcttctgcggcaactggttcaggctgtggtatgaactttattaattatgttttaggtattacaaaagcatatactacaagagttggagaaggtccttttccgacagagctaagagatgagataggtgatttacttggaacaagaggaaaagagtttggcactgttactagtcgaaagagaagatgtggttggtttgacggtgtccttgtaagacaaactctgaaaatttcaggaattgatggaattgcactaactaaactagatgtactagatgaactagatgaaattaaaatgtgcgttgcttacgagata

SEQ ID NO: 316107 - DNA, 739 bp, Unknown
  Bacterial polypeptide expressing nucleotide sequence isolated from the Sargasso Sea
tatgaaaagtgtagtagttgtaggaacacaatggggagacgaaggcaaaggaaaaattgttgattggttatctagtgaagctgatgttgtaataagatttcaaggtggacataatgctggtcatacattggtaattaatggagtcacctacaaacttagattgctaccttcgggaatagttaggaaagataaaatttcagttattggtaatggtgttgtgctaaatccttgggcttttttagatgaaatagaggaaataaaatcaaaaggtattgaagttaatgatgaaaatttaattttatcagaatctgcaaccttaattttaccttttcacattgaattagacgaaataagagaggatgcagcaggcaaagctaaaattggaactactagaagaggaattggtcctgcttatgaagataaagttgggagaagatcaattagagttatggatttaatttcagaaaaaagtttagatttaagattagattcagttttaatacatcacaatgcaataagaaaaggtttaggaaaaaaaatttttaacaaagataaactgaaaaaagaattgttagaaatagcgccaaaaatacttaagttttcaaaacctgtttggaagataattaatgactttaaattaaaaggaaaaaaaatattatttgaaggagcgcaaggtattcttctagatgttgatcatggtacatatccatttgtgacttcatctaatacagttgcagca

SEQ ID NO: 316108 - DNA, 808 bp, Unknown
  Bacterial polypeptide expressing nucleotide sequence isolated from the Sargasso Sea
gatgaaaaatgtagccgtagttggttcgcaatggggtgacgaaggaaaaggaaagattgttgactggttatctagcgaagcagatgtagttgttagatttcagggcggacataatgcgggacatactttagtaattaatggaataacttataaactaagattactaccctcaggaatagtaagacaaaataaaatttctattataggcaatggtgtagtagttgacccttgggctttattagaagaaatagaagaattaaaattaaaaggaacggatgttaatgaaaataatttaattctttcagaagctgccactttaattttaccatttcatagggaaatggatgaaattagagaagatgccgcaggaaattcaaagattggaactacaagaagaggaataggtcctgcatatgaagataaaattggaagaaggtctataagagttatggatctaaaatctgaaaaaaatttagatcatagactggatgcgattctatcgcaccataatacaattagaaaaggtcttggaaaaaaaatttatgaaaaagaacaagtaataaaagatttattaaaaatagcacaagaaatattaaaatattctcaacctgtttggaaaaaaattgatgagtttaaatctcaaggtaaaaaaattttatttgaaggtgctcaagggattcttttagatgtagatcatggaacttatccatttgttacatcatccaacacagttgcagcttctgcagctatcggctcaaggttgtggtccaatttcataaattatgttttaagcataacaaaagctata

SEQ ID NO: 316109 - DNA, 373 bp, Unknown
  Bacterial polypeptide expressing nucleotide sequence isolated from the Sargasso Sea
tggccaactacttgcaaaaagaggaaacgaatttggtgctacaactggacgaccaagaagatgtggttggctagatttagtatctctcaagaaagcagttttcataaattccgttacagatttatgtataactaaactagatgtacttgatgaaatagaaattatcaaagtttgcatcgaatatagtaataatgaaccaatttatatggagtttgatggctggctatcttctactgagggaatcactgaatattccaatttacctctaaaagctaggacatatatagaatatattgaagattacatagaatgctctgcctctattatttcaacaggaccctcaagagaacaaacaatcttaagaaatacttag

SEQ ID NO: 316110 - DNA, 753 bp, Unknown
  Bacterial polypeptide expressing nucleotide sequence isolated from the Sargasso Sea
tgttgttcgatttcatggtggaaacaatgcaggacatactgttattgttgatgacaacacatacaaactccatcttatcccctcaggggtattatatgaacatccaaccagcataattgggaatggggttgtggttgaccctgccgcattaataaaagaaataaactacctaaaagataagggtgtaaaccccaagttgaaaataagtgacagggcacatgttataatgccatatcatattgaaatggatatagcactaacaaaacaccagggcaaattagctgcaggcagtacaaaacgaggaattgctccagtatacggagacaaaatgtaccgacatggtatacgtatgatagacctaacagatcctgatgttttcagtgaaaaactagacaaagcatatagctttaatcaaacaatgatagaagcatttgggcacaacatcgaacaaaataaaaaaaatatttatgaacaatacatcgaatatggcgaaatactaagcccctatatatctgacatttctgtagatctttttaatgctcacaaaaaaggagcctcaatactttttgaaggtgcacagggtattagcttggatgttgaccatggtgtttatccgcacacaaccagcagcaacacagtcgccggccatgtggctgcagggacaggtgtaagcttcagagatattcacagaattatcggtgtcactaaagcatacctcaatagagttggtcaaagccctctccccacagagct

SEQ ID NO: 316111 - DNA, 821 bp, Unknown
  Bacterial polypeptide expressing nucleotide sequence isolated from the Sargasso Sea
ggatcgcaatggggtgatgaaggaaagggtaagatagttgattggctatccgaacaggctgatgtcgtgataagattccaaggaggacacaatgccggacatacacttgttattgatggtgtaacttataaattaagattactaccgtcaggaatagtaagaaaaaaaaaaatttcaattattggtaatggagtagttgttgatccctgggcactattagacgaagtagaggaaataaaattaaaaggagttgatgttaatgttaataattttattatttcagagtctgcaaatttaattttaccatttcatagagaaatggatgaaataagagaagatgcagctggagaaagtaagattggcactacaagacggggaattggacctgcttatgaggataaagttggcagaagatctataagagtaatggatttaagatctgaacaaaatttagatcataggttagaatcagttttgttacaccacaatgctattagaaaaggtttaggaaaaaaaatttttgaaaaagaacaattaaaaaaagaactgttaaaaattgcccctaaaatacttcaattttctcaacctgtatggcttaaaattgatcaatttaaaaaacaaaaaaaaaaaattttatttgaaggggctcaaggaatcttattagacgtagatcatggcacttatccctatgttacttcttcaaatactgtagcatcaaatgcagcaacaggaactggttgtggaccaaattcaattaattatgtattaggaataaccaaagcatacactactcgagtaggagaaggaccttttccaactga

SEQ ID NO: 316112 - DNA, 733 bp, Unknown
  Bacterial polypeptide expressing nucleotide sequence isolated from the Sargasso Sea
agaagagatctatgattcctacttgagttatggagaacagctaaaaccctacattcatgatacctctgtagaattatataatgccttaaaggcaggaaaatcaatactgtttgaaggtgctcaaggaattagcctagatgtagaccatggtgtttacccttttacaacatcatcgaatactgcagcaggtcatatctctacaggtaccggtgttagctttcgtgatattggaagaataattggtgttgtaaaagcttacctaagtcgcgttggagaaagcccattgccatcggagatccatggggatgaggccgaagacctaagacaaaaaggtggagaatatggaacaacaacaggtcgcccaaggagggtggggtggttggacctggtccaggtacgtcaagcagtaagagtgaacggacttacagagatcgccttaacaaagctggatgttttgaatggttttgaagtccttagggtctgtactgcatatgatattgatggtgaacaaataactgaaatgcccgccagtttaacacaataccgcaatgctaaacccaaatatgaatcactccccggctggaaaacgttaccagatgaggtctggacaaaagggtttaatgcactcccagaaacattaaaagactatatttcatttatagaagatgctgttgattgctcagtgaagatcgtatccgttgggcctcaacgccatgagaccattattcgttaa

SEQ ID NO: 316113 - DNA, 730 bp, Unknown
  Bacterial polypeptide expressing nucleotide sequence isolated from the Sargasso Sea
cttttatctatgtctaattatcttaactcttttagtgttccattatggaaaataataaatgaattaggtcaaaagaataaaaacattgtgtttgaaggggcgcaaggttcaatgttggacatagattttggaacatatccttacgttacatcatcaaatacaatatctggtcagatattctctggtacaggttttagtgatagaaaaaatcacaaaattttaggaattacaaaagcatataccactagagtgggatcaggtccatttccaacagagttattggatgagattggagaacatcttggtgaaaagggtcaagaatttggaacagttacaaaaagaaaaagaaggtgtggatggtttgatagtgttcttttaaaacaatctatcaaactaaatggtattacagatattgtacttactaaacttgatgttttagatgaattaaaagaaattaatgtatgtactggatatttaattgacaacaaacattatgactatttaccaagtgaagaatttttattcgaaaagataaagccaatttataaaaaagttgatggttgggaaaaatcaactgcaggtattaacatatttaacgatcttccagaaaatgcaaaaaaatatattcaaatactcgaggatcttatggaaactaatatctcaattgtatcaacagggccagacagaaaagagacgattgatataaatggaactttatctaatatttgaa

SEQ ID NO: 316114 - DNA, 916 bp, Unknown
  Bacterial polypeptide expressing nucleotide sequence isolated from the Sargasso Sea
aatgagaaatgtagttgtagtaggttcacagtggggagatgaaggaaaaggaaaaattgtagactggttatcagagcaagctgatattattgttcgttttcaaggtggacataatgcaggacatactttagtcattgatggcataacttataaattaagacttctaccctctggaattgttagaaaaaataaaatttcaataattggaaatggagtagtagtggacccttgggcattattagatgaaatatctgaaattaaatcaaagggggtagaggttaatgagaaaaattttatcatttccgattctgctaacttaatactaccttttcacagcgaattggacgcgattagagaagacatagcaggtaaagaaaaaataggaacaacaagacgtggaattggacctgcttatgaggacaaagttggaagaagatcggtaagagttatggatttaaaatcagaaaaaaatttagataaaagattagaaaacgtactaacacatcataacgcaatcagaaaaggtttaggaaaagatttgtatgaaaaaaataaattaaaaaaagaactattagaaatagctccaaaaatattaaaattttctcaaccagtttggttaaaaattgatgaatttaagaagaaaaataaaagaatattatttgaaggtgctcaaggaattttattggatgttgatcacggcacttatccttttgtgacttcttcaaatacagtagcttcaagcgctgcaacaggaacaggatgtggtccaaatacaataaattatgttttgggaataacaaaatcttatactacaagagtgggagaaggtcctttcccaacagaattaaaagataacattggagaacatcttggaacagtaggaaaagaatttggcacagttacaagcagaaaagaa

SEQ ID NO: 316115 - DNA, 643 bp, Unknown
  Bacterial polypeptide expressing nucleotide sequence isolated from the Sargasso Sea
tattaatgatttatgtaaacaaggcggagttgtttttgagggagcacaaggcactatgcttgacgtggatcatggaacctttccttatgtaacttcatctaatacgacactgtctggagttgtatctgggactggtgccaacatgtctctaattaagtatggtctaggtatcacaaaagcttattcaacacgagtaggacatggtcctttcccatcagaactacataatgatatcggtcaaaagataggaaaaataggtggagaaataggagctactacaggacgagcaaggagatgtggctggcttgatttaaaagttttaaaaaaatcgattcgtcttaataatttatcaggtatagctttgacaaaaattgatgtattagacaatttcgatgaaatttctatttgtgtcgattatggatctataaattatgaaacatttgaggttgaaaatttaaagttcataaaactccctggatggaatgaatccacagttggtattacaaaatatgatgatctcccaaaaaatgctaaggcatatattgaagctatagaaaatttagcagatatatctgttgatatcatatcgacaggacctgcaagaaatgaaattattcaaaaaataaatatctttgatgcctga

SEQ ID NO: 316116 - DNA, 649 bp, Unknown
  Bacterial polypeptide expressing nucleotide sequence isolated from the Sargasso Sea
ttagagaggatgctgcaggtaaggcaaaaatttgggactacaagaagaggcatcgggcccgcatatgaagacaaagtaggaagaagatctattagagtcatggatttagtatctgagcaaaatttagaccataggctcgaaactgtattattgcatcataatgcaataagaaaaggtctaggaaaaaaagtttatcaaaaaaaaaaattaaaacaagatttgttaaaaatttcatctgaaattttaaagtactcaaaaccagtttggaaaaaaatcgacgaattcaaattacaagagaagaaaattttatttgaaggtgcacaaggaattctactagatgttgatcacggtacctatccatttgtaacttcgtcgaatacagtggcatcttcagctgctactggctctggttgtgggccaaattctataaattatgttttgggtattacaaaagcatatacaacacgagttggtgaaggcccattccccacagagttaacagatgaaatcggtgaagaacttggcactaaaggtaatgagtttggaacagttaccagtaggaaaagacgttgtggttggttcgatggtgttttggttagacaaacaattaaaatttctggtattaatggtattgcattaactaagcttg

SEQ ID NO: 316117 - DNA, 881 bp, Unknown
  Bacterial polypeptide expressing nucleotide sequence isolated from the Sargasso Sea
gttgtgttggataaccttttctgaaatcaaattaggcacagatgctatagggactacaggtaaagggataggtccagcatatggagataaaatttctagaaaaggaattagggctgcagatttattagatatcgatactttaaaagatcgtttaattgcacttgttgagtcatcaaatcaattagttgataaaaacaaggttcaaaattcactttcagtagatgaattgttagagctatgtaagatttggtcagaaaaattacatccatatattgctccaacaggagagtatattaatgatcaattatataaaggatataatgctgttttagaaggtgctcaaggggttttgcttgatatagatcatggaacatatccatatgttacttcttcaaattcaagtatcggtggagcaattactggattatcaattcagcctagatatttaacttctgtagttggagtttttaaagcttacacaactagagttggtgcaggtcctttacccactgaactatttgatgatgtgggagaaagtattagaacaatagctagagaatttggaactactacaggtagagctagaagagtaggatggtttgatggagtagttgcaaaatatagtcatcaagtaaatgggtatacttctgccgtaatcactagattggacgttttagaccaatttgaagttgttaagatttgtacaggatatgaactagacggagaaatagttgatcaattgcctggaggcatggctgctttaagtagatgtgttcctgtatatgaggaattacctggttgggacatcccaactgctggaatgtcagacttgaataagttgcctaaaaatgctcgtcattatgttgacaggattcaagata

SEQ ID NO: 316118 - DNA, 613 bp, Unknown
  Bacterial polypeptide expressing nucleotide sequence isolated from the Sargasso Sea
atggcctgtctgataattgttggaacccaatggggtgatgaggggaaaggaaaaattgtggatttgctcacagaaagggctgatgccgtagtaagattccagggtggtaataatgcaggacatacggtaatgtttggaaaaaaaactttcgttctgcacttgctgccatcgggcattcttcgtgagaccacgtcaatcctgggaaatggtgttgtgatcgatttgtccgaattaattaaggaaataaatgagttggaaaaaatgggaattgatgtagcgaaacatcttcacatcagtgatagggcacatctagtgatgccttggcataaaactattgaccaacttcgtgaacaaaaaaaaggaaaatctaaaattgggactaccggtcgtggaataggtcccacttatgaggataaagcaggaagaacgggatttagggttggagatttgctggagcagcaaaagttcagttcacatttgagcgaaatagccatggaaaaaaatatttttctaacgaaatattttgatacggatgacaaatctttttttgcagaagatatattttcagcaatatacagattatataaaaaaaataaagccttgtattgctgac

SEQ ID NO: 316119 - DNA, 931 bp, Unknown
  Bacterial polypeptide expressing nucleotide sequence isolated from the Sargasso Sea
agagaggatgctgcaggaaaagataaaataggtactactagaagaggtattggaccagcatatgaggataaagtcgggagacgatctatacgtataatggacttaaggtcagaaaaaaacttagatcaaagacttgagtcagttttattgcatcataatgctattagaaagggtttaggaaaaaaaatttttgaaaaaaatcaattaaaaaatgatttattaaaaattgccccagaaatattgaagttttctcaaccagtttggttaaagattgaagaattaaaaaaacaaaaaaagaaaattttatttgaaggtgctcagggtattttattggatgttgatcacggaacatatccttttgtaacatcttcaaatacagtcgcatctagcgcagcaactggcacaggttgtggccctaattcaattaactatgtgttgggtatcacaaaagcttatacaacaagagttggggaaggaccttttccaacagagttaaaagatcaagttggtgatttgctaggtacaagggggaaagaatttggaacagtcacaagtagaaaaagaagatgtggttggtttgatggtgtcttagtcagacaatcaataaaaatttcaggaatagatggaatcgctttgactaaattggatgttttagatgaattagatgaaattaagatatgcattgagtatgaattaaatggaaaaaaaattgaatatcttcctgcagcagtagatgatcaattaaaaattaaacctatttacagaactttccctggatggaagagttctacaaaaggaataaaaaatttacgtgatcttcctgaaaaagctaaaaaatatgttactgctattgaggattttataggtgctaaaatatctagtatttcaactagccctgagagagatgacacaatattaatagaaaatccat

SEQ ID NO: 316120 - DNA, 496 bp, Unknown
  Bacterial polypeptide expressing nucleotide sequence isolated from the Sargasso Sea
ggtgaagggccattcccaacagaattacaaggggagtattaatgaccaactctgtgatagaggcagtgaatttggtaccactactggcagaaggaggagatgtggttggtttgatggggttattggtaaatatgctgtatctgtaaatggacttgattgtttagctgttacaaagttagatgtattagatgaattagatgagattcaagtttgcattgcatatgatcttgatggagaggaaatagactatttccccacaaattcagatgatttaaaaaaatgtaagccaatctttaagaaactaaaaggttggcaatgttcaactgccaactgtagaaagctttctgatctccctgaaaatgcaatgaactaccttagatttttagctgaattgatggaggtaccaattgctattgtctcattaggagccaatagagatcaaacaatagtaattgaagaccctattcacggacctaaaagagcactcttaaggtaa

SEQ ID NO: 316121 - DNA, 570 bp, Unknown
  Bacterial polypeptide expressing nucleotide sequence isolated from the Sargasso Sea
gatgaaaaatattgtagtagtgggatcacaatggggagacgaaggaaaaggaaaaattgtagattggctatctgaagaagcagatgtaattattagatttcaaggaggtaacaatgctggccataccttagtaattgatggggttacttataaacttagattacttccctcgggcattgtaagaaaaaataaaatttctataataggaaatggagttgtgcttgatccttgggcgttaattgaagaaattaatgaattaaaatctaaaggaatagaaataaatcaaaataatttgataatatctgaatccgttagcttgattttaccatatcataaagaacttgatgaaattagagaagatgaagcaggaaaagaaaatattggaacaacaagaagagggatagggcctgcttatgaagataaagttggcagaagatcagttagattgatggacttatttgatccggataacttagataaaaagttagagaaagcgttacttcatcacaattctattagaaaaggaattggcaaggaaatttacaagatatctgaacttaaagaaaaatt

SEQ ID NO: 316122 - DNA, 886 bp, Unknown
  Bacterial polypeptide expressing nucleotide sequence isolated from the Sargasso Sea
ccgcgacctcgacggtctgcgcgaggacgcgtcgggcgccggcaagatcggcaccacccgtcgcggcatcggcccggcctatgaggacaaggtcggccgccgcgccatccgcgtctgcgatctggcgcatctggacgatctggaccttcagatcgatcgcctgaccgcccatcatgacgcgctgcgcgccggtttcggcgaagcgccgatcgaccgcgcccagctgatggccgacctgaccgaaatcgccgccttcatcctgccgttcgtgaagccggtctggctgacgctcaacaaggcgaagtcggaaggcaagcgcatcctgttcgagggcgcgcagggcactttgctcgacatcgatcatggcacctatcccttcgtcacctcctccaacacggtggcgggtacggcggcgagcggcaccggccttggccccaatgccgccggtttcgtgctgggcatcgtgaaggcatacaccacccgcgtgggttccggtcccttccccagcgagcaggaaaacgacattggccagcgccttggcgaacgtggccatgaatttggcaccgtcaccggccgcaagcgccgctgtggctggttcgacgcggtgctggtgcgccagtcggtcgcggtttcgggcgtcaccggcattgcgctgaccaagctggacgtgctcgatggctttgaagagctgaagatctgcgtcggctacaagattggcgaccagagcttcgactatctgcccgcccatgcgcaggatcaggccaaggccgagccgatctacgaaagcattgccggctggagcgaaaccaccgccggcgcgcgtagctgggcggagcttccggcacaggcgatcaaatatatccgccgcatcgaggaactgatcggc

SEQ ID NO: 316123 - DNA, 505 bp, Unknown
  Bacterial polypeptide expressing nucleotide sequence isolated from the Sargasso Sea
caagagatggatgaaataagggaaaatgcagcaggaaaagataaaatagggacgacaaaaagaggtatcggaccatgttatgaagataaagttggaagaaggtctataagagttatggatcttagatctgaaagtaatttaaatgcaagattagagaaagttttacttcatcataatgcaataagaaaaggtttaaaaaaaaaagtttataaaaaagacgagttaaagaaaagattgttagaaatcgctcctaaaattttaaagtttgctcaaccaatttggcttaagtttgaggattttaaaaaagagagaaaaaaaatattatttgaaggagctcaaggtatacttttggatgtagatcatgggacgtatccttacgtgacatcatctaatactgtccccgctatggcagctactggcacggggtctggcccaaatatgattggatatatattaggcatcacaaaagcatatactactagagtaggaagtggtccattcccca

SEQ ID NO: 316124 - DNA, 850 bp, Unknown
  Bacterial polypeptide expressing nucleotide sequence isolated from the Sargasso Sea
ggcattaggataagagacttgcttaataaggaaaggctgagtaatgtgatcgaaattccattaagagaaaaaaacggtctactagaaaaaatctatggaattaagcctcttaaattagaggaaattgttgaagaatatcttgactatgggcaaagattatcaaagcatgttgttgactgtacgagaactatccatgcagcctcaaaaaacaagaagaatattcttttcgaaggtgctcaagggactttacttgacttagatcatggaacttatccttttgttacctcatcaaaccctatatcaggaggggcatgcattggggctggagtgggtcccactttaattgatagagtaatcggtgttgcaaaagcttataccacaagagtaggtgaagggccattcccaacagaattgcaagggagtattaatgatcaactatgtgatagaggtagtgaatttggaaccactactgggagaaggagaagatgtgggtggtttgatggagttattggtaaatatgctgtatctgtaaatggccttgattgtttagccgttacgaaacttgatgttttagatgaattagatgagatacaagtttgcgttgcatatgatctcaatggagaggaaatagactactttcccacaaattcagatgacttaaaaaaatgtaagccaatcttcaaaaaattaaaaggttggcaatgttcaactgcagattgcagaaaactatcggatctcccagagaatgctatgaattatctaagatttttagctgaattaatggaggttccaattgccattgtctctttgggggcgaatagagatcaaactatagtaattgaagatccaa

SEQ ID NO: 316125 - DNA, 619 bp, Unknown
  Bacterial polypeptide expressing nucleotide sequence isolated from the Sargasso Sea
ctgctggatatcgaccacggtacctatccgtacgtaacttcctccaacaccaccgcaggtggcgtggcaaccggctccggcctgggcccacgttatgtggactacgttctgggtatcatcaaagcttactctactcgtgtaggtgcgggtccgttcccgactgaactgtttgatgacgttggcgagttcctgtgcaaacaaggtaacgagtatggtgcgaccaccggtcgtcgccgtcgtaccggctggctggactccgttgctgtacgccgtgcagtacagattaactccctgtctggcttctgcctgactaaactggacgtactggacggtttgaaagaggtgaaaatctgtgtcgcttaccgtatgccggatggccgtgaagtaacgactactccgctggcagcagacgactggaaaggtatcgagccgatttacgaaaccatgccgggctggtctgaatctaccttcggcgtgaaggaacgtagcggtctgccgcaggctgcactgaactacatcaagcgtattgaagaactgaccggtgtgccgattgatattatctcaactggcccagaccgtactgaaaccatgatcctgcgcgacccgttcgacgcataat

SEQ ID NO: 316126 - DNA, 888 bp, Unknown
  Bacterial polypeptide expressing nucleotide sequence isolated from the Sargasso Sea
ctttattggccaaggggtaattctttcacttgattcattgcttaaagaaattcaagaaatagaagaaaagggaataggcctgcacgggaaacttaaaataagcaggtactgcagcttactgttgcctattcatgcaaaaatagaccagctcagagaagacaacaaaaatgccattggaacaaccagaagaggtattggtccagcatatgaggacaagacagcgagaagaagcataaaagcttttgaccttgaaaatgaagaggtattaaagaaaaaagttattgatcttgtggattactacaactatcaaataaagacgattcataaatcagaagaatttgatgctgatttagtcttcacagaattattaagcaactatgagaaagcatccaaatatttcggcgatgtaaccgattctcttgaagacatttacgaaagtggtgaagcaattctctatgagggtgcacaaggaactttattagatgttgattatggaacatatccatatgttacatcctcaaatacattagcaacttccgttggaattggctctggatttcccaaaagcattttttctgatgtgctcggagttgcaaaagcatataacactagagtcggggagggcccatttccgacagagcttttttgtcaggatggaaaaaaaattgctgatataggcaatgaatatggagctacaaccggcaggccaagaagatgtggatggcttgatttagtagcgttaaagtactctgcaaagttaaacaatctaacaagtctttgcataactaaacttgatgttctggactcatttgaaaagattaaagtatgtgttggttatgagattgagggaaaagaggtaccatttaagtcaaggttgctgcatcaagc

SEQ ID NO: 316127 - DNA, 805 bp, Unknown
  Bacterial polypeptide expressing nucleotide sequence isolated from the Sargasso Sea
aatgataagttgatgcaagctttagatttttataactcagtttttaaacattcatttagtgcttctcaaatcgatttaaatgaattggtagatttaaatttaaagcaagctgaacaattaaaaccttatgtcggaaatgtaatagaagaaattaggaaattacaaaaatctaaaaagaaaatactttatgaaggcgctcaaggtgcccttttagatgtaagcctaggtacttatccatttgtaacgtcgagcaacttaattggaggcgttccagctggtgtgggaataagtccatctgaaattgactatacgataggaattacaaaggcttatacaactagagtcggtgaaggcccttttcctacagagttatttgatgatatgggaatttacttagctgaaactggcggagaggttggagctactactggaagacctaggagatgtggatggttagatggtttccttctaaagaatatggttaaagtgagtggtgtagacggactctgcttgactaagatagacgtcttggacggcctagagaaaattaagatatgcactgagtattctagtgaacttactgaagctgaaatcatagaaactatggatctagagctagcaataccaaaatatctggaaatgccaggctggtctaaatctacagcaggacaaacttcttataaccagcttgatgacaacgctaaatcttttattgagaaaatagaagaaatctcaggggttcctgttatcatgatttcaactggaccaaaacgagaagaaaggattattagacaagatatataag

SEQ ID NO: 316128 - DNA, 746 bp, Unknown
  Bacterial polypeptide expressing nucleotide sequence isolated from the Sargasso Sea
aaatcagttaaaaaaagatttattaaaaatagctcctataatattaaaattctcccagccagtttggaaaaaattagatgaatttaagttgacaggtaaaaaaatactatttgaaggtgctcaaggtattttgttagatgtggatcatggaacatatccatttgttacttcatcaaatactgttgcatcctctgctgctactgggactggatgtggtgtaaatgctattaattatgttctgggtattacaaaagcttatacaactcgagtaggagaaggaccatttcctacagaattaaaagataaaaccggtgagatcctaggtacaagaggcaaagagtttggaacggtcactagtagaaaaagaaggtgcgggtggtttgatggagttttagttagacaaacaataaaaatttcaggaataaatggtatagcactaacaaaattagatgttttagatgaattagaagaaattaaaatgtgcgtagggtatgagctaagagggaaaaaaatagattatttaccggctgctgtggaagatcaattagaggtgaaaccaatatacaaaagctttaaaggatggaaaacttcaacaaaaggaactaaatcttttaaagaattaccaaaaaacgctcaaaactacatagaaggtttagaaaaatttatagaaacaaaagttgcaagtatttctacaagtcctgagagaaaagataccatcttgattgaaaatcctttttcattttaat

SEQ ID NO: 316129 - DNA, 598 bp, Unknown
  Bacterial polypeptide expressing nucleotide sequence isolated from the Sargasso Sea
tggtacatatccatttgttacgtcctctaataccgtagcttctgctgctgcaactggatctggttgcggactagattctataaactatgttttaggaataacaaaagcttataccactagagttggagaaggtccttttccaactgaattgaaagataaaattggaatattattaggtacaaaaggaaaagagttcggaacagtgactaatagaaaaagaagatgtggttggtttgatggtgttcttgtcaaacaaagtataaaaatctctggaattaatgggatagcactcacaaagctagatgttttagatggattaaatgaaattaaaatgtgtgttaaatatgaaattaatggaaaagaaatagactatttacccgcttcttcagaagatcaaaagaaagttaaacctatttataaaacatttcctggatggaaagagccaaccaaaggtattagaaatttagaagatcttccagataatgcgaagaaatacgtgcatgccgtagaagattttataggcgctaaaatttcaagtatttcaacaagtccagaaagagaagacaccgtcctcttggaaaatccttttggagattaa

SEQ ID NO: 316130 - DNA, 776 bp, Unknown
  Bacterial polypeptide expressing nucleotide sequence isolated from the Sargasso Sea
cggacatactgttattgttgacggcgacacctacaaactccatcttttcccctctggagtattatatgaatatccaaccagcataattgggaatggggttgtgattgaccctgctgcattaattaatgaaataaattacttaaaagataaaggtgtaaaccccaagttgaaaataagtgacagagcgcatgttattatgccatatcacattgaaatggatatagcactaacaaagcaccaagggaaattagcggcgggcagtacaaaacgaggtattgctccggtgtatggagataaaatgtaccgacatggtatacgtatgatcgatcttacagagcctgatgttttcagcgaaaagatagacaaagcatatagctttaatcaaacagtgatagaagcatttggccacagcattgaacaaaataaaaaaagcatttatgagcaatacatcgaatatggaaaaatactaagcccctatatatctgacgtttcagtagatctttttaatgctcacaaaaaaggagcctcaatactatttgagggtgcgcaaggcattagcctggacgttgaccatggtatttatcctcacaccaccagtagcaacacagtcgctggtcatgtagctgccgggacaggtgtaagcttcagagacattcacagaattatcggtgtcaccaaggcatacctcagtagagtcgggcaaagccccctccctacagaactcagtggcgtagatgctgaaacgctacgcgaaaaaggaggagaatatggtacta

SEQ ID NO: 316131 - DNA, 658 bp, Unknown
  Bacterial polypeptide expressing nucleotide sequence isolated from the Sargasso Sea
gggatcctcacgccccgatgtgacacccgtgatcggcaacggagtagtcgttgaccccgaagtactcttcgaagagattgaagggttgcgccaacaaggcgtcgacacctcgaagctcgtgatcagctcaaacgcgcacctgatcacgccgtaccacgtcacactcgacaaggtcaccgagcgattcttaggcaagagcaagatcggcacgacagggcgaggtatcgggccgacctacagcgacaagatcgcccgcatcgggatccgggtgcaagacgtcttcgacgagtcgattctgcggcaaaaggtcgagggggcgctggccaacaagaatcaagtactcgtcaaagtcttcaatcggcgagcgatcgaaacagatgcgatagtcgaagggctactgacgtacgccgatgcgttacggccgatggtccgggatacatcgctgcttctgaacgaagcactcgatgccgacaaggtcgtcctccttgagggtggtcaagggacccttctggatgtcgaccacggaacgtatccgttcgtgacatcgagcaacccgacatcgggaggcgcgtgcacaggaagtgggatcgggcccactcgaatcacgcgtgtgatcggaattctgaaggcgtacaccacccgtgtggggtccggaccg

SEQ ID NO: 316132 - DNA, 908 bp, Unknown
  Bacterial polypeptide expressing nucleotide sequence isolated from the Sargasso Sea
aatgggggttgtaattgaccctaaggccctgttggatgaagtttcctatttaaaaacaaaaggtgtaactcctaatttattaataagcgaccgtgcacatataattatgccatatcataaaatgttagatttagctcttactaaccatcaacaaaaacttgctgctggcagcactaagcgcggtattgcacctgtttatggcgacaaaatgtttcgtaatggtattaggatggttgatctgctggagcctaatatttttcatgagaaattaaataaatcttttattttcgcgaccaatcttttatccgctatatcttcatcagatttcgatttagattttgattctgtttataatgattatttaaagatgggtaaacttttatctccttatatatctgatatttctcttgaactttataatgcttacaataataataaaactatcctttttgagggcgctcaaggtatttcactagacgttgatcatggcgtatatccttatacaacatctagcaatactattgcaggaagcatttcaacgggcaccggagtaagctatagagacatacatagaattattggtgttactaaagcttatttaagtcgagtgggggaagggcctctcccttccgaggttcatggcgaggaagcgattcagctaagagaaaaaggtggagaatatggcactacaaccggtcgaccgcgtagggttgggtggttggaccttgttcaggtaaggcaggctgtacgtgtaaatggattaacggaaattgcgctaacaaaacttgacatattgtctaacacaaaggagctttcagtttgtacagaatatgatataaacggtgtcaaagaatctgaaatccctgcaagcttacataagtttcgctctgcaaaaactatatataaac

SEQ ID NO: 316133 - DNA, 562 bp, Unknown
  Bacterial polypeptide expressing nucleotide sequence isolated from the Sargasso Sea
gcctcagctgctgctacaggctccggctgtggtcccaattcaataaattatgttttaggaattacaaaagcttataccacgagagttggtgagggaccgttcccaactgaattgaaaaacgaaataggggaaaagcttggaactgtgggaaaagaatttggaacagtaacaagtagaaaaagacgttgtggatggtttgatggtgttttagttagacaaacaattaaaattgcaggaatagatggtatagctttaaccaaattagatgttttggatcaactagatgaaataaaaatgtgtgttgcgtatgaagttggtaataaaaaaatggattatctgcctgcagctgtagaagaccaattaaaagctaaacctatttataaaaattttaaaggttggagatgttcaacaaaaggtataaaaaattttgatgaattgcccaaaaatgcaaaagtttatattaaagaattggaaaaatttatagaaacaaaaattgctagcatttctacaagcccagaaagaaacgatactatattaatagtagacccttttagtagctaat

SEQ ID NO: 316134 - DNA, 835 bp, Unknown
  Bacterial polypeptide expressing nucleotide sequence isolated from the Sargasso Sea
atgccagctacagtagttctaggtgcccagtggggcgatgaaggcaaaggaaaattagtcgacagaattgcagaacaagctacttgggttgcgcgattccaaggtggtaataatgccggtcatacagtagtacttggcgaccaaatactaaaattccatcttttaccgtcaggaattactagaaaagagtgcaatttggttcttggagatggaatggtaatcgatccttgggtacttgataccgaattaaaaaattggcaagaatctagtggtgaggatccacgtggagatagattatttgtcagcgaaagggcccacataattttgccctttcaccgatatttagatggcttggataagaaaattgggactacaggtcgaggtatcgggccatcatatgcagataaaataaaccgaataggacttagatttggcgatgttgaggaagttaaagatgatgatgagtggtatgaatcaaccgttgagcgaatgaatgcttcattgactgctgctggttgtcaagatagaattactaaagatgggctcaaaagcgatgttaactggatttgggataattattcaagttgtatcaacaacactggattgatgctagataatgcattgaagatgaatgaacatgtgattcttgaaggtgctcagggatgtttacttgatattgatcaagggactttcccgtatgttacatcatcagttacctcaagagggaacgcctcacatggtgcgggtatacatccaggtcatattgaagaagtaattggaattaccaaggcctacatcactagagttggtaatggtgcaatgcccacagaactac

SEQ ID NO: 316135 - DNA, 778 bp, Unknown
  Bacterial polypeptide expressing nucleotide sequence isolated from the Sargasso Sea
cagaaaagggctaggaaaaaaaatttttgaaaaaaatcagttaaaaaaagatttgttaaaaatagctccattaatattgaaattctcccagcctgtatggaaaaaattagatgaatttaagtctaagggtaaaaaaatattatttgagggagcacaagggattttgttagatgttgatcatggaacttatccttttgtgacatcttcaaataccgttgcctcttctgccgcaacaggcacaggatgcggtgtaaatacaattaattatgttttaggtataacaaaagcttacacaactcgagttggagagggaccatttccaacggagcttaaagatgggtttggagaaattttaggctcaagaggaaaagaatttggaaccgtaacaagtagaaaaagaagatgtggttggtttgatggggttctagtgagacaaactataaaaatttcaggtataaatggcatagctttaacaaaactagatgtactcgatgagctagaagaaatcaaaatatgcataggatatgagttaaaaggtaaaaaaatagattatttgcccgcagcagttgaagatcaattacaggtaaaaccaatttataaaatttttaacggatggaagacttcaacaaaaggtattaaatcttttaaagatctacctaaaaacgcccaagaatacgtaaggggtttagaaaaatttatagaaactaaagtagcaactatttcaacaagtcctgagcgaaaagacactattttaatcgaaaatcccttcacaatttga

SEQ ID NO: 316136 - DNA, 540 bp, Unknown
  Bacterial polypeptide expressing nucleotide sequence isolated from the Sargasso Sea
attgagggggcacttcctcgtgagtcataacgtggtcatcctcggcacccagtggggcgatgagggcaaaggcaagatcgttgatttgttgaccgagcaggccgatgcggtggttcgctttcagggtggccacaacgccggccatactctggtgattggcggggaaaagacggtgctgcacctgatcccatcgggcgtgctgcgcgggggggtgcagtgtttgattggcaatggtgtggtcctctcgcccgaagctttactcaaggaaattgacacgctcgaatctagcggtgtgcccgtgcaggaccgcctcaagatttccgctgcgtgtccattgattctgccttaccacgtggcgctggatcaggctcgagaggcacggcggggcgaaaacaagatcggtaccacgggccgcggtattggcccgtgctatgaggataaggcagcgcgcagggcgctccgactgggcgactttcgcgactccgcgcgattcgctgcgtctctggaggaagtgctggactaccacaatcatgtcctgca

SEQ ID NO: 316137 - DNA, 558 bp, Unknown
  Bacterial polypeptide expressing nucleotide sequence isolated from the Sargasso Sea
aaatattttctggaactggttttagtaatagaaataatcataaaattcttggaataactaaggcatatactacaagagtaggagcaggaccattccccacggaattacatgatagtattggcgactatttgggagaaaaaggtcatgaatttggtacagttacaaaaagaaaaagaagatgcggttggtttgatagtgtgcttcttaaacaatcaattaaattaaatggaattaccgatgttgttcttacaaaactagatgtgttggatgaattaaaagagattaacatatgtattcgttacgatattgaaggtgaacaatatgattttttaccaagtgaagagtttttatacgataaaattaaaccaatatacaaaacaataaatggctggcaaacatctactgctggtataaataatattagagatttacctaataatgcaatcagatatataaatttacttgaggaattaattgaagcaagaatttcaatagtttctacaggcccagatagaaaagagactatagatataaacggtattttaactaatatttaga

SEQ ID NO: 316138 - DNA, 655 bp, Unknown
  Bacterial polypeptide expressing nucleotide sequence isolated from the Sargasso Sea
ggacagcagttattatttgagggggctcaggggactttacttgatgtcgattttggaacctacccttacgttacctcttcttccactacctcgggaatggcaagcataggaacaggagttccctttcatgctataaactttgttttagggattgttaaggcttacacaactagagttggtgaaggtccgttcccaactgaattatatgacaaggacggaatgcatttggcaagcgtgggtcacgagaagggcaccgtgaccggacgaaaacgtcgttgtggttggttcgacgcagttttggtaaagcagagctgcatagtgaacggagtaaaaggaatagctctgactaaattggatgtcctgtgtggtctgaaacaaataaaaatttgtgtgggttataatctggatggaaagaaactagaatactttccctcgcagcaggcccgacaagaaaaaataaaaccaatttatgaagttttggatggatgggaagagtctatcgtaggggtgaagcgcctattggatttaccccaaaatgctatccgttatattaaaaggatcgaggaactaattaactgcaaagtagccattctttcctttagccctgagagagaagatacaataatggttcagaatccatttgaggtaagataat

SEQ ID NO: 316139 - DNA, 640 bp, Unknown
  Bacterial polypeptide expressing nucleotide sequence isolated from the Sargasso Sea
aattctatttgaaggcgctcagggtttcttgctagatattgattatggctcttatccatttgtcacgtcatcaaacactcattctagttatgctgcaattgggagtggtttgaatcctaatagaataaatcatgtaatggggatcactaaagcgtatacaactcgagttggttcaggaccatttccaacagaggaagataatgatataggacaaaaacttggcgaaattggtcatgagtttggcacagtgactaatagaaggagaagatgcggttggtttgatgcggttcttgttagtcaagctgttcaacaatctggcatcaatggaatagcgttaactaaattagatgttttagatacatttgaagtattaaaagtttgtgttggctatgagataaaaggtaaaaaaattgattattttcctagttctgagtttgatcaagctaatttaaaacctatttatgaggaaattgaaggttggaattcaaaaactgctggaagtcaaaatataaaagaactgcctgaaaaagctgtaaattatattaacaggcttagtaatttaattggagctaaaattgacttggtatcaacaagtccaaaaagagaagatacaattttattaaatgatgtgttcagttaa

SEQ ID NO: 316140 - DNA, 633 bp, Unknown
  Bacterial polypeptide expressing nucleotide sequence isolated from the Sargasso Sea
aatgaattccaccctaattctaggattgcaatggggtgacgagggaaaaggcaaaattgttgatgctctttgtaaagaaggctcattagtttgtagatttcaaggcggacataacgctggtcatacaataaaggttgatggttcccaaaaagttcttcatttaatcccttcaggaattatgcactcatcctcgagctgcattattggtaatggggtggtgatttccttgccagcactcaatgaagaaattgagatgttgtctaatagcggcatatccgttaaaaaccgactttatatcagtaatgattgccctttaattttgccgacccatattgccatcgatcaagttcgtgataagcatgagggtattggcacgactggaagaggtatcggcccagcttacgaagataaggtaggaagaagatcattaaaatttggagatcttgctgatcttgaacttcatagatctaagatttctgagttagttaaataccacaatcaattactcactaaaatttatgatagtactcctatcgatactaaccttgtgatggaggagttaactagttttagaaaactacaaactaattttggttgtgacacttataaaatattgcacaaaagtattgaaga

SEQ ID NO: 316141 - DNA, 778 bp, Unknown
  Bacterial polypeptide expressing nucleotide sequence isolated from the Sargasso Sea
attatgccctatcatataaaacttgatcaggccgaagaaaactatagaggaagcaaagcagttggaacaactggaagaggaattggtcctgcatactctgataaagtctctagaaatggaatcaggataggagatttaagagacgtagattcattacaaaaaaaaatctctaaaaacttaaaatttaagaataaaatattaagagaaatttatgaaacagaagaaatttcagaaaaagaaatctttgaaaaaatagataattggcataataaattatcaaaatatatagctaatacagaacaaataatccatagaaatattgaagaaaaaaaatctattcttctggagggagcacaaggtgcactacttgatattgatcatggaacttatccttacgtaacttcatctaactcaatttcaggaggatctttgacagggcttggaattggagccaaagaaatagataaggtaatgggtgtattcaaggcatttacaactagagttggagaaggaccatttccaactgaaatttttggagaaaatgctgaaaagatcagagaaattgctggagaattcggagctactacaggtaggcctagaagaataggctggtttgatgctgttgcagcaaaatattcaactaaaataaatggtttagattccatagtcataactaaattagatatactcgatcattttgaaaaaattagagtctgcactgcttatgaatataagggagaaaaattagatttcttcccaacagatccagaaatattat

SEQ ID NO: 316142 - DNA, 408 bp, Unknown
  Bacterial polypeptide expressing nucleotide sequence isolated from the Sargasso Sea
tatgaaaaacgttgttgttgtaggatcccaatggggagatgagggtaaaggcaaaatagttgattggctatctagtgaagctgatgttgtcataagatttcaagggggtcataatgctggacacacgttagtcattaagggaattacatataaactgagacttcttccttcaggtattgttagaaaagacaagatttctgtaattggtaatggagtagttattgatccatgggctcttttagaggaaattgaagaaattaaatccaaaggcgtaaatattaatgagaagaatttaattatctctgaatcagcaaccttaatacttccatttcacaaagaaatggatgaaataagagaagatgcagctggaaattctaaaataggaacaactagaagaggtattggtcc

SEQ ID NO: 316143 - DNA, 841 bp, Unknown
  Bacterial polypeptide expressing nucleotide sequence isolated from the Sargasso Sea
cttgcggtccgaaaaaaacttagacttaagattagagtctgtgcttattcatcacaacgcaattagaaaaggattaggaaaaaaaatttttgaaaaagaggaattaaaatcaaaattattagaaattgctcctaaaatattacaatatgcacaacctgtttggcttaaaattgatgaatttaagaaacaaaaaaaaagaatattatttgaaggagctcaaggaattttattagacgtagaccatggcacttacccctacgttacatcttctaatacagttgcatcaaatgcagcaactggctcaggatgtggccctaactcaattaattatgttttgggaattactaaggcctatacaacaagagttggagaaggtcctttcccaacagagttaaaagataatattggtgaattattgggaactcgaggaaaagaatttgggacagttacaagtagaaaaagaagatgtggttggtttgatggagttttagtaagacaaacgataaaaatttcaggcatagatggaatcgctcttactaaacttgatgtccttgatgaacttgatgaaattaagatgtgtgtccaatatgagatagatggaaaaaaaatcgattacttacctgctgcgctagaggatcaattaaaaatcaaacctatttataaaactttttctgggtggaaaaaatcaacaaatggaattaaaaatattaaagaactacctgataacgcacaaaaatatgtatttgccattgaggattttattggtgcaaaaatatctagtatttcaacaagccctgagagaaaggatacaatacttgtcgaaaatccttttgagatttaa

SEQ ID NO: 316144 - DNA, 961 bp, Unknown
  Bacterial polypeptide expressing nucleotide sequence isolated from the Sargasso Sea
cacattggtaatcgacggtattacttacaaattactattattaccttctggaattgtaagaaaaaaaaaaatttctgtaatagggaatggagtagtaattgacccttgggcactcattgaagaaatagacgaaataaagtcaaagggagtaaatgtagacgaaaacaacttgataatatctgaaacagcaacactaattcttccatttcatagagaaatggatgagataagagaagatgtagctggaaattcaaaaataggaacaactagaagaggaattggacctgcatacgaagataaagtaggaagaagatcaattagagtaatagacttagcatcaaaggaaaatcttgataagagattagacggtgtattatttcatcacaatgcaatcagaaaaggtctgggcaaaaataattttgaaaaagaaaatctaaaaaaagaattattagaaattgctccaaaaatacttaaattttctcaaccagtttggaaaaaaattgaggaatttaaaaaagaaaataagaaaattttatttgagggtgcgcaaggaattttactagatgtggatcatggaacatatccatttgtaacatcttcaaataccgttgcatcatctgctgcgactggttctggttgtggtccaaattctataaattatgttttaggaataaccaaagcatatacgacaagagttggggaaggaccttttcccacagagttaaaaaatgatattggagaaattctagcgaacaaaggtaaagaatttggtactgtgactagcaggaaaagaagatgtggttggtttgatggagtcttggtaagacagacaataaaaatttcaggcattaatggaattgctcttaccaaactagatgttctggatgaattagaggaaataaaaatgtgtattggatatgaaatgaaaggtaaaaaatttattttctacctgcgggaatag

SEQ ID NO: 316145 - DNA, 745 bp, Unknown
  Bacterial polypeptide expressing nucleotide sequence isolated from the Sargasso Sea
caaaatatacaaattacgattattgccttcaggcatcgttagaaaaggcaagatttcgataattggaaatggggttgtgatagatccctgggctcttttagaagaaattaaagatattaaaaaacaaggcgtggaagttaatgaagaaaatctaattatatcagattgtgctaatcttattttgccatttcataaagaaatggatgaaataagagaagattatgctggtaaaggaaaaattggcactacaagaagaggtattggtcctgcttatgaagataaagtcgggagacgctcaattcgtcttatggatttaaattctgaaattaatctagacagaagattagataatatattatttcatcacaatgcgataagaaaggggcttaataaaaagatttataaaaaagatgatctaaaaaaagaactattaaagatcgctccagaaatacttaaattttctcatccagtttggcttaaaatagatgaaatgaaaaaaaatagaaaaaaaatattatttgaaggagctcaaggaattttattagacgttgatcatggcacttatccatttgtaacttcatcaaacacagttgcatcaatggcagcaaccggaacaggttgtggactcaatacaattaattacgtcttagggattaccaaggcttacaccacaagagttggtagcggtccatttccaacagaactaagtaacaaaattggtaatttgttaggtgaaaaaggaaaa

SEQ ID NO: 316146 - DNA, 490 bp, Unknown
  Bacterial polypeptide expressing nucleotide sequence isolated from the Sargasso Sea
gatgaaaaatgtagtcgttgtaggttctcaatggggggacgaaggaaaaggtaaaattgttgactggctttccagtgaagctgatgttgtaatcagatttcaaggtggaaataatgctggtcatactttggtaattgatggcactacttataaattaaaattattgccctcaggtatagtaagaaaaaataaaatttctgttataggtaatggagttgttgttgatccatgggcacttattgaagaaataaatgaaataaaatcaaaaggagtcgaaatagatgagaaaaatttaattttgtcagaatccgcaacacttatattgcctcttcataaagaattggacgaaataagagaaaattctgctggaaattcaaaaataggaacaacaagaagagggattggcccagcttatgaagataaaattggaagaagatctgtaagagttatggacttagcttcagagaataatttagataaaagattagaa

SEQ ID NO: 316147 - DNA, 877 bp, Unknown
  Bacterial polypeptide expressing nucleotide sequence isolated from the Sargasso Sea
aaaaagcggtaaaaacaaaattggcacaaccggcagaggtattggtcctgcatatgaagacaagatatctagaagaggaattaagttaggtgatttatttgatgcaactaaagcaaaagaaaaaattgatgcaatatgtgagtatcataattttttacttaaaaactattttggggtaagtgagcttaatccatcggacgtattagacggtttattgaatctatttgaaaggtataagaaaaatgtttgcaatactactgattacattcaagaactgattgatagtgataaaaagataatttttgaaggtgctcagggaagtatgcttgatattgatcatggcacatatccttttgttacatcttctagcacaacagttgggggaatactcacaggcacaggagtatctcataaaaacttagattatgttttaggcattgtgaaagcttataccacaagagttggtgaagggccatttcccacagaactttttgacgaaactggagaaactttatcttcccgtgggcatgaatttggtgcaaccaccggaagagcaagaaggtgtggatggcttgacttatatactttaaaaaaaattgctaaaacaaatggctttgatggaatatgtattacaaagctagatgttctagatacacttgaagagattcaagtattctttggagagaaagagggctacaaaaaatttgcgggatggaaatgtaagacaaatggcattgaggaattcaaaaaattacctctagaagcacaaacttatatcaattcgattgaggagtatctcgaaattcctattgaaattatatcaactgggcctggtagaaacgaaaatatttttcatcaaagaaaacttgatatttag

SEQ ID NO: 316148 - DNA, 544 bp, Unknown
  Bacterial polypeptide expressing nucleotide sequence isolated from the Sargasso Sea
aatgaaaaatgtagtagtcgtaggttcgcaatggggagacgaaggtaaaggtaaaattgttgattggctttcaagccaggcagacgtagttgtgcgttttcaaggaggacataatgctggtcatacacttgttatagaaaaaaaaatatttaaacttagactacttccttcaggaatagttagagagggcaaaatttctattttgggtaacggagtagtaatagatccgtgggcactattagaggagattaaagaaataaaaaaacaaggcattaatgttacttcagaaaattttatgatttcagagtcagcatcgttgatcttaccatttcatcaagaaatggatgagataagagaggatgccgctggtaaagaaaaaataggcactactaggagaggaataggcccttgctatgaagataaagttggcaggcgatcaataagagtaatggatctaagatcaaagtctaatcttgataatagattagagaatgttttattacatcacaatgcaattagaaaaggtcttaaaaagaagatattt

SEQ ID NO: 316149 - DNA, 649 bp, Unknown
  Bacterial polypeptide expressing nucleotide sequence isolated from the Sargasso Sea
atgaaaaatatagttgtagtagggtcacaatggggagatgaaggtaaaggaaaaatagttgattggttatcaagcgaagctgatgttgttattagatttcaaggaggacataatgctggtcatactctagttattgatggtgtaacatacaaacttagactactcccttctggtattgtgagaaaaaataaaatatctataattggaaatggtgttgttatagatccgtgggcgctcttagatgaaattgaagaaattaaaaataaaggcgtcgaagtaactgcaaaaaatctaataatctctgaaactgctacattaattttgccttttcataaagaaatggatgaaataagagaagactcagctggtaaaggaaagattggaacaactcgtagaggaattggtcctgcttatgaagataaagttggcagacgatcaattagagtaatggatttaatttcagagaaaaatttagatgaaaggttagtaacagttttgtcacatcataatgctattagaaaaggtcttggaagacttatttttgaaaaggataaattaaaaaaagaactattaaaaatagcaccaattattttgaaatattcacaaccagtatggaaaaagatagaccaatttaaaaacgaaggaaaaa

SEQ ID NO: 316150 - DNA, 854 bp, Unknown
  Bacterial polypeptide expressing nucleotide sequence isolated from the Sargasso Sea
tgatgaaaagaatttaattttatcagaatctgcaaatcttattctcccatttcacaaagaaatggatgaaataagagaagattctgctggaaaatctaaaattggaacaacaagaagaggaatcggccctgcctacgaagacaagatggggagaagagcaattagagtaatggatttagtttctgagagaaatttagaccacagactagaaactgttcttattcatcataatgcaattagaaaaggtttaggaaaaaagatttttaaaaaagatcaattaaagaaagatttgttaaaaatagctccagaaatattaaaattttctcaaccagtttggaaaaagatagatgaatacaagttaaaaaataaaaagatattatttgaaggggcgcaaggtattttattggatgtagatcatggcacatatccatttgttacatcttctaatactgtagcttcatctgcatcgacaggaacgggttgcggaccaaatactataaattatgttttaggtataaccaaggcttacacaactagagttggagagggcccttttccaaccgaacttaaaaaccaaactggagaattattaggcagtaaaggaaaagaatttggtactgttactagcagaaaaagaagatgtggatggtttgacggagtgctcgtgaaacaatctattaaaatttcaggcattactggagtagcactcacaaaattagatgttttagatgaattaaatgaaattaagatgtgcataaaatatgaaattaatggaaaagaaatagaccacttgcctgctgctgtagacgatcaagcaaaagttaagcctatctataaaaccttcccggggttgg

SEQ ID NO: 316151 - DNA, 786 bp, Unknown
  Bacterial polypeptide expressing nucleotide sequence isolated from the Sargasso Sea
aaaggaaaaattgtagattggttatcagaagaagcagacatcgtaatacgttttcagggaggacataacgccggtcatactttagtaatagatggcacaacctataaactaagattgcttccttcgggaatagttagagatggaaaaatttcaattattggcaatggtgtagtagtagatccctgggctctgttagaagaaatagaggaaataaaattaaaaggtattaatgttagtgaagaaaattttataatatcagaatcagctaatcttattttaccttttcacaaagaaatggatgaaataagagaagatgctgctggaaaaagtaagataggaacaactagacgaggaataggaccagcttatgaagataaagtaggcaggagatccataagagttatggatttaagatcagaaagcaatttagaccatagattggaaaatgtactacttcatcataatgcaattagaaaaggattaggaaaaaaaatttttagaaaagatcaattaaaaaaagaattattagaaatagctcctaaaattttaaaattttcacaaccagtttggcttaaaattgatgaatataaaaaaaaaggaaagaaaatattgtttgaaggtgcccagggtgttctacttgatgttgatcatggcacttatccatttgtaacatcttcaaatacagttgcatctagtgcagctacaggaactggttgtggacctaattctataaattatgttttaggaattactaaagcttatactacaagagttggtgaaggacca

SEQ ID NO: 316152 - DNA, 562 bp, Unknown
  Bacterial polypeptide expressing nucleotide sequence isolated from the Sargasso Sea
agcttctagcgcagcaacaggatctggatgcggacctaatttgattaattatgttctaggaataacgaaggcttatacaactagagttggagagggaccattcccaacagagttagaggataagattggtgaattgcttggcacaagaggaaaggagtttgggacagttactagtcgaaaaagaagatgtggatggtttgatggtgttttagtaagacaaacaataaaaatttcaggaattgatggaatcgctttaaccaaactggatgtcttagatgaattagataaaataaatatttgtatagaatacgatttaaatggtaaaaaaattgattatctcccagcagctgttgaagatcaattaagaattaaaccagtttatcaaacttttgacggatggaaaacatcaaccaaaggtattagaaatattaatgatttaccagaaaacgcaaaaaaatatatttttgcaattgaagaatttatcggagctaaaatatccagtatttctactagccctgagcgtgatgatacaattttagttgaaaacccttttgaaatttaa

SEQ ID NO: 316153 - DNA, 751 bp, Unknown
  Bacterial polypeptide expressing nucleotide sequence isolated from the Sargasso Sea
tttgaataaaacttatgaagaattagttaatatatcaaataaaattataaattttagtgctccagtatggaaaataattaatgatgctggtaaacaaaataagttcatattatttgaaggtgctcaaggatctttgcttgatgtagattttggtacttacccgtacgtaacttcatctaatacttcttcaggacaaattttttcaggtactggttttggtataaaagaaaatcataatgttttgggtattacaaaagcctatactactagagtggggtctggaccgtttgttactgaattagataacgaaataggggatcattttgttgaaaaaggtcaagaatttggaacagttacaaaaagaaaaagacgatgtggatggtttgatgctgtgcttgtaggacaatctatagccataaatggaatcactgatgttgttttaacaaaactcgatgttttggatgaattagaagaaatacaagtgtgtgttggttatgagattatggataaaaaatataactacttaccctttgatgaaaatattcataatgcattagtgccaatttacgaaactatacctggatggcaagaatcaacctttggtttaactacttgggatgatttacctaaacaagcccaaaattacataagtattttagagtctaaaattcaaaaaaatatctcaataatttccacaggtccagacagagcacataccatagatagaaataatttattgggtaataactga

SEQ ID NO: 316154 - DNA, 495 bp, Unknown
  Bacterial polypeptide expressing nucleotide sequence isolated from the Sargasso Sea
aatgaaaaatattgttgtagttggctcccagtggggagacgaaggaaaaggaaaaattgttgattggctgtcgagtgaagctgatgtagtagtcagatttcaaggagggcacaacgctggacacactttagtgatagataagaaagtatttaaattaagattattaccatctggtgtagtaagaaaaggaaaaatctctattttaggaaacggagtggtaattgacccttgggcacttttagatgaaattcaagaaattaaaaaacaaggcatcaatgtcagtccagaaaatttcatgatatcagagtcagcctcgctcatcctgccttttcataaagaaatggatgaaattagggaagatgcagcaggaaaagggaaaattggtaccactagacgtggtattggaccttgttatgaggataaggttggaagaagatcaatcagagttatggatctaagatctgagactaacttagatagtagattagaaaatgt

SEQ ID NO: 316155 - DNA, 760 bp, Unknown
  Bacterial polypeptide expressing nucleotide sequence isolated from the Sargasso Sea
atgaataaagcaattatcggacttcagtggggagatgagggcaaaggtaaaattgtagactttctttctgaagattttgatttagtcgtaagataccaaggtggaaataatgctggtcataccgtaatggttgataatattacttataaattaaaccttataccatcaggtgtaatacgaggaaaaaaatgctttcttggtcaaggtgtggtacttgaccctaatcacttttctaaagagtatgatcaaattaaacaaaaggtcaataatcctcaaatatttctatcatcaaatatatctctaattttagattatcataagaagttagatataataaatgagtctattttaaatagtaaaaaaaaaattggcactacctcaaagggtattggtcctgcatatcaagataaagttggaagaaaaagtattaaactttatgatttgaaatcaagaaatattattgaagaaaaattgtattcaataaagaagttttatgaccctattttagagagttttagtgaagataaaattaatgttgagaaaacagcccaagttttaatgaatttttacgatttagttaaagaactaatcgtagataattccctcattaaaaaagaatttaaaaataagaaaatattatttgaaggtgctcaaggagcattacttgacttagatcatggttcatacccctatgtaacatcttcaaatactgtttcatctaatattgctattggttcagcgttacaagttgataccaaac

SEQ ID NO: 316156 - DNA, 391 bp, Unknown
  Bacterial polypeptide expressing nucleotide sequence isolated from the Sargasso Sea
ccgtcgtcgtcgtaccggctggctggatatcgttgcgatccgtcgcgccgtgcagatcaactccctgtctggcttctgcctgaccaagctggacgttctggacggcctgaaagaagtgaagctctgcgttgcctatcgtctgccggacggccgcgaagtgacgaccactccgctggctgctgacaactgggaaggcattgagccgatttatgaaaccatgccaggctggtctgaaaccaccttcggtgtgaaaacgcgcagcggtctgccgcaggcagcgctgaactatatcgcgcgcattgaagagctgaccggcgtgccggttgatatcatctctaccggtcccgaccgttctgagacgatgattctgcgcgacccgtttgacgcataa

SEQ ID NO: 316157 - DNA, 544 bp, Unknown
  Bacterial polypeptide expressing nucleotide sequence isolated from the Sargasso Sea
attggccaatgttgttgtaatcggagcccaatggggtgacgaaggaaaaggtaaaataacggatttacttagtcgttcggcagacgttgtcgttcgctatcaagggggagtaaatgcaggtcatactatagtcgtcgatgataaagtcttaaaattacatttaattccatcagggatactttataaaaatacttcttgtctaattggttcgggtactgttgtagatccaaaaattttgcttaaagaaattgacatgttaattgataatggaattgatatctcaggattacaaatttcatcaacatcacatgtaacaatgccctaccaccgaatattagatgaagcgatggaggctgatagaggttcaaacaaaatagggacaacaggtcgtgggattggcccaacttatgcggataagtcacaaagaaatggcattaggataagagatttactcaacaaggaaaggctaagtgatgtgatcgatattccattaagagaaaaaaacggtctactagaaaaaatctatggcattaaacccacttaa

SEQ ID NO: 316158 - DNA, 420 bp, Unknown
  Bacterial polypeptide expressing nucleotide sequence isolated from the Sargasso Sea
tatgtctttagatctattgctaggtcttcaatggggagatgagggtaaaggaaaaatagttgatgcaataacctctaattatgatattattgctagattccaaggaggacctaatgctggacacactattgagtttgatggaaataaacatgttctacatactattccatctggtatcttcaacaaagattctattaatataattggaaatggagttgttattgatcctggaatttttcttaaagaaattgaaggactaaataaatataaaattgatcttagaaaaagtttatttatttccaaaagagctcatatcattttgcctactcataagattattgatgccacatctgaagcatcaaaagggaaaaagaagattgggctcacactaaaaggaataggacctacttatatggataa

SEQ ID NO: 316159 - DNA, 253 bp, Unknown
  Bacterial polypeptide expressing nucleotide sequence isolated from the Sargasso Sea
atgtctaacaatacccttatccttggtctgcaatggggagacgaaggaaaaggaaaaattgttgatgccttaagcgaaaacgtttatgcagtatgcagattccaaggtggtcataacgctggacacacaataaaagtagatggggttcaaaccgttcttcacctgataccatcaggagttcttcataaaaatgttaagtgccttataggaaatggagtagtcctatctcttgaggcaattaaaaaagaaatga

SEQ ID NO: 316160 - DNA, 698 bp, Unknown
  Bacterial polypeptide expressing nucleotide sequence isolated from the Sargasso Sea
gttaaacgaaacagttttcaaaaaaaggttaaaaaagtcctttgattttaataagggtcttgttgaaaaagtttttgaacagccttttaactattcttatgaagaaattttagaagaatatttggggtatgctgaaacaatacgaccatatgtaaaaaatgtaacggaagagctaacaaatgcggttaaagaaaacagaactattctgtttgaaggggcacaaggtgcctgtttagatattgaccatggtctttacccgtatacaacaagcagcaacacggttggtggacacatagaggcgggcgccggggttggcataaacaaagaaaaacatgttgtggggattgcaaaagcatatttaacctatgttggtaggggcccttttccaacagaaattcagtcttctttgggagaaaaaattagagaaattggacaagaatatggaacaacaactggcaggccaagaagagtggggtggattgatttagtacaattaaaacatgccaatcaaattaatgcgtttagcgagctaatattgaccaaggtggatgtgctttctggtttttcagaaataaaggtctgtgttgggtataaaattgatggggaaacaattaattatgtgccatcagatctagaaagcttcacaaaaattgagccaatatatgagtctcttaaaggctgggcctctttgcctacaa

SEQ ID NO: 316161 - DNA, 844 bp, Unknown
  Bacterial polypeptide expressing nucleotide sequence isolated from the Sargasso Sea
agaagaggtattggacctgcatacgaggataaagttggaagaagatcaattagagtcatggatttaagatcagaaaaaaatttagatcaacgattagaaactgtgttaatgcaccataatgcgattaggaaaggattaggtaaaaaaatatttgaaaaaaaacaacttaaggaagatcttttaaaaattgcaccagaaattttaaaattttcagaaccggtgtggttgaaaattgacaaatttaaaaaacaaaagaaaaaaatattatttgagggtgcgcaaggtattctacttgatgttgatcatggcacatatccttttgtaacttcatcgaacacagttgcttcaagtgctgcaactggaacaggatgtggaattaattcaattaattatgttttaggtataaccaaagcatatactactagagttggtgagggaccgtttccaacagaactctcaaatgaaattggtgaattgctagggacaagaggtaaagaatttggaactgttactagtcgaaaaagaagatgtggatggtttgacggtgttttagtcagacaaactatcaaggtttcaggtatagatggtattgctttaaccaaactcgatgttttagacgaattagaagaaattaaaatgtgtgtagaatatgatcttgatggaaaaaaaattgactatctaccagcagccgttgaggatcaacttaagataaagccaatttataaaaaatttgagggatggaaaacctcaacaaagggaataagaaatattgatgatttacctgataatgctaaaaaatacgtattcgcagtcgaggaatttattggagcaaagaatatctagt

SEQ ID NO: 316162 - DNA, 851 bp, Unknown
  Bacterial polypeptide expressing nucleotide sequence isolated from the Sargasso Sea
attgcaccgcgtgtacgccgataaaatgtttcgtaacggtatccgcatgattgaccttttagaaccggatgtattccgggaaaaactggaaaagggatataattttgcaaaaggattaatcgaaaaatcactgggcaagcttcttgaaatgaaccaagaagatatttttagtgcttatatagaacatggaaaacagctggaagaatatatttgtgatacatctgtagaattgtacaaggcacaccagtctggtaaatccattttattcgaaggtgctcaaggtatcagccttgatgtagatcatggcatttatccttttaccacttcttcgaatacagccgccggccatatttctactggtactggtgtcagtttcagggatattagccgtatcatcggtgtggtaaaggcctatgtgagccgtgtgggtgaaagtccattgccatcggagattcaaggtgaggatgctgaaatcttacgagaaaagggtagtgaatacggaacgactactggccgtccgcggcgtgtgggttggctggatctggtacaagtccggcaggctgttcgtgtgaatggcctcaccgaaatagctcttaccaaattagatgtattaaatggctttgagaaattacttgtttgtattgcctatgatgtagatggtacccaggtcacagaaatgccagccagcctaacggcttaccgcaaagctaaacctatctataaaacattgaatggctggggaacactaacgggaaatatctgggaaaaaggatatcatgctctccctcagactttacagaattatatagattttattgaacatgaagtggagtgtccagtaaaaattgtat

SEQ ID NO: 316163 - DNA, 535 bp, Unknown
  Bacterial polypeptide expressing nucleotide sequence isolated from the Sargasso Sea
atgtggaccacaaaatattaattatgtgttaggtataactaaagcgtataccacaagagttggcgaaggtccttttccaacagaactaacagataaaatcggtgaagagttaggtattagaggaaaagaatttggaactgtgactagcagaaagagaagatgcggatggtttgatggggtgttagttaggcaaactattaaaatttcaggtattaacggaatagcattaacaaaacttgatgttttagatacacttgaggaaatcaaaatgtgcgtaggttatgaaattgatggaaaaaaaattgattatcttcctgcgtctttagaggaacaaatcaaggtaaaaccaatttataaagtctttaacggttggcttcaatcaacaaagggtataaaaaatttagaagagttacctcaaaacgcaagaaattacattaaagaattagaaaattttattgatgctaaaatttcgagtatctcaactagtccagaaagaaatgatacaatattaatagaggacccttttaaggcctaa

SEQ ID NO: 316164 - DNA, 847 bp, Unknown
  Bacterial polypeptide expressing nucleotide sequence isolated from the Sargasso Sea
aatgttttatactgttattggaacacaatggggagatgaaggtaaaggaaagatagttgattggctatcatctaaagttgatattgtagtacgtttccaaggtggaaataatgcaggacatacaattaaagttggtaaaaaagtttttaaactaaatttattaccttcaggaataattcaaaataaaaaatgtataataggtaatggagtcatactagatccttgggctttacttgaagaaataaaaaatttaaaatctaaaggtattaaaataaatactaaaaatttatttgttgccgaaaatatttgtttaattcttcctattcataaattaattgatcaacttaatgaaaaaaaattaggaaaaaaaaatattgggacaacaaaaaaagggattggtcccgcttatgaagataaagtaggaagaagagctgttaggttatgtgatttaaagtataaaaaaatatttaataataagatattagaaataattaaatatcatcaacctaaatttgttaacttgaataaaaaagttaatgcaaaaaaaattattaaggatttgtctgatatatcaaaagaaattagcaagtttagttttcctgtatggaagatgattaatcaagcaggaaaaaataataaaaaaattttatttgaaggtgcacagggtactttgttagatgttgattttggcacctatccatacgttacttcttctaatacttcttctggtcaaattttttcagggacaggttttagtattaaagaaaagcacaaattattaggtataactaaagcctatactactagagtagggtcaggaccttttcctactgaattaaataatgaa

SEQ ID NO: 316165 - DNA, 376 bp, Unknown
  Bacterial polypeptide expressing nucleotide sequence isolated from the Sargasso Sea
aatgaattccaccctagttctaggattgcaatggggtgatgagggaaaaggcaaaatagttgatgctctttgtaatgaaggctcattagtttgtagatttcaaggcggacataacgccggtcatacaataaaggttgatggttcccaaaaagttcttcatttaatcccttcagggattatgcactcatcttcgagctgcattattggtaacggggttgtaatttccttgcccgcactcaatgaagaaattgagatgttgtctaacagcggtatatccgttaaaaacagactttatattagtaatgattgcccactaattttgccaactcatattgccattgatcaagtccgtgataagcatgaaggaatggcacga

SEQ ID NO: 316166 - DNA, 657 bp, Unknown
  Bacterial polypeptide expressing nucleotide sequence isolated from the Sargasso Sea
aatgagaaatatagttattgtaggctcacagtggggagatgaaggaaaaggaaaaattgttgactggctgtctgatctagcagatattataattcgttttcaaggtggacataacgctggtcacacattggtaatcgacggagtaacttttaaattaagattactcccatcaggcattgttagaaaaaataaaatatctataattggcaatggagttgtcgttaatccttgggcattacttgaagagattaaagaaatcagattaaagggtgttaatatagactctagcaatcttataatttcagaatctgccactcttattttaccttttcatagtgagttagatgaaataagagaaaatattgcaggaaaaaataaaataggaacaactcgtagaggaattggaccggcatatgaagataaagctggaagaagatcaatacgtattatggatttaaaatatgaaaaaaatttagataaaaaactagaagtaatattacaacatcataatgctataagaaaaggattggggaaaaaaatttataaaaaagataaattaaaaaaagaattaattaaaatagcacctgaaattttaaaatttgcacaaccagtttggctaaaaattgaagaatttaaaaaaaaaggtaaaaaaatatt

SEQ ID NO: 316167 - DNA, 719 bp, Unknown
  Bacterial polypeptide expressing nucleotide sequence isolated from the Sargasso Sea
ttactcaatcatcataatgcgataatgagaggttttggattggatgaatacaatttagaagaagtagtcagtgaaatatatgaattaggggaatatgccaaaccttttgcaaaaacaataaatgacataactaacgtaataaacagcggcaaagaaaaaattttatttgagggagctcaaggatttcttttagatattgaccatggaacctatccttttgtaacatcatcaaatgttcacgctagttatgcatctattggcagtggattgaatccaaaagttattaatcatatccttgcaattacaaaagcatatacgacgagagttgggaatggtccttttcctacagaacaagacaatgaaataggcaataaacttggagaaattggccatgaatttggaacagtgacaaatagaaagagaagatgtggttggtttgactcagttttagttcgtcaagctttaattcaatcaggagcaacaggtattgctcttactaaaatcgatgtattagatcactttgatgaaattaaaatgtgtgtaggatataatttaaatggaaaagaaatagattactacccaagctctgaacaagatcaagagactatagagccaatctatgagacctttcaaggatggatgagtacaacaactggcataaacagcttcgatgaattgccagaaaacgcaaaaaagtatgtcaatcgtattagtgagct

SEQ ID NO: 316168 - DNA, 619 bp, Unknown
  Bacterial polypeptide expressing nucleotide sequence isolated from the Sargasso Sea
tcttgcagaaggagcacaaggtacactgttagatatagattttggaacatatccttttgttacatcttccaatacaatttctgcaggtgcctgcaacggcttaggaatagctcctaacaaaataaaaaatattattggtgtatttaaagcatactgcaccagggtgggaaatggaccatttagtacagaattacaaaacgatactggtgaaaaaattgctcaaaaaggaaatgaatttggatccacaactggaagagctcgtagatgtgggtggattgatttaccagcattaaaatatgctattgatattaatggagtcacagaactcagtatgatgaaatcagatgtgttaagtggttttgacaaaataaaagtatgtacaggatacacatatatggggcaacaaattgaacacctaccatataatttaaatgaacataatactcaacccatatatatcgaattaaaaggatggcacgatgatatttcaaatatcaaatcaacagaagaattaccaaaagaattcaaagaatatatactatttttagaaaccaagcttaatattccaatatccattatatcagtgggaccagatagatcccaaacaatattcagatga

SEQ ID NO: 316169 - DNA, 928 bp, Unknown
  Bacterial polypeptide expressing nucleotide sequence isolated from the Sargasso Sea
gaatcagcaacattaattctaccatttcacagagagttggatgaaataagagaagacgctgctggcaattcaaaaataggaactactagaagaggtattggtccagcttatgaagataaagtaggcagaagatctataagagtaatggatctagcatctaaaaaaaatcttgaaaatagattaactgtagttctagaacaccataacgcaatccgtaaaggattaggcaaaccaatttatcaaaaagatcaattaattgacgatttaataaaattagcacccaatgttttaaaatactcagctccagtctggagaaaaatagaacaatttaaatcggaaaaaaaaaaaattttatttgagggcgctcaaggaattttacttgatgttgatcatggtacatatccatatgtaacttcttcaaatactgtggcggcttccgctgcaacagggtcaggttgtggtcccaattctattaattttgttttaggtatcacaaaagcttatacaacgagggtaggagaaggacctttcccaacagaacttaaagatgatattggtaattatttaggtgagaaaggacatgaatttggaactgtaaccagtagaaaaagaagatgcggttggtttgatggcgttctagtaagacagacaataaaaatctcaggtattgacggtatagctctcacaaaattagatgttttagacgaattagatgaaataaatttatgtgtagcttatgaacttaatggaaaaaaaatagattattttccttcggcagttgaggatcaattaaatgcaaaaccagtttataaaaaattcgatggatggaaatctaaaacaaaaggaattaaaaaattcgatgatttaccagaaaaagcaaaaatttatgtaaaagctatagagcaattcattgagacaaaaatatcta

SEQ ID NO: 316170 - DNA, 880 bp, Unknown
  Bacterial polypeptide expressing nucleotide sequence isolated from the Sargasso Sea
agaggaaattaaagaaactaaatctaaaggcataaaaattaatgaaaataatttaattctttctgactctgcaactcttattctcccatttcataaggaattagatgaaattagagaggatactgctggaaaagataagattgggacaacaagaagaggaataggtccagcgtacgaagataaaataggcagaagatctataagagttatggatttaaattcagaaaaaaatttgagtgaaaaattagaaaatattctaattcatcataatgcaataagaaaaggtctaggaaagtctccttttaaaaaaaatattctaatgaaagatttattaaaaatagctccagaaatattaaaattttctcagccagtttggaaaagaatagatgagttcaaatcaaaaagaaaaaaaatattgtttgagggtgcacaaggtattttattagatgtagatcatggcacttatccatttgtaacatcttctaatacagtagcttctgctgctgctacaggttcaggatgtggaccagatactatagattatgttttaggtattactaaagcatataccactagagtaggaaaaggaccttttccaacagagctaaaggataaaacaggagaattattaggtattagaggaaaagaatttggaacagtaactagtagaaaaagaagatgtggttggttcgatgggattcttgttcgtcaaacaataaagattgcaggtataaaaggaattgctttaactaaattagatgtattagatgaactagatgaaattaaaatatgtataaattatgagcttaatggtaaaactattgattatttacctgcctcgtctaaagatcaagaagatataaaacctatttataaaact

SEQ ID NO: 316171 - DNA, 844 bp, Unknown
  Bacterial polypeptide expressing nucleotide sequence isolated from the Sargasso Sea
ggtagtaatataattggaacaacaaaaaaaggaattggacctgcttatgaagataaggttggaagaagggcaataagactgtgtgatctaaatgatcataaaaatttaaaaaacaaaattaaaaacttatattattttcatgaaccaagattaaaaaaatttaataaaaaagttgattttgaaaaagcatttgatgatttggttaagatttcaggtgaaattattaattttagcgcacctgtttggaaagtaattaatgatgcaggtaaacaaaataaatttatattatttgaaggagcgcaaggttcattattagatatagattttggaacatatccttatgtaacttcttcaaacacagcttctggtcaaattttttcaggtactggctttggtataaaagaaagtcataatgtattaggtattacaaaagcctatacaacgagagtaggatctggaccgtttataaccgaattagatgatgagataggaaatcattttgtggaaaaaggtcaagaatttgggacagttacaaaaagaagacgacgttgtggatggtttgatagtgtgctagtaaaacaatcaatagcaataaatggtatcactgatgtcgttttaacaaaacttgatgttttggatgatatagaagaaataaaagtctgtgttggttatgaggcagagaaaaaaaaatataactacctcccatttgatgaaaatttgcatgataaattactgccaatttatgaaacaatacctggttggtgcacatctacttttggattaactgaatggaatcaacttccaacaaatgctcaagattatatttattttttagagtcaaaaa

SEQ ID NO: 316172 - DNA, 789 bp, Unknown
  Bacterial polypeptide expressing nucleotide sequence isolated from the Sargasso Sea
tctggctgcgtgccgccggacaggaattggcagttgccggtaaaatgatggctgatcttctggccatacgcgatgagcttttgtcctatgccggtcaaagctggcgctgtcttgccgatgctcgtgctgccaataaacgggtgttgtttgaaggggcacaaggcgtgatgcttgatattgatcatggtacttatccgtttgtaacctctagcaacacagttgccggtcaggccgccactggtgctggaaccggcccaaccgatattggattcgtcctcggcattacgaaggcctacacgacgcgcgttggcagcggaccgtttcctactgaggattttggtgatgatggtgaccgtatgggtcgccgtggccgcgaatttggcacggttaccggccgcaagcggcggtgtggctggtttgatgctgtcatggtacgccaagccggtcacgtggcagggattaccggcatggcattaaccaagctagatgttcttgacgggctcaagactttgaaaatctgcgttggttatcagattgatggcagcgatacggtgcttgattatttcccgtcagaggcgggcgcgcaggccgcctgtaagccggtttatgaaaaaatgccgggatggtcagatagtacatgtggcgcccgtagctgggttgaattgcctgccaatgcggttaaatatatacgccgtattgaggagttaactaaattgtcagtgagcttgctgtcaaccagcccagaacgcgatgacacgattttgataaaagacccttttgagggctaag

SEQ ID NO: 316173 - DNA, 529 bp, Unknown
  Bacterial polypeptide expressing nucleotide sequence isolated from the Sargasso Sea
aaggaaaatcataacgtattaggaattacaaaagcctatacaactagagttggatctgggccatttgtatctgaattagatgatgaaattggtgatcattttgttgaaaaggggcaagaatttggaacagtaactaagagaaggagacgttgtggatggtttgatagtgttctcgtaaaacaatcaatcgcaataaatggaattactgatgttgttttaacaaaacttgatgtgttagatgagcttgatgagataaaagtctgtgttggttatgagtctgagaaaaaaaaatatgattatcttccttttgatgaaaatcttcatgataaattattgccaatttacgaaacaatacctggttggcgtaaatcaacttttggattaactggatggaatgaactgccaagcaaggctcaagattatataatttttttagagtcaaaaattgaaaaaaatatttctattatctctacaggcccagacagagttcatacaattgatagaaataacttattgaataatagttgac

SEQ ID NO: 316174 - DNA, 826 bp, Unknown
  Bacterial polypeptide expressing nucleotide sequence isolated from the Sargasso Sea
atgaataatgtagttgttgttggatcgcagtggggagatgaaggaaaaggtaagatagttgattggttatcaagcgaagcagacgtagttgttagattccaaggaggacataatgccggtcatacgttagtcatagatggtgttacttataaactgagattgttaccatctgggattgtcagaaaaaataaaatttctattataggaaatggagttgtagtagatccatgggcgctgctagatgaaatcgaggaagctaaatctaaaggtgtagaaatcaatgaaaataatctgattttatctgaggctgccacactaattttaccatttcatagagagatggatgaaataagggaggactctgctggtaaatcaaaaattggaactacaagaagaggtattggtccagcatatgaagacaaagtaggaagaagatcaataagagtaatggaccttgcatccaaaaaaaatttagaaaatagattagctgtggttttagaacatcataatgctatccgaaagggattggggaagccaatatatgaaaaagataaactagtcgaggacttattaaaaatagcaccaaatattttaaaatattcagctccagtttggaaaaagatagatcaatttaaatcagaaaataaaaaaatattatttgagggagctcaaggaatattacttgatgttgatcatggaacatatccatatgtaacttcatccaatacggttgcagcttcagcagcaacaggatctggatgtggtccaaactcaataaattatgtattaggaattacaaaagcatacacaactagggtaggcgaag

SEQ ID NO: 316175 - DNA, 748 bp, Unknown
  Bacterial polypeptide expressing nucleotide sequence isolated from the Sargasso Sea
taaatcagggctattttctgatctgaatgaaattgcgccgatgattttaaaatactctgcccctgtttggaaagttttgaatgaaaagaggaaagcgggaagccgtattctttttgagggtgcacaaggagcgttactagatattgattttggaacttatccatttgttacgtcatcaaatgtgattgccggccaggcggcgactggttcgggcctcgggccaaacggtattgattttgttttaggaattgtcaaagcctacacaactagagttggagaaggccctttccccacagaactaaacgataatgatggcactcgtttaggggaaagaggacatgaatttggcaccacaacgggccgaaagcgccggtgtggttggtttgactctgtattggttcggcaaacttgtgcaacttccggtgtgactggtatttctcttacaaaacttgatgttttggatggttttaaaaagctgaaaatctgtattggatacgaacttgatggagaaaatcttgattacctgcctactgccgcggatcagcaagcgcgctgcacgccgatttatgaagaaatatctggctgggctgaaagtacagagggtgcacggtcatgggcagatttgccagccaatgcaattaagtatgttcgtagaattgaagagttgatagattgccctgtggcactagtatctacctctcctgagcgtgatgatacgattctggtaacggacccttttgaggattga

SEQ ID NO: 316176 - DNA, 837 bp, Unknown
  Bacterial polypeptide expressing nucleotide sequence isolated from the Sargasso Sea
catcagaaaataatttggataaaagattagacgaagtattaagtcatcataatgccataagaaaaggtttaggaaaaactgaatttaaaaaagaacaattaaaaaaaaatctgttaagtattgcaccaaaaatacttaaattttcacagccagtatggaaaaaaatagatgaatataaatctcaaaacaaaaaaatattatttgaaggtgctcaaggagttcttttagacgttgaccatgggacttatccatttgtaacttcctctaatactgtagcttcatctgctgcgaccggctcaggctgtggtataaactccattaactatgttttaggtattacaaaagcatacacaacaagagttggagagggcccttttccaactgaactaactgatgagataggtgacttacttggaacaagaggaaaagaatttggaactgtcacaagtcgaaaaagaagatgtggttggtttgatggggtcctcgtaagacaaactctaaaaatttcaggaattgatggaattgccttaactaaactagatgtgctagatcaactagatgaaattaaaatgtgcattgcttatgagataaatggtaaaaaatatgattaccttcctgcttcagtggatgaccaatttatggctaaaccaatatacaaatcgtttaagggttggaaatcttcaacagtgggtctaaaaaaatttgaagaactaccagataatgcaaaaaattatataaaagagttggaaaaatttgtagacaccagaatttcaagcatttccactagtccagagagaaatgatacaatcttaattcaagatccttttaatgtttaat

SEQ ID NO: 316177 - DNA, 787 bp, Unknown
  Bacterial polypeptide expressing nucleotide sequence isolated from the Sargasso Sea
aatgaaaaaatccttgatccttgtaggcactcaatggggtgatgaaggaaaaggaaaaatagtagatttttactcaaagaagttcgacgcagtctgccgtttccaaggggggcataacgctggccatacaatttataaggaagaagagaaatttgttcttcatcttataccttcagggatattttatgaccatgtttcatgttttataggtcaaggcgtaatcttatccattgattcactgcttgaggaaattgaacaattagagcaaaaaggtataaatctcgagggcaagttaaggataagccgatattgcagtttattgttgcctttacacgctaaaattgatcagctaagggaagataacaaaaattcaattggtactactcgtcgaggcataggtcctgcttatgaggataaaactgctagaagaagcatcaaggcttttgatcttgaagataacgatctactagaaacaaagctcagaagtttagttgaatattataattaccaaatccaaaacattcatgattcagaaccttttgcgtttgaagatgtttacaacgagctaatgcagtcatacaaaaaggcatctaaatattttggtgatgttacggatactctcgagaacatttacgaacagggtggaaatatattatatgaaggtgctcaaggaactttattagatgttgattatggtacttacccatatgttacctcatctaatactttagctacttctgtaggaattggctctggctttccaaaagtatttattccgatgttctag

SEQ ID NO: 316178 - DNA, 541 bp, Unknown
  Bacterial polypeptide expressing nucleotide sequence isolated from the Sargasso Sea
aatgtccaagaacgtagtcgtcctaggcatccagtggggagacgagggaaaaggcaagatcgttgatctgctgactgaccgctgcaaagcggtggtcaggttccagggcgggcacaacgctggtcacacccttgttattgatggtgaaaagacggtgctccatttggtaccgtccgggatactgcgtccacaagtccagtgcatgatcggaaatggggtggtggtggcccctgatgcgttgattaaagaactcgaggcactggagcaggcaggcgagtctcctcggagtcgtctgacgattagtcctggatgccccgtgattctcccgagccatgtcgcactcgatcaggcgagagaacgggcccgtggcagcaaggccatcggcacgaccggaagggggattggacctgcttacgaggataaagttgcccgaaggggtgtccgcatcggcgagttgaccgagctggacttgtgcaaagagagtactcgagagctgctcgactaccacaattttttgcttgagcaccgattcggcgaggcg

SEQ ID NO: 316179 - DNA, 512 bp, Unknown
  Bacterial polypeptide expressing nucleotide sequence isolated from the Sargasso Sea
tatgggaaaaaatattattgtgctaggcacccaatggggtgatgaaggcaaaggaaaaattgttgatttattaacagagtctgtctcagcagttgtgcgatatcaaggaggacataatgctggacatacagttgttattgataaagataaaacagttttacatttaataccctcaggaattctgcatgatgatgttgaatgtctaattggtaatggcgtagttttaagcccccatgcactagtagaagaactaaacatattaaaaaaagcagggatatcagctcattctcgagtcaaaataagccccgcatgcacactgatattgccctatcatatagcgcttgatcaagcacgcgaaaaacataaaggaaaagacgcaataggaacaacaggtagggggataggtcccgcttacgaagataagattgcaagaagagcgataagagttgatgatctaaccgatgaaaatcgtttcgcaagaatgcttcaagaaatactcgactattataatt

SEQ ID NO: 316180 - DNA, 537 bp, Unknown
  Bacterial polypeptide expressing nucleotide sequence isolated from the Sargasso Sea
cgtctttctaatactgtaacgtcatcagcagctactggatctggctgtggaccaaattctataaattatgttttgggaattacaaaagcatatacgacaagagttggagaaggaccctttcccacagaattaaaaaatgaaattggagaaatacttggctctaaaggaaaagaatttggaacagtcacaagtagaaaaagaagatgtggttggttcgacggtgttttggttagacagacaataaaaatttctggaattgatggaattgctcttaccaaacttgatgtattagatgatttagaagagataaaaatttgtatagcttatgaacttgatggaaagcaaatatattatttgccagccgcatttgacaaacaaattaaaataaaaccaatatacaaaaaatttaaaggatggaaatcttccacttcaggtatcaaaaattttaaagatctacctaaaaatgcaaaaatttatattaaagatttagaaaaattcatagaaacaaaaatttcaagtatatcaactagtccagaa

SEQ ID NO: 316181 - DNA, 442 bp, Unknown
  Bacterial polypeptide expressing nucleotide sequence isolated from the Sargasso Sea
atgacagcactggtagtggtaggcacccaatggggggatgaaggtaaagggaaaatcgtggatctgctcaccgaacaggctgatgctgtggtgagatatcagggggggaacaacgccggtcacacggtgatgtttggagacgaaacacatatcctgcacctgatcccctcaggtattttacgggacacgatgtcgatcctgggtaacggagtggtgatcgatctgcccgaacttctcaaagaaatcgaagaacttcgagaaaacggggtcgaagtccagggcaagcttcatgtcagtgcccgcagccatctggtcatgccctggcatcggctgatcgatcaacttcgcgaaaaggataagggagagaaaaaaatcggtaccaccggacgcggaatcggtccggcctacgaagacaaagttggaagacgcggaatccggatgg

SEQ ID NO: 316182 - DNA, 790 bp, Unknown
  Bacterial polypeptide expressing nucleotide sequence isolated from the Sargasso Sea
aatttaattttgccttttcatagagaaatggatgagattagagaggatgcagcaggaaaaagcaaaataggaactacaagacgtggaattggacctgcatacgaagataaagttggaagaagatctataagaattatggatctaagatctgaaaaaaatttagatcaaagactcgactccgtgttagttcatcataatgcgattagaaaaggtctaggaaaaaaaatttttgaaaaagatcaacttaaatctgatttgcttaaaatagcgcccaaaatattagaattttctcagcctgtttggctaaagattgatcaatttaaaaaacaaaaaaagagaattttattcgaaggagcccaaggtattttacttgatgtagatcatggaacttatccttttgtaacttcatctaatactgttgcctcaagcgcagctacaggaagtggttgtggccctaattcgattaattatgttcttggaattacaaaagcttatacaacaagagttggagaaggtccttttcctacagagttaaaagatgatgttggtgaacttttaggaacacgcggtaaagaattcggaactgttacaagcagaaaaagaagatgtggatggtttgatggtgttttagttaggcaaactattaaagtttcaggaattgatggtatcgctttaacgaaattagatgtgctcgatgaattagatgaaattaaaatgtgtgttgcttatgagcttgatggtaaaagattagattatttacctgctgctgtagaagatcaaataaaaataa

SEQ ID NO: 316183 - DNA, 490 bp, Unknown
  Bacterial polypeptide expressing nucleotide sequence isolated from the Sargasso Sea
tatgacaagtgttgttattgttggtacccagtggggtgatgagggtaaaggtaaaatagttgactccttgtctgataaagcagatgtaatagttagatttcaaggtgggcataatgcaggccatactttggtaatcgatggacaaacaatcaaattatctctccttccatctggtattgttcgagaaaacaagctcacaataattggaaatggcgttgttttagatcctcaggcattatcatcagaaatagaatatctctctaaaattgggataaaagtcacaccgaaaaatttaaaaatcgctgaaaatactacaattatattaccgttgcataaagatttagatctggctcgagaggaaagggcaggtaaagcaaaaataggaactaccggtagaggaattggacctgcttacgaggataaagttgcaagaagatcaataaaattgaatgatttaagtaatctagaaaatataaaagacaaaatttga

SEQ ID NO: 316184 - DNA, 637 bp, Unknown
  Bacterial polypeptide expressing nucleotide sequence isolated from the Sargasso Sea
tttgagggagctcagggaattttgctagacgttgatcatggcacctatccatttgtcacttcatcaaatacagttgcttcaatggctgcaacaggaacgggttgtggaccaaattctataaattatgttcttggtattacaaaggcatatactacaagagttggtgcgggaccatttccaacagaacttaaagataatatcggagaaaaacttggattaaaaggaaatgaatttggaactgttacaagtcgaaaaagaagatgtggatggtttgatgcagtcttggttagacaaactataaaaatatcaggcatagatggtattgcattaacaaaattagatgtacttgatgactttgaggaaattaaaatttgtgtagcttatgaattaaatggtaaaagaataaattatctaccatcttcatcggaagaacagtcaaaagttgttccagtttatgaaacttttaaaggatggcaatcttcaacttcaggtattaaaaaatttgaactattacctgacaatgccaaaacttatattaataaattagaaaaattaattcagacaaaaatttctagcatttcaacaagtcctgaaagaaatgatacaatatttataaaagatccgttttcctcttaat

SEQ ID NO: 316185 - DNA, 742 bp, Unknown
  Bacterial polypeptide expressing nucleotide sequence isolated from the Sargasso Sea
ctcaaggtaaagcagcggttccttgaagcaagccagccaactggcagtgatgccattgaacttgatagcaacacgattttcgaccaatatcaggaatatgcagaacgactccgtgactacgtcggggagacgacaaactttcttttagattctgttgaaaccggtaaaccggttctcttcgaaggtgcacaaggtgcactgcttgatatcgaccacggcacgttcccgtttgtgacgagtagcaactcgtctggggttggagtgtcaagtggatcaggtgttccgggtcgatggatcacccgaactatcggtgtcttgaaggcctattccacacgggttggaggcggacctcttccaactgaacaagacaacaatattggcaaacaccttcaggaacgcggcagagaatttggcactgtgactcagcgaccacgacgctgtggttggtttgatgcagtggcaacgcggtattcagctcgcctttcaggtgctgatgaacttgcggtgatgctgctcgatgttctctcggaactcgatgaactccgaatatgtactggctatcgcataaacggaaaagttgtgaatgagtttcctggacagattgatgatctgaaggctgcggagccaatctacgagacacttcccggatggaacaacgatttaacgactgttcgtaacgaagcagatctaccgctgaatgctatacagtataaaaatcgtattggagaacttctcggccggc

SEQ ID NO: 316186 - DNA, 821 bp, Unknown
  Bacterial polypeptide expressing nucleotide sequence isolated from the Sargasso Sea
tgattggctttcaagtgaggctgacgttgtcgtaagatttcaaggtggtcataacgctggacatactttagttatcgataaaaaggtatttaaattaagattattaccatcaggtattgtacgaaaaggaaaaatttcaattcttggaaacggagttgttattgatccatgggctcttttaaatgaaatagaggaaataaaaaaacaaggtgtaatcgtaagtcctgaaaattttatgatttccgagtcagcttcacttatccttccatttcataaagaaatggacgagatcagagaagatgctgcaggtaaaggaaaaataggaacaacacgaagaggtataggaccttgttatgaagataaagttggtagaagatcaatcagagcaatggatttaagatcagagagtaatctagataaaagattagaaaacgttttattacatcataatgcaattagaaaaggtttaaataaaaaaatatatgagaaagataaactcaaaaatgatttgttaaaaattgctcctgaaatattaaaatttacgcaacctgtatggctaaaactaaacgaatttaacaataatagaaaaaaaatattatttgaaggagctcaaggtatacttttagatgtagaccatggaacttatccctacgtaacttcatcaaatacagtgccggcaacagcggcaactggttcaggatccggaccagataaaattaattatgttttaggaataaccaaagcatatactacaagagttggcagtgggccctttccaactgagttaaatgacgaaattggtgagagtcttggtagaaggg

SEQ ID NO: 316187 - DNA, 661 bp, Unknown
  Bacterial polypeptide expressing nucleotide sequence isolated from the Sargasso Sea
attgcataaagcgaatcaaagcggtaaatcaatcttgtttgagggtgcacaaggtataagtttagatgtagaccatgggatctatccttatacaacatcttcaaatactactgcaggtcatatttcaactggaaccggcgttaactttagaaacgttgatagagtaataggtgttgttaaagcatatttaagtaaggttggagatggatatttaccatctgaaattcatgatgacagcgccaagttaattcgagaaaaaggtaacgagtacggaactactactggcaggcccagaaggattggttggattgatctcgttcaactcagacaagcggtcagagtaaatgggttaacagatattgttttaactaaactagatattttaaatgggctaaaagaaattaaagcatgcattggttatgaagttgaagaaaagattattaaagaaatgcccgcaagcttaaaaacgtttcgaaaagctaagcctatttataaaaccctctcttgttgggattctcttccagagaaagtgtggaaaaaaggttttaaatccttgcctgattcattaaagaactacattagttttattgaaggcgaaattaattgtgatataagtatagtttctgttggccctcaacgccatgaaaccattatacgatag

SEQ ID NO: 316188 - DNA, 863 bp, Unknown
  Bacterial polypeptide expressing nucleotide sequence isolated from the Sargasso Sea
tgtagtgggcgcgcaatggggtgacgagggaaaaggtaagattgttgactggttaagtgaaagggccgatgtagtcgtaaggtttcaaggtgggcacaatgcggggcatactctagtaattgatgaaaaaatatataaattgcatgcgcttccatctggtgtggttcgtggtggtaagttatcaattataggtaatggtgtagtgcttgatccctggcacttactaagcgaaatagaaactttaacagatcaaggtgtaactattgatgcggatacgttaaaaatcgcggagaataccccgttaattttgcctgttcatggtgaattagaccgggcaagggaggcccaaagtggcattgcaaaaattggcactactggacgaggtatagggcctgcctacgaggacaaagtaggacgaagagcggttagggtttcggaccttgcggatgagaccaccttgtctaatcgaattgataggctccttcagcatcacaacactctgcgaaacggaatgggtttggagccaattgaaaaaggaaatctgtttaaaaaacttctcgatgtggcgcctcatatactcaaatttgccgctccagtatggaaaattctaaacgataaaagaaagtcgggacaacgtattctatttgaaggtgcgcaaggggcattgctagatgtggattttggaacctatccattcgtaacctcgtctaatgttattgctggtcaggctgccactggctcagggcttggtccaggaggaatagacttcgtgttaggaatagtaaaggcttacactactcgggttggagaagggcctttcccgacggagctaaacgatgattgcggtaatatgcttggagagc

SEQ ID NO: 316189 - DNA, 856 bp, Unknown
  Bacterial polypeptide expressing nucleotide sequence isolated from the Sargasso Sea
cataagagtaatggatcttgcatcacaatttaatttagaaaaaagattagattcagtattaatacatcataatgctattagaaaagggttaggaaaaaatgaatttaaaaaaaatcaattaaaaaaggatttattgaaaattgcaccacaaatactaaaattctctcaaccagtctggaaaaaaattgaagaatttaaatctcaaaataaaaaaatattatttgagggagcccaaggtgttcttttagatgttgaccatggaacttatccatttgtgacctcatcgaatacagttgcatcatcagctgcaactggtacaggttgtggagtaaattcaattaattatgttttaggaattacaaaagcttatacaacaagagtaggcgaaggtccatttccaacagagcttacagatgaaattggtaagataataggaacaagaggtaaagaatttgggactgttacaagcagaaaaagaagatgtggttggtttgacggggtacttgttagacaaaccttaaaaatttcaggtattgatgggattgcactaacaaaattagatgttcttgatgaactcgatgaaattaaaatgtgtattgcatatgagataaatggaaaaaaatttgattatttacctgcatctgttgatgatcaattaaaggctattccagtatataaatcatttaaaggttggaaatcttcaacagttggtataaaaaatttcgataagttaccagaaaatgcaaaaaattatataaaagaattagaaaatttcactgaaactaaaatctcgagtatttctaccagtccggaaagaaacgatacaatcttgatacaagatccttttgatctttaa

SEQ ID NO: 316190 - DNA, 613 bp, Unknown
  Bacterial polypeptide expressing nucleotide sequence isolated from the Sargasso Sea
tgttttgttagatgttgatcatggcacatatccatttgttacttcatctaatacagtggcttcatcagcagcaactggaacaggatgtggaccaaatacaataaactatgtgttaggtataacaaaagcttataccactagagtaggtgaaggaccgttcccaacagagcttaaggataaaattggagaacttttgggaactagaggtaaagaatttggaactgtgactagtagaaaaagaagatgtggttggttcgatggagttcttgtaaggcagacaataaaaatttctggaattaatgcaatagctctcacaaaattagatgttttagatgaacttgatgagattaaaatgtgcgttgcttacgaacttgatggaaaaaagatagattatttacccgcagctgtggatgatcaactaaaagttaaaccaatctataaagtatttaaggggtggaaatcatcaactcacggtacaaaaaaactcgataagttgccagaaaatgcaaggatatatataaaagaattggaaaaatttattgaagctaaaatttctagtatttcaacaagtccagagagacaagatactattcttattgaaaatccattttaa

SEQ ID NO: 316191 - DNA, 728 bp, Unknown
  Bacterial polypeptide expressing nucleotide sequence isolated from the Sargasso Sea
gatgaaaaatgtagttgtagttggatcacaatggggagatgaaggaaaaggcaaaattgttgactggctgtcaagtgaggctgatgtaattataagatttcaaggaggtcacaacgccggacatactcttgtaatagatggtgtagtttataaattaagactgttaccatcaggaatagtcagaaaaaataaaatatcaattattggaaatggtgttgtagttgatccatgggcacttttagatgagattgatgaaattaaatttaaaggtgtagaagttaatcccaacaatttaattttatctgaagcagcaactcttatattaccatttcacaaagaaatggatgagattagagaagatgcagcaggaaaatcaaaaataggaactacaagaagaggaataggaccagcttatgaagataagattggtagaagatcaataagagtaatggatcttgcatcagaaagtaatttggataaaagattagatgcagtattaagccatcataatgccataagaaatggtctaggaaaaactgaatttaaaaaagtgcaattaaaaaaagatctgttaaatattgcgcctcaaatacttaaattttcgcagccagtgtggaaaaaaatagatgattttaaatctcaaaacaaaaaaatattattcgaaggagctcaaggagttctcctagacgtagatcacgggacttatccatatgtaacttcttctaata

SEQ ID NO: 316192 - DNA, 659 bp, Unknown
  Bacterial polypeptide expressing nucleotide sequence isolated from the Sargasso Sea
gttggatgaaaggaaaacatcaatggcaaacgttgtcgtggtcggcgctcagtggggggatgaaggtaaaggaaagattgtcgattggctaagtgaaagggcagatattatcgttcgctttcaaggtggccataacgctgggcatacccttgtcattgatggaaagacctacaaactgcatgctctcccatcaggtgttgttagaggcggtaaactttctgtcataggcaatggagtggttttggatccttggcatttaatcgacgaaataaaggtggtaagagatcaaggcgttgatatttcatctgaaaatttaataattgctgaaaatacaccacttattctacccatccacggtgaactagatcgcgctcgtgaggatatcaacaaagttgcaaaaattggcactaccggcagaggtattgggccagcttacgaagataaggtaggccgaagagccgtgcgggtagcggacttggcagataggtctactttagaggcacgcatcgatagattattgctgcatcataatacgttgagacgaggtatgcagcttggcgaaatagataagtcgaaattaatcactgatttgctagagattgctccttctattcttcagtactcagctccggtttggaaagtattaaacgaaaagagaa

SEQ ID NO: 316193 - DNA, 554 bp, Unknown
  Bacterial polypeptide expressing nucleotide sequence isolated from the Sargasso Sea
tgctgccacaggttcaggatgtgggcctaattcaattcattatgttttaggtattacaaaagcttatacaacaagagttggggaaggtccttttccaaccgaattaaccgatgatattggagaacttttaggcacacgtggcaaagaatttggaactgtaactagtagaaaaagaagatgtggctggtttgatggtgttcttgttagacaaacaataaaaatttcaggaatagatgggattgcgcttaccaaacttgatgttcttgatgaattagatgaaattaaaatgtgtattgaatatgagctagatggaaaaaaaacaaattatttacctgctgcgaaagaagatcaattgaaaataaaaccagtttataaaacttttcctggttggaaaacaactaccaaaggtattaaaaatattgactcattgcctgagaatgcaaaaaattatatttatgctttagaagattttgtaggtgctaaagtatctagtatatcaactagtccagaaagagaagatactattttagttgaaaatccttttgatgtttagt

SEQ ID NO: 316194 - DNA, 887 bp, Unknown
  Bacterial polypeptide expressing nucleotide sequence isolated from the Sargasso Sea
cttaccgtttctagggaaatggatgaaataagggaagattcggcaggtaaatctaaaataggaacaacaagaagaggaattggtccagcatatgaagataaagttggcagaagatcaataagagttatggatttagtttctgaaaaaaacttggaccatagattagaaacagttttaatgcatcataacgcaataagaaaaggattagggaaagaaatttataaaaaagacaaattaaagaaagatctattagatatagctcctgaagttttaaaatattccaaacctgtatggaaaaaaattgatgagtttaaatctcaaggtaaaaaaattttatttgaaggtgctcaaggtattcttttagatgtagatcatggaacttatccatttgttacatcatccaacacagttgcagcttctgcagctatcggctcaggttgtggtccaaattcaataaattatgttttaggcataacaaaagcttatacaacaagagtaggtgagggcccatttccaacagaattaacaaatgaaattggtgaaaaacttggaactaaaggaaaagaatttggaacagtaacaagtagaaaaagacgatgcggatggtttgatggagttttagttagacaaactattaaaatttctggaatagatggcatagcattaaccaagctagatgttttagaccaattagatgaaattaaaatgtgtattgcatacgaagttgatggaaaaaaaattgattatcttcctgcttcggtagatgatcaattcaaagtaaaaccaatttataaaagttttaaaggatggaattgttcaacaagtggggtaaaaaaatttgaagatcttcctgacaatgcaaaaaattatattaaagaattagagaa

SEQ ID NO: 316195 - DNA, 888 bp, Unknown
  Bacterial polypeptide expressing nucleotide sequence isolated from the Sargasso Sea
ttaccattccatagagaaatggatgaaataagagaagatgcagctggtaaagcaaaaattggaacaacgagaagaggaattggtcctgcatatgaagataaggctggtagaagatcaattagagtaatggatttagcttctgaaaaaaatttagatcataaactggaaatggcattaatgcatcataatgcaattagaaaggggttaggtaaagaaatttatcataaagataaacttaaaaaagatttaattgaaatagctccaaaaatattaaaatactcacagcctgtttggaaaagaatcgatgaacttaaatttcagaaaaaaaaaatattatttgaaggagcccaaggaattttacttgatgtggaccatggaacttatccatttgtaacatcatcaaatacagttgctgcaaatgcggccactggatcaggctgtggtccaaattctataaattatgttttgggaattactaaagcatataccacaagagtaggagaaggaccttttccaactgaattacgagataaaataggagaggaacttggaattagaggaaaagaatttggaacagttactagtcgaaaaagaagatgtggatggtttgacggtgttttggttagacaaactattaaagtttcaggcatagatggaattgcactgactaagttggatgttctggatgaactagatgaaattaaaatgtgtattgcttacgagatagatggtaaaaaaattgatcatttacccgccgctgtagatgaacagttaatggtaagaccagtttataaatcttttaaaggttggaaatcttccacaggaggtgtgaaaaaatttgaagacctacctgataatgcaaagaaatatgtaaaagaattagaaaaa

SEQ ID NO: 316196 - DNA, 646 bp, Unknown
  Bacterial polypeptide expressing nucleotide sequence isolated from the Sargasso Sea
aatgttttatacaattgtaggaactcaatggggagatgaaggcaaagggaaaatagttgactggttatcatctaaagcacaatttattgttcgttttcaaggaggcaacaatgcaggtcatacaattaaagttgataaaaatgtatataaacttaatttattaccttctggtataattagaaataaaaaatgtattataggtaatggagttattttagatccttgggcattaattacagaaataaaaaatttaagaaatcaaaaaattaatattgacgaaaataatttatttattgctgaaaatatttgcttaatcttaccaattcataaattgattgatcatatcaatgaagaatctaaaggtattaattcaattggaactacaaaaaagggtataggtcctgcatatgaagataaggttggtagaagagcaattagattatgtgatcttaataattataaaattctaaaatcaaaaataagagatttatacgaatttcataaacctagattggaaaaatataataaatttttagattttgaaaaagattatgaagaattaataaaaattgaaaaaaacatttcgatttttagcgcacctgtatggaaattaataaatgaagctggtaaggaaaataagattata

SEQ ID NO: 316197 - DNA, 754 bp, Unknown
  Bacterial polypeptide expressing nucleotide sequence isolated from the Sargasso Sea
atttaaaaaagagcaattaaaaaaaaatcttttaaatattgcaccgcaaatacttaaattttcacagccagtatggaagaaaatagatgaatttaaatctcaaaacaaaaaaatattatttgaaggtgctcaaggagttcttttagatgttgaccatgggacttatccatttgtaacttcctctaatactgttgcttcgtctgcggctactggctcaggctgtggaataaactccattaattatgttttaggtattacaaaagcatacaccacaagagttggagaaggcccctttccaacagaactaacagatgaggtaggtgacttacttggaacaagagggaaagaatttggaactgtaacaagccgaaaaagaagatgtggttggtttgatggggtccttgtaagacaaactctaaaaatttcaggaattgatggaattgccttgaccaaactagatgtgctagatcaactggatgaaattaaaatgtgcatcgcttatgagataaatggtaaaaaatatgattatcttccagcttcagtggatgatcaatttatggctaaaccaatctataaatcctttaaaggttggaaatcttcaacagtgggtataaaaaaatttgaagatctaccggaaaatgcaaaaaattatataaaagaattggaaaagtttgtagaaaccagaatttcaagtatttccactagtccagagagaaatgatacgatattaattcaagatccttttaatctttaa

SEQ ID NO: 316198 - DNA, 985 bp, Unknown
  Bacterial polypeptide expressing nucleotide sequence isolated from the Sargasso Sea
tgtcgttcgctatcaagggggagtaaatgcaggtcataccatagttgtagatgataaagtcttaaaattacatttaattccctcaggaatactttataaaaatacttcttgtctaattggttcgggaactgttgtggatccaaaaatcttgcttaaagaaattgacatgctaattgataatggaattgatatctcaggattaaaaatttcatcaacatcacatgtaacaatgccctaccatcgaatattagatgaagcgatggaggctgatagaggttcaaacaaaatagggacaacaggtagggggattggcccaacttatgcggataaatcacaaagaaatgggattaggataagagacttgcttaataaggaaaggctaagtgatgtgatcgaaattccattaagagaaaaaaacggtctactagaaaaaatctatggcattaaaccacttaaattagaagatattgttgaagaatatcttgattatggggaaagattatcaaaacatgttgttgactgtacgaggactatccatgcagcctcaaaaaacaagaagaatattcttttcgaaggtgctcaagggactctacttgacttagatcatggtacttatccttttgttacctcatcaaaccctatatcaggaggagcatgtattggggctggagtgggtccaactttaattgacagggtcataggtgtagcaaaagcttataccacaagagtaggtgaaggaccatttcctactgaattacaaggaagtattaatgatcaactctgtgatagaggcagtgaatttggcaccactactgggagaaggagaagatgtgggtggtttgatggagttattggcaaatatgctgtatctgttaatggtcttgattgtttagccgttacgaaacttgatgtgttagatgaattagatgagattcaagtttgcattgcatatgatctcgatggagaggaaatagactactttcct

SEQ ID NO: 316199 - DNA, 924 bp, Unknown
  Bacterial polypeptide expressing nucleotide sequence isolated from the Sargasso Sea
tgggctttattggatgaaattgatgagattaaatctaaaggtgttaaagttagtccggaaaacttaataatatcggagtctgcaaatttaatattaccatttcatagagagatggatgaaattagagaagacgctgctggaaaagctaaaattggaactactagaagaggtattggaccggcatacgaagacaaagttggcagaagatctataagagtaatggacttaatatcagaaaaaaatttagatcacaggctagaaactgtattattacatcataatgctattagaaaaggactaggaaaaaatgtctaccaaaaagacaaactaaaaaaagatttattaaaaattgctccagaaattttaaaattctcaaagccagtatggaaaaaaatagacgaatttaaatctcaaaataagaaaattttgtttgagggagcacaaggtattcttttagatgttgatcatggcacctacccatttgtaacttcttccaatactgttgcatcctcagcagctactggttcaggctgtggtccaaattctataaattatgttttaggaataacaaaagcttacacgacacgggttggtgaggggccttttcctacagaactaaaagataaaatcggcgagaaacttggtaataaaggaaaagagtttggaacagtaactagcaggaaaagacgttgtggttggtttgatggagttttagttagacaaacaattaaaatttcaggaattaacggaatagctttaactaaacttgatgttttagatgatctagatcatgtaaaaatgtgtattgcatatgaattgaatggaaataaaattgactatttgcctgccgcagttgatgaccaattaaaagtcaagccagtttataaaacttttgaaggtggaaagtttctacgaaaggtataa

SEQ ID NO: 316200 - DNA, 451 bp, Unknown
  Bacterial polypeptide expressing nucleotide sequence isolated from the Sargasso Sea
catgatacagtttggagaacatattcgagaaaaagcaaaagaatatggtactactacagggagagctagaagagttggatggtttgatgctgttgctgcaagattttcagcacatattaatggttttacatcgattgttttaaccagattagatgttttagatggatttgatgaattaaagatttgcaataaatatcaatttggtgataaagctatttcagatttccctacagacaatgcaacattaaatagatgtcaaccgatctacgaaacattaccaggctggtctgatccgacggcatctatgactggtttggataactttccaataaatgctttggagtatgtgaaaactctagaaaaatatattggggtaccgataaaaataatttccaccggtcctcaaagagaagaaactgtattagtagaaagttttgtgaatgaaatttaa

SEQ ID NO: 316201 - DNA, 293 bp, Unknown
  Bacterial polypeptide expressing nucleotide sequence isolated from the Sargasso Sea
aatgaaaaatgtagtagttgtaggatcgcagtggggagacgagggaaaaggtaaaatagtagattggctttcaagccaagcagatattgttgttcgttttcaaggtggtcataacgcaggacatacattggtaattgatggcaccacctataaacttagacttttaccatcaggaattgtgagaaaagataaaatttccgtcatcggaaacggagtagtaattgatccttgggcattgcttgatgaaatagatgaaattagattgaaaggtatcaaagtagatgaaaaaaatt

SEQ ID NO: 316202 - DNA, 652 bp, Unknown
  Bacterial polypeptide expressing nucleotide sequence isolated from the Sargasso Sea
ccttcaacatttacatgacaaatattgtactgatacacaggaccttatttatgattggataataaaagaaaatcaatctttgttgtttgagggcgctcaaggaacattgctagatatagatcatggcacatatccttatgtaacatcttcaagcacgacagccggaggtgtttcaacaggccttgggctaggacctaaatacataaataaaattattggtatctcaaaagcttattgcacccgtgttggagagggcccatttctaactgaactttttgatgacaatggcaaaatgcttgcgaaaaaaggaaatgaatttggtgctacaactggcaggccaagaagatgcggttggctagatttattagcccttaaaaaagctgtttttacaaattctgttactgatatttgtttaacaaaactagatgttatggatgaatttaactcaatagaagcttgtattaattataaagacggtgaaccagtttataaaacttttgagggttggaaatcatcaacagaaggtattactgaatttgaaaatttacccttaaaagcccaagagtatattaattttatcgaagattttgttggttgtaacatctcaattgtttctacaggaccatcaagagaccagacaattcatagataa

SEQ ID NO: 316203 - DNA, 512 bp, Unknown
  Bacterial polypeptide expressing nucleotide sequence isolated from the Sargasso Sea
cgttcttggaattacaaaagcttatacaacaagagttggagagggtccgtttccaacggaactaacagacagcactggtgaattattaggtatgcgaggaaaagaatttggaactgttacaagcagaaaaaggagatgtggatggtttgatggtgttttagttagacaaacaattaaagtttcaggtattaattctatcgctttaacaaaattagatgttttagatgagttaaatgaaattaaaatgtgcgtagcttacgaacttgatggtaaaaaattagactacttacctgctgctgtagaagatcaaattaaaataaaaccaatttataaaactttccaagggtggaaggttcccaccagtggtatcaaaaatatggattcattacctgaaaatgctaagaaatatatttttgcaatagaggattttattggcgcaaaagtgtctagtatttcaacgagtccagaaaggaatgatactattttaattgaaaatccttttgaagtttaat

SEQ ID NO: 316204 - DNA, 523 bp, Unknown
  Bacterial polypeptide expressing nucleotide sequence isolated from the Sargasso Sea
attggccaatgttgttgtaatcggagcccaatggggtgacgaaggaaaaggtaaaataacggatttacttagtcgttcggcagatgttgttgttcgctaccaagggggagtaaatgcaggtcatactatagtcgtagatgataaagtcttaaaattacatttaatcccctcaggtatactttataaaaatacttcttgtctaattggttcgggaactgttgtagatccaaaaattttgcttaaagaaattgacatgttaattgataatggaattgatatctcaggattaaaaatttcatcaacatcacatgtaacaatgccctaccaccgaatattagatgaagcgatggaggctgatagaggttcaaacaaaatagggacaacaggtcgagggattggcccaacttatgcggataagtcacagagaaacggcattaggataagagacttgctcaataaggaaagactaagtgatgtcatcgaaattccattaagagaaaaaaacggactactagaaaaaatc

SEQ ID NO: 316205 - DNA, 946 bp, Unknown
  Bacterial polypeptide expressing nucleotide sequence isolated from the Sargasso Sea
tcgggaactgttgtagatccaataatcttgcttaaagaaattgacatgttaattgataatggaattgatatctcaggattaaaaatttcatcaacatcacatgtaacaatgccctaccaccgaatattagatgaagcgatggaggctgatagaggttcaaacaaaatagggacaacaggtcgtgggattggcccaacttacgcggataaatcacaaagaaatggcatcaggataagagacttgctcaataaggaaaggctaagtgatgtgatagaaattccattaagagaaaaaaacggtctactagaaaaaatctatggcattaaaccacttaaattagaagatattgttgaggaatatcttgattatggggaaagattatcaaaacatgttgttgactgtacgaggactatccattcagcttcaaaaaacaagaagaatattcttttcgaaggtgctcaagggactttacttgacttagatcatggaacttatccttttgttacctcatcaaaccctatatcaggaggtgcatgtattggggctggagtgggtcccactttaattgatagagtcataggtgtcgcaaaagcttataccacaagagtaggtgaagggccattcccaacagaattgcaagggagtattaatgatcaactctgtgatagaggcagtgaatttggaactactactgggagaagaagaagatgtgggtggtttgatggagttattggtaaatatgctgtatctgtaaatggtcttgattgtttagctgttacaaaacttgatgtgttagatgaattagatgagattcaagtttgcattgcatatgatctcgatggagaggaaatagactactttcctacaaatgcagatgacttaaaaaaatgtaagccaatcttcaaaaaattaaaaggttggcaatgttcaactgcagatgcagaaa

SEQ ID NO: 316206 - DNA, 877 bp, Unknown
  Bacterial polypeptide expressing nucleotide sequence isolated from the Sargasso Sea
tttcatagagaaatggatgagattagagaagatgcagcaggcaaaagcaaaataggaactaccaggcggggaattggacctgcatatgaagataaagttggaagaagatctataagagttatggatctaagatctgaaaaaaatttagaacaaagactagactctgtattagttcatcacaatgcgattagaaaaggtctaggaaaaaaaatttttgagaaagatcaacttaaatctgatttgcttgaaatagctcctaaaatattaaaattctctcagccagtttggctaaaaattgatcaatttaaaaaacaaaaaaagaaaattttgtttgaaggtgcccaaggtattttgcttgatgttgatcatggaacttatccttttgtaacttcatctaatactgttgcttcaagcgcagctacaggaactggttgtggacctaattcgataaattatgttcttggcattacaaaagcttatacaacaagagttggagagggtccttttcctacggagttaacagatgatatcggtgaacttttaggaacacgtggaaaagaatttggaactgttacaagcagaaaaagaagatgcggatggtttgacggtgttttagttaggcaaaccattaaagtttcagggatagatggtgttgccttaacaaaactagatgtgcttgatgaattagatgaaattaaaatgtgtgttgcttatgagcttgatggtaaaagattagattatttacctgcggctgtagaagaccagataaaaataaaaccaatttatcaaacttttccaggttggaaaatttctacaagtggagtaaaaaatatagacttgttacctgaaaatgcaaaaaaatatatttttgcagtag

SEQ ID NO: 316207 - DNA, 831 bp, Unknown
  Bacterial polypeptide expressing nucleotide sequence isolated from the Sargasso Sea
attcaccaaaaaatagatttggctcgagaaaaaaaacgaggggaaaacaaaatagggactacaggcaggggaataggccccgcatacgaagataaagtggcaagacgtggtattcgggtggcagacctagaaagtcctgatcaagtgttatcgaaattaaaagatcaattcgaataccacaatatttttctcagggatgcgggcgaacaaatagcctctgccgagaaaacttttgagaatttaatggcaattagtcataacatccgacagtttgcgcaaccagtgtggaaaaagatggacgaacttcgagcgcaaggttcgaaaattttgtttgaaggcgctcagggtgttatgttagatgtcgaccatggaacctatcccttcgttacttcctcaaacacagtagccggacaagctgctgctggtacgggtacaggaccaacttccattaattacgttttaggaattactaaagcctataccaccagggttggtggtggaccgtttcctactgaattactagatgaaacaggccaaattcttggagagagaggtcatgaatttggggtggtcacaggtaggaaacgccgatgtggttggttcgacgctgtcatggtcaaacaggctataaagacgtcggggataaccgggattgcattgacaaaaatggatgtgctagacggtttcgaaacactgaaagtttgtgacggatatgaacttgaaaacagtaggatcgactattttcccagttcatccaagcatcaggcggctgtaaaacccttgtatagggagatcgagggatggtcggaaagtacacgtggagctaggtca

SEQ ID NO: 316208 - DNA, 511 bp, Unknown
  Bacterial polypeptide expressing nucleotide sequence isolated from the Sargasso Sea
aatgaaaaatattgttgttgtaggatcacagtggggagacgaaggtaaaggaaaaattgttgactggttatcagaccaagcagatgtggttattcgttttcaaggtggtcataacgctggacataccttggtaattgacgacgtaacttataaattaagattacttccatcaggcattgttagaaaaaataaaatatcagttattggtaatggtgttgtagtagatccgtgggcattgcttgatgagattaaagaaattaaatcgaaaggtgtagaagtaaatgaaaataattttattatttcggactcagcaacactcatattgccttttcatagagagatggatgaaataagagaagacgctgcaggaaaaggtaaaattggcacaactagaagaggaataggaccagcctatgaagataaggttggcagaagatcaattcgtgttatggatttaaggtctgaaagtaatttagatcatagattagaaaatgttttacttcaccacaat

SEQ ID NO: 316209 - DNA, 694 bp, Unknown
  Bacterial polypeptide expressing nucleotide sequence isolated from the Sargasso Sea
ctccaacctgtttggttaaaaattgatcaatacaaaaaacaaaaaaaaaagatattatttgagggcgcccaaggtatcttgcttgatgtagatcatggaacatatccttatgtaacatcttcaaatactgttgcatcgagcgcagcaacaggaactgggtgcgggcctaattcaattaattatgtgcttggtataactaaagcttatacaacgagagttggagaaggaccatttccaacagagttaattaatgagattggtgaaatattgggaaacagaggaaaagaatttggtactgttacaagtagaaaaagaagatgtggatggtttgatggagtattagtcagacaaacaattaaggtttcaggcatcgatggaattgcacttactaaattagatgtattagacgagctagatgaaataaaagtttgtattgagtacgatttaaatggaaaaaaaattgattatcttccagctgctgttgaggatcaattgaaaatcaaaccaatttataaaacttttactggatggaagacctcaactaaaggaattaaaaatttaaatgatttacctgaaaatgctaaaaagtacgtttttgcgattgaagatttcgttcaagcaaaaatatctagtatttcgactagtccagagagagatgacacaatacttattgaaaatccttttgagatctaat

SEQ ID NO: 316210 - DNA, 880 bp, Unknown
  Bacterial polypeptide expressing nucleotide sequence isolated from the Sargasso Sea
aatggcaaatgtggtggtcgttggctcacaatggggcgacgaaggtaaaggaaagattgtcgattggttatcggaaaaagctgacgctgtagttcgtttccaaggcggccataacgctgggcatacattagtcattgatggcgtaacctacaaacttagcttgctcccatctggtatagttcgacctgacaaattatcctttattggcaacggtgcggctatagatccgtgggctttaatttctgagattgaaactattcgtcagctctcgattgatgtaagcccaaaaaatctccgtatttctgaaagtgcagtattgatactcccacttcaccgaaatttagatcttctgcgtgaagaagccgcaggcaatagtaaaattggcaccacgggacgcggcatcgggccagcttatgaggataaaatcgcgaggcgagctatcagggtcggagaccttgcagacgtccgtacaataactgaaaagaccgataaactattatttcatcataatgcactactcaaaggtatgggcatgaaactcgttgaacaagaaccactggttgctgaactcaaagaaattgctcccaagattataccctattccactgctgtttggcatgaactcgatcaattacagaagcgtggaaaccgtattttgtacgaaggtgctcagggaaccatgttggatattgatcacggcacttatccattcgtgacatcttcaaatactgtagctgcacaagctgcagtaggctcaggacaaggacctcactcgattaattatgtccttgggatctgcaaagcatacacgacccgggtcggttctggaccatttccaactgaacaagaaaactctatcgggcaactgctcgggacccgc

SEQ ID NO: 316211 - DNA, 660 bp, Unknown
  Bacterial polypeptide expressing nucleotide sequence isolated from the Sargasso Sea
aaaaagaaaaaaaaaagatattattcgaaggagcacaaggtattctgttagatgttgatcatggaacttacccattcgtaacatcttccaatacagtggcatccagcgcagcgactggaactggttgtggcccaaattctataaattatgtactagggattacaaaagcttacactacacgtgttggagaaggaccttttccgacagagttgaagtgtaaaattggagagttgcttggtacgaggggtaaagagtttgggactgtaacaagtagaaaaagaagatgtggttggttcgatgctgttttagtaagacaaagtattaaaatctcaggtattaatggcatagcattaactaagctagatgtattagatgaattagatgaaattaaaatgtgtgttggatataaacttgatgaacaagagatagatcatttgcctgcctctgttgaggatcaattaaagattaagccagtatataaatcttttttagggtggaagaagtcaactcaagggaccaaaagcattaatgatctaccaaaaaatgctaaaaattatatctttgcagttgaggattttataggcactaagatatcaagcatctcaacgagcccagaaagaaaagatacaatattaattgagaacccttttgagaattaat

SEQ ID NO: 316212 - DNA, 500 bp, Unknown
  Bacterial polypeptide expressing nucleotide sequence isolated from the Sargasso Sea
aattacaaaagcatacacaacaagggtgggccaaggaccttttccaacagaacttacagatgaaattggtaatcatttaggagaaaaaggacacgaatttggaacagtaactagtagaaaaagaagatgtggctggtttgatggagttttagtaagacagacaataaaaatttcaggcattaatggaatagcactaactaaattagatgtattagatgaacttgatgaaataaatctatgcattgcttatgaattaaaaggaaaaacaatagattatttcccagcttctgttgaagatcaattaaatgttaaaccagtttataaaacattcaagggttggaaatctaaaactcaaggaattaaaaaatttgaaaatttacctaaaaatgccaagatttatgttaaagctattgaagagtttattgagacaaaaatttcaagtatttctacaagtcctgagagagaagacacaattcttttaattgatccgtttaattaaa

SEQ ID NO: 316213 - DNA, 539 bp, Unknown
  Bacterial polypeptide expressing nucleotide sequence isolated from the Sargasso Sea
aatgcctaatgttacagtagtaggtacacagtggggtgatgaaggaaaaggtaaaattgtagactggctttcagaaaaagctgatgtgatagtaagatttcaaggtggccataatgcaggacatactcttgtggtaaatggcattacatataaattaaaattattaccttcaggaatagtaagaaaaaataaaatttcaattattggcaatggagtagttatagatccttgggctcttttagatgaaattaaacaaattgaaaaattgggaataaaaattacaagaaaaaatttatacgtagctgagaacgcaacattaatcttgccattacatagagagttagatggtattagagaagatacaaaaaatactgacaaaataggcactacaagaagaggtattggaccagcatatgaagacaaagtcggtagaagaggaattcgtgtaattgatcttgtcaataaaaaaaatctgtcaaaaaaaattaatatgattttatctcatcataattctgtaagaaaaggtttgaaaaaaaaat

SEQ ID NO: 316214 - DNA, 937 bp, Unknown
  Bacterial polypeptide expressing nucleotide sequence isolated from the Sargasso Sea
ggaaaaataggaacaactagaagaggaattggaccagcttacgaggataaagttggaagaagatctataagagtgatggacttaagatcagaaaaaaatttggatcaaagactgcattcagcacttattcatcataatgcaattagaaaaggtcttggaaaaaaaatttatgaaaaagatcagttaaaatcagatttacttagtatagctcctaaaatattagaattttcacaaccagtttggcttaaaattgatcaatttaaaaaacaaaaaaagaaaattttatttgaaggtgctcaaggaattttacttgatgtagatcatggaacatatccttttgtaacttcatctaacaccgttgcatctagtgcagctactggttcagggtgtggtcctaactcaataaattatgttcttggaattactaaagcttatacaacaagagttggcgaaggtccttttcccacagaattaacagatgatattggtgaattgttgggtacaagaggtaaagaatttggaactgtaacaagtagaaaaagaagatgtggatggtttgatggagttttagtaagacaaacaattaaagtttcagggatagatggtatagctctaactaaattagatgtgttggatgaattagatgaaattaaaatgtgtgtcaaatataaacttgatggaaaagatatagattatttacctgctaccatagaagatcaattaagaataaaacccgtttacaaaacttttccaggatggaaaacttctattaatggaattaaaaatattgaattattaccagaaaatgcaaaaaaatatatttatgcaatagaagattttataggtgcaaaagtatctagtatatctactagcccagagagagacgatacaattttagtacaaaatccttttaatattttatttagttggcaataga

SEQ ID NO: 316215 - DNA, 576 bp, Unknown
  Bacterial polypeptide expressing nucleotide sequence isolated from the Sargasso Sea
tatgggcaataacaccctaatcttgggattacagtggggtgatgaaggcaaaggcaagattgtagacgctctcgcagaaactgcagaagctgtctgccgtttccaaggcggtcataatgcaggccatactcttaaggtagacggtgttcaaaaagttctccacttggtaccatctggaattctccatccttctgtcaattgtgtcctaggtaatggtatcgttttatccctttcagcccttgcaaaagaaattaaggaattgcaagaaagtgaaattaatttcaaggaccgattttacgtaagtgaagattgctctttaatccttcccactcatatagcaattgacaaagttcgagataaatctgagggcattggcacaactggtagaggaattggtccagcatacgaggacaagatcgctagacgagcagtgcgttttggagatctaaaagatcctgaagaactagaagttaaattgtcaaaattagtcaattaccataatcaaattttagagaacttatatggtgctcaacctatcaaatacgaggatgtcttggaagagttgactggaaacat

SEQ ID NO: 316216 - DNA, 583 bp, Unknown
  Bacterial polypeptide expressing nucleotide sequence isolated from the Sargasso Sea
tatgccaaatcttgcagttattggtgcccaatggggagatgaaggaaaaggaaaaatcatagatgttctaagcgataaagctgaagttatagtcaggttccagggaggacataacgcaggccatacccttgtcattggaagcgaaactattaaattatccctattaccttcgggcataatgaggcctggtaaattggcggcaattggtaacggtgtggtattaaatccttgggcgcttttagatgaaattaagatgattgaaaaaaaaggtataaaggtttcacctaaaaatcttgtaatagcagaaaatgtttcgctcattttaccaccccacgaagagttagataaagccagagaagaacaattaaaaaaggcaaaaattggaactactggtagaggtattggccctgcctatgaggacaaagtcggcagaaggtctataagattgtgtgatatttttgatgaggtgaatttgaatgaccgtcttgaaattttcatagctcatcatgatatcatacgccgtggcttaggtatggcttctctcaatatggaaggacttgaagtcaagttgagtaaagtaggc

SEQ ID NO: 316217 - DNA, 568 bp, Unknown
  Bacterial polypeptide expressing nucleotide sequence isolated from the Sargasso Sea
atgtattatagcgtagtaggaactcaatggggcgatgaaggaaagggtaaaattgttgattggctatcttcaatagcagatatagtggtgagattccaaggaggaaataatgcaggtcatacaataaaaattaatgaacaaacttataaattaaacttattgccatcaggaattattagaggaaaaaaatgcattataggcaatggagttgttcttgatccgtgggctttaaatgacgaaattaattcattacgagataaaaaaataaaaattgatgaaaagaatttgattattgctgaaaatatttgtttaattcttcctatacaccaattactagatgaaattaatgaaggtgtcagaggagattcttcaattggaactacaaaaaaaggcattggtccagcatatgaggacaaaataggtagaagatctatcaggttgtgtgacttgtttaatgaaaaaatacttctaaataaaataaaaaatttaatttcttttcataatataaggttggaatattatggtaaaaaaataaatgaggatgagctatttcaatcattgatagaaa

SEQ ID NO: 316218 - DNA, 685 bp, Unknown
  Bacterial polypeptide expressing nucleotide sequence isolated from the Sargasso Sea
atgtctaatgtagctgtaataggttctcaatggggagacgaaggaaaaggaaaaattgttgattggctttcaaaaaaggctgatgtaatagtaagattccaaggcggacataacgcaggacatacacttgttattgataacattacatacaaactgaaattattaccttctggaatagttagaaaaaataaaatttcaatcataggcaatggtgtagtaatcgatccttgggctcttttagatgaaattaaatcaatagaaaaactagggataagaattacaaataaaaatttatacattgcagaaaacgccacattaattttaccaatacacaaagaattagacggaataatagaagattcaaaaaataatgataaaattggtacaactaggcgaggtataggacctgcttatgaagataaggtaggaagaagagcaattcgtgtgatggatcttgcaaataaaaaaatattgtcgaaaagattggatacgatgttatttcatcacaatgccgtaaggcaaggtttaggtaaaaaaaaaataaataaaaaaaaattaattaaagatctgggaaaaatttcttcaaaagttcttaaatattcaaaaccggtttggaaaaaaataaatgaatttagaaaaaaaagaaaaactattctctttgaaggagctcaaggaattctttaga

SEQ ID NO: 316219 - DNA, 751 bp, Unknown
  Bacterial polypeptide expressing nucleotide sequence isolated from the Sargasso Sea
gatgaataatgttgtgattataggtgctcaatggggtgatgagggtaagggaaagatcgtagatttactatctgaaaaagctgatgctgttgtaaggtttcagggaggccataatgctggtcacacccttgtaattaaagacaatgagtttaaattatctttgcttccaagtggaatcattagggatacaacattatctttaattggaaatggtgttattattgaccctatgcacttaataaaagaaattgctgaaattgaaaataaaggcataaaaattacatcagaaaaattaattatttcagaaaattgctttttgattttaccaatacataaatttattgatcaattgagagaaaataatcaatcctcaataaaatcaaaaattggtacaacaggtagaggtattggccctgcctatgaagataaagttgcaagacgtggtattagaatagatgacttaaaaaataaaaatatttttttagataaaatgaaaaagacttatgatcatcataatatttgggtatcttatagtgaaacagacttaatggattttgaaaaagatgccaaacaaattttaaaagcatatgatgttctaaaaccatttgtcaaaaactcatggaatgaattaaacaaatatgttgagaagaaaaaaaatatattatttgagggtgctcaaggtacttttctagatattgactttggaacatatccatatgtaactagtagtaacacagttgctggtaatgca

SEQ ID NO: 316220 - DNA, 738 bp, Unknown
  Bacterial polypeptide expressing nucleotide sequence isolated from the Sargasso Sea
agtgacagagcacatgttattatgccatatcacattgaaatggatatagcactaacaaagcaccaagggaaattagcggcaggcagtacaaaacgaggtattgctccggtgtatggagacaaaatgtaccggcatggtatacgtatgatcgatcttactgagcctgatgttttcagtgaaaaactagacaaagcatatagctttaatcaaacaatgatagaagcatttggccatagcatcgaacaaaataaaaaaagcatttatgagcaatatatcaaatatggcgaaatactaagcccctatatatctgacatttctgtagatctttttaatgctcacaaaaagggtgcttcaatactttttgaaggtgcgcaaggtattagcctagacgttgatcatggtgtttatcctcacacgaccagcagcaatacagtcgctggtcatgtagctgcagggacaggtgtaagcttcagagatattcatagaattattggtgttacgaaagcatacctaagtagagtcggtcaaagccctcttccgacagagctaagtggcgttgaggctgaaacgctgcgcgaaaaaggaggagaatatggtaccactacaggaagaccgcgccgagttggatggctagaccttgtccaagttaggcaagctgtaagaacgaatgggctaacagaaatagcccttacaaaactagatattttatctgggttttcaagcctcccagtctgtcac

SEQ ID NO: 316221 - DNA, 826 bp, Unknown
  Bacterial polypeptide expressing nucleotide sequence isolated from the Sargasso Sea
gatgaaattgaagaagtaaaatcaaaaggtgttgaaattaatgaaaataatctaattttatctgaagcagccacgttaattctaccatttcacagagagatggatgaaataagagaagactctgccggcaactcaaaaataggaactaccagaagaggtattggcccagcttatgaagataaagtgggcagaagatctataagagtaatggatctggcgtctaaaaaaaatcttgaaaataggttaatggttgttttagaacaccataatgcaatccgtaaaggattaggcaaaacaatttatcaaaaagataaattagttgaagatttattaaaattagcacccaatattttaaaatactcggctccagtttggagaaaaatagatcaatttaaatcagaaaataaaaaaattttatttgaaggtgcccaaggaattttacttgatgttgatcatggtacgtatccatacgtaacttcctcaaatactgtggccgcttctgctgcaacaggatcaggttgtggtcccaaatctattagtttcgttttaggtatcacaaaagcttacacaacaagagtaggtgaaggaccttttccaacagaacttaaagatgatattggtaatcatttaggagaaaagggacatgaatttggaactgtaaccagtagaaaaagaagatgtggctggtttgatggggtgctagtaagacaaacaataaaaatttcaggtattgatggtatagctcttacaaaattagatgttttagacgaattagatgaaataaatttatgtgtagcttatgaactaaatggaaaaaaaatagatt

SEQ ID NO: 316222 - DNA, 892 bp, Unknown
  Bacterial polypeptide expressing nucleotide sequence isolated from the Sargasso Sea
agttgactatctctccgaagactttgacttagtggttagataccaaggtggaaataatgctggccatactgtgattgtcgatgacaaaacatacaaattaaacctaattccatctggcgtaattagagggaaagattgttatttaggtcagggtgttgttcttgaccctaaccacttttctagtgagtatgatcaaattgtaaaaaaaattttaaaccccaaggtattcttatcatcaaacatatctctcatcttagaatatcataaacaactggataaaataaatgagtcaattttaaatagcgaaaaaaaaataggtacaacctctaagggtatcggccctgcatatcaagataaagttggtagaaaaagtataaagctttatgatttaaaatctaaaaatattattgaagaaaaaattcactcaattaaaaagttttatgatccgatactagaaaaatttaatgaaagtaaaattgatgtcgatcaaatagtaaaggaattacaaatattttatgaattagtaaaggatctaattattgataattctttaattaaaaaaaaatttaaaaataaaaaaatattatttgaaggtgctcaaggtgcacttcttgatttagatcatggttcttatccttttgttacttcatcaaatactgtttcatcaaatattgttataggctcagcgttacaagttgattatcaaactataggtatatttaaagcctatgctactagagtaggtaatgggccattcccatctgagctatttgatagtgtaggtgactatattgctgaaaaaggagttgaaattggtactgtaacaaaaaggaaaagaaggtgtggttggcttgacttggtatctttaaaatatagttgtgaaataaatcgt

SEQ ID NO: 316223 - DNA, 565 bp, Unknown
  Bacterial polypeptide expressing nucleotide sequence isolated from the Sargasso Sea
attggccaatgttgttgtaatcggagcccaatggggtgacgaaggaaaaggtaaaataacggatttacttagtcgttcggcagatgttgtcgttcgctatcaagggggagtaaatgcaggtcatactatagtcgtagatgataaagtcttaaaattacatttaattccctcagggatactttataaaaatacttcttgtctaattggttcgggaactgtagtagatccaaaaatcttgcttaaagaaattgacatgttaattgataatggaattgatatctcaggattaaaaatttcatcaacatcacatgtaacaatgccctaccaccgaatattggatgaagcgatggaggctgatagaggttcaaacaaaatagggacaacaggtcgtgggattggcccaacttatgcggataaatcacaaagaaatggcataaggataagagacttactccataaggaaaggctaagtgatgtgatcgaaattccattaagagaaaaaaacggtctactagaaaaaatctatggcattaaaccacttaaattagaagatattgttgaagaa

SEQ ID NO: 316224 - DNA, 652 bp, Unknown
  Bacterial polypeptide expressing nucleotide sequence isolated from the Sargasso Sea
actggctttaaataaaaatattttaattgaaggagcacaaggtacaatgttagatattgattatggaacatatccttatgtaacatcatctaattgttcttcaggaggtataggcaccggccttggaatacctgggtctaaattagatgatattataggtatttttaaagcatatactactagagtaggtggtggcccatttcctacggaattatttgataaagatggagaacttttaggtagtataggtaaagaatttggagctactacaggtaggcctaggcgttgtggatggtttgatttagttgctgcaagatatagcgctagagttaatggcttaacaggaatagctcttacaaaactagatattttaaattcttttgaaacaattaaagtatgtacatcttatgatttcaagggtcatcaaactcaaaatatgacagaagcattaaataatttagaagatgtaacaccaatttataagtcgtttaatggatggaagattgacattgatgatattactagttttgatcaattacctaatgaagcacaggtatatataaaatacttagaatcagaaattggtgttccgatttctattatttctattggtccaaagcggcatcaaatcatagaatgtaatacgaaataa

SEQ ID NO: 316225 - DNA, 593 bp, Unknown
  Bacterial polypeptide expressing nucleotide sequence isolated from the Sargasso Sea
atccatatgtacttcatctaacactatttctggtcaaattttttcaggcactggttttagtgatagaaataatcataaaatttttggaataacaaaagcttatacaacaagagtaggttcagggccgttcccaacagagttacatgataatattggaaagtatttaggcgaaaagggtcaagaatttggaacagttacaaaaagaaaaagaaggtgtgggtggtttgatagcgttctattaaaacaatcaattaaactaaatggtattactgacattgttcttacaaaactagatgtgcttgatgaattaaaagagattaacgtatgtataggatatataattgatgataaaaaatatgactatttacctagtgaggaaattttatatgataaaataaaaccaatttataaaaaaattgatggttggcaaactaatactgctggaattaacgattggagaaatttacctaagaatgctgtaaaatatattaagcttttagaggaattaatggaaacaaatatttcaatagtatctacaggacctgatagaaatgaaactatagatataaatggtaccttactgaatatttagt

SEQ ID NO: 316226 - DNA, 865 bp, Unknown
  Bacterial polypeptide expressing nucleotide sequence isolated from the Sargasso Sea
tgtgacttatttaatactgaaaagttgattgataaaatacaaagtgctttattccatcataatcccataagaaaggggcttggcataaaagaattagaggctaaaactattttaaatgaaattactagctattctaactttattaagccctttgttaaaaatgtatggcatgaacttttaaatttacaatataaaaataaaaatatacttttcgaaggagcgcaaggtaccttattagatattgaccatggaacttatccattcgttacgtcatcaaacactgtatctgcacaggcatccataggtacaggggttggatcaattaataactgttttactttaggaataaccaaagcttacctcacaagagttggggaaggaccatttcctactgaacaaagtaatgaaataggagagaaattgggttttcttggaaaagaattcggaactgttacaggaagaaaaagaaggtgtggctggttagatttagttttgcttaaacaatctgtaaatgtttcaggtttaaagggtttagcgctcactaagcttgatgtacttgatagttttaaaaagataaaggtatgtacttcatatacttataaaaataaaaaatatgattaccttccattaggagttgatagatttaatcaagttaaacctaattacattgaactaaatggatggaatgaaaaaaccatgggagcaaaaaaactttcagatttacctaaaaatgctaaaaaatatataacttttatagaagagtttgtaggagtaccgataacaatgttatctacaagtccagagagagaagatacaattttattcaaagaccccctttggagcttaaacatttttactttctaaa

SEQ ID NO: 316227 - DNA, 742 bp, Unknown
  Bacterial polypeptide expressing nucleotide sequence isolated from the Sargasso Sea
tctaaaatcgatctaaatgaattggtagatttaaatttgaaacaagctgaacaattgaagccttatattggaaatgtaatagatgaaataagagaattgcaaaaatctaaaaagaaaatcctttacgaaggtgctcaaggcgctttattggatgtaagcttaggaacttatccttttgtcacatcaagtaacctaattgggggtgttccagctggcgcgggaattagtccatctgatattgattatacgataggaattaccaaggcttacactacaagagttggcgaaggaccttttcctactgagttgtttgatgagatgggaacttacttagctgaaacgggtggagaggttggagctactaccggaagaccgagaagatgtggatggctagatggtttccttctaaagaatatggttaaagtcagtggagtagacggactgtgcttaactaagatagatgttttggacggattagaaaaaataaagatttgtaatgcttattctagtgaccttactgaagctgaaatgatagaaactatggatttagagcttgctcagccagaatatctagagatgccaggctggtctaaacttacagcaggacaaacttcatatgaagaactcgatgataatgctaaatcttttgttgagaaaatagaagaaatttcaggagttcctgttattatgatttcaactggtcctaagcgcgaagatacaattattagaaaagatatataag

SEQ ID NO: 316228 - DNA, 672 bp, Unknown
  Bacterial polypeptide expressing nucleotide sequence isolated from the Sargasso Sea
gaaaatttagataatagattagaaactgttctaatgcatcataatgctattagaaaaggtcttggaaaaaaacttttttataaggatgaattaaaaaaaaacttacttaaaatagctcctcaaattttaaaatattctcaacccgtttggaaaaaaatcaatgagtataaaaataaaggaaaaaaaatattatttgaaggagctcaaggagtattgcttgatgtagatcatggtacgtatccatttgttacatcatcaaatactgttgcatcatctgcagcgactggttccggatgtggtcctaattctataaattatgttttgggaattacaaaagcatatactactagagttggagaaggacctttccctactgaattattagataaaactggagaagagttaggtgaaaggggcaaagaatttggaacggttaccagtagaaaaagacgatgcggatggtttgatggagtactggttagacaaacaattaaaatttcaggaatagatggaattgctctaacgaaacttgatgttttagatgagcttgatgaaattaaaatttgtgtagcttacaagttaaatggaagagaaattgattacttgccagcagctgttgatgatcaattaaaagtaaaaccaatttataaaacatttaggggttggaaatct

SEQ ID NO: 316229 - DNA, 728 bp, Unknown
  Bacterial polypeptide expressing nucleotide sequence isolated from the Sargasso Sea
ttaattaagattcataataaattgttggagcatttttatgatgcagaacccttttctgtggaagaaatcctaaataatctactttcttttaaaaactttgctgaagctttctcagttaatacaacagacttattaatgaattggtctgaagagggtaaagaggttttatttgagggtgcgcaggggactttccttgatattgatcatggaacctatccctatgttacttcatcaagcactacaattggtggagtttcatcaggtcttggaatagggccaaagcacattaataatgtaatcggaattgttaaagcatatgcaacaagagttggagaaggcccatttataactgagctatttgatgaagatggagaagaaatagctaaacgtggaaatgaatttggagcaactacgggtaggccaagaagatgtggatggctcgatcttgttgctttaaaaaaggctatttttataaattctgttgacagtttatgtatgaccaaagctgatgtgctcgatacttttgaaaatatacgtgtttgcgtagcttatgatgacaataacttacctatctataagagattcgaaggatggcaagaggataccagtcaatgcagttcatatgacgaacttccacaaaaattaaaagattatgtaaaattcattgaggaaactgtaaactgcaaagttagcataatctctgttggcccttccagagagcaaagcat

SEQ ID NO: 316230 - DNA, 723 bp, Unknown
  Bacterial polypeptide expressing nucleotide sequence isolated from the Sargasso Sea
taacaaaaatttctttaaagattcttaaatattcaaagcctgtttggaaaaaattagatgaatttaaaaagaaaaggaaaataattctttttgaaggagctcaaggtatacttttagatgtggaccatggaacatatccatttgtaacatcatcaaacactgttgctggtgcagcttatgcaggaacaggatgtagtcttaatacaattaattatgttcttggtatagttaaagcctatacaacgagagttggtgaagggccatttcctacagagttaaaaaatgaaataggaaataaaattgggagaaaaggtaaagaatttggaactgtcactaatagaaaaagaagatgtggatggtttgatgctgtattagttaagcaatcatgcattatatctggaattaatggaatagctttgaccaaaattgatgttctagatgaattaaaaaatttatatatttgtgtagcttatcggcttaatgggaaaaaaattgattattttcctagctctttacatgaacaaattaaagcaaaaccaatatataagcgttttgatggatggttaaaaaatacaaaaggtataagaaagttgaaagatttgccaaacaatgcaaaaaaatatattaattttattcaaaaatattgcggtgttaaaatatcaagtatttcaacaagtcctagaagagaggatactattcttttagaaaatccctttaaataac

SEQ ID NO: 316231 - DNA, 835 bp, Unknown
  Bacterial polypeptide expressing nucleotide sequence isolated from the Sargasso Sea
tgattggctatcaagtgaggctgacgtaattgtaagatttcaaggcgggcataatgctggccacactcttgttatagatagtatagtttacaaattaagactgttaccatcaggaatagttagaaaaaataaaatatcaattattggaaatggcgtagtgattgatccatgggcacttttagatgagattgatgaaattaaatctaaaggtgtagaagttaatcctgataatttaattttatctgaagcagccactctcatcttgccatttcataaagaaatggatgagattagagaagatgcagcaggaaaatcaaaaataggaactacaagaagaggaataggaccagcgtatgaagataaaattggtagaagatcaataagggtaatggatcttgcatcagaaaataatttggataaaagattagatgtagtattaagtcatcataatgccataagaaaaggtttaggaaaaactgaatttaaaaaagagcatttaaaaaaaaatcttttaaatattgcaccacaaatacttaaattttcacagccagtatggaaaaaaatagatgaatttaaatctcaaaacaaaaaaatattatttgaaggtgctcaaggagttcttttagatgttgatcatgggacttatccatttgtaacttcctctaatactgtcgcttcgtctgctgcgaccggctcaggctgtggtataaactccattaattatgttttaggtattacaaaagcatacaccacaagagttggagagggcccttttccaacagaactaacagatgaggtaggcgacttacttggaacaaggggaaaagaatttgga

SEQ ID NO: 316232 - DNA, 723 bp, Unknown
  Bacterial polypeptide expressing nucleotide sequence isolated from the Sargasso Sea
ggtcgacgttcaattcgagttatggatttaagatcagaaaataatttaaatcaaagattagatactgttttaatgcaccacaacgctataagaaaaggattaggaaaaaaggtttacgaaaaaaaaaaattaaaaaatgagttaatgatgatagcagataaaattctcaaatttgctaaaccaacatggaagatattagataattataaaaatttaggaaaaaaaatattatttgaaggtgctcaaggaatacttttagatgtcgatcatggaacatatccatttgttacatcatcaaatactgtagcggcaagtgcttcaattggttcaggatgtggacctaattctctaggctatgttctaggaataaccaaagcgtatacgaccagagttggtgaaggaccatttccaactgaattaaccaatgatataggtgctcttttagggagaagaggaaatgaatttggaacagttactaatagacaaagaagatgcgggtggtttgactctgttttagtgaaacaaacatgtaaaatttctggaataaatggtattgctcttactaagcttgatgttttagatgaactagaagaaataaaaatttgtatacaatacgaattaaatggaaaaaaaattgattatttcccaacagctgtcgaagaccaaattaaagtaaaacctgtttacaaaactctaaagggttggaaaacctctacaaaaggc

SEQ ID NO: 316233 - DNA, 435 bp, Unknown
  Bacterial polypeptide expressing nucleotide sequence isolated from the Sargasso Sea
ggggcatgtattggggctggagtgggtcccactttaattgatagagtaatcggtgttgcaaaagcttataccacaagagtaggtgaagggccattcccaacagaattgcaagggagtattaatgatcaactatgtgatagaggcagtgaatttggaaccactactgggagaaggagaagatgtgggtggtttgatggagttattggtaaatatgctgtatctgtaaatggccttgattgtttagccgttacgaaacttgatgttttagatgaattagatgagatacaagtttgcgttgcatatgatctcaatggagaggaaatagactactttcccacaaattcagatgacttaaaaaaatgtaagccaatcttcaaaaaattaaaaggttggcaatgttcaacagcagattgcagaaaactatctgatctccca

SEQ ID NO: 316234 - DNA, 744 bp, Unknown
  Bacterial polypeptide expressing nucleotide sequence isolated from the Sargasso Sea
tatgttttatactgttattggaacccaatggggtgatgagggaaaaggaaaaattgttgattggttttcatctaaagctgatgctgttgtcagatttcaagggggaaataatgctggacatactattaaaataaatgaaaaagtttttaaattaaatcttttgccatcaggaattattagaggaaaaaaatgttttattggtaatggagttattcttgatccatgggccttaagggatgaaatatttaaattaactgattcaggaattgcaatcaatcctcagaatttgcagatagctgaaaacatatgtttaatacttcctttgcataaagatttagatggaattaatgaagatagtagaggtaatgaaagtataggaaccacaaaaaaaggcattggaccagcttatgaggataaaattggacgaagatcaattagattatgcgatttatcagataaagatctcataaagaaaaaaataaaaaatttagtttcgtttcatggattaaaacttaattattacaataaaaatatcaaagaagatgaattgcttacaaagctaatagaagtttacagtgatatatctcaatattcttttcccatatggaaaactattaatgatttaggagataaaaataaaattattttatttgaaggtgctcaaggagcattattagatattgattttggaacttatccttacgttacatcttcaaatacatctgcaggtcaaatatttgcagg

SEQ ID NO: 316235 - DNA, 946 bp, Unknown
  Bacterial polypeptide expressing nucleotide sequence isolated from the Sargasso Sea
atgaaaaatgttgttgttgtgggttcgcagtggggagacgaaggcaaaggaaaaattgtagattggctatctagtgaagcagatgtagttgttcgttttcaaggtggtcataatgctggacacactttagttattgataaaaaagtatttaaattaagactgttaccctctggaatagtaagacagggaaaaatatcaattttaggcaatggtgtagttatagatccttgggctttgttagatgaaattaaagaaataaaaaaaaagggaataaatgtaagttcagataatttcatgatttccgagtcagcttcactaattcttccatttcatcaagaaatggatgaaataagagaagatgcagctggaaaaagcaaaattggaactactagaagagggattggtccttgctatgaagataaagttggaagacgttctatccgagtaatggatttaagatcaaccagtaatcttgatagtagattagaaaatgtattattacatcataacgctattagaaagggtttaaaaaaaaagctgtataaaaaagttgatcttaaaaagaaattattaaaaattgctccagaaattttaaaatttgcacaacctgtttggttgaaattagatgagtttatcaaagatagaaaaaaaattttatttgaaggagctcaaggaatactcttagatgtagaccacggaacgtatcctttcgttacttcatcaaatacagtaccagcaatggcagcaaccggatctggtttaggaccaaataagataaattatgttttaggtattactaaagcttacacaacaagagttggtagtggaccgtttcctacagaacttaaaaataaaattggtgaaaacttaggaaaaagaggaaaagaatttggaacggtaactgcaagaaaaagaagatgcggttggtttgatggtgttttggtgc

SEQ ID NO: 316236 - DNA, 831 bp, Unknown
  Bacterial polypeptide expressing nucleotide sequence isolated from the Sargasso Sea
aagaaaatttagaccataggcttgaaactgtattattgcatcataatgctataaggaaaggactaggaaaaaatatttaccaaaaagataaattaaaaaaggatttattaaaaatcgctccagaaattttaaaattctcaaaaccagtatggaaaaaaatagacgaatttaaatctcaaaataagaaaattttatttgagggcgcacaaggcgttcttttggatgttgatcacggaacatatccatttgtaacttcctcaaatactgttgcatcttcagccgccactggttcaggttgtgggccaagttctataaattatgttttaggtataacaaaagcttacacaacacgagttggtgaagggccttttcccacagagttaaaagatgaaattggagaggaacttggcactaaaggaaaagagtttggaacagtaactagcagaaaaaggcggtgtggttggtttgatggggttttagttagacaaacaattaaaatctcaggaattaatggaatagctttaactaagctcgatgttttagatgatttagatcatgtgaaaatgtgtattgcatatgaattagatggaaataagattgattatttaccagcagcagttgatgatcaattaaaagtaaagccaatttataaaacttttgaaggctggaaaacatctacaaaaggaacaaaaaattttaaagatttacctgaaaatgcaaaaaaatatattcgtgagttagagcaatttatagaaactaaagtatcaagtatctctactagccccgaaagaaatgatactatcttaattgtagatccttttaaaaattaat

SEQ ID NO: 316237 - DNA, 972 bp, Unknown
  Bacterial polypeptide expressing nucleotide sequence isolated from the Sargasso Sea
tccatgtggctttggataaagcgcgcgaagtagcccgtggtgataagccaattggaactacgggtcgtggtattggcccagcctatgaagacaaagtagcacgccgtggtctgcgtgtaggtgatttgtttaatcctgaattatttgctgaaaagctgaaagttctgatggacttacacaacttcactttaactcagtactacaaagtggatgcgattgatttccaaagcaccttagacagtgctttagctatagctgaagtgttaaagcctatggtggtagacgtaaccgatttactggataaagcccgtaaagccggtaaagaaatcatgtttgaaggtgcccagggcactttattagacattgaccacggtacttacccttatgtaacttcgtcgaacactacagcaggtggcgtagcgactggtgctggttttggcccacgttacttagactatgtgttaggtattgtgaaggcgtataccacccgtgtgggttcaggcccgtttccaacagaactggactgtgaagtcggtgaacacttgggtgtcaaaggccatgaatttggcgccaccactggccgtaaacgccgttgtggctggtttgatgctgttgcagtcaaacgtgctgtgcagttaaacagtatctccggattctgcttaaccaaactggatgtgttagatggtttaagtgtggtcaaaatttgtgtgggctacaaagcagctgacggttcagtcactgacgttccgccaatggctgctgaaggttatgaagtggtcactccggtgtttgaagaaatgccaggctggacccaaagcacttttggcgtacagaagctggaagaattgccggttgaagcgcgcaactacatcactcgtctggaacaagtgacaggtgtacctattgatataatttcaacaggcccggatcgtattcagaccatcacgctgcgtcatccatttgccgtttaat

SEQ ID NO: 316238 - DNA, 943 bp, Unknown
  Bacterial polypeptide expressing nucleotide sequence isolated from the Sargasso Sea
aagagaagattccttgctggtaattcaaaaataggaactaccagaagaggtattgggccagcttatgaagacaaagtaggtagaagatctataagagtaatggatctagcgtctaaaaaaaatcttgaaaataggttaactgtagttttagaacatcataatgcaatccgtaaaggattaggcaatccaatttatcaaaaagacaaattatttgaagatttattaaaaatagctcctaatattttaaaatactctgccccagtttggagaaaaatagatcaattaaaatcggaaaacaaaaaaattttatttgaaggtgctcaagggatattgctcgatgttgatcatggtacatacccatatgtaacttcctcaaatacagttgcagcttctgctgcaacagggtctggatgcggcccaaattctattaatttcgttttaggtatcacaaaagcttatacaacaagagtaggtgaaggacctttcccatcagagcttatagatgatattggtaatcatcttggtgaaaaaggtcatgaatttggaactgtaacgagtagaaaaagaagatgtggttggtttgatggggttctagttagacaaacaattaaaatttcaggcattactggaattgctttaacaaagttagatgttttagacgaattagatgaaataaatttatgtgtagcttatgaattaaatggaaaaaaaatagattattttcctgcagctgtagaagatcaattaaatgttaaaccagtttataaaaaatttgagggatggaaatctaaaacacaaggtattaaaaaatttaatgatttaccagaaaaagcaaaaatttacgtaaaagctattgaagaatttgttgaaataaaaatatccagtatttcaacaagcccagaaagagaagatacaatccttttgatagatccatttaaataaa

SEQ ID NO: 316239 - DNA, 585 bp, Unknown
  Bacterial polypeptide expressing nucleotide sequence isolated from the Sargasso Sea
aaaacagatctatattatttgagggagctcagggaactcttttagatattgatcatggcacttatccttatgtaacatcatctagtacaactgcaggaggtgtctctactggtttaggaataggcccaaagtatattgacaaaataattgggatatcaaaggcatatacgactagggttggtgaaggaccttttattacagaactttttgatgataatggcaaaatgcttgctgaaagaggaaatgagtttggagcaacaactggacgaccaagaagatgtggttggcttgatctagttgccttaaaaaaagctatttttataaattctgttacagacctttgcattacaaagcttgatgttttagatgaaatgaaaaagattaatgtatgtattgattatgaaaatgatctgccagtatataaagagtttgagggctggttatcctcaaccgaaggcatcactgaatacgatagcctccctaaaaatgcaaaaatctacataaaatatattgaagattttgttaagagcaaagcttcaattatttcaaccggagcatttagagatcaaacaatttttaaataat

SEQ ID NO: 316240 - DNA, 838 bp, Unknown
  Bacterial polypeptide expressing nucleotide sequence isolated from the Sargasso Sea
gatgaaaaatgtagttgttgttggatctcaatggggcgacgaaggcaaaggaaagatcgttgattggctttcaagtaaggctgatgttgttataagatttcaggggggacataatgctgggcacactttggtcattgatggtataacatataagttaagattattaccatctggaattgtcagaaaagataaagtttcaattattggaaatggagttgtaattgatccctgggcattgttagatgaaattaaagaaattcgctcaaagggagttaaagtagatgaaaaaaatcttattatttctgaagctgcaaatttaattttaccatttcatagagaaatggatgaaataagagaggatgctgccggtaaagctaaaattggaacaacgagaagaggtattgggccagcttatgaggacaaagttgggagaagatcaataagagttatggacttaatatctgaaaaaaatctagatcataggttagaaacagttttgatgcatcataacgcaataagaaaaggacttgggaaagaaatttttaaaaaggacaaacttaaacaagaattattatcgattgctccaaaaattttaaaattctctcaaccagtttggaaaaagatagatgaatttaaatctcaaaaaaaaaaaatactatttgaaggtgctcaagggattttgcttgatgtagatcatggtacttatccatttgtaacatcctcaaataccgttgcttcagctgctgcgacaggatcaggatgtggtcctaattctattaattatattttaggaattacaaaagcatatactactagagttggagagggtccatttcca

SEQ ID NO: 316241 - DNA, 667 bp, Unknown
  Bacterial polypeptide expressing nucleotide sequence isolated from the Sargasso Sea
aatgggtaaaaataataaagtgatagtttttgaaggagcacaaggatcaatgcttgatattgattttggtacgtacccttatgttacctcttcaaatacaatttcaggtcaaatattttcaggaacaggtttcagtaatagaaataatcataaaattcttggtataacaaaagcatatactaccagagttggttcaggacctttccctacagaattaaatgataatattggagaacatttaggagtaagaggtcaggaatttggcactgttacaaaaagaaaaagaagatgtggctggtttgatagtgttctattaaaacaatcgataaatttaaatggtattacagacattgttcttactaagttagatgtattagatcaattagaggaaattaaagtttgcataggttatgatattgagggaaaaaaatatgattatttgcccagttcagaatttttatatgaaaaaataaaacctgtatataaaactattgcaggctggcaaacctcaactgcaggtattagtaattttagcaacttaccaaataaagcaattgactacataaaaacccttgaagatttgatggaaataaaaatatctattgtttctactgggccagataggaaggaaactattgatataaatggtactttattgaatatttag

SEQ ID NO: 316242 - DNA, 778 bp, Unknown
  Bacterial polypeptide expressing nucleotide sequence isolated from the Sargasso Sea
aatgaaaaatatagttgtagttggttctcaatggggagatgagggaaaaggaaaaattgttgattggctctctcaacaagcagatgttgtaattagatttcagggaggacataatgctggtcatacgttggtaattgatggtgtaacttataagttaagattactaccatcagggatagtaagaaaagataaagtttcaattattggaaatggagtagtagttgatccctgggcattacttgaggaaatagaagaaataaaatcaaaaggggttaatgttacaactgataactttataatctctgaagctgcaaatttaattttaccatttcataaagaaatggatgaaattagagaagatgcagctggcaaaggtaagattggaactaccagaagaggaattggcccagcttatgaagacaaagtaggcagaagatctattagggttatggatttaagatctgaaaaaaatttagatcaaagattagagtctgtgctaatccatcataatgcgattaggaaaggtttaggacaaaaaatttttgaaaaaaagcgattaaaatccgatttacttaaaattgcacctcaaatattacaatattcccagccagtgtggcttaaaattgatgaatttaaaaaacaaaaaaagaaaattttatttgaaggcgctcaaggaattttacttgatgtagatcacggaacttatccgtatgttacttcctccaatacagtagcctcaagtgccgcaacaggatcaggatgtggtcctaactcaatt

SEQ ID NO: 316243 - DNA, 1300 bp, Unknown
  Bacterial polypeptide expressing nucleotide sequence isolated from the Sargasso Sea
atggccaaaaacgttgtcgtactcggaacccaatggggtgacgaaggaaaaggaaaaatcgttgacttgttaactgacaaggcaagctatgtggtgcgctatcaaggcggacataacgctggtcatacgttagtaatagacggtgaaaaaacggtattgcatttgatcccttcaggtgttttacgtgcaaacgtaaaatgtgtgataggtaacggtgtagtgttatcccctgaagctttattaaaagagatggccatgctggaacaaaaaggtgttccggtgaaagagcgtctgttgttgagcgaagcttgtccgttaatcctgcctttccatgtggctttggataaagcgcgcgaagtagcccgtggcgataagccaatcggtactacaggtcgtggtattggtccagcctatgaagacaaagtagcgcgtcgtggtctgcgtgtaggtgatttgtttaatcctgaattatttgctgaaaagctgaaagttctgatggatttgcacaacttcactttaactcagtactacaaagtggatgcaatcgacttccaaactactttagacaacgctttagctatagctgacgtgttaaagcctatggtagtagacgtgaccgatttactggataaagcccgtaaagccggtaaagaaatcatgtttgaaggtgcccagggcactttattagacattgaccacggtacttacccgtacgtgacttcgtcgaacacaacagctggcggcgtagctaccggtgctggttttggcccacgttacttagactatgtgctaggtattgtgaaagcttataccacccgtgttggttcaggcccgtttccaacagaactggactgtgaagtcggtgaacacttaggtgtcaaaggccatgagtttggcgcaaccactggccgcaaacgccgttgtggctggtttgatgctgttgcagtgaaacgtgctgtgcagttaaacagtatctctggattctgcttaactaagctcgacgttctcgatggcttagatgtggtcaaaatttgtgtcggttataaagccgctgacggttctatcactgacgtgccgccgatggcagctgaaggttatgaaatcgttactccggtatttgaagaaatgccgggctggactcaaagcacttttggtgtccagaagctggaagacttgccagtagaagcccgcaactacattactcgtctggaacagattactggagtacctattgatattatttcaacaggcccggatcgtattcagaccatcacgctgcgtcatccatttgccgtttaat

SEQ ID NO: 316244 - DNA, 646 bp, Unknown
  Bacterial polypeptide expressing nucleotide sequence isolated from the Sargasso Sea
ttgacctggaaaggaaaattaatgaacaatcttgtagtagttggttgtcagtggggtgacgaaggaaaaggtaagcttgttgattatttaggagataaagcagatattatagtacgttttcaggggggtaataatgcaggtcacacaattgtaactggtgataaaatttttaaattatctttgctaccttctgggattttaagaaataataaactttcaataattggtaacggtgttgttttagatccttgggctttaaaaaaagaaattgattctttggaaaatttaggaattaaaatttcaaaaaaaaatctgatgattgcagaaaacgtttcactaattcttcctttccataaagagttagataaacttagagaagaaattgctggtggtaaaaaaattggaacaacaggaagaggaataggtccagcatatgaagacaaagttggaagacgatcagttcgtttgtctgatttaaataatccagaattacttagggaaagattggaaagatctctagctcattacaatatcttaatgaaaggctatggtaaatctgaatatagtgtttttgaggtgcaaaaaaaattagatgaaatttctcattttatttccaagttctcaacatgtgttggcaagaattaaa

SEQ ID NO: 316245 - DNA, 1171 bp, Unknown
  Bacterial polypeptide expressing nucleotide sequence isolated from the Sargasso Sea
aatgaaaaatgtagttgttgtaggaactcaatggggcgatgaaggtaaaggaaagattgttgattggctttcaaatgaagcagacgttgtcgttcgttttcaaggaggacacaatgccgggcatactttagttattgatggagttacctacaaacttagattattaccatctggaatagttaggaaaaataaaatttcaataattggaaatggagttgttgttgatccctgggcattactcgatgaaattaaagaagctaaatcaaaaggtattaatattgatgaaaaaaatttaattttatctgagtctgcaaatcttatacttcctttccatagcgagatggatcaaatgagagaagatgttgcaggaaaagatgatattggcaccacaagaagaggaattggccctgcctatgaagataaagttggaagaagatctgtcagagttatggatttagtatctgaaagtaatttagataaaagattaaaaactgctcttgtccatcacaacacaataagaaaaggcttaggaaaaaaaattattgataaagataaattaaaaaaagatcttctaaaaatagctccagaacttttaaaattttctcaacctgtttggaaaaaaatagatgaatataaatcaaaaggtaaaaagatattatttgaaggtgcacaaggtattttattagacgttgaccacggtacatatccatttgtaacttcctctaatactgtagcggcatccgctgcaacaggaacaggatgtgggccgaatactataaattatgttctaggtataacaaaagcctataccactagagttggaaagggaccttttccaacagaattaaaagataagacaggagaattgttaggtcatagaggaaaagagtttggaactgttactagcagaaaaagaagatgtggttggtttgatgcagttctagttagacagacaattaaaatttcaggtgttaatggaatagcgcttacaaaacttgatgttcttgatgaacttgatgaaattaagatgtgtgttgcctacaaacttaatggcaaagaaatagattatttaccagctgcagcagaagatcaaattaaagttgtacctgtgtacaaagtatttaaaggatggaaatctcccacaagcaaaattaaagaatttaataaatta

SEQ ID NO: 316246 - DNA, 760 bp, Unknown
  Bacterial polypeptide expressing nucleotide sequence isolated from the Sargasso Sea
atggcaaacgttgtagttgtcggcgctcagtggggagatgaaggtaagggaaaaattgttgactggcttagtgaaagggccgatattattgttcgttttcaaggtggtcacaacgccgggcatactctcgttattgatgggaagacttacaaattacacgctcttccgtccggcgtggtaaggggaggtaaactatcagtaattggaaatggtgtggttttagacccttggcatttgatcaaggaaataaaaatagttaaatcgcagggcgttgatatatccccagaaaatttaatcatagccgaaaatacaccacttatcttgcctattcacggagaattagatcgtgcccgtgagggcctcaacaaagttgctaaaattggaactactggaagaggcattgggccagcttatgaagataaggtcggtagaagagctatacgtgtagctgatttggcggaccgatctactttagaggctcgcattgatagattaatgctgcaccataatactctacgaagaggaatggagcttgaagaaattgataaatcaggtttaattgctgacctgcatgaaattgcgccgactattttaaaatactctgcccctgtttggaaagttttgaacgaaaaaaggaaggcaggaaatcgaattctttttgagggtgcacaaggagccttgctagatattgattttggaacttacccatttgttacatcgtccaatgtgattgcgggccaggcggcgactggttcgggcc

SEQ ID NO: 316247 - DNA, 1294 bp, Unknown
  Bacterial polypeptide expressing nucleotide sequence isolated from the Sargasso Sea
aatgaaaaatgtagttgttgtaggttcgcagtggggagatgaaggtaaaggaaagatagttgactggttatctagtgaagcagatgtagtagttcgttttcaagggggccacaatgctggacacactttagttatagataaaaaagtatttaaattaagattattaccatcaggcatagttagagaaggaaaaatttcaattttaggcaatggtgtagttatagatccctgggccttattagatgaaatcaaagaaataaaaaaacaagggataaatgtaacacctgaaaactttatgatttctgagtctgcttcattaatacttccatttcatcaagagatggatgagataagagaagattctgccggaaaaggaaaaattggtaccactagaagaggaattggtccttgttacgaagataaagttggaagacgttccattcgtgtaatggatttaagatcaaaagagaacctcgataataggttaaaaaatgtattattacatcataacgctataagaaaaggcttaaaaaagaagatttaccaaaaagatgatctaaaaaaaaaattattgaaaattgctcctgaaatcttgaaatttgcacaacctgtttggctaaaattagatgagtttaagaaagatagaaaaaaaatattgtttgaaggagctcaaggaatacttttagacgtagatcatggaacatatccttacgttacttcatcaaataccgtgccggcaatggctgcaacaggatctgggttggggccaaatacaataaattatgttttgggaatcaccaaggcttatacaacaagagttggtagtgggccatttcccacagaacttaaaaataagattggtgaaagtttaggaaaaagaggtaaagagtttggaacagtaacagcaagaaagagaaggtgtggatggttcgatggtgttttagtccgtcaaacaattaagattgcaggtataaatggaattgcattgaccaaactagatgttttggatgaattagatgaaattaaaatttgtgtagagtatgaattaaacggaaaaaggatagattatttacccgctgcttctgaagatcaatttaacatcaaacctatttataaaacttttccagggtggaaaagttcaactcaaggtataagaaatattaaagatttacctgaaaaagctaaaagttatatatatgctttagaagattttattggtgcaaaaatttcaagtatttcaaccagtccagaaagagacgatacaattttgatcgaagatccttttaaaatttag

SEQ ID NO: 316248 - DNA, 1291 bp, Unknown
  Bacterial polypeptide expressing nucleotide sequence isolated from the Sargasso Sea
atgaaaaacgttgtggtagtaggttctcaatggggagatgagggaaaaggcaagatagtagattggctatcacgagaggcagatattgttataagatttcaaggtggtcataatgcaggtcacactttagtcattgatggggtaacatataaattaagattattaccttcaggaatagttagaaaaaataaagtatctattattggaaacggagttgttgttgatccttgggctctacttgatgaaattgaagaagtgaaatctaaaggtgttaaaattaatgaaaaaaatctaattttatctgaagcagctacgttaattttaccatttcacagagagatggatgaaataagagaagattcagctggcaaatcaaaaataggaactaccagaagaggtattggcccagcttatgaagataaagtaggcagaagatctataagagttatggatctggcgtctaaaacaaatcttgaaaataggttaactgcagttctagaacaccataatgcaatccgtaagggattaggcaagcctatttatcaaaaagataaattaattgaagaattattaaaattagcacctaatattttaaaatattcagctccagtctggagaaaaatagatcaatttaaatcagaaaataaaaaaattttatttgagggtgcacaaggaattttgcttgatgttgatcatggcacatatccatttgtaacttcctcaaatactgtggcagcttctgctgcaacaggatcaggttgtggtcccaattctattaatttcgttttaggtattacaaaagcttatacaacaagagtaggcgaaggtccttttccaacagaacttaaggatgatattggaaatcatttaggtgagaaaggacatgaatttggaactgtaaccagcagaaaaagaagatgtggttggtttgatggtgttctagtaaagcagacaataaaaatttcaggtattgatggtatagctctaacaaaattagatgttcttgacgagttagatgaaataaatctttgcatagcttatgagctaaatggaaaaaaaatagattattttcctgcagcagttgaggatcaattaaatgttaaaccaatttataaaaaatttgatggttggaaatctaaaacgcaaggtattaaaaaatttgaagatttaccagaaaaagcaaaaacttatgttaaagctatagaggaattcattgagacaaaaatttccagtatatcaacaagcccagagagagaagatacaattcttttaatagatccttttaaataat

SEQ ID NO: 316249 - DNA, 1163 bp, Unknown
  Bacterial polypeptide expressing nucleotide sequence isolated from the Sargasso Sea
cgctggtcatacacttgaatttgaagggattaaacacgttttacatacaattccatctggaatatttcattcaaaggctcttaatttaattggaaatggagttgtaattgatccagtaatttttgttgaagaaattgataaattaaaaaaatataaaattaattaccaagaaaaattattgatatcaaaaaaagctcatataatactacccactcataggcttctggatgcaacatcagaagcatcaaagggtaaattgaaaattggatcaactttgaaaggtattggtccaacttacatggataaaaccggaagaaatggaattcgtgttggagatcttttaaataaagactggaagaagaagtataacttgttgacaaagaaacatataagaatgcttagtttttttgaggttaatgttgaatttgatttaaaaaaattagaaaaaaaattttttgactctatcactgttttaaaaaaatgtaaaatagtcgatagtgaggaatatttaaataaggctcaaaaagaaggaaaaaaaattttagctgaaggagcgcaagggtcattacttgatgtagactttggcacatatccatatgtgacatcctctaatacaactgcagctggagcatgtacaggtctcgggattgccccaaataaaataaaagaagtttttggagtatttaaagcttattgcacaagagttggcagtggaccttttccaactgaaataaaaaacaactacggaaaaaaaatggcagaagttggaaatgaatttggatcaacaactggaaggacacgaagatgtggatggattgatttaattgcgttgaaatattctattcaaatcaatggtgttacacaattaatgatgatgaaaggagatgttctatcaggatttgataaaataaaaatttgtactggatatatacagaaaaataaaaaaattaacttttttccatatagcttagattgtaaagatgttaaaccaatatatattgaaatggatgggtgggatgaaaatttaaccgaaataaaaaatcaaaatgaatttcctgaaaatttcaaaaattatctgtcttttttagaaaaagaacttcaaacgccaataaaaattatttctgttgggcctgacagaagtcaaacaattcatatggcttaat

SEQ ID NO: 316250 - DNA, 997 bp, Unknown
  Bacterial polypeptide expressing nucleotide sequence isolated from the Sargasso Sea
atgcctttagaacaaggcactattactgttattgttggcgctcaatggggtgatgaaggtaagggtaaaattacagatttcttttcaggcgactcagattacgttgttcgctatcatggtggcaacaacgcaggtcatactgtaattgtaaatggtgatacttataaattacatttaattccttctggggttttataccctacccctataagcattattggtaatggagttgtaattgaccctaaggccctgttggatgaagtttcctatttaaacactaaaggtgtaactcctaatttattaataagcgaccgtgcacatataattatgccatatcataaaatgttagatttagctcttactaaccatcaacaaagccttgctgctggcagcactaaacgcggtattgcacctgtttatggcgataaaatgtttcgtaatggtattagggtggttgatctgctggaacctaatatttttcatgagaaattgaataaatcttttattttcgcgaccaatcttttgtccgctatatcttcatcagatttcgatttagattttgattctgtttataatgattatttaaagatgggtaaacttttatctccttatatatctgatatttctcttgaactttataatgcttacaataataataaaactatcctttttgagggcgctcaaggtatttcgctagatgttgatcatggcgtatatccttatacaacatctagcaatactattgcaggaagcatttcaacgggcaccggagtaagctatagagacatacatagaattattggtgttactaaagcttatttaagtcgagttggggaggggcctctcccttctgaggttcatggcgaggaagcgattcagctaagagaaaaaggtggagaatatggcactacaaccggtcgaccgcgtagggttgggtggttggaccttgttcaggtaaggcaggctgtacgtgtaaatggattaacggaaattgcac

SEQ ID NO: 316251 - DNA, 944 bp, Unknown
  Bacterial polypeptide expressing nucleotide sequence isolated from the Sargasso Sea
cctgccaacacatgttgccctggatatagctcatgaaaaatcacttggtaagtcatcaattggaacaactggacgaggcataggtccgacctatgaagataaggtagcaaggagaggaattagactaattgatttttctaacatagatatacttaagaaaaaactccagaaatcaatggattatcataatttcctactaaaagaatattataagagcgatactatctcaatagatatagtgcttgaaaaattagtaccaatttttgaggaaattaagtcttatgtatgcaatgtagctccattgatattaaaccttaacaaagactctaatataatatttgagggagctcaaggaactatgcttgatatagatcatggaacatatccatttgttacctcttctaatacaactatgtctggagtaatttccggaacaggtattggcgtagataaaattgattattcattaggcataactaaagcttatagtacacgagtagggcatggaccatttcccacagagttacatgatcaattaggactcaatatagctgaatggggaggagaagttggagctacaactggacgcgcaagaagatgcggatggttagatttgaaaatacttaagcagtcgatagaactaaaccgtattaatggtatagcactaactaaacttgatgttttagataatcttgaaaaaattaagatatgtctagattatggacctatagattatgaaaccctcaacacatctgatatgaagtatattgaaatggaaggttggaagagctcaacagtaggtataacaaattatgacgaattaccagaaaatgctaaaaaatacataaaaactattgaagaaatttctaaaacaaaaatagttatgatatcgactggcccatcgagagatcaaattatagtgctggaagatatatttaaataaa

SEQ ID NO: 316252 - DNA, 943 bp, Unknown
  Bacterial polypeptide expressing nucleotide sequence isolated from the Sargasso Sea
aatgttttatacaatcattggaactcaatggggtgatgaaggtaaaggaaagatagtagattggctctcttctaaagctgatcttgtggttaggtttcagggcggcaacaatgcaggacacaccattaaagttgacaaaaatgtgtataaacttaatcttctaccatcaggtattattagaaataaaaagtgtgtaattggaaacggagtagttttagatccatgggccttaattagagagattgccaatcttagagaacaaaaaattcttatagataaaaaaaacttatttattgctgaaaacgtatgcttaattttaccaattcataaactaattgatgaagttaatgaagagtccagaggaaataattcgataggaacaacaaaaaaaggaattggacctgcctatgaagataaagttggaagaagagctataagactatgcgatttaaatgatttaaaaaatctaaaattaaaaattaaaaatctatatgattttcataagcctagactcgataagtttaaaaaaaattctgattataaaaaaacttttaatgatttagttgaaatatcagaacaaattttcatatttagtgcacctgtatggaaaataattaatgatgcaggaaaacaaaacaaatttattttatttgagggtgctcaaggttcattattggatatagactttggtacttatccatatgtaacttcttcaaatacatcttcaggtcaaattttttcaggcactggttttggcataaaagaaaatcataacgtccttggcataacaaaagcttatacaactagagttggttctggcccttttgctactgagctaaatgatgaaataggagatcattttgtggacaagggacaagagtttggcactgtaacaaaaagaagacgtagatgtggatggtttgatagtgttttagtaaaacaa

SEQ ID NO: 316253 - DNA, 739 bp, Unknown
  Bacterial polypeptide expressing nucleotide sequence isolated from the Sargasso Sea
cttaaatctgatttacttaaaatcgctcctaaaatattaaaattttcacagcccgtgtggcttaaaattgatcaatttaaaaagcgaaaaaagaaaatattatttgaaggtgcacaaggtattttgcttgatgtagatcatggaacttatccttttgtaacttcgtctaatacagttgcttcaagtgcagctactggaacaggctgtggtcccaattcaataaactatgttttaggaattacaaaagcttatacaacaagagtaggggaaggaccttttccaacagaactaactgataaagtaggtgaacttttgggtacacgtggaaaagaatttggaactgttacaagtagaaaaaggagatgcgggtggtttgatggtgttctagtaagacaaacaattaaagtttcaggtatagacggtatagctttaacaaaattggacgttcttgatgaattagatgaaattaaaatgtgcgttgcttatgaactcgaaggagaaaaattagattatttacctgctgctgtagaagatcaaattaaaataaaaccaatttacaaatcttttccaggctggaaagtatccactagtgggattaaaaatatggattctttacctgataatgcaaaaaaatatatttttgcagtagaagattttattggtgcgaaaatatctagtgtctctactagtcctgaaagagacgatactattttaattgaaaatccttttgaagcttaat

SEQ ID NO: 316254 - DNA, 859 bp, Unknown
  Bacterial polypeptide expressing nucleotide sequence isolated from the Sargasso Sea
aaaattcaaagaaaaggaattagaattcaagacttattagatgaaacaaattttgaaataaaagttagaaaaaatatagaagatgtaaatttaactcttacaaaaatctatgaccactctccattagtagttgatgatattcttgatgaatttagcacttacaaagatatcgttactaatcatgttgcagatacatctttactaatagctaatgcaataaagaataaaaaaacaattttatttgagggagctcagggaacattgttagacattgaccatgggacatatccttttgtgacaagttcaaatacatcttctggcaatgcagctattggctcgggtgtaggtcctaaaaatatagatagaatagttggtgttacaaaagcctacatttcccgtgttggtagtggtccttttctaacagaacaaaaaaacgaaattggagattttcttattgaaaagggagcagagtttggagtagttactgggagaagaagaaggtgtggatggcttgatttaatttcccttaaatactcagtaagagttaactctttgacagagctttttataactaaacttgatgtactttcaggccttgaagagttaaagctttgtgtgggttacaaagataacgatgaagttatcactgactatccatttaatcaaaatgttttaaacagtgctgaaccagtttatgaaaccttcgatggttggacagatgatatttcaacagttaaatcttttgaggatctaccaaataatgcccaaagttatataaaagcgattgaagcttttatagaagtgcctattacgtttatctctgttgggccagagagaacagaaaatataataatttaaa

SEQ ID NO: 316255 - DNA, 857 bp, Unknown
  Bacterial polypeptide expressing nucleotide sequence isolated from the Sargasso Sea
tataagattaatggatttggtttcagagcaaaatcttactcatagattagaaacagtattaacgcatcataatgcaatcagaaaaggtcttggtaaaaaaatttatgagaaagagaatctaatgaaagatttacttaaaatagctcctgaaattttaaaatattcacaaccggtttggaaaaagattgatgaatttaaatcacaaggaaaaaaaatattgtttgagggagctcaaggaattttacttgatgtggatcatggaacctatccatttgtaacttcttcaaacacagtggcagcagctgctgctacgggttcaggttgtggtccaaattctataaattatgtcttaggaattactaaagcatataccacaagagttggagaaggtcctttcccaactgaattgacagacaaaataggtgaagaacttggaactagaggaaaagaatttggaacagttactagccgtaaaagaagatgtggatggtttgacggagttttagttagacaaacaattaaaatttccggaattgatggaatcgctttaacgaaattagatgtattagatgaacttgaccaaattaaaatgtgcataggatatgaacttaatggaaaaaaaattgactatttgcccgcatctgttgatgaccaattaaaagcaaaaccaatttacaagacttttgaaggttggaaatctccaactagtggtattaaaaaatttgatcatcttccagataatgcaaaaaactatataaatgaattagaaaaatttatagaatctaaaatatctagcatttcaactagtccagaaagaaatgatacaatattaattgaagatccttttaaaatttagt

SEQ ID NO: 316256 - DNA, 1294 bp, Unknown
  Bacterial polypeptide expressing nucleotide sequence isolated from the Sargasso Sea
gatgaaaaatgtagttgtagtcggttcgcagtggggagatgaaggaaaaggtaaaattgttgattggctatcaagtgaagctgacgtgattgtaagatttcaaggtgggcataatgctggccacactcttgttatagatagtatagtttacaaattaagactgttaccatcaggaatagttagaaaaaataaagtatcaattattggaaatggggtagtggttgatccatgggcacttttagatgagattgatgaaattaaatctaaaggcgtagaagttaatcctgaaaatctaattttatctgaagcagctactcttattttgccatttcataaagaaatggatgagattagagaagatgcagcaggaaaatcaaaaataggaactacaagaagaggaataggaccagcgtatgaagataagattggcagaagatcaataagagtaatggatcttgcatcagaaaataatttggataaaagattagatgaagtattaagtcaccataatgccataagaaaaggtttaggaaaaactgaatttaaaaaagagcaattaaaaaaaaatcttttaaatattgcaccacaaatacttaaattttcccagccagtatggaaaaaaatagatgaatttaaatcccaaaacaaaaaaatattatttgagggtgctcagggagttcttttagacgttgaccatgggacctatccatttgtaacctcctctaatactgtcgcttcatccgcggcgaccggctcaggttgtggtatgaattcaattaattatgttttaggtattacaaaagcatatactacaagagttggagaaggtccttttccaacagaactaactgatgatattggtgagttacttggaactagaggaaaagagtttggaacagttacaagtcgaaaaagaaggtgtggttggtttgatggagtgctagtaaggcaaactttaaaagtttcaggcattgatggaattgcacttaccaaactagatgtgctagacaatctagatgaaattaaaatgtgtattgcttatgagataaatggtaaaaaattcgattatcttcctgcctcagttgatgaccaatttatggcaaaaccaatatataaatcattcaaaggttggaaatcctcaacagtgggaataaaaaattttgatgaattgcctgaaaatgcaaaaaattacataaaagcacttgaaaaatttattgagactaaaatttcaagtatttctaccagtcctgagagaaacgatacaattttaattcaagatccttttaatctttaa

SEQ ID NO: 316257 - DNA, 943 bp, Unknown
  Bacterial polypeptide expressing nucleotide sequence isolated from the Sargasso Sea
aattagagaggactctgcaggtaattctaaaattggaactacaagaagaggaattggaccagcttatgaagataaagtaggaagaagatctataagagtaatggatctagcatcaaaaaaaaatcttgaaaaaagattaaccgtagtacttgaacatcataacgcaatacgcaagggattaggtaaatctctatatgagaaaaaaaaattagtcgaagaattagtaaaaatagcaccaaatattttaaattattccgcacctgtttggagaaaaatagaccaatttaaatcagaaaataagaaaattttattcgagggtgctcaaggtatattacttgatgttgatcacggaacttacccatatgtaacttcatcaaatacagttgcagcttctgcagcaacaggatctggatgtggccccaattcgataaattttgttttaggtataacaaaggcatatacaacaagagtaggcgaagggcctttcccaactgaacttacagatgatgttggcaatcatttaggagaaaagggacatgaatttggaacagtaacgagcagaaaaagaaggtgtggctggtttgatggagttttagtaagacaaactataaagatttcaggcattgatggtatagcattaactaagttagatgttttagatgaacttgatgaaattaatgtttgtgtagcatacgatcttaacggaaaagaaatagattattttccagccgcggtagaggaccaattaaatgttaaaccagtttataaaaaatttaaaggttggaaatctaaaacccagggaattaaaaaatttgaaaatttacctaagaatgccaagatttatataaaagcaattgaggagtttattgaaacaaaaatatcaagtatttcaacaagtcctgagcgagaagatactattcttttaatagatccgtttaattag

SEQ ID NO: 316258 - DNA, 620 bp, Unknown
  Bacterial polypeptide expressing nucleotide sequence isolated from the Sargasso Sea
gatgaaaaatgttatagttgttgggacacagtggggagatgagggaaaaggcaagattgttgactggctctcaagtgaagctgatgttgtagttagatttcaaggtggtcataacgcaggacacacactagtcatcgacggaaaaacttacaaattgagattattaccatctgggactgttagagaaggtaaaatttctataattggaaatggcgttgttgtagatccctgggctttaattgatgaaataaaagaaatgaaatccaaaggagttgaagtagatgagaataatctaatactctccgaggcagcaaaccttatattgccataccacaaggaaatggacgaaataagagaagatgcagccggaaacgcgaaaattggaactacaagaagaggtataggtccagcttacgaagataaagttggcagacgatcaattagagttatggatttagcttcagaaagtaatttagataaaagattagaagcagcactgatccaccacaatgcattgaggaaaggtttaaaacagaaggtttttaaaaaggataaattaaaaaaagatttattaaaaatagcaccacaaattttaaaattttcacaaccagtttggaaaa

SEQ ID NO: 316259 - DNA, 699 bp, Unknown
  Bacterial polypeptide expressing nucleotide sequence isolated from the Sargasso Sea
taagtattcaagccagtttggaaaaaattgatcagtataaatctgagggaaataaaatattgtttgaaggagcacagggaatattacttgatgttgatcatggcacatatccatttgtaacatcctctaatacagttgcatcttcggctgcaacagggtctggttgtggaccagacacaataaattatgtattaggtattacaaaagcttacacaacaagagttggcgaaggaccatttccaacagaacaaaataatagcattggtgaattactaggatctataggaaaagaatttggaactgttacaagcagaaaaagaagatgtggctggtttgacggtgtactagttagacaaacaataaaaatttcagggataaatggtgtagctcttaccaagcttgatgttttagatgagttagaagaaattaaaatgtgtattaaatacgaaatagacggaaaacaaattgattatttgcctgcagcagttgacgaacaattaaaagtaaaaccgatatataaaacttttaagggctggaaatgttctactaaaggtattaaaaattttgagaaattacctgaaaaagcaaaattatatattcttgagttagaaaaatttataggagcaaagatttcaagtatttcaactagtccagaaagaaacgatacaattttattagaaaatccttttaaaatttaat

SEQ ID NO: 316260 - DNA, 775 bp, Unknown
  Bacterial polypeptide expressing nucleotide sequence isolated from the Sargasso Sea
aatgagaaatgtcgtagtagtaggctcgcagtggggtgatgagggaaaaggaaaaattgtagactggttgtccagtgaggctgatgtagttgtgcgctttcaaggagggcataacgcaggtcatactcttgttatagacggaattacttataaacttagactacttccttctggcattgtaagaaaaaataaaatttcagttatcggtaatggtgtagtggttgacccatgggcgctactagatgaaattgcggaaattaaaaccaagggagtaaatgtagatgaaaataatcttatattatctgagtcagctaatctaattcttccttttcataaagaaatggacgagattagagaagatactgccggtaaagcaaaaattggtactacgcgtaggggaatagggccagcgtacgaggacaaaattggacgaagatccataagggtcatggatttggtatcagagtcaaatttagatcatagattggaagctgttttaatacatcataacgcaataagaaaaggtctgggtaaaaaaatatttgaaaaagataaactaaaaaaaaatttattaaaaatagcgccaaaaattttaaagttttcacaacctgtttggaaaagaatagatgagtttaaatctaaaggaaaaaaaatattgtttgagggagctcaaggaattttacttgacgttgaccatggcacttacccgtttgtaacatcatctaatacagtcgcatcagcagctgctactggtactggctgcggtgtaaattca

SEQ ID NO: 316261 - DNA, 1294 bp, Unknown
  Bacterial polypeptide expressing nucleotide sequence isolated from the Sargasso Sea
atgaaaaatgtagtagtagttgggtctcaatggggtgatgaaggaaaaggaaaaatagttgactggctttccagccatgccgatgttgttattagatttcaaggtggccataatgctggacatactttggttattgatggtgttacatacaaattgagattattaccgtctgggattgttagaaaaaataaaatatcaattattggaaatggagttgttattgatccatgggctttattagatgaaataaaagaaataaattcgaaaggtgtaaacgtagatgaaaaaaacttaataatatctgaagcagcaaatttaatactaccttttcacagggaaatggatgaaatcagagaagatgctgctggaaattctaaaattggaacaactagaagaggaataggcccagcttatgaggataaagtgggcagaagatctattagagtgatggatttagcctcaaaagaaaatttaaataaaagattagataatgtcctagctcatcataatgcaattagaaaaggattaaaaaaaaaaatttacgagaaaggtgttttgatagaggagttacttaaaatcgcaccaaaaattttgaaattttctcaaccagtttggaaaaaaattgacgaatttaaacaaaaaaataaaaaaattttgtttgaaggagctcaaggaatattgctagatgtagatcatggaacttatccatttgtaacttcttcaaatactgttgcttcatcagctgctacaggaactggttgtggtcctaattccataaattatgtattaggcattacaaaagcttatacgacaagagttggcgagggaccttttccaactgagttaaaagataaggtaggtgaggagctcggtactagaggaaaagaatttggtacagtgacaagtagaaaaagaagatgtggttggtttgacggagtactagtaaggcaaacaattaaaatttcaggaattgacggaatagctctcacaaaacttgatgttttagatgaactagatgaaattaaaatctgtgtagcgtacgagattaatggaaaaaaaattgattacctgcctgcagctgtagatgatcaactaaaagtaaaaccaatctataagacttatgatggttggaaatcttcaactgttggaataaaaaattttgatgaactgcctgaaaacgcaaaaatatatattcaagatttagagaaatttatagaaactaagatttctagtatctcaacaagtccagagagagaagatactatactaattctagatccttttaaaaattagg

SEQ ID NO: 316262 - DNA, 1138 bp, Unknown
  Bacterial polypeptide expressing nucleotide sequence isolated from the Sargasso Sea
aatgttttatacgatagttggaacccaatggggagatgaaggaaaaggcaaaattgttgattggatttcttctaaagctgacttgatagtcagatatcaaggtggaaataatgcaggacatacaattaaagtagataataatgtttataaacttaatttattaccctcaggaataattaataataaaaaatgtgctattggtaatggtgttgttttagatccgtgggcactaattaatgaaattgataatcttaaagaacaaggaatagaagtaaacaaagacaatttatatattgctgataatatttgtttaatcttacctattcataaacttcttgatgaaataaatgaaacctctagaggtaaaaaagaactaggaacaactaaaaaaggtattggtccagcatacgaagataaagtaggtagaagagcaataagaatttgcgatttaaaagatccaatatttttaaaacaaaaaattgataacctttacgaatttcataaagataaaatttcaaaacatattaataaaattacacataattattatgaagaacttttatctatgtctaattatcttaactcttttagtgttccattatggaaaataataaatgaattaggtcaaaaaaataaaaacattgtttttgaaggggctcaaggttctatgttagacattgattttggaacatatccttatgttacatcatcaaatacaatatcaggtcagatattctctggcacaggttttagttatagaaaaaaccacaaaattttaggtataacaaaagcatatactactagagttggatcaggcccatttccaacagagttaatggatgagattggagaacaccttggtgaaaaaggccaagaatttggtacagtcacaaaaagaaaaagaaggtgcggctggtttgatagtgttcttttaaaacaatctatcaaactaaatggtattacagatattgtacttactaaactcgatgttttagatgaattaaaagaaattaatgtgtgtactggatatttaattgatgacgaacattatgactatttacccagtgaagaatttctattcgataagataaagccaatttataaaaaaattgatggttgggaagaatcaactgcagga

SEQ ID NO: 316263 - DNA, 1273 bp, Unknown
  Bacterial polypeptide expressing nucleotide sequence isolated from the Sargasso Sea
ttgtcaactaccattgttttaggcgctcagtggggcgatgaaggcaagggtaaagtcacagacttttttgcatcaaaagctgatctcgtagtccgattccaaggtggcaataatgcaggtcacacaattgttgtaggtgatgaaaaatttgccctttcaatggttccgtcaggagtgatgtatgaatcatgtactcccatcattggttcaggatgtgtaattgattttgaagttttaaaaaatgaaattgaaactttaaatggtaaaaatatagacaccactaagttaaagctttcatataatgcacacatcatcatgccatatcacaaaattcttgatgaattaattgaagatagcttaggtgataagaagattggaacaactagaaaaggtatagggccttgttatggcgacaagatacaaagaaaaggtatacgcatacaagattttttatctgaagaaaatttttatgaaaaattaaaaaataatcttgaagaaaaaaatcaaataattgaaaaaatttatggtggaaattctataaactttgacgaaatagtcgacgagtataaaaaatacaaagaacttgtttcatcaattgcagacgacacatcattggttatatctaattcattaaaagaaaataaaaagatcctatttgaaggagcccaaggcactcttctagatatcgatcatggaacatatccatttgtcacaagttcaaatacaagtgcaggtaatgcagctactggatctggaattggtcctttaaattttgatgaagttgttggtgtaaccaaagcctacatatctagagttggtactggtcctttcataactgaacaagaaaatgaaattggtgattacatgattgaaaagggggctgagtttggaacggttactggaagaagacgacgttgtggatggctagatttagtttcattaaaatattcgaaaaggattaactctctaagtcaattatttataacaaaattagatgttttaagtggccttgaggaaatcaaggtatgcataggatacagctttgaagataaaaaaattacagactatccattagttgatgagatattagataagtgtgaacctatttatgaatcgtttgagggttggaatgaagatatttctggaattacgaaatatgatgcacttcctgagaatgctaaaaaatatattgaatttattgaagatttcagcgatgtgccaattaaatatatatctgttggaccagagagaaaccaaaatataattagataaa

SEQ ID NO: 316264 - DNA, 502 bp, Unknown
  Bacterial polypeptide expressing nucleotide sequence isolated from the Sargasso Sea
actgcagggtggtttatcatcagggttgggtgttggcccgcggcatattgattctattttgggcatcactaaagcatatactacccgtgttggtgaagggcctttcatcactgagttgtttgattccaatgcagagcagttggcaaaagttgggcatgaatttggtgcaacaaccggacgcccaagaagatgcgggtggttagatttaaaagctttagaaactgtagttttcattaactctgttactaatctctgcataacaaaattagatgtccttgatggctttgaagaaattaaagtgtgcattgattatgacaaagatcagctaccgatttataaatctttctctggttggatgcaggatacatccaatgctagatcttttgatgatttacctaaggctgctcaggactatatactatttattgaggagactctggattgtccgattggcattgtttcggtaggaccatcaagagatcaaacaatttatagagattag

SEQ ID NO: 316265 - DNA, 1180 bp, Unknown
  Bacterial polypeptide expressing nucleotide sequence isolated from the Sargasso Sea
gctggacacaccctagttattgacaacgtaacatataagctaagattattaccttcaggaatcgtaagaaaagataaagtttcaattatcggaaacggtgtggttgttgatccatgggctttattagatgaaattgaagaaattaaatctaaaggtgttgaaataaatgaaaaaaacttaattctttcagaggctgcaaatttaattttaccatttcatagagaaatggacgaaattagagaagatgctgctggaaaagctaaaataggaacaacaagaagagggattggacccgcatatgaagataaagttggaagacggtcaataagagttatggatttaggttctaagaaaaatctagaacatagattagaattagttttaatgcatcataacgcaataagaaaaggactaggaaaagaaatttataaaaaagataaactgatgcaagatttattaaagatagcaccagatatattaaaatactctcagcctgtgtggaaaaaaatagatgaatttaaatcagaaggaaaaaaaatattatttgaaggtgcgcaaggcattttgcttgatgtagatcatggaacatatccatttgttacatcttcaaatacagtcgcttcggctgcagcaactggttcaggctgtggtcctaattcaataaattatgtattaggaataacaaaagcttatactactagagttggagaaggtccttttccaacagagcttaaaaatgagataggtgaaaaattaggaactattggtaaagaattcggaacagttacaagtagaaagagaagatgtggatggtttgatggagttttggttagacaaacaattaaaatttctggaataaatggaatagcattaactaaactagatgttttagatcaattagatgaaattaagatgtgtatagcttacgaagttgatggaaaaaaaatggattatttaccagcagctgtaaacgatcaattaaaagcccaacctatttacaaaacttttaaaggctggaattgttcaacaaaaggtataaaaaaatttgaagaccttcctgataatgcaaaaaattatattacagaattagaaaagtttatagaaactaaagttgctagtatttcaacaagccctgaaagaaatgatactatattaatagttgacccttttagtagctaat

SEQ ID NO: 316266 - DNA, 1288 bp, Unknown
  Bacterial polypeptide expressing nucleotide sequence isolated from the Sargasso Sea
atgacaggtgttgtaattgttggatcccaatggggagacgaggggaagggaaaaattgtcgattggttatcaagccaggccgatattgtaataagatttcaaggtggccataatgctggtcatactcttgtaataaataatgaaacattcaaattaaatattctaccctccggaatcttaagaaaaggcaaaatttcgataattggaaatggcgtggttttagatttagctgcttttcaaaaagaagtagctgggttaaaggatagaggagtagatataaccccttcaaatttatacatatcggacagggcgacaataattttacctcttcatcaatcactcgatgaactaagagaaaataacaacttaataaaaattggtacaacaaaaaggggaataggaccagcttacgaagataaagttggaagaagagcaataagattatgtgatttatttgataaggaaaaattaaacaagaaaattgaaattttactcaatcatcataatgcgataatgagaggttttggattggatgaatacaatgtagaagaagtagtcagtgaaatatatgaattaggggaatatgccaaaccttttgcaaaaacaataaatgacataactaacgtaataaacagcggcaaagaaaaaattttatttgagggagctcaaggatttcttttagatattgaccatggaacctatccttttgtaacatcatcaaatgttcacgctagttacgcatctattggcagtggattgaatccaaaagttattaatcatatccttgcaattacaaaagcatatacgacgagagttgggaatggtccttttcccacagagcaagacaatgaaataggcaataaacttggagaaattggccatgaatttggaacagtgacaaatagaaagagaagatgtggttggtttgactcagttttagttcgtcaagctttaactcaatcgggagcaacaggtattgctcttactaaaatcgatgtattagatcactttgatgaaattaaaatgtgtgtaggatataatttaaatggaaaagaaatagattactacccaagctctgaacaagatcaagagactatagagccaatctatgagacctttcaaggatggatgagcacaacaactggcataaacagcttcgatgagttgccagaaaacgcaaaaaagtatgtcaatcgtattagtgagctcacaaagactaagatagatttaatttccactagccctagacgtgaggacacaatactaataaacaaattatttaattaag

SEQ ID NO: 316267 - DNA, 1294 bp, Unknown
  Bacterial polypeptide expressing nucleotide sequence isolated from the Sargasso Sea
aatgagaaacgttgtagttgttggttcacagtggggagatgaaggtaaagggaaaatagtagattggctatctagtgaagcagatattgtagttcgttttcaaggtggccataatgctggacacacactagtaatcgataaaaaagtatttaaactgagactattaccgtcgggaatagttagggataataaaatttctattttagggaatggtgtagtgatagatccttgggctttaatagaggaaataaaagatattaagaaacaaggaataaacgtaactcctaaaaattttatgatttcagagtcagcatcattaatacttccttttcatcaggaaatggatgagatcagggaggatacagcaggtagaggaaaaattggcactaccagacgaggtataggaccatgttatgaagataaagtcggaagaaggtcaatacgagtaatggatttaagatcagaaagcaatttggacgctaggttagaaaatgttctattacatcacaatgcaataagaaaaggattaaaaaaaaagatttataaaaaaaatgaattaaaaaaaaaattactcaaaattgctccagaaattctaaaatttgcaaaaccagtttggctgaaattagatgaatttaagaaagacagaaaaaaaatattgtttgagggagcacagggaattctcttagatgttgaccatggaacctatccatttgtaacttcatctaacacagttccagctatggcagctacaggatcaggttcgggtccagataaaattggttacattttgggaattacaaaggcatatacaacaagagtaggaagcggaccatttcctacagagttaaaaaataaaattggtgaaatgttaggaaaaagaggaaaggaatttggaactgtgacagcgagaaaaagaaggtgcggttggtttgacgcggttttggtaagacaaactataaaaatttcaggaattaatggaatagctttaacaaaattagatgttttagatgaattagatgaaataaaaatgtgtattgaatatcaattaaatggagaaaaaattgattacttaccagcagcctctgaagatcaatttaaaataaaaccaatttacaaaacttttccaggctggaaaacaactactcaaggtataagaaatataaaagatttgccagaaaatgcaaaaaaatatatttactctttagaagattttataggtgcaaaagtatcgagtatttcaacaagccctgaaagagatgacacaatcttaattgaggacccttttaaagtttag

SEQ ID NO: 316268 - DNA, 1219 bp, Unknown
  Bacterial polypeptide expressing nucleotide sequence isolated from the Sargasso Sea
ttgtctgaaaatactttaatcctaggtcttcagtggggagatgaaggtaaaggcaaaatagtagataacttaagccaaagtgttgatgtggtttgtcgttttcagggaggtcataatgctggccatacaatcaaagttaatgatgagcaaacagtacttcatttaattccttcaggcattttgcatgataatgccaaatgcttaattgggaatggagtagtgctcgctttggatgcattggatgaagaaatcacaaaacttaaagataagggcataaattttcaagatagattttatatcagttcagcatgttccttaatcctccctagtcacatatcaattgataaagttagagataaaaaagaatcaattggaaccactggtagaggaattggacccgcctacgaagataagatcggcagaagggcagttagatttggagatatcggtaataaatctctattaaaagagaaaattgaattattagttggttatcacaataggctattaaaagaattacacaaccatgaaccccatgatgtaaatgaaatctttgaatcagttataaaatataaggacttatatgatcagttttgtgttgattctcaagacttgatgtataaatgggtaaaaaataaaaaatcaattttatttgaaggtgctcaagggacactattagatatcgaccatggaacttacccttatgtaacatcttcaagtacaactgcaggtggggtatctacagggcttgggataggaccaaaatttatagataaaattattggtatatctaaggcttatgcaacacgggttggtgaagggccatttctaacagagttatttgatgaaaatggtgaaatgatagctaaaaagggtaatgaatttggggcaacaactggaaggccaagaagatgtggctggttagatctagttgctcttaaaaaagctatttttactaattctgtaacagatttatgtattacaaagcttgatgtattagatgaaatgcaagaaatatcagtctgtatcgagtatgagaaaaataaaccagtttatatgaaatttaagggatggttatcatccactgaaggaatcacagaatactccaatcttcctaaagaagcaaaagattatattgaatttatagaagattacatagaatgcagcgcatcaattatttcaactggaccatcaagggatcaaacaataaacaaataaa

SEQ ID NO: 316269 - DNA, 1261 bp, Unknown
  Bacterial polypeptide expressing nucleotide sequence isolated from the Sargasso Sea
aatgtctagtatttttcttgttggtactcattggggtgatgaaggaaagggtaagatagttgatgtactatctgaaaatgctaaagcttgtattagatttcaaggtggtcataatgctggacacactttagtgataaataatgaaaaaacaattcttcatttaataccatctggtattttgagagatgactgtttatcgattatagggaatggagtggttgtttctttagaggctctcaataatgaattaaaagaacttaaagataaaaaaattaaaattgatggtaaattatttataagtgagtcagcacatataatactcccttcgcatcgagctttagatattgcaagagaaaagtctctaggatcaaagtcaattggtaccacaggaagaggtattggtccatgttatgaagataaagttgctagaagaggaataagactatcagacgttggagatttagatatttttagaactaagctagaaaaatcaatggagtttcataattttattctagagaaatattacggcacaaaaactcttgattttgaagaaacttgttcagagcttgtatcattgtattctagtgttaagggatatatttgtgatactcgaagcttaattaataacactgtttcatcttcaaatgtaatatttgagggagctcaaggaaccatgttagacgttgatcatggaacttatccttttgtaacatcatctaatacaacttttgctggactattgtcaggtacgggtatcggtgccaatcaagtgaattactcactaggtataactaaagcatacacaactagagttgggcatggaccatttccatctgaactaacaaatgaaattggtaagaatttagcagactggggtggcgaagttggagcaacaacaggtcgtgacagaagatgcggatggttagatctaaaaatactcaaacattccgttatggttaatcgaattgacggaattgctctgacaaaattagatgtattagataagttagataagattaaaatatgtattgattatggcgagattgattactcagattttagcgttaaagatttaaattatatagaaatggatggctggttatcatctaccgtgggtataactaattttaatgatttacctacagctgcaaaagagtatataagaactattgagaaactcgctaatgtcccagttgttttgatttcaacgggtccctcgagagaccaaataatagttcaaaaaaatctttttacataa

SEQ ID NO: 316270 - DNA, 1294 bp, Unknown
  Bacterial polypeptide expressing nucleotide sequence isolated from the Sargasso Sea
gatgaataatgtagttgtcgttggatcgcagtggggagatgaaggaaaaggtaaaatagttgattggttatccagtgaagcagatgttgtcgtaagattccaagggggacataatgctggtcataccttggtcatagatggtgttacttataaattaagattattgccatcaggaattgtaagaaaaaataaaatttcaattataggaaatggagttgttgtagatccttgggcgcttttagatgaaattgaagaagctaaatctaaaggtgtgcaaattaatgaaaataatctcatattatcagagactgctacattaattttaccatttcatagagagatggatgaaataagagaagactctgcaggtaaatcgaaaattggaactactagaagaggtattggtccagcatacgaagataaagtagggagaagatctatacgagtaatggatcttgcatcaaaacaaaatcttgaaaatcgattatcattagtacttgaacaccataatgccatccgaaaaggattaggtaaaccaatatatgaaaaagataaacttgttgaggacctattaaaaattgccccaaatattttaaaatattcagcacctgtttggagaaagatagacgaatttaaatttgaaaataaaaaaatattatttgagggagcccaaggaatattgcttgatgttgatcacggaacatatccatatgtaacttcatccaatacagtagcagcttcagcagcaacaggatcaggatgtggtccaaactcaataaactatgtgttaggaattacaaaagcgtatacaacaagggtaggtgaaggacctttcccaacagaattaacagatgatattggtaatcatttaggtgaaaagggacatgaatttggcactgtaactagcagaaaaagaagatgcggctggtttgatggagttctagtaagacaaacaataaagatttcgggtattgatggaattgcattaactaaattagatgtattagatgaacttgatgaaataaatctttgcgtagcttacgaactaaatggcaaagaaatagattatttccctgctgctgtcgaagatcaattaaatgtcaaaccagtatataaaacattcaatggctggaaatctaaaacccaaggtgttaaaaaatttgatgatttacctaataatgccaaaatttatgtaaaagctattgaagagtttattgagacaaaaatatccagtatttcaacaagcccagagagaaaagatactattcttttagtagatccatttaactattaa

SEQ ID NO: 316271 - DNA, 1101 bp, Unknown
  Bacterial polypeptide expressing nucleotide sequence isolated from the Sargasso Sea
tatgagcaatatcaccctgatcttaggcttacagtggggtgatgaaggtaaaggaaagattgtagatgctcttgcagagaaagcaggagctgtttgtcgttttcaaggtggccacaatgctggccatactcttagggtcgatggtgttcaaaaagtactacatttggttccatctggaatcctccatcctaatgttcactgcgtcttgggtaatggtatcgttttatccctttctgctctcgctaaagaaattaaggaattgcaagagagtaatataaattttaaagatcgtttttatgtcagtgaagattgctcattaatccttcctacacatattgcaattgataaagttcgagaccagtcggagggcattggaactacaggtagagggattggtccggcatatgaagataagatcgctagacgcgctttgcggtttggggatttaaaaaatcttgacgaacttaaagtgaaattaactaaattagtaaattatcataaccaaattttagagcatttatataatgctgaacctgttgagtttgagaatgttttagaggagttgactggcaacatagatctctataatcaatatcactgcaaaacccaagatcttttaaaggtatgggtaaaagagggaaagaatatcctttttgaaggtgcgcaggggtctatgttagacattgatcacggaacctatccatatgttacttcctctagcacaacagcaggaggattatccacaggcttgggagtgggcccacgttatcttgatactattttgggaattactaaggcatacaccacacgagttggcgaggggccttttgctacagaattatttgattctaatgcagaacaattggcaaaggttggccatgaatttggtgcaacaactggtcgcccaagaagatgcggatggctagatctcaaagctttagaaattgttgtttttataaattccgttaccaatctttgtctaacaaaattagacgttttggatagctttgatgaaatcaaggtatgcgttgactatgatgaaaatgaacagccgatttataaaactttttctggatggaaacaagacacctctaaagctaa

SEQ ID NO: 316272 - DNA, 781 bp, Unknown
  Bacterial polypeptide expressing nucleotide sequence isolated from the Sargasso Sea
atgaaaaatgttgttgtagtaggttctcagtggggtgatgaaggaaaaggaaaaattgtagattggctttcaagcgaggcagatgttgtagttcgttttcaaggaggtcacaatgctggacatactttagttattgatggaattacttacaaacttagattgttaccatctggcatagttagaaaaaataaaatttcaataattggaaacggtgtagttgttgatccatgggctttacttgatgaaataaaagaaattaagtctaaaggcgtaattgtagatgaaaataatttaattttgtcagagtcagcaaatttaatacttccttttcataaagagatggatgaaattagagaggacgctgctggtaatgctaagattggaacaacaagacgaggaattggacctgcttatgaagataaaattggaagaagatcaatcagagttatggatttagtatctgaaagtaatttagatcacagattagagaccgtacttattcatcataatgcaattagaaaggggctaggcaagcagatttacaaaaaagagcaattaaagaaagatcttttaaaaattgcaccagaaattctcaaattttctcaaccagtttggaaaaaaattgatgaatacaaagccaaaggaaagaaaatattatttgaaggcgctcagggcattcttttagatgtagatcacggcacatatccatttgtaacttcttcaaatacagtagccgcaacagctgcaacaggttccggatgtggtccaaatactattaatt

SEQ ID NO: 316273 - DNA, 965 bp, Unknown
  Bacterial polypeptide expressing nucleotide sequence isolated from the Sargasso Sea
tatgacaaacgttacagtagtaggcactcaatggggtgatgaaggaaaaggaaaaatagtagattggttgtcagaaagagctgacgtagtagctagattccaaggtgggcataatgcaggccatacaatagtattaaataaaaaagtatataaactcagtttacttccttctggaattataagaaaaaaaatttccattataggtaatggtgtagtgatagatccatgggctctaataaatgaaattaataaaattgaatcacaaggacttaaaatcacttcaaaattattaaaaatatctaataaagccagcttaatattgccttaccaccaagaattagatttattaagagaaaatgccaaaggaaataataaaattggtaccactggtagaggtattggtccggcttatgaggataaagttggaagaagagcaattagagtatgtgacctttttaataaagatagcagagaaaaacaattaaaagcagcaataacccatcataatattattcttagaggtttaaataaaaaaactattcgtaaaacaaatataaataaaatgttagataaaattgctcctattttaaaaccttttgtaactaatacaatggaactaattatatcttcaaataaaaaaaacaaaaatatcttatttgaaggagcacagggttctatgttagatatagaccatggaacttatccatttgttacatcatctaacactgtttcttctcaatcagcaactggctctggaataggtccgtctcttattaataatgtattaggtatcactaaagcctatactacaagagttggaaatggcccctttccttccgaattaaataataaaactggtgaattattaggaaaaattggacatgaatttggtgtagtaacaggacgcaaaagacgctgtggctggtttgatgcagtaatagtaaattatactgttaaattatcag

SEQ ID NO: 316274 - DNA, 1294 bp, Unknown
  Bacterial polypeptide expressing nucleotide sequence isolated from the Sargasso Sea
atgaaaaatattgtagtcgttggatcgcaatggggagatgaaggaaagggtaagatagttgattggctatctgaacaggctgacgttgtgataagattccaaggaggacacaatgccggacatacacttgttattgatggtgtaacttataaattaagattgctaccctcaggaatagtaagaaaaaataagatttcaattattggtaatggagtagttgttgatccttgggcattgttagacgaagtagaagaaataaaattaaaaggagtagatgttaatgttgataattttattatttcggagtctgcaaatttaattttaccatttcatagagaaatggatgaaataagagaagacgcagctggtaaaggaaaaattgggaccacgagacgaggaattggaccagcttatgaggataaagttggcagaagatctataagagtaatggatttaagatctgagcaaaatttagatcatagacttgaatcagttttggtacaccacaatgctattagaaaaggtttaggaaaaaaaatttttgaaaaagaacaattaaaagaagaactattaaaaattgcaccaaaaatactacaattttctcaacctgtatggcttaaaattgatcaatttaaaaaacaaaaaaagaaaattttatttgaaggggctcaaggaattttattagatgtagatcatggaacctatccttatgtcacttcatctaatactgtagcctcaagcgctgcaacaggaactggttgtggaccaaattcaataaattatgtactaggaataactaaagcatacactactcgtgtaggagaagggccttttccaacggaattaaaagatgatataggagaattattaggcactagaggaaaagaatttggaactgttactagcagaaaaagaagatgtggttggttcgatggtgttctggttagacaaactattaaaatttctgggatcgatggaattgcacttactaaattagacgtattagacgaattggatgaaattaaaatgtgtatacattatgagttagatggaaaaaaaatcgattacttaccagcagctgttgaggatcaattaaaaataaaaccgatattcaaaactttcccaggatggaaatcttcaacaagtggaataaaaaacatggatgctctaccagaaaatgcaaaaaaatatattttcgcaattgaggattttataggcgcaaagatttcaagtatatctactagtcctgagagagaagatacaatattagttgaaaacccttttgaaatttaat

SEQ ID NO: 316275 - DNA, 1120 bp, Unknown
  Bacterial polypeptide expressing nucleotide sequence isolated from the Sargasso Sea
tgtagtaataagattccaaggaggtcacaatgctggccatactttagtgattgatggtattacatataaattgagactactgccatctggaatagttagaaaaggtaaaatatcaattattggtaatggagttgtcgtagatccatgggcattattagaggaaatagaagaaataaaatctaaaggcgtagaagtaaatgtaaataattttattatttcggagtctgcaaatttaattttgccttttcatagagaaatggatgagattagagaggatgcagcaggaaaaagtaaaataggaactacaagacgaggaattggacctgcatacgaagataaagttggaagaagatctataagagttatggatctaagatctgaaaaaaatttagatcaaagactcgactctgtattagttcatcataatgcgattagaaaaggtctaggaaaaaaaatttttgaaaaagataagcttaaatctgatttgcttaaaatagcaccaaaaatattagaattctctcagccagtttggttaaagattgatcaatttaaaaaacaaaaaaaaaaaattttattcgaaggagctcaaggtatattacttgatgtagatcatggaacttatccatttgtaacttcatctaatactgttgcttcaagcgcagcgacaggtactggttgtggccctaattcgataaattatgttcttggcattacaaaagcttacacaacaagagttggagaaggcccttttcctacggagttaacagatgatatcggtgaacttttaggaacacgtggtaaagaattcggaaccgttacaagtagaaaaagaagatgtggatggtttgatgctgttttagttaggcaaactattaaagtttcaggaattgatggtatcgctttaacaaaattagatgtacttgatgaattagatgaaattaaaatgtgtgttgcttataatcttgatggtaaaagattagattatttacctgccgctgtagaagaccagataaaaataaaaccaatttatgaaacttttccaggatggaaagtttctacaagtggggtcaaaaatatagactcgttaccagaaaatgctaaaaaatatattttgcagtag

SEQ ID NO: 316276 - DNA, 1294 bp, Unknown
  Bacterial polypeptide expressing nucleotide sequence isolated from the Sargasso Sea
gatgaaaaatatagttgtagtagggtcacaatggggagacgaaggtaaaggaaaaatagttgattggttatcaagcgaagctgatgttgtcattagatttcaaggaggacataatgctggtcatactctagttattgatggtgtaacatacaaacttagactactcccttctggtattgtgagaaaaaataaaatatcaataattggaaatggtgttgttattgatccttgggcgctcttagatgaaattgaagaaattaaaaataaaggcgttgaagtaactgataaaaatctaataatctctgaaactgctacattaattttgccttttcataaagaaatggatgaaataagagaagactcagctggcaaaggaaagattggaacaactcgtagaggaattggtcctgcttatgaagataaagttggcagacgatcaattagagtaatggatttgatttcagagaaaaatttggatgaaaggttagttacagttttatcacatcataatgctattagaaaaggtcttggaagacctatttttgaaaaagataaattaaaaaaagaactattaaaaatagcaccaattattttgaaatattcacaaccagtatggaaaaagatagatcaatttaaaaacgaaggaaaaaaaatattatttgaaggagctcagggtatattacttgatgttgatcatggaacgtatccatttgttacatcgtcaaatacggtagcttcttctgcagctactggctctggttgtgggcctaattctataaattatgttttaggtataactaaagcatacacaactcgagttggagaaggaccgtttcctacagaattattggatgatttaggtgaaaaacttggaaaaagaggaaaagagtttggaactgtaactagtaggaaaagaagatgtgggtggtttgatggagttctggtaagacagactattaaaatttcaggtatagatggtatagcacttacaaaactagatgtattagatgaatttgaagaaataaaaatgtgtatagcttactcattaaatggaaaagaaattgattatttaccagctgctgtggaagaccagattaaagtaaagccaatttataaaactttcattggttggaaatcaagcacacaaggaattaagaagtttgatgatttaccagataacgcaaaagtttatattaaagaacttgaaaaatttatcgaaactaaaatatcaagtatttcgacaagtccagaacgtgaagatactattttattagaaaatccttttaattcttaa

SEQ ID NO: 316277 - DNA, 1297 bp, Unknown
  Bacterial polypeptide expressing nucleotide sequence isolated from the Sargasso Sea
ttggtggcaaaatctttagttgtgataggagctcaatggggagatgaaggaaaagggaaaatcattgacatccttactgagaaagccgatttagttgtcagatttcaaggaggacataatgctggtcatactcttgtcatagatggcgagaagacagtgcttcacctgattccgtccggcatctttaatgatgccaagtgcttgattggaaatggagttgtactccatctgcccacaataataaaggaaattgaatatctcgaatcaaaaggcattgatgttcaaagtaaactcatgatcagttctcagtgtccattgataatgcccagccatatagccattgatgaagccagagagaagtcattaggaaaaaatgcaatcggtactaccggaagaggcattggaccggtatatgaagacaaggttgcgagaagggcagttcacgtaatggatttgtttgaagaggatttatttagctcaaaattactttcattgacgacttttcataactttcttcttgaaaaactttatgaatccgaaggaatagatcttgacggaatatacaaagactggatgaatcatttcaataagatcaaaaatcttattgttgatagctcagaggtagtaaataacttaaagtcacaaggctccaacattctttttgagggcgctcagggctcaatgcttgatattgatcaaggcacttacccattcgttacttcatcaaatacactatctggtgcagcatcgctcggctcaggttcaggaccactggatatagacggggtacttggaatcacaaaagcttatgctacaagagtaggctctggaccatttccaacagaaattgaggatgattacggaaaacacatggcaaaagttggtgttgaatttggtgcaacaacaggcagacctagaagatgcggctggctggaccttgtagcattacgtaaagcggttaatatcaactccatatcgcatttatgcataaccaaaatcgatgtgcttgatggtcttgataaaattctcgttgccgaagagtataagattgacgataagagctatgacacattgcctgcgatgagtcagaatcgctttgatagtatcgtgccaaactatacagagtataaaggttggtcaggcactacatatggactgaagtcatttgatcaattgccagtcgaagcacaaaccttgattaagggaatagaggattccatcggcatacccgtgtctttgatctcaacaggtcctgatagaaatgacatgattgtcattgatgaaatattttcatgag

SEQ ID NO: 316278 - DNA, 1348 bp, Unknown
  Bacterial polypeptide expressing nucleotide sequence isolated from the Sargasso Sea
atgtctgccagcgcagtgaacgtgactcccgggcgcaatgtcgtcgtcgtgggaacgcaatggggtgatgaaggcaagggcaagatcgtcgactggctgacggaccacgctcagggcgtcgtgcgtttccagggcggtcacaacgccggccacaccctcatcatcggcggcaagaaaacgatcttgcgcctcattccgtcgggcatcatgcgtgaaggcgtcgcctgctacatcggcaacggcgtcgtcctgtcccccgaagcactgttcaaggaaatcggcgagctggaagaagccggcgtgaacgtgcgcgaccgcctgttcatttccgaagccacgacgctgatcctgccgtaccacatcgcgatcgaccaggcgcgcgaagcgcgcaagggcgcgggcaagatcggcacgacgggccgcggcatcggccccgcgtacgaagacaaggtcggccgccgcgcgctgcgtgtgcaggacctgttcgatgcgaagaccttcgccgaccgtctgcgcgaaaacctcgatttccacaacttcgtgctgacccagtacctgggcggcgcggctgtcgatttccaggccacgctcgacacgatgctgggttatgccgaccgcctgaagccgatggtggccgacgtgtcgcgccgcctgtacgacgcgaacaatgcgggccagaacctgctgttcgaaggcgcacaaggtacgctgctcgacatcgaccacggcacctatccgttcgtcacgtcgagcaactgcgtcgcaggtgcggcgtcggctggcgcgggcgtgggtccgcagaagctcaactacatcctcggcatcacgaaggcatattgcacgcgcgtcggctcgggcccgttcccgagcgaactgtacgatgcggacaatccgcagcgtcaggaccaggttggcgtcacgctcgcgaatgtcggcaaggaattcggttcggtcaccggccgtccgcgccgcacgggctggctcgacgcagccgcgctgcgccgctcgatccagatcaacggcgtgtcgggcctgtgcatgacgaagctcgacgtgctggacggcctcgacgaagtcaagctgtgcgtcggctacaagatcgacggcaaggatgtggacatcctgccgcgcggtgccgctgacgtggcccgttgcgagcccgtatacgaaacgtttgccggctggaaggaaagcacggtcggcatcaagacgtgggaagccctgccggcgaacgcgcaggcttacctgacccgtgtccaggaagtggctggcgtgccggtcgacatggtgtcgacgggtccggaccgcgacgaaacgatcctgctccgccatccgttcaaggtgtaat

SEQ ID NO: 316279 - DNA, 673 bp, Unknown
  Bacterial polypeptide expressing nucleotide sequence isolated from the Sargasso Sea
ttggatgagtttgggaaagatagaaaaaaaatattgtttgaaggagctcaaggaatacttctagatgtagatcatgggacatatccttttgttacttcttcaaatacagtaccagcaatggcagccacagggtctggattgggtccaaatactataaactatgtgttaggaatcacaaaagcttatactactagagttggcagcggaccatttcctacagaacttaaaaacaaaattggtgaaagtttaggaaaaagaggaaaagaatttggaactgtaacagcaagaaaaagaagatgtggttggttcgatggcgttttagttcgtcaaacaatcaaaattgctggcataaatgcaatagctttaaccaaactagatgtattggatgaactagatgaaattaaaatttgtgtagagtacgaattaaatggaaaaaagatagattacttacctgcagtttcagaagatcaattcaatatcaaacccatttataaaacttttccaggatggaaaagttctactcaaggcataagaaatattaaagatttacctgaaaaagctaaaaattatatatatgctctagaagattttataggagctaagatttcaagtatttctacaagcccagaaagagatgatacaattttgattgaagacccttttaagagttaat

SEQ ID NO: 316280 - DNA, 879 bp, Unknown
  Bacterial polypeptide expressing nucleotide sequence isolated from the Sargasso Sea
aatgaaaaatgtagctgttgttggatctcagtggggagacgaaggcaaaggaaagattgttgattggctttctagtgaagccgaggttgttgtaagatttcaaggaggccacaatgcaggtcatactttagtaattgatggtattacttacaaactgcgattattaccttctggaattgtcagaaaaaataaaatttctataataggtaatggcgtagtaattgatccatgggcgcttcttgatgaaataaatgagataaaagaaaaaggaattaatctagatcaaaataacttaataatttctgaagcagcaactctcattcttccatttcatagagaattagatgagatacgtgaggacttagctggaaattcgaaaataggaactacaagaagaggaattgggcccgcatacgaagacaaggtaggaagaagatcaataagagttatagatttagcttacgaagaaaatcttgataagagattagacaatgctttgaatcatcacaacgcaataagaaaagggttgggaaaagataattttgaaaaagaaaatcttaaaaaagaattattaaaaatagcacccaaaatacttagattttgtcagccagtttggaaaaaaattgaagaattcaaaaaggaaaataagagaatattatttgagggtgcccaaggaattttgttagatgttgatcatggaacatatccatttgtaacatcttcaaatacagttgcatcatcagcagcgactggatccgggtgcggtctaaattccattaattatattttaggaataacaaaagcatatacaacaagagttggtgaagggccttttcctacagagcaaaaaaatgaaattggaaatcatcttggtgaaaa

SEQ ID NO: 316281 - DNA, 1264 bp, Unknown
  Bacterial polypeptide expressing nucleotide sequence isolated from the Sargasso Sea
atgaagaagtcccttatccttgtaggtactcaatggggcgatgaaggtaaaggcaaaatagttgattatttttcacaaaaattcgaagctgtatgtcgttttcagggaggccataatgcaggccatacaatatataacgaagaagaaaaatttgtattacatttaattccatcgggtgtattttatgaccatgtctcttgttttattggtcaaggagtaatactttctctagattcattattagaagaaatagaacaattagaatctaaaggtataaaactagaaggaaagttacgaattagtcgttattgcagtttacttttacctattcatgcaaaaattgaccaactaagagaagataaaaagaatgcaataggaactactagaagaggtattggtcctgcatatgaagataaaactgcaagaagaagcataaaggcatttgacttagaggataatgaacttttagaacagaaattaaaaaatttagttgattattataattttcaaatagaaacaattcataaatctgatactttcatttttgaagatgttttagataacctcaaaaagtcttatcaaaaagcatcaaaatactttggtgatgtcacagattcattagaagagatctatgataatggtggtaatattctttatgaaggagctcaaggaactttgcttgatgttgattatggaacttatccatatgttacttcctcgaatacactagcaacatccgttggtgtaggttcaggtttccctaagagcatatattcagacgtcttaggtgtgacaaaagcttatacaactagagttggctcaggtccatttcctactgaacttttttgtaaagatggagaaaagttagcagagttaggaaatgaatttggagcaactacaggaaggcctagaagatgtggttggcttgatttagtggctttaaaatactcagctaaattaaataatttaactgagctttgcattaccaaactagatgttttagatagttttgaagctataaaagtctgtcatggctacaattctgatggagttgatactccttttaagtcacgacttctgcataaagttgaccctgtttatgaagttcttaaaggatggaatacttcattaaatgactgtaaagattatgatagcctgccagaacagactaaagtttttattaaatacgttgaagattatgttggagtaaaagtaactttaatttcaaatggaccaaataggtctgacttaatccatagataat

SEQ ID NO: 316282 - DNA, 1005 bp, Unknown
  Bacterial polypeptide expressing nucleotide sequence isolated from the Sargasso Sea
tatgcctttagaccaaggcactattactgttattgttggcgctcaatggggtgatgaaggtaagggtaaaattacagatttcttttctggcgactctgattatgtggttcgctatcatggtggcaacaacgcaggtcatactgtaattgtaaatggtgatacttataaattacatttaattccttctggggttttatatcctacccctatcagcattattggtaatggggttgtaattgaccctaaggccctgttggatgaagtttcctatttaaaaacaaaaggtgtaactcctaatttattaataagcgaccgtgcacatataattatgccatatcataaaatgttagatttagctcttactaaccatcaacaaaaacttgctgctggcagcactaagcgcggtattgcacctgtttatggcgacaaaatgtttcgtaatggtattaggatggttgatctgctggagcctaatatttttcatgagaaattaaataaatcttttattttcgcgaccaatcttttatccgctatatcttcatcagatttcgatttagattttgattctgtttataatgattatttaaagatgggtaaacttttatctccttatatatctgatatttctcttgaactttataatgcttacaataataataaaactatcctttttgagggcgctcaaggtatttcactagacgttgatcatggcgtatatccttatacaacatctagcaatactattgcaggaagcatttcaacgggcaccggagtaagctatagagacatacatagaattattggtgttactaaagcttatttaagtcgagtgggggaagggcctctcccttccgaggttcatggcgaggaagcgattcagctaagagaaaaaggtggagaatatggcactacaaccggtcgaccgcgtagggttgggtggttggaccttgttcaggtaaggcaggctgtacgtgtaaatggattaacggaaattgcgctaacaaa

SEQ ID NO: 316283 - DNA, 967 bp, Unknown
  Bacterial polypeptide expressing nucleotide sequence isolated from the Sargasso Sea
tatgccatatcataaaatgttagatttagctcttactaaccatcaacaaaaccttgctgctggcagcactaaacgcggcattgcgcctgtttatggcgacaaaatgtttcgtaatggtattaggatggttgatctgctagaacctaatatttttcatgagaaattaaataaatctttaattttcgcgaccaatcttttgtctgctatatcttcatcagatttcgatttagactttgattctgtttataatgattatttaaagatgggtaaacttttatctccttatatatctgatatttctcttgaactttataatgcttacaataataataaaactatcctttttgagggcgctcaaggtatttctctagatgttgatcatggcgtatatccttatacaacatctagcaatactattgcaggaagcatttcaacgggcaccggagtaagctatagagacatacatagaattattggtgttactaaagcttatttaagtcgagtgggggaggggcctctcccttctgaggttcatggcgaggaagcgattcaactaagagaaaaaggtggagaatatggcactacaaccggtcgaccacgtagggttgggtggctggaccttgttcaggtaaggcaggctgtacgtgtaaatggattaacggaaattgcgctaacaaaacttgacatattatctaacacaaaggaactttcagtttgtaccgaatatgatataaacggtgccaaagaatctgaaatccctgcaagcttacataagcttcgctctgcaaaacctatatataaacaactccctggttggggtgatattacaagctctatgcttaaagacgggtatgattcacttcccaatgaacttaagtcttacgttcaattcattgaaaaccaagttaactgtaaagtgtctattatatctgtagggcctgaacggcatcaaactataattagataa

SEQ ID NO: 316284 - DNA, 619 bp, Unknown
  Bacterial polypeptide expressing nucleotide sequence isolated from the Sargasso Sea
aatgctggacattgattttggtacatatccttacgttacatcatcaaatacaatatcaggtcagatattttctggcacaggttttagttataaaaatgaccacaaaattttaggaatcacaaaggcgtatactactagagttggatcaggaccatttccaacagagttaatggatgagattggagaacatcttggtgaaaaaggtcaagaatttgggacagtcacaaaaagaaaaagaaggtgtggttggtttgatagtgtacttttgaaacaatcaattaaacttaatggtattacagatattgtacttactaaacttgacgtcttagatgaattaaaagaaattaatgtatgtactggatacttaattgataacaaacactatgattatttacctagtgaagaatttttatttgataaaatcaaacctatttataaaaaagttgctggttgggaaaaatcaacaggagggattaacaaatttgatgatcttcctaaaaatgctaaaaaatatattaaaatactcgaagatcttatggaaactaacatttcaattgtttcaacagggccagacagaaaggagacaattgatataaacggaactttatctaatatttga

SEQ ID NO: 316285 - DNA, 684 bp, Unknown
  Bacterial polypeptide expressing nucleotide sequence isolated from the Sargasso Sea
tatggaaaaaattagatgaatttaagtctaaaggtaaaaaaatcctttttgaaggagctcaaggaattttactggatgttgatcatggaacctatccatttgttacatcttcgaatacagttgcttcatctgctgcaacaggctctggctgtggagtggatacaataaattatgttttaggtataaccaaagcctatacaacaagagtaggcgaaggtccatttcctacagagcttaaagacaaaattggtgatatattgggatcaagaggaaaagagtttggaactgtaacaagtagaaaaagaagatgtggatggtttgacggtgtcttagtaaggcaaacaattaaaatttcaggcattaatggcatagcattaacaaaattagatgttttagatgaactagatgaaattaaaatttgtattggatatgaattaaaaggtaaaaaaattgattatttgcccgctgcagttgaagatcaattaaaagtaaaaccaatttataaaaatttcagtggctggaagacctcaacaaagggtataaaatcttttaatgaccttccccaaaatgctcaaaaatacattaaaggtttagaaaaatttatagagacaaaagtagcaagtatatcaacaagtcctgaacgaaaagatactattttaatagaaaatccttttttaatttaat

SEQ ID NO: 316286 - DNA, 280 bp, Unknown
  Bacterial polypeptide expressing nucleotide sequence isolated from the Sargasso Sea
atgttttatacaatagttggaacccaatggggtgatgaaggaaaaggcaaaattgttgattggatttcttctaaagctgacttgatagtcagatatcaaggaggaaataatgcaggtcacacaattaaagtagataataatatttataaacttaatttattaccctcaggaataattaataataaaaaatgtgctattggtaatggtgtagttttagatccctgggcactaattaatgaaattgataatcttaaagaaccaaggaatagaagtaagtaaa

SEQ ID NO: 316287 - DNA, 1285 bp, Unknown
  Bacterial polypeptide expressing nucleotide sequence isolated from the Sargasso Sea
atgactaaaactatttctttgttggggttacagtggggtgatgaaggcaagggaaaggttgtcgatcatttagctaaagaccttgatgcagccattagatatcaaggcggccacaatgctgggcatactctgatagtagatggaaagaaggtagttttccatcttttgccgtctgcgatatgtcatgaggatatccattgttttattggaagaggggttgtggttagtcttgatgctctttttgaggaaatagaagaagctcaggatgttataggaaatataaaggatagactcacaataagttcagcttgtagtctcatacagccttaccatattaagttagaccaattaagagaagggtcaaagcagctgactaaaatcggaactactggaagaggaattggtaccgcttatgaagacagagttggaagaagatctattcgagttacagatttatatgacgaaaacaaacttaaagaaaagctgcaagagtccttagaattttacaactcaatttttaaacactcatttaatgctgaaggaattgatttaaatgaattatttgaaaagaatttaaagcaaggagaaaaactcaaaccttatattgggagtgtcatagaagaaataagagatcttcaggaagctgacaaaaaaatattatttgaaggtgcgcaaggagctttattggacgtcagtctcggtacatatccgtatgttacttccagtaattcttcagttggagggatagcatcagggattggaataagcccaactaatatagactactcccttgggatagctaaagcttacacgacaagagttggtgaaggaccttttcctaccgaattgttcgatgatataggtacctttttagctgaaaaaggtggagaagttggcgctacaactggtagaccaagaagatgcggctggctagatgcttttctgctttctcacacagttaaattaaatggcattgacgggctttgtataactaaaattgatgtattagatggtttagaaactatcaaggtatgtactgactattcaagtaatataagtaaaggggaaatattagaaaccttagctttagaagatgtagagccgatatatacagagttaaagggatgggaagagcctacagctggaaaacaatcatttgaagaattgaatgatagagcgaaagagtttattctgaatattgaagatctttgtaaagtacctgtgataatgatttcgacaggtccgaaaagagaagatactattattagaaaatacccattgtgat

SEQ ID NO: 316288 - DNA, 1183 bp, Unknown
  Bacterial polypeptide expressing nucleotide sequence isolated from the Sargasso Sea
ttgattaaaaaatctaaaaattcaatttttattggtgctcaatggggagatgaaggaaaaggccggatagttgatttagtatccaaagattatgatatagtcactcgatttcagggtggcagcaatgctggacatacaattattattaaaaacaaaaaaattgttttacatcatataccttctggggttttaaggaaaggtaaggtttcggtaataggtaatggaactgtaatagatttaagcactttgattaaagaaattaaaggactgagaaaaagtgggttcaagataacaggaaaaaatcttaagataagttcacttgcacatataattgcaccctatcataagttaattgaccaacaaagagaagtattaaaaggaaatcaagcaataggaactactgggcgggggatagggcctgcatatgaggataaagtatctaggcagggaattagaattatagatttagaggacaaagttttattagaaaaaaaagttaaacaaatcttaaaagaaaaaaataaaattatttctaaaatatttaataaaaaaggttttaattcaaattccattgttactgaattaagaaaaaattatttatatatcaaagaatttattgaagacactggtaagttcttaaacaaaagtattgaaaaagataaaaagattttattcgagggtgcacaaggggtaatgcttgacctagactttggaacatatccctttgtaacttcctcttcgacaattgcatcaaacgcatctgctggctcgggagttgctttttcaaaattaggtgaggtaattggtatatcaaaggcttatacaactagagtaggtcatggcccgttccctacggaaatgattgacgatcaaggcctaactttgagggaatttggagtagagtatggagccactactggtagaccaagaaggtgtggatggcttgatttagtagctcttaagcatgcaacagctatctctggtatcaaatcactcgttctaactaaggttgatatattatcaatttttaaaaaaattaaagtttgcacagggtacaagttagataataaaaaactttcctattaccctctaaaaatagaggatttatcaaagattaagccaatatataaagaatttccctcatggtctattgaggatttatcaaaaaataaaaattcctaaa

SEQ ID NO: 316289 - DNA, 819 bp, Unknown
  Bacterial polypeptide expressing nucleotide sequence isolated from the Sargasso Sea
tatgaatctaaatatttctttacttggtcttcagtggggtgacgaaggaaaaggcaaggtagtggataaccttgcaaatgatctagatgccgccgtaaggtatcagggcggtcataatgctggtcatacgttaatagtgaatggaaaaaaaattgtttttcatttattaccttcagcaatatgtcatgaaaatataaaatgttttatagcaagaggagttgttgtaagtctagatgctttattctcagagttagccgaagcgaatgaagttcttggagatattgaagacagacttataataagttcagcttgcagtcttattcaaccttatcatataaagttagatcaactcagagagcagtctgctaatttaacaaaaataggaacaacaggaagaggaataggaacatcttatgaagataaagtcggaagaagatcagtgcgaatttcagacctgtatgatgaaaaaaaattaaatgataagttgatacaagctttagatttttataattcaatttttgatcattcatttggtacctctaaaatcgatctaaatgaattggtagatttaaatttaaaacaagctgaacaattaaagccttatgttggaaatgtaatacaagaaattagagaattacaaaaatctaaaaagaaaatactttatgaaggcgctcaaggtgctttattggatgtaagcttaggaacatatccgtttgtaacatcaagcaacttaattggaggtgttccagctggtgcgggaattagtccatctgatattgattatacgataggaattaccaaggcttacactactagagt

SEQ ID NO: 316290 - DNA, 724 bp, Unknown
  Bacterial polypeptide expressing nucleotide sequence isolated from the Sargasso Sea
cctcgctcgcggcgagcaggtcctccttgagggcgcgcagggggcgatgcttgacatcgatcagggcacctatcccttcgtcacctcatcaatcacatgcagggcaaacgcgacacacggtgctggcatccatcctgggcacatagaccagtgctatgggattaccaaggcatacaccacaagggtcggaaacggacctttccccaccgagctgtcacttgaggatggccccgggaagcagatgtcagtcgtcggccatgagttcggaactaccacgggtcgcccgagaaggacaggatggctagatgcagttgccctcaacgagagccagcgactcaatggatacacgggactggtcgttaccaagctggacgtactaggcggcttggaagaactgaagatttgcacctcatacaatctggatgggaacgagattacccacgtcccatcctcgtccgaggaactcgccagatgcacgcctgtctacgagagccaccctgggtttcctgcgctcgatgaggacaggtggatcgagatggccgaggagtctaggaaggggggagggatcgcatctctccccagctccatcagatcatacctatctagaatcgaggagatcaccggggtaccagtagtaagtgtgggggtaggtccggaccgcctggcctctgtagccagctcagatgggccattcgatgtcgaaatgtccgaagcaaccttctaa

SEQ ID NO: 316291 - DNA, 742 bp, Unknown
  Bacterial polypeptide expressing nucleotide sequence isolated from the Sargasso Sea
atgaaaaatgtagtagtagttggttctcagtggggcgatgaaggaaagggaaagattgttgactggctctcaagtaaagcagatgtggttgtacgttttcaaggtggacacaatgcaggccatactttggttatagatggtgttacatacaagttaagacttctgccatcaggaatagttagaaaaaacaaagtttcaataattggaaacggcgtggttgtagatccttgggcactacttgatgaaataaaggaaatcaggtcaaaaggggtcatagttgatgaaagtaatttaatattatctgagtctgcaaatctcattcttccttttcataaagaaatggatgaaataagagaggatgcggctggtaaagcaaaaattggcacaacaagaagaggaattggacccgcttacgaagataaaattggaagaagatcaattagagttatggatttagtttcagaaaataatcttgatcatagattagaaactgttcttatccaccataatgccataagaaaaggtttaggaaaaaaaatatttaaaaaagaccaattgaaaaaagatttattagaaattgccccagaaatattaaaattttctcaacccgtctggaaaaaaatagatgaatacaaattaaaaggcaaaaagatattattcgaaggtgcccagggcattttattagatgttgaccacggaacttatccatttgttacatcttctaataccgtagcatcttctg

SEQ ID NO: 316292 - DNA, 1039 bp, Unknown
  Bacterial polypeptide expressing nucleotide sequence isolated from the Sargasso Sea
atatcacagggattaaaaatttcatcaacatcacatgtaacaatgccctaccaccgtatattagatgaagctatggaagctgataggggttcaaataaaattgggacaacaggtcgggggattggtccaacctatgcagataaatcgcaaaggaatggaattagagtaagagatttgctcaatagagaaaggttaaatgacgtgatcgaaatcccattaagagaaaaaaatggtcttctagagaaaatctatggaatcaaacctcttaaagtagaggacattgttaaagaatatcttgactatggacaaagattatcaaagcatgtcgttgactgtactaggactatacatacagcatcaaaaaacaaaaagaatattctatttgaaggtgctcaaggtaccctacttgacttagatcatgggacttatccctttgtcacatcatcaaaccctatatcaggaggggcatgtattggggctggagttggtcctactttaattgatagagttataggtgtcgcaaaagcttatacaacaagagtaggtgaggggccatttccaacggaattacaagggagtattaatgatcaactctgtgatagaggcagtgagtttggaaccacgactggaagaaggagaagatgtgggtggtttgatggagttattggtaaatatgctgtatctgttaatggtcttgactgtttagccgttacaaaactagatgtattagatgaattagatgagattcgagtttgtattgcatatgatctcgatggagaaaaaatagactactttcctacaaattcagatgacttaaaaaaatgtaagccaatcttcaaaaaattaaaaggttggcaatgttcaactgcagattgcagaaaactatctgatcttccagagaatgccatgaattatctcagatttttagccgaattaatggaggttccaattgccattgtctcattgggtgcgaatagagatcaaactatcgtgattgaagacccaattcatggtcctaaaagagcactactgaggtaat

SEQ ID NO: 316293 - DNA, 1294 bp, Unknown
  Bacterial polypeptide expressing nucleotide sequence isolated from the Sargasso Sea
atgaataatgtagttgttgttggatcgcagtggggagatgaaggaaaaggtaagatagttgattggttatcaagcgaagcagacgtagttgtaagattccaaggaggacataatgctggtcataccttagtcatagatggtgttacttataaactgagattgttgccatctggaattgtcagaaaaaataaaatttctattataggaaatggagttgtagtagatccatgggcgctgttagatgaaattgaggaagctaaatctaaagctgtagaaatcaatgaaaataatctgattttatctgaggctgccacactaattttaccatttcacagagagatggatgaaataagggaagattctgctggtaaatcaaaaattggaactacaagaagaggaattggtccagcttatgaagataaagtcggacgaagatctataagagtaatggaccttgcatccaaaaaaaatctagaaaatagattagctgtggttttagaacatcataatgctatccgaaagggattgggtaagccaatatatgaaaaagataaactagttgaggacttattaaaaatagccccaaatatattaaaatattcagctcctgtttggagaaagatagatcaatttaaactagaaaataaaaaaatattatttgaaggagctcaaggaatattacttgatgtggatcatgggacatatccatatgtaacttcatctaatacagtagcagcttcagcagcaacaggatctggatgcggtccaaattcaataaactatgtgttaggaattacaaaagcatatacaacaagggtaggtgaaggacctttcccaacagaattaacagatgatattggtaatcatttaggtgaaaagggaaatgaatttggaactgtaactagtagaaaaagaagatgtggctggtttgatggagttctagtgagacaaactataaagatttcaggcattaatggtatagcattaacaaaattagatgtattagatgaacttgatgaaataaatctttgcgtagcttacgaactaaatggaaaagaaatagattattttcctgctgccgttgaagatcaattaaatgtcaaaccagtatataaaacattcaaaggctggaaatctaaaacccaaggtattaaaaaatttgatgatttacctattaatgcaaagatttatgtaaaagctattgaagagtttattgaaacaaaaatatccagtatttcaacaagtcctgagagagaagatactatacttttagtagatccgtttaactattaaa

SEQ ID NO: 316294 - DNA, 1087 bp, Unknown
  Bacterial polypeptide expressing nucleotide sequence isolated from the Sargasso Sea
cggtgttgtgctaagccctgacgcactaatgaaagaaatgactatgcttgaagagcgtggcgttccagtgcgcgagcgattaaagattagtgaagcttgtccgcttattcttccttatcacattgcactagacgtagcgcgcgaaaaagcccgtggcgcaaaagcaattggtacaaccggtcgtggtatcggtccagcgtatgaagataaagtagcccgtcgtggattacgcgttggcgacttgtttaatgcagaagacttcgcagcaaagctgaaagaagtgctagacgtgcataacttcacgcttacgcagtactatggcgaagaagcagtagactttgatgaaaccttaaaaggtgcaatggaagttgctgacattcttaaagcaatggttgttgatgtaactgacgaactagacaaagcacacaatgctggcttgcctattatgtttgaaggtgcacaaggtacacttctagacatcgatcacggtacttatccttatgttacgtcctcaaacactaccgttggtggtgtagcaacgggtgctggctttggcccacttaagctagattacgtactgggtattgttaaagcatacactacgcgtgtaggctcaggtcctttccctactgaactagaatgtgaagtaggccaacacttaggtgttaaaggtcacgagtttggcgcgactacaggtcgtaagcgccgtacaggttggttcgatgcagttgcgatgaaacgcgcagtacaaattaactctattacaggtttctgtttaaccaagcttgacgtgctagacggccttgaaagccttcaaatttgtgtaggctacaaagatgcagacggcaacgtgaaagacgttccacctatggcggctgacggttacgagaaagtaacgccagtatatgaagaaatgccaggttggacagacaacacctttggtgtaactgagtttgaagcgcttccacaagctgcgaaaaactacattaagcgccttgaagagctaacaggtgtgccggttgatatcgtttcaacaggccctgacagaaacgaaactatcgttttacgcagcccatacgacgcgtaa

SEQ ID NO: 316295 - DNA, 673 bp, Unknown
  Bacterial polypeptide expressing nucleotide sequence isolated from the Sargasso Sea
aaaaaaaatattctttttgaaggggcacagggtacattacttgactgggatcatggaacatatccctatgtgacttcatcaaatccgatatcaggaggtgcttgtattggtgctggagttggcccaactttaatagatagggtgataggagtagcgaaagcatacactacgagagttggagaggggccattcccaacagaattacaaggaagtattaacgatcaactttgtgatagagggagtgaatttggaaccacaactggaagaagaagaagatgtggttggtttgatggaattattggcaaatatgctgtttatgtaaatggtcttgattgtttggcagtaacaaaattagatgtgctagatgaattagatgaaattcaagtctgtattgcatatgaattagatggtaaagaaatagattatttccccacaaattctgatgacttaaaaaaatgtaaaccaatttttaagaaattaaaaggatggcaatgctcgactgctaattgcagaaagctatctgatctgcctgaaaatgctatgaattacctcagatttcttgctgaattaatggaagtgccaattgcgattgtttcattaggcgcaaacagagatcaaaccatagtaattgaagacccaatccatggtcctaaaagagctcttctaagataat

SEQ ID NO: 316296 - DNA, 778 bp, Unknown
  Bacterial polypeptide expressing nucleotide sequence isolated from the Sargasso Sea
aatgaaaaatgtagttgttgtaggttcgcaatggggtgacgaaggcaaaggaaagatcgttgactggctttcaagcgaagcagacgtagttgttcgttttcaaggaggtcacaacgcaggtcatactctagttatagatggagttacatataagcttagactcttgccatccgggatagttagaaaaaataaaatttcaataattggaaacggcgttgttgtggatccctgggcactacttgatgagattaaagaaattaaatcaaaaggcgtgaatgttgatgagaaaaacttaatcttatctgaatctgcaaaccttattcttcctttccataaggagatggacgaaataagagaagatgctgctggaaaagccaaaattggaacaacaagaagaggaattggtcctgcctacgaagataagattggaagaagatctattagagtgatggacttagtttctgaaagcaatctagaccacagattagaaactgttcttattcatcataacgccataagaaaaggtttaggaaagaaaatttttaagaaagatcaactaaaaaaagatctgttaaaaatagccccagaaatattaaaattttctcaacctgtttggaaaaaaatagacgaatataaatcaaaaggtaaaaaaatattatttgaaggtgcgcaaggtattctattggacgtagatcatggcacatatccatttgttacatcttctaatactgtagcttcatctgctgcaacaggaacaggatgtggtccaatacaataa

SEQ ID NO: 316297 - DNA, 529 bp, Unknown
  Bacterial polypeptide expressing nucleotide sequence isolated from the Sargasso Sea
gatgtggtccaatacaataaattatgttttagggataacaaaagcttacactacaagagttggagaaggaccttttccaactgagttaacagataaaatcggtgaacaacttggaactagaggaaaagaatttggaactgttactagcagaaaaagaaggtgcggttggttcgacggagttcttgtgagacagacaataaaaatttctggaatcaatggaatagcacttacaaaactagatgttttggatgaactagatgaaattaaaatgtgcattgcttatgaaattaacgggaaaaaaatagactatttaccggcagcagtagatgatcaattaaaggttaaacccgtttataaatcttttaaaggttggaaatcttccactcagggaattaaagactttgacaagttaccagaaagtgcaaaagtttatgtaaaagaattagaacgatttattgaagcaaaaatatcaagcatatcaactagtcctgaaagaaaagacactattcttattgagaatcctttttaa

SEQ ID NO: 316298 - DNA, 1067 bp, Unknown
  Bacterial polypeptide expressing nucleotide sequence isolated from the Sargasso Sea
ttgggcattattagatgaagttaaagagattaaagagaaaggtgttgaagttaattcagagaattttatgatttctgaatctgctaatttaattttgccgtttcatagagaaatggatgaaattagagaagatgctgctggaaagggaaaaataggaactacaagaagaggaattgggcctgcatacgaagataaagttggcagaagatctataagagtaatggacttaaggtctgaacaaaatttagatcaaagacttcaaacagttttattacatcataatgcaattagaaaagggttaggaaaaaaaatttttaaaaaagataaattaaaaaaagatcttttagaaattgctcctgaaatattaaaatattctaaacctgtctggctaaaaattaatcaattcaaaagacaaaaaaaaaagatattgtttgaaggcgctcagggtgttttgctagatgtagatcatggcacttatccttttgttacttcttcaaacacagtagcttcaagtgcagcaacgggaacgggttgtgggcctaattcaattaattatgttcttggcattacaaaagcttatacaactagggtcggtgaaggaccatttccaacagagcttttagacgagattggtgaattgcttggcactagaggaaaagaatttggaacggttacaagtagaaagagaagatgtggatggtttgatggagttctagttagacaaacaataaaggtgtcaggaatcgatggagtagcattgactaaacttgatgttttagatgaattagatgaaataaaaatgtgtgttgaatatgagctaaatggcaagaaaatggattaccttccagctgcagtcgaggatcaattaaaaattaaaccaatttataaaacttttgatggatggaaaagttcaacgaatggaattaagaatattaacgatttacctgagaatgctaaaaaatatatttttgctatagaagatttcattggagcaaagatatctagtatatcaactagtcctgagagagatgatactattttagttgaaaacccttttgaaatttaat

SEQ ID NO: 316299 - DNA, 532 bp, Unknown
  Bacterial polypeptide expressing nucleotide sequence isolated from the Sargasso Sea
atgtctcttgatgtaggaactattacagtaatagtcggcgctcaatggggcgatgagggtaagggtaaaattactgatttttttgcaggctcttcaaactacgtagttcgatatcatggtggcaacaatgctggccacactgttattgttaatgataacaaatataaattacacctaataccttcaggggttctatacccggaccctattagcgttattggcaatggcgttgtaattgacccaagggctcttttagatgaaattgcctatttaattgataaggatgttacacctaatctcatgattagcgatagagcgcatgttataatgccataccataagctacttgatggtgccttaacaaatcatcaggacaacttagctgcaggcagcactaaacgcggtatagcgccagtgtatggagataaaatgtttcgtaacggcattagaatagttgatcttttagaaaaagatatattatatgaaaagctaattaagtcttttgaatttgctaataatttatatcatgcaa

SEQ ID NO: 316300 - DNA, 479 bp, Unknown
  Bacterial polypeptide expressing nucleotide sequence isolated from the Sargasso Sea
cagagttgggtcggggccttttccaacagaacttcatgataaatatggtgagcacttaggttctgttggtgttgaatttggagcaacaacaggccgaccaagaagatgtggttggcttgatgtcgtagccctgagaagatctgtattgaatagcagtatctcaggattttgtcttactaaacttgatgtgcttgacggcttggaaaagataaaaatttgcacagaatataaattgcatgacaaaaccatttcaaattttccattagaaatctcagagttagataattgtgaacctttgtatgaagagtttgggggctgggaagactcaacgaaaggtttaaaaagattttcagatatgcccttgaatgctaagaagtatattcaagctattgaggagatgttgcatcttcccattgacattatttcaactggacccgatagagatcatacgattatcagaaacaatccattctcttgat

SEQ ID NO: 316301 - DNA, 1222 bp, Unknown
  Bacterial polypeptide expressing nucleotide sequence isolated from the Sargasso Sea
aatgtctaacaatacccttatccttggtctgcaatggggagacgaaggaaaaggaaaaattgttgatgccttaagcgaaagcatttatgcagtatgcagattccaaggtggtcataacgctggccacacaataaaagtagatggggttcaaaccgttcttcacttaataccatcaggagtccttcataaaaatgttaagtgccttataggaaatggagtagtcctatctcttgaagcaattaaaaaagaaattgaaggattggaggaatttggtgttgaaatacgtgaccgattatatattagtgaaaactgcccattaattctcccaagtcatataaagattgatcaagtcagagataaagatgaatttattggcacaacaggaagaggcattggaccagcctatgaagataaagttggacgaagagcaataagattcggtgacttaaaagacgagactttattaagaaaaaaagtttcaaggttaattaagattcataataaattgttggagcatttttatgatgcagaacccttttctgaggaagaaatcctaaataatcttctatcttttaaaaactttgctgaagctttctcagttaatacaacagacttattaatgaattggtctgaagagggtaaagaggttttatttgagggtgcgcaggggactttccttgatattgatcatggaacctatccctatgttacttcatcaagcactacaattggtggagtttcatcaggtcttggaatagggccaaagcatattaataatataatcggaattgttaaagcatatgcaacaagagttggagaaggcccatttataactgagctttttgatgaggatggagaagaaatagctaaacgtggaaatgaatttggagcaactacgggtaggccaagaagatgtgggtggctcgatcttgttgctttaaaaaaggctatttttataaattctgttgatagtttatgtatgaccaaagccgatgtgcttgatactttaaaaaatataagtgtttgcgtagcttatgatgacaacaacttacccatctataagagattcgaagggtggcaagaggatactagccaatgcacctcatataacgagcttccaaaaaaattaaaagattatgtaaaattcattgaggaaactgttaactgcaaagttagcataatctctgttggcccttctagagagcaaagcatacatttataa

SEQ ID NO: 316302 - DNA, 292 bp, Unknown
  Bacterial polypeptide expressing nucleotide sequence isolated from the Sargasso Sea
ttggccaatgttgttgtaatcggagcccaatggggtgacgaaggaaaaggtaaaataacggatttacttagtcgttcggcagatgttgtcgttcgctatcaagggggagtaaatgcaggtcatactatagtcgtagatgataaagtcttaaaattacatttaattccctcagggatactttataaaaatacttcttgtctaattggttcgggaactgtagtagatccaaaaatcttgctcaaagaaattgacatgttaattgataatggaattgatatctcaggattaaaaa

SEQ ID NO: 316303 - DNA, 454 bp, Unknown
  Bacterial polypeptide expressing nucleotide sequence isolated from the Sargasso Sea
ttgcttaaaatagcacccaaaatattagaattttctcagccagtttggctaaagattgatcaatttaaaaaacaaaaaaagaaaattttattcgaaggagcacaaggtattttacttgatgtagatcatggaacttatccttttgtaacctcatctaacactgttgcttcaagcgcagcaacaggaactggttgtggccctaattcgataaattatgttcttggcattaccaaagcttatacaacaagagttggagaaggaccttttcctactgagttaacagataatgtcggtgaacttttaggaacacgtggaaaagaatttggaactgtcacaagtagaaaaagaagatgtggatggttcgatggtgttttagtgaggcaaactattaaagtttcagggattgatggtatcgctttaacaaaattagatgtacttgatgaattagatgaaa

SEQ ID NO: 316304 - DNA, 1159 bp, Unknown
  Bacterial polypeptide expressing nucleotide sequence isolated from the Sargasso Sea
catctgatcccctccggaatcctttatccggacacgatctgcatgatcgggtccggcacggtcgtggatcccaaggtgatgctcggtgagctggacatgctcatcgccaacgacatagatatatctggcctgcagttggcctccacggcccacgtgaccatgccgtaccaccgcctgcttgatctggcgatggagaagcagcgcggcgaccggcggatcggcaccaccggccgcggcatcggaccgacctatgccgataaatcccagcgcagcggtatccgtgtgatcgacctgctggatgaagcacggctgagggaacgtcttgagggacccctccaggaaaaaaatcaactgctggagacgatctacggcgtcgagcccctcgatgcggagtccgtgatcaaggagtacctgggctacggcaagcgcctggccccccacgtggtggagtgcacccaggccatccaccaggcggcaagggcccgcaaaaacatcttgttcgaaggtgcccagggcaccctgctggatctcgatcacggcacctatccctacgtcacctcctccaatccggtgtccggtggggcctgcatcggtgccggcgtgggaccgacgctgatcgaccgggtgatcggcgtggccaaggcctacaccacccgtgtcggcgaaggccccttcccgacggagctcagtggccgattgaacgaccagctcaccgagcgtggcggcgaattcggcaccaccaccggccgccgacgtcgctgtggttggttcgacggggtgatcggccgttatgcggttcaggtgaacggcctcgactgcctcgccgtgaccaagctcgatgtgctggatgagctggatgccatccaggtgtgcgtggcctacgagctggatggtgaacgcattgagcatttccccagcagcgccgaggacttcgcccgctgcaacccgatcttcgagacccttcccggctggcagtgctccaccgaggactgccgcaagctcgaggatctgccggacgctgccatggcctacctgcgcttcctcgctgatctgatggaggtgccgatcgcgattgtctccctgggtgccagccgcgatcagaccatcgttgtggaagatccgatccacggccccaaacgggctctgctcagcgcctgat

SEQ ID NO: 316305 - DNA, 441 bp, Unknown
  Bacterial polypeptide expressing nucleotide sequence isolated from the Sargasso Sea
aatgttttatactattgttggtactcaatggggagatgaaggcaaaggaaaaattgttgattggatatcatcaaaagcagatcttatagttagatatcaaggtggtaacaatgcaggccatacaataaaagtagataataaaatttataaattaaatttgttaccttcaggaattataaataataaaaaatgtgcaattggtaatggtgtggttttagatccatgggcattagttaacgaaataaataatcttaaagaccaaaatattcttgttgataaaaataatttattaatagcagataatatttgcctaatattaccaattcataaaatgattgacgagatcaatgaattatctaggggaagtaaagaattaggaactacaaaaaaaggtataggacctgcttatgaagataaagtaggaagaagagctattaggct

SEQ ID NO: 316306 - DNA, 894 bp, Unknown
  Bacterial polypeptide expressing nucleotide sequence isolated from the Sargasso Sea
aatgaaaaatgtagtagtagtaggttcacagtggggagacgagggtaaaggtaaaattgttgattggttatctgatcaagctgatatcgttattcgttttcaaggaggacataatgccggtcatacattggttattgatggagttacttataaattgagattacttccatcgggaatagttagaaaaggcaaaatatcaattattggcaatggtgttgtggtcgacccttgggctttattagaagagattaaagaaattaaatctaaaggcgttgatgtaaatgaagataattttattatttcagaatctgcaaatttaattttaccatttcatagagagatggatgagattagagaagatgcagctggcaaaggaaaaattggaacaacacgcagaggtataggtccggcatatgaagataaagttggcagaagatctatccgtgtgatggatttaaaatcagaaaagaatttagatcacagattggaaacagtgttgcttcatcataatgctattagaaaaggtttagggaaaaaaatttatgaaaagaatgaacttaaaaaagatttattaaaaatagcaccagaaattttaaagttttcaaaacctgtatggcttaaaattgatgaatataaaaagaaaaaaaagaaaatattatttgaaggcgcgcaaggtattttattagacgtagaccatggaacttatccatttgtaacatcgtcaaatacagttgccgcaagcgctgcaacaggttcagggtgtggtcctaattctattcattatgttttaggaattacaaaagcttatacaacaagagttggagaaggaccttttccaactgaactcaaagataaaattggagaattgcttggtacaagaggaaaagaattgga

SEQ ID NO: 316307 - DNA, 1284 bp, Unknown
  Bacterial polypeptide expressing nucleotide sequence isolated from the Sargasso Sea
gatgaaaaatgtagctgttgttggatctcagtggggtgatgagggaaaaggaaaaattgttgactggttatcaagtcaagcggatgttgtaatcagatttcagggcggacataatgctggccatactttagtaatagatggtgttacgtataaattaagattattaccatcaggtatagtaagaaaaaataaaatatctatcatcggaaacggtgttgtagttgacccatgggcattacttgatgaaattcaagagattaaatccaaaggagttgacgtaaaccaaaaaaatttaattatatctgaagctgcaaatttaattttaccatttcatagagaaatggatgaaataagagaagatgctgctggaaaggctaagattggaacaacaagaagaggaatcggtccagcgtatgaagataaagtcggcagaagatctataagagtaatggatttgatttcagaacaaaatcttactcatagattagaaacagtattaacgcatcataatgcaatcagaaaaggttttggtaaagaaatttataagaaagagaatctaatgaaagatttacttaaaatagctcctgaaattttaaaatattcacaaccggtttggaaaaagattgatgaatttaaatcacaagggaaaaaaatattgtttgagggagctcaaggaattttacttgatgtggatcatggaacttatccatttgtaacttcttcaaacacagtggcagcagcagctgcgacaggttcaggttgtggtccaaattctataaattatgtcttaggaattaccaaagcatataccacaagagtaggtgcaggtccttttccaactgaattgacagataagataggtgaagaacttggaactagaggaaaagaatttggaacagttactagccgcaaaagaagatgtggatggtttgatggagttttagttagacaaacaattaaaatttcaggaattgatggaattgctttaacaaaattagacgtattagatgaacttgaagaaattaaaatgtgtatagcatatgaacttgatggaaaaaaaattgactatttgcctgcatcgattgatgatcaattaaaagtaaagccagtttataagatttttgaaggttggaaatcttcaaccagtggtattaaaaaatttgataaccttccagataatgccaaaaactatataaatgaattagaaaaatttatagaatctaaaatatctagcatttcaactagtccagaaagaaatgatacaatattaattgaagatccttt

SEQ ID NO: 316308 - DNA, 453 bp, Unknown
  Bacterial polypeptide expressing nucleotide sequence isolated from the Sargasso Sea
tgctggatcaaaccggagagttccttcgcagcgaaggacaggaatttggcgcgaccacaggacgaccccgccgctgtggctggtttgacgcggtgttggtgcgatatgccgttcgtctgaacggtatcacttcgctggcgttaaccaaactcgatgtgcttgacaaatttgaaactctgaaactttgtttcggttaccgcatgaaggatggcagcatccagaccgattttcccttcgaggggcatgatgaggttgaaccggtttatgaggaactgcccggctggaacacaaaaaccgcgggcatcacggaatacgatcaactgccgaaaaacctgctcgactacctggcccgcatcgaagaactggtggaggctcctgcatcgatcatctccaccggtcccaaacgggaggatacgattgtgcttcaacccgaccgattctggaagtcatgag

SEQ ID NO: 316309 - DNA, 1297 bp, Unknown
  Bacterial polypeptide expressing nucleotide sequence isolated from the Sargasso Sea
tatggcaaatgtagtagtcgtcggatctcagtggggagatgaaggaaaaggaaagatagttgactggctatcaagtagagcagatgtagtggtaagatttcaaggaggccataacgcaggacatacattagttatagatggtaaaacttataaactatcattatttccatcaggtatcgttagggaggataaagtatcaataattggtaatggtgtagttgtagatccctgggcatttgctgaagaactaaaaatccttattaatcaagacgttgaaataaattcaaaaaatttaaaaattgctgaaaatgcttccttaatacttcctgttcataaaaatcttgatattttaagagaacatagaagctcaaatgattcaaaaataggaactaccaaaagaggaattggcccagcatatgaagataaagtcgggagacgatctgtaagggttggtgatttaagggatttaaaagctttaaaattaaaagttaataatcttgttgatcatcataatatcattcttagaggtatgaatgaagaagagataaacccagatactatctatgatgacttaattgaagtttcagaaattattaagccgtttatttctagaacccaagaatttcttattcgagcaagaaaagatagaaagcgaattttgtatgaaggtgcccaaggtgctttactggatatagatcatggtacatatccatatgtaacttcatcaaatactattgcatctgcggctgcaactggatcaggtcaaggtgttaaatccataaattatgtattaggaataactaaagcctataccacaagggtaggtgagggaccattcccttctgaacaagataatgatgttggaaatgagcttggtgaaaaaggtcatgaatttggaactgttacaggaaggaaaagaagatgcggttggtttgatgctgttctagttaaacatgcaattgaagtctcgggtattgatggtatggctctcaccaaacttgatgtccttgatggctttgaaaaaattaatatttgcactgcttatgaactcgacggtaaaaaaattgattattttccatcttcatctgaagaacaatcaagaattaagcctatttttgaagaatttgatggatgggatacaacaacttttggagctaggctttggaatgacttacctgcagaagctgttaaatatgttaaaagaattgaagagttaacaggtactccagttgcattattatcaaccagtccagaacgagaagatacaatattagtaaaagatccttttgaggattaa

SEQ ID NO: 316310 - DNA, 1348 bp, Unknown
  Bacterial polypeptide expressing nucleotide sequence isolated from the Sargasso Sea
atgtctgccagcgcagtgaatgtgaaccccgggcgtaacgtcgtcgtcgtgggaacccaatggggtgatgaaggcaagggcaagatcgtcgactggctgacggaccacgcccaaggcgtcgttcgcttccagggcggtcacaatgccggtcacacgcttatcatcggcggcaagaaaaccatcttgcgtctgattccgtcgggcatcatgcatcccggcgtcgcgtgctacatcggcaatggcgtcgtgttgtcgccggaagcgctgttcaaggaaattggcgagctcgaagccgccggggtcgatgttcagaatcgccttttcatttccgaagccaccaccctgatcctgccctaccacattgcgatcgaccagggccgcgaagcgcgtcgtggcgcgggcaagatcggcaccaccggccgcggcatcggcccggcctacgaagacaaggtggcgcgccgcggtctgcgcgtgcaagacctgttcgagccggaaagcttcgccgaacgtctgcgtgaaaatctcgattaccacaacttcgtgctgaccaagtacctgggcgtcgcagctgtcgacttccagcaaacgctcgacacgatgctgagctacgccgaccgtctgaagccgatggtgaccgacgtgtcgcgtcgtctgtacgacgaaaacgccgccggcaacaatctgctgttcgaaggcgcgcaaggcacgctgctcgatatcgaccacggcacctatccgttcgtcacgtcgagcaactgcgtggccggtgcggccaccgcgggtgcgggcgtcggtccgcaaaagctgaactacattctcggcattaccaaggcgtattgcacgcgcgtcggttcgggcccgttcccgagcgaactgtacgacgcggataacgccgcgcgccaggaagcgatcggcctcgaactggccaccgtcggcaaggaattcggttcggtcaccggccgtccgcgccgcacgggctggctcgacgccgccgcgctgcgccgctcgatccagatcaacggcgtgtcgggtctgtgcatgaccaagcttgacgtgctcgacggcctcgacgaagtgaagctgtgcgtcggctacacggtcgacggcaagccggtcgatctgctgccgcgtggcgcgtcggaagtcgcgcgttgcgtgccggtgtacgaaactttccccggttggaaggaaagcaccgtcggcatcacgcagtgggacaagctgccggccagcgcgcgtgcgtatctgacccgtgtgcaggaagtcgcgggtattccgatcgacatggtgtcgaccggtccggatcgcgacgaaacgattctgctccgtcatccgttcaaggtttaag

SEQ ID NO: 316311 - DNA, 1291 bp, Unknown
  Bacterial polypeptide expressing nucleotide sequence isolated from the Sargasso Sea
atgagaaatgttatagttattggaacgcaatggggagatgagggcaaaggaaagatagttgattggctttcaagcgaggcagatgttgttgttagatttcaaggtggtcataatgccggtcatactttggtaattgatggtgtaacttttaaattaaggttacttccctcaggtacagttagaaaaaataaagtctcagtaataggaaacggtgttgttgtcgatccgtgggcattaatcgatgagataaaagagatgaaatcaaagggtattgaaattaataaagataatttaattctatccgaagcagccaatctcatactgccttatcacaaagagatggatgaaataagagaagactcagcaggaaaagcaaaaattggaactaccagaagaggcataggtcccgcatacgaggataaggttggaagaagatcgattagagttatggatttaatgtcagaaagtaatttggacactagactcgaagctgccttgatacatcataacgctttacgaaaaggtttaaaaaaaaaggtttttaggaaagataaattaaaaaaagacctgttaaaaatagcaccagagattttaaagttttcacaaccagtttggaaaaaattgaacgaatttaaagcaaaaggaaaaaaaatattatttgaaggagcacaaggaattcttctagatgttgatcatggcacttacccttttgtaacttcatcaaatacagttgcatctgcagcagctactggatccggatttggatctagcaatgcaagttatattttaggtattacaaaagcttacacaacaagagtaggtgaaggcccatttccaactgaacaaaaaaataaaattggaaacttactgggtagtagaggaaaagaatttgggacagtaactagcagaaagagaagatgtggatggtttgatggtgtactagtaagacaaaccattaaaatatccggtataaacggaatagctcttacaaaattagatgttttagatgagttagatgaaattaaaatgtgtgttgcatacaaattaaatggaaaacaatatgattatttacctgcaggagcagaggatcaatttaaaattgaacctatttacgaaacctttcctggatggaaagaaagtactagaggtataagaaatattgaaaatcttccagataaagcaaagaaatatatttacgctcttgaagattttatagaggctaaaatttcaagtatttcaacaagtcctgaaagagaagatacaattttagtcgaaagtccatttgcttaat

SEQ ID NO: 316312 - DNA, 760 bp, Unknown
  Bacterial polypeptide expressing nucleotide sequence isolated from the Sargasso Sea
ttggtgtctgataacactttaatcttaggtcttcaatggggagatgaaggcaaaggcaaaatagttgacaatttaagtaaatcgattgatgtcgtttgtaggtttcagggcggacataatgctggacacaccattaaagttaatggtcaaaagactgttctccatctaattccatctggcatcttgcatgataatacaaaatgtttaattggtaatggagttgttttagctctagatgctttgcataaagagataaaacatttggaagaaaaaaaaatttcttttcaagatagattttttataagttctgcatgtgctttgatactcccaacccacattacattagatatagtaaaagataaaaaagaatctataggaactacagggagaggtattgggccagcatacgaagacaagattggcagaagagcaattagacttggtgatttaaatgacttgaaatcactaaaagataaaatatattcgcttgtagaatatcataatcgattacttgaaaacatatatcaacataaacctcataatgctgaagaagtttttaatcatattgttaagttcaaggatttacatgataaatattgcgtagattcacaagaaactatgcataaatggattaaaaatgatgaaactatattatttgaaggtgctcaaggcacactattggatattgatcatggaacctatccttatgtgacatcttcaagcacgactgctgggggagtttcgactggtcttggcatag

SEQ ID NO: 316313 - DNA, 1067 bp, Unknown
  Bacterial polypeptide expressing nucleotide sequence isolated from the Sargasso Sea
aatgacaggtgttgtagttgttggatcccaatggggcgatgagggaaaaggaaagattgtggattggctttcaagccaagctgaccttgtaatccgatttcagggtggtcataatgctggccatacccttgtaattaataatgagacatacaagttaaatatattaccttcaggcattttgcgtgaagacaaaatttcaattattggcaatggggttgttcttgatttatctgctcttaaaaaagaaataacaagtttagttgatagaggtgtaaaaatctcaccacataatctatttatttctgatagggcaacaataatattgcccatccatcaaaagctagacgctataagagaaaataataatcttataaaaataggaacaactaaaagaggaatagggccagcttatgaagacaaagttggaagaagagcaattagattgtgcgatttatttgataaagaaaaattaataaccaaaattgatgtattattgaatcatcataatgcaataatgagaggattaggcaacgaggagtacaaagccgtcgatatacttgatgagatttatgaactggggcagtttgcaagaccgtttgcaaaaacaattaatgaaattcttggcaccattaaagacaataatgaaaagatactatttgagggagcccagggatttctgttagacattgatcatggaacatatccatttgttacatcatctaatgttcatgcaagttatgcctcaattggcagtggtttgagcccaaaagtagttaatcatgtattagcaataactaaagcttatactacaagggtaggaaatgggccttttccaactgaacaagataatgaagttggcaataaactgggtgaaattggtcacgaatttggaacagttacaaatagaaagagaaggtgtggttggtttgatgccgtgttggttcgtcaggcactgactcaatcaggcgcaacaggtattgctcttacaaaaattgatgtattagatcattttgaagaaatacagatgtgtattggctataagttaaatggtgaagatattgattttt

SEQ ID NO: 316314 - DNA, 1072 bp, Unknown
  Bacterial polypeptide expressing nucleotide sequence isolated from the Sargasso Sea
ttgtcgattcatgcggtattaggtggccaatggggagatgaaggaaaagggaaaattgttgactacctagctaaagatttttctataatagccagattttctggtggaaataatgcaggtcacactgtaataaacgaatttggagaattcaaattccatttaataccttcaggagtatgttggccacatgttgaaaatataattggaaatggagtagttgtagatccaaatgtactaattgaagaaatatcaaaattaaaagatttagggttaacagacacaaaaattaaagttagtgaaaaatgtcatttagtaatgccctatcacattctcatagataatttagatgaggaaagaaaaggttctttccagataggtacaactagaagaggaataggacccgcttatgtagacaaggtatctagagaaggaataagaatagaaagtctgctagatataaaagatttccaagatcaattagcgagagtactcaaaataaaaaatgaaatattatcaaaagtatatgatcaaagacctttagaattaaagccaattatggaaaaagtgaaattttgggcctcatttctaaaaccatatatttatgatacagaaagttatatttctgaatctatacaaaataataagaaaattttattagaaggagctcaaggtactttattagatttagatcatggaacttatccatacgtaacatcttctaatcctacaattggtggcgcactaactggactaggcttagggccaaaaaatatttctgaaatcctaggcgtattcaaatcttattgtacaagagtagggtcagggccttttcctacagaattaaaaggtgcgttaggagaaaaaataagaactcaaggccaagaatttggaacaactactggtagaccaagaaggtgtggctggtttgatgcagtaattgcaagatacagcactaggattaataacttagattcgataattttaactagattagatattttagatggatttgaaaaaattaaaatatgtgtaggttatgaattggaaaccaatcaaatagttgattttcctg

SEQ ID NO: 316315 - DNA, 631 bp, Unknown
  Bacterial polypeptide expressing nucleotide sequence isolated from the Sargasso Sea
ggtgcacaaggtattttattagatgtggatcatggaacatatccatttgttacatcttctaacaccgtagcctctagtgcagctactgggacgggttgtggaccaaattctataaattatgttttaggtatcacaaaggcttatactactagagtaggagagggaccttttccaacagaacttcagaacgatattggtgaactattaggcaaaaagggaaaagaatttggaacagtaacaagtcgtaaaagaagatgtggttggtttgatggtgttttagttagacaaacaattaaaatatccggaataaacggtattgcattaacaaagcttgatgttctagatgaattaaacgagattaagatgtgtgttgaatatgaattagatggaaaaaaaattgattatttgcctgcttcagttgaggatcaactaaaaataaaaccaatttataaaacttttcctggttggaaaaaatctacaaatggaattaaaaatatcaatgaacttcctcaagaggctagagattacatttatgcaatcgaagattttattgaggcaaaaatatcaagtatatccacaagtcctgagagagaagatacaattttaattgaaaatccttttgaaatttagt

SEQ ID NO: 316316 - DNA, 601 bp, Unknown
  Bacterial polypeptide expressing nucleotide sequence isolated from the Sargasso Sea
atgccagataactcatccaaagtaacagctattgtcggtgctcagtggggcgatgaaggcaagggtaaaatcactgatttctttgctggtgaggcagactttgttgtccgatttcatggtggaaataatgccggacatactgttattgttgacggcgacacctacaaactccatcttatcccctctggagtattatatgaatatccaaccagcataattgggaatggggttgtgattgaccctgctgcattaattaatgaaataaattacttaaaagataaaggtgtaaaccccaagttgaaaataagtgacagagcgcatgttattatgccatatcacattgaaatggatatagcactaacaaagcaccaagggaaattagcggcgggcagtacaaaacgaggtattgctccggtgtatggagataaaatgtaccgacatggtatacgtatgatcgatcttacagagcctgatgttttcagcgaaaagatagacaaagcatatagctttaatcaaacagtgatagaagcatttggccacagcattgaacaaaataaaaaaagcatttatgagcaatacatcgaatatggaaaatactaag

SEQ ID NO: 316317 - DNA, 1432 bp, Unknown
  Bacterial polypeptide expressing nucleotide sequence isolated from the Sargasso Sea
cctgaccttcataatcgcttcccaacgcaacgggcagccaattatcacatccaaagcattcaaacacctatcgccatgttccgcgaccgtgcctgccagagtagtgctcggggcccaatggggggatgaaggcaagggcaaggccatagaccaactggcccccaactcccaatgggcagtacgcttccaggggggcaataacgccggtcacacaatagtggccgggggtaccactctcaagatgcacctgctaccatcaggaatcacagccagggattgcaatctggtgctcggatgcggcatggtggtagacccatgggtcctagatacggaactatccgagtgggcagaactgaccggagagagcccagaggggaaacgcctcttcatcagcgagagagcagctgtgattcttcctttccacaggctatacgactcggccgacgagcttgtcgggactaccggcaggggcatcgggccagcataccgcgacaggaccgaaagggtcggtctgcgattcgtggacatcgggctaatcttgggaagggactccgagatagcagagatttctgagagaatgaacgcccaactatccacagtagggatcgaagaaaagatcgaacctgagcaactcaagtccgatctgtcttggatccaccagagattctccgaagccatcagagccactggcccgatgctggacaaggccctcgctcgtggagaaaaggtcctcctcgagggggcccagggggcgatgcttgacatcgaccagggcacctatcctttcgtcacttcatccatcacgtgcagggcgaacgcgacacacggtgccggcatccatcccggacacatagaccagtgctacgggattacaaaggcatacaccacaagggtcggaaacggtcccttcccgaccgagctatctctcgaggatggccccgggaagaagatgtcagtggtcggccacgagttcggaaccaccacggggcgccccagaagaacgggatggctagatgcggttgccctcaacgagagccagcggctgaacggatacacgggacttgtcgtcaccaagctggacgtactgggtggattggaagaactgaggatctgcacctcgtacaatctggatgggaatgagatcgaccacgtcccgtcctcgtccgaggaactcgccagatgcacgcccgtctacgagagccacccgggattccccgcgctcgacgaggaagagtggatcgagatggcagaggagtccaggaagggagggggcataggctccctgccgagcccgattaggtcctacctatccagaatcgaggagatcacgggcgtgcccgtagtcagcgtgggagtcggcccggaccgcctcgcttccgtagccagcgcaggcgggccattcgacgtggaaatgtccgaagcaaccttctaa

SEQ ID NO: 316318 - DNA, 795 bp, Unknown
  Bacterial polypeptide expressing nucleotide sequence isolated from the Sargasso Sea
gtcatcacaattttataagaaaaggtatgggtaaacaaatttttaataaagatttacttaaaaaagatttacttaaaattgccccacatattttaaaatttgtacaacctgtttggaaaaaaattgatgaatttaaggtacaaggaaaaaaaattctttttgaaggtgctcaaggtattttactagatgtagatcatggaacatatccatatgtaacatcgtcaaatactgttgcttcttctgctgcaacaggatcaggctgtggtccaaattctgtaaactatgttttaggtataacaaaagcatatactaccagagtgggagaaggtccattccctacagaattaaaaaatgaaattggtgagcatttaggaagtgtaggcaaagaatttggaacagttaccagtagaaaaagaagatgtggatggcttgatgctgtgctagtaagacaatcaattaaaatttcaggaattaacggaatagctttaactaaattagatgtattggatcagttagatgaaattaaaatgtgtgttgcgtatgatttagatggaaaaaaaatagattatctgcccgcaactctagaagatcagataaaaattaaaccaatttataaaatttttgaaggctggaaaacatccactaaaggaataaaagattttaaaaatttacctgaaaatgcaaaaaattatttgtctgaagtggaaaagtttattgggataaaaatatccagcatttctactggtccagaaagaaatgaaaccatattaattgaagatccctttgatatttaat

SEQ ID NO: 316319 - DNA, 1095 bp, Unknown
  Bacterial polypeptide expressing nucleotide sequence isolated from the Sargasso Sea
ataccattaaggtaaatggtgagaaaacagtactgcttttaataccatctggaatattgcataacaatgctaagtgcctaataggtaatggtgtagttttagcattagatgccttagataaagaaattaaagaacttaaagataaaggtattgattttaaagatagatttttcgttagttcagcatgtgctttaattctcccaacccacatatctatcgacaaggtaagagataaacaagaatctataggaacaactggtagaggtataggaccagcatacgaagataaaattggaagaagggcaattagatttggggatattggagaccatcagctcttaaaagaaaaagtagcattgctcatcggataccataatcgaattttaaaagatttatatcaacaagaaatttataacgttgatgaagtttttgaagagattattaaatacaaatatctgtatgacgaattttgtgttgattcgcaagatttaatttatgactgggttgaagacaaaaagtctattttatttgaaggagctcaaggaacacttttagatattgatcatggaacatatccatatgtgacatcatcaagcacaactgctggaggagtatcaactggattaggcataggcccaaaatatattgataaaatcattggaatatctaaagcttatacaactagagttggagagggcccattcattacagaactatttgatgaagatggatcactacttgccaaaaggggtaacgaatttggagctactacaggaaggcctagaagatgcggttggttagatttagtagctcttaagaaagcaatttttacaaattctgttacagatttatgcataacaaaactagatgttcttgatgagactaaagttataagagcatgtgtagaatacaaaaataatgaacctgtttataaggaatttgatggttggttatgctctactgaaggaataactgaatattctgaattgccggatagagcaaagatgtatattgaatatatcgaagaatacattagttgttcagcttctataatttcaactggcccatcaagagatcagactatttctaaatagc

SEQ ID NO: 316320 - DNA, 517 bp, Unknown
  Bacterial polypeptide expressing nucleotide sequence isolated from the Sargasso Sea
aatattttaggtataacaaaagcatatactactagagttggttctggtccattcgtaacagaattgaatgatcagataggagaccatttagtagagaaaggacaagaatatggaactgttactaaaagaaaacgtcgatgtggttggtttgatagcgtacttgtaagacaatcaatagcaataaacggtatatctgatgtggtgttaacaaaactagacgtacttgacgatattaaagaaattaaagtttgcgtaggttataaggatgatacaacaatctacaattatatgccttttgatgaaaatatccaaaaaaaattaattccaatttacgaaactataccaggatggcaaacatctacatttggtctaactaaatggaatgatcttccaaaaaaaacacaagattatattaaatttttagaactaaaaatcgaaaaaaaaatttctattatttctacaggtcccgatagaattcacacgattgatataaataatttattgagtaagaactgaa

SEQ ID NO: 316321 - DNA, 700 bp, Unknown
  Bacterial polypeptide expressing nucleotide sequence isolated from the Sargasso Sea
ggaccttgttgttgatagctcaaaagagttgaacaatttgaagttaaagcagtcaaatatactctttgaaggagctcaaggctcaatgctagatatagatcaaggtacatacccatttgttacatcatcaagcactctatctggggcctcttcgttaggttctggtatcggaccattggatatcgatggagtactgggtatcaccaaagcatatgctaccagagttggctcaggcccattcccaacagaaatcgatgatgattatggcaagcatatggcaaaggttggagttgagtttggagcaacaacaggcagacctcgaagatgtggttggctagaccttgttgcattacgtaaagcggtcaatattaattcaatatcacaactctgcatcacgaaaatcgatgttcttgatggactagacaagattcttgttgctgaagaatatgaaattgacgaaaagatatatgacactctccctgctatgagtcaaaatcgattcgaaagaatttcgccaaaatacaaggaatacaaaggttggtcagaaatcacatctggactgcaatcttttgatcaattaccaactgaagctaagactttgataaaagggatagaggactcaatcggtgttcctgtatctttgatatcaacaggacctgatagaaacgacatgattgtcattgatcaaattttttcatga

SEQ ID NO: 316322 - DNA, 1207 bp, Unknown
  Bacterial polypeptide expressing nucleotide sequence isolated from the Sargasso Sea
atgaaaaatgtagctgttgtcggatctcagtggggtgatgaaggaaaaggaaaaattgttgattggctctcaagtgaagcagatgtagttgtaagatttcagggcggacataacgctggacatacgttagtaatagatggaattacctataaattaagattacttccatcaggaattgttagaaaaaataaaatatcaattattggtaacggggttgtggttgatccatgggcattactagatgaaataaaagagataaaatcaaaaggagtagagatatcagaagaaaatttaattttgtcagagtcagccaatttaattttaccttttcacaaagaaatggatgaaataagagaagatgcagcaggaaaagcaaaaattggcaccacaagaagaggtataggaccagcatatgaagacaaagtaggcagacgatcgatcagggtaatggatttaatttctgaaaaaaatttagatcataggcttgaaactgttttaatgcaccataatgcaataagaaaaggtttaggaaaagaattgtttgaaaaaaataagttgaaaaaggaacttcttgaaattgcaccccaaatattgaagttttcaaagcccgtctggaaaaagattgatgaatttaaaaacgaaggaaagaaaattttatttgaaggtgcgcaaggaattttgttagacgtagatcatggcacttatccttttgtaacttcatcaaatacagtcgcatcttcagcagcaacaggctcagggtgtggaccaaatacaattggttatgttcttggtatcacaaaagcctacacgacaagagtaggcgagggtccttttccaactgagttgaaaaatgaaactggagaacatctcggtaaaataggaaaagagtttggaactgttactagcagaaaaagaagatgtggttggtttgacggtgttttggtaagacaaacgattaaagtctcaggtattaatggaatagcattaaccaaattagatgttttagacgaactagaagaaatcaaaatgtgcgtagcctacgaactagatggtaaaaaggttgactatttgcccgctgcggtagatgatcaattaaaagttaagccaatttataaaagctttaaaggttggaaatcttcaacaaaaggaatcaaaaattttgaaaaattgcccgaaaaggcaaaaatttatattaaaggagcttgaa

SEQ ID NO: 316323 - DNA, 691 bp, Unknown
  Bacterial polypeptide expressing nucleotide sequence isolated from the Sargasso Sea
gatgaaaaatgtagttgtagtcggttcacagtggggagatgaaggaaaaggtaaaattgttgattggctctctagcgaggctgacgtaatagtaagatttcaaggtggacataatgctggtcatactcttgttatagatggtgtagtttataaattaagactgttgccatcaggaatagttagaaaaaataaagtatctataattggaaatggagtagtcgttgatccatgggcacttctagatgagattgatgaaattaaatctaaaagtgtagaagttaactctgataatttaattttatctgaggcagccactcttatcttgccatttcataaagaaatggatgagatcagagaagacgcagcaggaaaatccaaaataggtactacaagaagaggaataggaccagcgtacgaagataagattggcagaagatcaataagagtaatggatcttgcatcagaaagtaatttggacaaaagattagacgtagtgttaggtcatcataatgccataagaaaaggtttaggaaaaactgaatttaaaaaagagcaattaaaaaaagatctgttaaatattgcgccacaaatacttaaattttcacagcctgtatggaaaaaaatagatgaatttaaatatcaaaaaaaaaaaatattatttgaaggtgctcaaggcgttcttttagatgtt

SEQ ID NO: 316324 - DNA, 389 bp, Unknown
  Bacterial polypeptide expressing nucleotide sequence isolated from the Sargasso Sea
aacagaattgtttgatgtaaatggagaaatgattgcaaaaaaaggtaatgagtttggagcaacaactggaagaccaagacgatgtggatggctagatttggttgctcttaaaaaagctatttttactaattctgttactgatttatgtataacaaaacttgatgtgctggatgagatgaaagaaatatttatctgtgtagaatatcaaaaaaacaaacctatatataaaaagtttaatggatggctatcatctactgaaggtataacagaatattctaatcttcctaaagaggcaaaagactatatagaattcattgaagattatattgaatgtaaggcatcaattatctcaactggaccatcaagagaccaaacaatatataaataaa

SEQ ID NO: 316325 - DNA, 841 bp, Unknown
  Bacterial polypeptide expressing nucleotide sequence isolated from the Sargasso Sea
tttgaaaaagatttattcaaatctaaactcacctcattaactgcttatcacaactttcttcttgaagagctctatgaatctgatggaactgattttgaagacacacacaaagagtggatgggtcatttttctaaaatcaaggatcttgttgttgatagctcaaaagagttgaacaatttgaagttgaaacagtcaaatatactctttgaaggagctcaaggttcaatgctagatattgatcaaggtacatacccatttgttacatcatcaagcactctatctggggcctcttcgttaggttctggtatcggaccattggatatcgatggagtgttgggtatcaccaaagcatatgttaccagagttggctcaggcccatttccaacagaaattgatgatgattatggtaagcatatggcaaagattggtgttgagtttggagcaacaacaggcagacctcgaagatgcggttggctagacctcgttgcattacgtaaagcagtcaatatcaattcaatatcacaactctgcatcacaaagatcgatgtacttgatggattagataagattcttgttgctgaagaatatgaaattgacgaaaagatatatgacactctccccgctatgagtcaaaatcgattcgagagaatttcaccaatatacaaggaatacaaaggttggtcaggaatcacatctggactgaagtcttttgatcaattaccaacggaagctaagattttgattaaaggaatagaggactccattggtgttcctgtatctttgatatcaacaggacctgatagaaatgacatgattgtcattgatcaaattttttcatgag

SEQ ID NO: 316326 - DNA, 1294 bp, Unknown
  Bacterial polypeptide expressing nucleotide sequence isolated from the Sargasso Sea
atgaaaaatgttgcagtagttggttcgcagtggggagatgaaggaaaagggaaaattgtagattggctatcagagcaagctgatgttgtaattagatttcaaggcggtcataatgctggacataccttagttatagatggagtaacttacaaacttcgattacttccctctggaatagttagaaaaaataaaatttcaattattggaaatggtgtcgttgtagacccttgggcattattagatgagattaaagaaattggagaaaaaggtgtcgatgtaaattcagaaaattttatgatttctgaggctgcaaacctaattttaccatttcaccgagaaatggatgaaataagagaggatgcagccggtaaaagcaaaataggaactactaggagaggtattggacctgcttatgaggataaagtcggaagacgttcaataagagtaatggatcttagatctgaaaaaaatttaaatcaaagattagaaacagttttattacatcataacgcgatcagaaaaggtttaggaaaaaaagtatatgagaaaaatcaacttaaagaagatcttttaaaaattgcacctgatattttaaaattttcagcaccggtatggcttaagattgatcaatttaaaaaacaaaagaaaaagatattatttgagggtgcccaaggaattctgttagatgttgatcacggaacatatccttttgtcacttcgtctaataccgtggcttcaagtgctgcaacgggaactggatgtggaccaaattcaattaattatgtattagggataaccaaggcttacacaactagagtgggcgaaggaccttttcccacagaattagttgatggaataggtgagttattaggaacaagaggcaaagaatttggaactgtaacaagccgaaaaagaagatgtggatggtttgatggtgttttagtaaggcaaacaataaaagtttctggaattgatggtattgctttaacaaaacttgatgttctagatgaactagatgaaataaagatgtgtgtggaatatgatttaaatggaaaaaaaatagactatcttcctgcagcagttgaagatcaacttaaaatcaaacctatttacaaaacatttgacggatggaaaaccccaactaatggtatcaaaaatattgatgacctcccttacaatgctaaaaaatatgtatttgcaatcgaggacttcattggagcgaaaatatcaagtatatcgactagtcccgagagggacgatacaattttagttgaaaatccttttgagatttaat

SEQ ID NO: 316327 - DNA, 1222 bp, Unknown
  Bacterial polypeptide expressing nucleotide sequence isolated from the Sargasso Sea
aatgtctaacaatacccttatccttggtctgcaatggggagacgaaggaaaaggaaaaatcgttgatgcccttagcaaaagcgtttatgcagtatgcagattccagggtggtcataatgctggccacacaataaaagtagatggagttcaaactgttcttcacttaataccatcaggagtccttcataaaaatgttaagtgccttataggaaatggagtagtcctatctcttgaagcaattaaaaaagaaattgagagattggaggaatttggtgttgaaatacgtgaccgattatatataagtgaaaactgtccactaattctccctagtcatataaagattgatcaagttagagataaagatgaatttattggcacaacaggaagaggaattggcccagcttatgaagataaggttggacgaagagcaataaggttcggtgacttaaaagatgagactttattaagaaaaaaagtttcaaggttagtcaagattcataataaattgttggagcatttttatgatgcagaacctttttctaaagaagaaatcttaaataatcttctatcttttaaaaactttgctgaagctttctcatttaatacaacagatttgctaatgaattggtctgaagagggaaaagaggttttgtttgagggtgcgcaggggactttccttgatattgatcatggaacctatccctatgttacttcatcaagcactacaataggcggagtttcatcaggtcttggaataggaccaaagcatattaataatgtaatcggaattgttaaagcatatgcaacaagagtcggagaagggccattcataactgagctttttgataaggatggagaagaaatagctaaacgaggtaatgaatttggagcaactacgggtaggccaagaagatgtggatggctcgatctggttgctctaaaaaaagctatttttataaattctgttgacagtttatgtataaccaaagccgatgtgcttgatacttttaaaaatataaatgtttgcgtagcttatgatgacaataacttacctatctataagaaattcgaaggatggcaagaggataccagtctatgcagctcatatgacgaacttccaaaaaaattaaaagattacataaaattcattgaggaaagtgttaactgcaaagttagcataatctctgttggtccttccagagagcaaagcatacatttataa

SEQ ID NO: 316328 - DNA, 1118 bp, Unknown
  Bacterial polypeptide expressing nucleotide sequence isolated from the Sargasso Sea
tggtattttgcatgctggagttcggtgccttatcggaaatggggttgtttttgagcccttcgcttttattaaagaggttgagcttttagaaacaagagggttttcgatccgggagcgattaactgtttcaccagcagctcaactgattatgccgtatcatgcgctgatcgacagtgcgcgtgaagaggccttaggagggaaaaaaattggaacgacaggacgaggcattggtcctgcgtatgaagacaaggtagctaggagaggtattcgggttggcgatctttataatttgagtagctttaaagaaaaggtagctgtagcactggattttcataatttcgttttaaccaaatactttagtaaagacccggtcgattcagaaaatattttcgattcctatgcttccattgccgaggatcttaagcctatggtagctgatgtggtgcccattctagaaaaactccaggatgcaggtgataacatactgctcgaaggagcccaggggtcgttgcttgatgtagatcttgggacttatccgtacgtgacttcgtccaatacgactgcttcgagtgctggtctaggctctggtctgggtccgaaggacatagattatgtattgggcattgccaaggcttatacaactcgtgtcggcgaggggcctttccccactgagcttatggattccactggagaaaccattgctaaaaaaggcaatgaatttggagctacgaccggtagacctcgcaggtgcgggtggttcgatgcggtcgcaatgaagagagcggttaaattgtcgagtgtgactggagtatgtctcacaaaaatagatgttttagatgatctagaagtagtcaagatttgcgttgattacgagcatgaatacaaaagggaattatttgactttagttcggcttctttggccggcgtaacaccaaagtatattgaaatgccgggttggcaagaaagcacaagcggactgaccgagtatgatcaactgcctgaggcagcgcgtaactacgtgaaagagttagagaagcaaattggtgttccaatatcgatgatttcgaccggtcccgaccgggaagagactatcattttggcaaatccgtttggttagc

SEQ ID NO: 316329 - DNA, 856 bp, Unknown
  Bacterial polypeptide expressing nucleotide sequence isolated from the Sargasso Sea
aatgaaaattgatttaatactaggtctccaatggggtgacgagggaaaaggaaaaattgttgattttttaactaacgactataatataattgctagatttcaaggaggtccaaatgcaggtcatactctagaatttgatggaattaaacatgttttacatactattccctctggaatttttcatgaaaataaaattaatgtcattggtaatggagttgtcattgatccagtaatttttaaagaagaaattgagaaattaaaagaattgaatgttgatctcagtaaaaaactattaatatcaagaaaagctcatttaatactgccaactcaccgtttaatagataaagcttctgagctttctaaaggaaagaaaaaaattggctctacactcaaaggtattggtcctacatatatggacaaaactggtagaaatggacttaggattggagatttagaacttgatggttgggaagagaaactcaatactttaacaaataagcatcttaacctaataaataattttaacgttgatatagattttgatattaataaattagttgaagaatttactaattcaataaattttataaaatcattaagatttattgacagtgaacattatttaaatgaatctataaataatggaaaaaaaatattgggtgaaggagcacaaggatccttacttgatattgattttggtacctatccttatgtaacatcttcgaacacaactgcagctggagcttgcactggccttggaatagctccaaataaaataaataatgtttttggaattttcaaggcttatactaccagggttggtagtggtccatttcctactgagcttagggacgaa

SEQ ID NO: 316330 - DNA, 1195 bp, Unknown
  Bacterial polypeptide expressing nucleotide sequence isolated from the Sargasso Sea
ttggtggcaaaatctttagttgtgataggagctcaatggggagatgaaggaaaagggaaaatcattgacatccttactgagaaagccgatttagttgtcagatttcaaggaggacataatgctggtcatactcttgtcatagatggcgagaagacagtgcttcacctgattccgtccggcatctttaatgatgccaagtgcttgattggaaatggagttgtactccatctgcccacaataataaaggaaattgaatatctcgaatcaaaaggcattgatgttcaaagtaaactcatgatcagttctcagtgtccattgatactgcccagccatatagccattgatgaagccagagagaagtcattaggaaaaaatgcaatcggtaccaccggaagaggcattggacccgtatatgaagacaaggttgccagaagggcagttcacgtaatggacctgtttgaagaggatttatttagatcaaaattaacttcattgacgacttatcataactttcttcttgaaaaactttatgaatccgaaggaacagatcttgaaggaacatacaaagactggatgaatcatttcaataagatcaaaaatcttattgttgatagctcagagatagtaaataacttaaagtcacaaggctccaacattctttttgagggcgctcagggctcaatgcttgatattgatcaaggcacttacccattcgttacttcatcaaatacactatctggtgcagcatcgctcggctcaggttcaggaccgctggatatagacggggtacttggaatcacaaaagcttatgctacaagagtaggctctggaccatttccaacagaaattgaggacgattacggaaaacacatggcaaaagttggtgttgaatttggtgcaacaacaggcagacctagaagatgcggctggctggaccttgtagcattacgtaaagcggtcaatatcaactcaatatcgcatttatgcataaccaaaatcgatgtgcttgatggtcttgataaaattctcgttgccgaagagtataagattgacgacaagagctatgacacattgcctgcgatgagtcagaaacgctttgatagtatcgtcccaaactatacagagtataaaggttggtcaggcactacatatggactgaagtcatttgatcaattgccagtcgaagcacaaacct

SEQ ID NO: 316331 - DNA, 565 bp, Unknown
  Bacterial polypeptide expressing nucleotide sequence isolated from the Sargasso Sea
gaatactgttgcttcttctgctgcaaccggatcaggttgtggcccagatactattaattatgtattaggtataacaaaggcttacactaccagagtaggagaaggaccttttcccacagaactaactgataataccggcgaacatcttggaaaaagaggtaaagaatttggaactgttactagcagaaaaagaagatgtggatggtttgacggagttctagtaagacaaactataaaaatttcaggtattaatggaatagcgcttacaaaactagatgttttggatgaattagatgaaattaaaatgtgcatagcttatgaaattgaaggtaaaaaaattgattatttacccgcagcagttggggatcaactaaaagttaaacccatttataaaaaatttaaaggttggaaatctaatacaaaaggaattaaggatttcaataaactgccagaaaatgcaaaactttacatcaaagaattggaaaaatttgtaggagctaaaatatcaagtatatccactagtcccgaaagaaaagacacaatacttatagagagccccttttaa

SEQ ID NO: 316332 - DNA, 686 bp, Unknown
  Bacterial polypeptide expressing nucleotide sequence isolated from the Sargasso Sea
tgtgtggaaaaaaattgaccaattcaaatcagaaaaaaagaaaattttatttgaaggagcccagggaatcctgcttgatgtagaccatggaacatatccttttgttacgtcttctaatacagttgcctcatccgctgcaacaggatctggttgtggaccaaattctatagattatgttttaggaattaccaaagcatacactacaagggttggagcaggaccttttcccacggaattaaatgatgacataggagaacagcttgcaaatagaggaaaagaatttggcacagttactagccgtaaaagaagatgcgggtggtttgatggtgttttagtaaaacaaactattaaaatttctggtattgatggaattgctctaactaaattggatgttctagatgaattagatgaagtaaaaatgtgtatagcatatgagataaatggaaaacaaattagacacttgcctgcagctgttaatgaacaatttaatattaaacctatatataaaatattcaaaggttggaaaacttcaacaaaaggtgttaaaaaatttgatgaactaccaactaatgcaaaaagttatattaaggagttagaaaagtatttggaaactaaaatatcaagtatttcaacaagtcctgagagaaatgatactatactaatcgaagatccttttaagatttaat

SEQ ID NO: 316333 - DNA, 982 bp, Unknown
  Bacterial polypeptide expressing nucleotide sequence isolated from the Sargasso Sea
tatgaaaaatgttgttgttgtagggtctcaatggggagatgaaggtaaaggtaaaatagttgattggttatcaagtgaagccgatgttgtcataagatttcaaggtggtcataatgctggacacacattagtaattgatggaattacatataaactgagacttcttccttcgggaattgttagaaaagataagatttctgtaattggtaatggagttgttattgatccatgggctcttttggaggaaattgaggaaattaaatccaaaggcgtaattattaacaaaaaaaatttaattatctctgagtctgcaactttaatacttccgttccataaagaaatggatgaaataagagaagatgcagctggaaattctaaaataggaacaaccagaagaggcattggtccagcttacgaagataaagttggtagaagatcaattagagtaatggatttaatttctgaaacaaatttaaacagtagattagataacgttttgtctcatcataatgcaataaggaaaggtttaaataaaccactttttaataaggaaaaattattagaagatttgttaaatttagcacctcacatacttcagttttcacagcctgtatggaaaaaaattgatcaattcaagttatctggaaaaaaaattttatttgaaggtgctcaaggaatacttttggatgttgatcacggcacctatccttatgttacttcatcaaatactgttgcatcttcagcagcgacaggttctggatgtggacctaactcaataaattatgttttagggataaccaaggcatatactacaagagttggtgaaggaccattcccaaccgaacttactgatgagataggtgagcttttaggtacgagaggtatggaatttggtactgtcacaagtagaaaaagaagatgtggatggtttgacggtgtattagtgaggcaaacaataaaaatttcaggaattgatggaatt

SEQ ID NO: 316334 - DNA, 715 bp, Unknown
  Bacterial polypeptide expressing nucleotide sequence isolated from the Sargasso Sea
atgaaaaagtcccttatccttgtaggaactcaatggggtgatgaaggtaaagggaagatcgtagattacttttctcaaaaatttgatgctgtttgtcgttttcaaggaggccataatgcaggccataccatttacaacgaagaagaaaaatttgtattacatttaattccatccggtgtattttatgaccatgtttcttgtttcattggtcagggagtaatactctctcttgattcattattagaggaaatagagcaactagaatcaaaaggtgtaaaactagaaggaaaattacgcattagtcgttattgcagtttacttttaccaattcatgcaaaaattgatcagttaagagaagataaaaagaatgcaataggcacaactagaagaggtatcggtccagcttatgaagataagactgctagaagaagtatcaaagcatttgatctagaggacaatgaattactagagcagaaattaaaaaatttagttgattattataattttcaaatagagacaattcatgcatctgatactttcgattatgaggaagtcttaaaaaatcttaaagaatcgtatcaaaaagcatcaaaatattttggcgatgttacagattcattagaagaaatttatgatggtggaggcaatatactctatgaaggagctcaaggaactctacttgatgttgattatggaacttatccgtatgttactt

SEQ ID NO: 316335 - DNA, 1273 bp, Unknown
  Bacterial polypeptide expressing nucleotide sequence isolated from the Sargasso Sea
atgaaaatagacttaattttaggccttcaatggggagatgaaggaaaaggaaaaattgttgatgttttaactgaggattataatattatagccaggtttcaaggaggacctaacgcaggacacacgctcgaatttgacggtattaaacatgttctacataccattccctcaggaatttttcatgataataaattgaatataattggaaatggtgttgtaatcgaccctgttatcctaaaaactgaaattgataagttacatgaacttgatgttgatttgagtaataaactcatgatttcgagaaaagctcacttgatattaccaactcacaggttaatagataaagcatctgaactttcaaaaggtaagaagaagattggatcaactttaaaaggaattggtccaacttacatggataaaacaggaagaaatggtctcagagttggagatttagagctagatggatgggaggaaaaattaaataacttgataaaaaaacatcttaatcttgttaataattttaatgtagattttgattttaacatacaagagctgaccgttgaatttacagaatcaataaaatttcttaaaaaaattaaatttattgatagtgaacattttttgaataaatcaattgatgaaggaaaaaaggtattaggagagggtgcacaaggatctttgcttgacatagattttggaacatacccatatgtaacctcgtcaaatacaacctctgctggagcgtgtacaggacttggaattgcacctaacaagataaataaagtttatggcatttttaaggcatacacaacaagagttggaagtggcccttttccgacagaattatttgattctacaggtgaaagaatggcaaaaattggcaatgagtttggagctactactggcagaccaagaagatgtggatggcttgaccttgtatcattgaaacactccataacagtcaatggtgtaacagatctaattatgatgaaaggtgatgtactttctggtattgataaaataaaagtttgtactaaatataattacaatggagaggttgttgattacatgcctttttctattatggatgaaaatattgagcctatctatgatgaaattgatggatgggaagaggatatcactcaagcaaaatcatacaatgatttaccattaaattttaaaaattatgttgcatttcttgaggataaactaaatttaaaaattaaaattgtttcagttggacccgatagaaaacaaacaatattcgtataag

SEQ ID NO: 316336 - DNA, 1294 bp, Unknown
  Bacterial polypeptide expressing nucleotide sequence isolated from the Sargasso Sea
atgaaaaatgtagctgtagttggatctcaatggggagacgaaggcaaaggaaagattgttgattggctttccagcgaggctgacattgtagtaagatttcagggaggacataatgcaggacatacattagtaattgatggagtaacttataaactgagattattaccctcaggaattgtaagaaaagataaagtttcaattattggaaatggagttgttgttgacccctgggctttcttagatgaaattaaagaaatcaaatctaaaggcgtagaaataactcaaaaaaatttaattctttcagaagctgcaaatttaattttaccatttcatagggaaatggatgaaataagagaagatgcagcaggtaaagcaaaaataggcacaacaagaagaggaatcggtccagcatatgaagataaaattggaagaagatcaataagagttatggatctagtttctgagaaaaacttagaacatagattagaaacagtattgatacatcacaacgcaataagaaaaggtttaggaaaagagatttataaaaaagacaaactaaaaaaagatttattaagtatagctccagaaatattaaagtattctcagccagtatggaaaagaatagatgaatttaaatcacaaggaaaaaaaatattatttgagggtgctcaaggtattttgcttgatgttgatcatggcacatacccatttgtaacatcatctaatacagtagctgcagctgcagccacaggttctggttgtggccccaattcaataaattatgttttgggtattacaaaagcttacactactagagttggagaaggtccattcccaacagaactaaaagatgaaataggagaaaaattaggaagcataggaaaagaatttggaacagttacaagtagaaaaagaagatgtggatggttcgacggggttttagttagacaaacaattaaaattgcgggtatagatggaatagcattaactaagctagatgttttagatcaactagacgaaattaagatgtgtattgcatatgaagttgatggaaaaaaaatggattatttacctgcagctgcagatgatcagataaaagcaaaaccaatctataaaagttttaagggctggaattgttcaactaaaggtataaaaaagtttgatgatcttccagataatgcaaaaaattatattaaagagttagaaaaatttgttgaaacaaaaattgcaagtatttctacaagtccagaaagaaatgatacaatactaatagttgatccttttagtgtctaat

SEQ ID NO: 316337 - DNA, 1300 bp, Unknown
  Bacterial polypeptide expressing nucleotide sequence isolated from the Sargasso Sea
catgccgaacgtggtggtcgtgggcgcccaatggggcgacgaagggaaggggcgcgtcgtggactggctggcggcacaggccgatctcgtcgcacgctacaacggcggccacaacgcgggtcatacgctggtcgtgggcggcaagacgtacaagctcgcgctgctgccgagcggtgtcgtgcgcggcaagcgcggcgtgatcggcaacggcgtggcgctcgatccggaagcgctgctcgcggaaatcgggcgaatggccgaactcgggctgtcggtgacgccggataacctgtcgatcgccgagaacgcaacgctggtgctgccgatccaccgcgcgatcgaccaggctcaggagcgtctgcgccgcgagccgatcggcaccacgctgcgcgggatcgggccggcctacgaggacaaggtcggacgtcgcgggctgcgcgtcggcgatctcgcggaacccggccagctcgcggccaaactggatgtgctcgtcgaccatcacaacgcgtggttccgcggcctggggctcgacgagtattcccgcgacgcgatgctggcgacgctggtcgaccttgcgccgcggatcctgccgttcgtgcgccccgtctgggccgacctcaacgacgcgaccgaccgcggcgagcgcatcctgttcgaagggtctcaagccgtgatgctggacatcgactggggcacgtatccgttcgtgacgtcgtccggcaccgttgcctcggcggcagcggctggtacagggctcggtgcgtcgaagctcggccacgtgctgggcgtcacgaaagcgtatgcgacgcgggtcggcggcggcccgttccttaccgagctgtccgacgcgaccggcgaaacgctgcgtgcgcgcgggcaggagttcggcgtgaatactggccgaccgcgccgctgcggatggctcgatgccgcgcaattgcgtcaggccgtcaggatctccggcatcgattcgctggcgcttacgaagctggacgtgctcgacggtttcgagtcgatcgcgctgtgcgtcggatacgaactcgatggcgtgcgggtggatcatctgccggcgagcctcgatgcgcagtcgcgcgccaagccggtgtacgagcggttcgacggctggcacggcaccgtgaagggggtacgtgaacgtgcggcgctgccgcgcgccgcgcaggagttcattgcgcgcgtcgaagcggtcgccggcgcaccggtatcgatgattaccaccggcgcggagcgcgacgacacgatcgtgttgcgtaatccgttcgatgcggccgccgaggcttga

SEQ ID NO: 316338 - DNA, 315 bp, Unknown
  Bacterial polypeptide expressing nucleotide sequence isolated from the Sargasso Sea
tttcatcaacatcacatgtaacaatgccttaccatcgattattagatgaagcgatggaggctgatagaggttcaaacaaaatagggacaacaggtcgtggaattggtccaacttatgcggataaatcacaaagaaatggcattaggataagagatttgctcaataaggaaaggctaaatgatgtgatcgaaattccactaagagaaaaaaacggtctactagaaaaaatctatggcattaaaccacttaaattagaagatattgttgaagaatatcttgactatgggagaaagattatcaaagcatgttgttgac

SEQ ID NO: 316339 - DNA, 544 bp, Unknown
  Bacterial polypeptide expressing nucleotide sequence isolated from the Sargasso Sea
aggtactggttgtggaccaaattcaatagattatgttctaggtattactaaagcttatacaacacgtgttggtgaaggtccctttcctactgaattgaaaaatgctgtaggtgaacatttgggcaatattggaaaagagtttggaactgttactagcagaaagagaagatgtgggtggtttgatggagttttggtaagacagacaattaaaatatctggtattaacggtatagctttaacaaaattggatgttttagatgaattagaagaaattaaaatttgtgttgcatatgaattggatggaaatcaggttgattacttgcctgcagcagtagatgatcaattaaaagtaaaaccaatatataaaaaatttaaaggctggaattgctctacaaaaggaattaaaaatttcgataaattacccgaaaatgcaaaaatttatatcaaagaattagagaaatttattgaaacaaaagtttcaagtatttcaacaagcccggaaagaaacgataccattctaattgaagatccctttaaagtttaa

SEQ ID NO: 316340 - DNA, 1273 bp, Unknown
  Bacterial polypeptide expressing nucleotide sequence isolated from the Sargasso Sea
gttgacaactaccattgttttaggcgctcagtggggcgatgagggcaagggtaaagtcacagacttttttgcatcaaaagctgacctagttgtacgttttcaaggtggtaacaatgctggtcatacaatcgtggttgatgatgaaaaatttgcattatctatggttccatcaggggttatgtacgatacttgtaccccagttatagcttcaggttgtgtagttgattttgaagttctcaaaaaagaaattgatagtttaaatcagaaaaatattgatacttcaaatttaaaactttcttacaacgcacatattattatgccttatcacaaagtcctcgatgaattgatagaagaaagcttaggcgatcgaaaaataggcaccactaaaaaaggcataggcccatgttatggagataaaattcaaagaaaaggtataagaatacaagactttttatcaccggaaaaatttaaatccaaattacaagaaaacttaaacgaaaaaaataaaattattgaagaaatttataaaggaaaatctttaaattttgatgaaatattatctgagtatgaaacttttcgcgaattaattgaatccttatcgacagatacttcattatttatttcaaattctataaaagaaaataaaaatattctttttgaaggagctcagggtacattactagacattgatcatggaacttatccatttgtaacgagttcaaataccagcgcgggcaatgcctcaattggttctggaataggaccattaaattttgaaaaggttgttggtgttacaaaagcttacatatctagggtaggcactggtcctttcatgactgaacagagtaataaaataggagattatttaattgagaaaggtgctgaatttggaacagtgactggtagacgaagacgatgtggctggttagatcttgtttcacttaaatattcagcaagaataaattctttgagtgaattgtttattacaaagttagatgttttaactggtttagatgaggtcaatatttgtgtaggttacaaatttaaagatcaggaattaactgattaccctttagttgaggatattctagaaaaatcaacacctatatataaatcgtttgaggggtggaatgatgatatatcttcaattacagaatttaataaacttccagaaagtgcacaaacttatataaatttcattgaagaatttacagaaataccaattaaatatatatctgttggaccagaaagaaagcaaaatataattagataa

SEQ ID NO: 316341 - DNA, 1017 bp, Unknown
  Bacterial polypeptide expressing nucleotide sequence isolated from the Sargasso Sea
ttaattggtatggtgtcgtgctagcgctagatgcattagatgaagaaatcaaaaaacttaaagataaaaatattaactttaaagatagattctttataagctcaggatgttctttaattcttccaagtcacataacaattgataaagttagggataaaaaagaatctataggtaccacaggaaggggaattgggccagcatatgaagataaaattggaagaagggcagttagatttggagatataggtaatgaatctatattaagagagaagattcatttattagtaaactatcacaatagattattaaaagagttacacaaccatgaaatacataatgaagatgaaatttttaatgaagttattaaatataaaagcttatatgatgaattttgcgttgattctcaggacctaatgcatgagtggattaaaaataaaaaatcaattttatttgaaggagctcaaggaactcttttagatattgatcatggaacttatccttatgtaacatcttcaaatacaactgcaggcggcgtatcaactggactcggtataggcccaaaatttatagataagattattggtatatctaaagcctatgcaactagggtcggtgaaggaccttttccaacagaactatttgataaaaatggtgaaataatagctgaaaagggaaatgagtttggagcaacaactggaagaccaagaagatgcggctggttagatttagtagctcttaaaaaagctatttttaccaattctgtaaccgatctttgtataactaaacttgatgtattagatgaaatgcaggaaatattagtttgcactgaatatgacaatgacaaacctatttatacttcattcaaaggatggcttacttctacagaaggcatcaaagaatattcagattttcctaaagaagcaaaaaaatatatagaatttatagaagactatattgaatgcaaagcttcaatcatttcaatcggaccttcaagagatcaaacaatatataaataaa

SEQ ID NO: 316342 - DNA, 1165 bp, Unknown
  Bacterial polypeptide expressing nucleotide sequence isolated from the Sargasso Sea
aatcgacggtgaaaaaaccgtacttcacttaatcccatcaggcatcctacgcgataatgttacctgtattattggtaacggtgttgtgctaagccctgacgcactaatgaaagaaatgactatgcttgaagagcgtggcgttccagtgcgcgagcgattaaagattagtgaagcttgtccgcttattcttccttatcacattgcactagacgtagcgcgcgaaaaagcccgcggcgcaaaagcaattggtacaacgggtcgtggtatcggtccagcgtatgaagataaagtagcccgtcgtggattacgcgttggcgacttgtttaatgcagaagacttcgcagcaaagctgaaagaagtgctagacgtgcataacttcacgcttactcagtactatggcgaagaagcagtagactttgacgaaaccttaaaaggtgcaatggaagttgctgacattcttaaagcaatggttgttgatgtaactgacgaactagacaaagcacacaatgctggcttgcctattatgtttgaaggtgcacaaggtacacttctagacatcgatcacggtacttacccttatgttacgtcctcaaacactaccgttggtggtgtagcaacgggtgctggctttggcccacttaagctagattacgtactgggtattgttaaagcatacactacgcgtgtaggctcaggtcctttccctactgaactagaatgtgaagtaggccaacacttaggtgttaaaggtcacgagtttggcgcgaccacaggtcgtaagcgccgcacgggttggttcgatgcagttgcgatgaaacgcgcagtacaaatcaactctattacaggtttctgcttaactaagcttgacgtactagacggtcttgaaagccttcaaatttgtgtaggctacaaagatgcagacggtaacgtgaaagacgttccacctatggcggctgacggttacgaaaaagtgacgccagtttatgaagaaatgccgggttggacagacaacacttttggtgtaactgagtttgaagcgcttccacaagctgcgaaaaactacattaagcgtcttgaagagctaacaggtgtgccggttgatatcgtttcaacaggccctgacagaaacgaaactatcgttttacgcagcccatacgacgcgtaa

SEQ ID NO: 316343 - DNA, 1279 bp, Unknown
  Bacterial polypeptide expressing nucleotide sequence isolated from the Sargasso Sea
tatgaaacgaaatatttctttgttgggtcttcagtggggcgatgaaggcaagggtaaagtcgttgataatttagcaaatgatttggatgcggctgttagatatcaaggcggtcataatgccggacatactttgatagttaatggaaaaaagatagtttttcacttactgccctctgctatatgtcacgagaacataaagtgctatatcggaagaggtgttgttgtgagtctggaggcactattctcagaaattagtgaagctagtgaagttttagggaatattgaagaaaggttggttataagctcagcatgtagtcttattcagccctaccacatacagctagatcaactgcgagaaaaatctaataaccttactaaaattggtactacaggaagaggaataggcacttcctatgaggacaaagtcggaagaaggtcaataagggtctcagatctttatgatgaagaaaagctgaaagacaaactgacccaatccttagatttttataattcagtttttgaacattcttttaatgctccgaagatagatttaaatgaacttttcgaattaaatcttgaacaagcagaaaaattaaaaccatatgttggtaatgtaataaaagaaataagagatctacaagatgacggcaaaaaaatactttatgaaggagcacaaggtgctctactagatgtaagtctcggtacttacccatatgtaacatcaagtaacttgataggaggtgtttctgcaggaactggaataagtccctctgacatagattacacgattggaattacaaaagcctacacaactagagttggagaaggtccctttccaactgaactatttgatgaaatggggacctatctagctgaaactggaggagaagtcggagcaaccactggaaggcctagaaggtgtggctggttagatggttttttattaaagaacatggtgaaggcaagtggagttgatggtctttgcttaactaagattgatgttttagatggtcttgagaagattaaaatttgtacaaactacgagagtgatcagtctgaagcagagcttattgagactatggatttagaagatgccaaaccagtttacttagagttagatggttgggatgaacctactgcaggacaatcttctttcgaagaattaaatgataaggccaaatccttcatagagaaaattgaagaaatttcaggtgttcctgttattatgatctccactggcccaaagagagaagatactattattaggcaaaagatttaa

SEQ ID NO: 316344 - DNA, 1219 bp, Unknown
  Bacterial polypeptide expressing nucleotide sequence isolated from the Sargasso Sea
attgtctgaaaatactttaatcctaggtcttcagtggggagatgaaggtaaaggtaaaatagtagataacttaagccaaagcgttgatgtggtttgtcgttttcaaggaggtcataatgctggccatacaatcaaagttaatgatgagcaaacagtacttcatttaataccttcaggcattttgcatgataatgccaaatgcttaattgggaatggagtagtgcttgctttggatgcattggatgaagaaatcagaaaacttaaagataaggacataaattttcaagatagattttatatcagttcagcttgttccttaatcctcccaagtcatatatcaattgataaagttcgagataaaaaagaatcaattggaaccacgggtagaggaattggacccgcctatgaagataagattggcagaagggcagttagatttggagatatcggtaataaatacctattaaaagaaaaaattgaattattagttgagtatcacaataggttattaaaagaattacataatcatgaaccccatgatgtaaatgaaatctttgaatcagttataaaatataaggatttatatgatcagttttgtgttgattctcaagacctgatgtatgaatgggtaaaaaataaaaaatcaattttatttgaaggtgctcaaggaacactattagatatcgatcatggaacttacccttatgtaacatcttcaagcacaactgcaggcggtgtatcttcagggcttgggataggaccaaaatttatagataaaattattggtatatctaaggcttatgcaacacgggttggtgaaggaccatttctaacagagttatttgatgaaaatggtgaaatgatagctaaaaaaggtaatgaatttggggcaacaactggaaggccaagaagatgtggctggttagatctagttgctcttaaaaaagctatttttactaactctgtaacagatttatgtataacaaaacttgatgtattagatgaaatgaaagaaatattagtttgtactgattatgaaaaaaatcaaccgatttacaagaaatttaaaggatggctatcatccactgaaggaatcacagaatattctgatcttcccaaagaagcaaaagagtatattgaattcatagaagattatattgaatgcaatacatcaattatttcgactgggccatcaagagatcaaacaataaacaaataa

SEQ ID NO: 316345 - DNA, 949 bp, Unknown
  Bacterial polypeptide expressing nucleotide sequence isolated from the Sargasso Sea
ttgtccactaccgtagttctcggcgcccagtggggagatgaaggtaagggtaaagtcacagatttttttgcttcaacagctgattttgttgtcagatttcaaggcggaaacaatgccggtcatacaattgtagttggagaagataaaattgctctgtctttaacaccttctggagtactatatcctgactgtgttccggtaataggttcaggttgtgtaatagacttgggctttttaaaacaagaactcaaaatgttagaagataaaaacatagatactgagaagttagctatttcacctaatgcgcatttgataatgccctatcacaaattacttgatgaattgattgaagaaagtttaggagaaaacaaaataggaacgacaaaaaaaggaattggcccttgttatacagacaaaatacagaggcggggcataagggtacaggacttgttagaccaggaagtatttgaaaaaaaagtaaaatcaaatattgaagaaactaatctcactcttacaaaaatctatgagcaacctcctttggtagctgaagaattaattgaagaatttaatagttataaagatattgtcgttaatcatataaaagacacgtcacttttaattgaaaatgctattaaagagaacaaaacaattttatttgaaggagcccagggtacattgctcgacatagatcatggaacttatccatttgtaactagctcaaatacatctgcaggaaatgctgctattggatccggagttggtccgaaaaatatagatcgtattgttggagttacaaaagcatatatatctcgagttggaagtgggccattcataacagaacaaaaaaatgaaattggtgacttcctaattgaaaagggggcagagtttggtgttgttacaggtcgtagaagaagatgtggttggcttgatttaatttctttgaaatatt

SEQ ID NO: 316346 - DNA, 793 bp, Unknown
  Bacterial polypeptide expressing nucleotide sequence isolated from the Sargasso Sea
ttgtcaactaccattgttttaggcgctcagtggggcgatgaaggcaagggtaaagtcacagacttttttgcatcaaaagctgatcttgtggtccgattccaaggtggcaataatgcaggtcacacaattgttgtaggtgatgaaaaatttgccctttcaatggttccatcaggagtgatgtatgaatcatgtactccagtcattggttcgggatgtgtaattgattttgaagttttgaaaaatgaaattgaagctttaaatggtaaaaacatagacacgactaaattaaaactttcatataacgcacacattatcatgccatatcacaaaattcttgatgaattaattgaagatagtttgggtgataagaaaattggaactactagaaaaggtatagggccttgttatggcgacaagatacaaagaaaaggtatacgcatacaagattttttatctgaagaaaagttttatgaaaaattaaaaaataatcttgaagaaaaaaatcaaataattgaaaaaatttatggtgggaattctataaattttgacgaaatagtcgaggagtataaaaaatacaaagaacttgtttcatcaattgcagacgacacatcattggttatatctaattcaataaaagaaaataaaaatatcttatttgaaggagcccaaggtactcttcttgatattgatcatggaacatatccatttgtcacaagttccaatacaagtgcaggtaatgcagctactggatctggaattgggcctttaaatttgatgaagttgttggtgtaac

SEQ ID NO: 316347 - DNA, 904 bp, Unknown
  Bacterial polypeptide expressing nucleotide sequence isolated from the Sargasso Sea
cctgggagaaatatttatcagtgaaaaagcacacatgattatgccatatcacatcaagcttgatcaagcggaagaagcgtatagaggaagtgaggctgttggaacgactggaagaggaattggtccagcttattcagataagatttcaagaaatggaatccggataggggatcttaaaaatatagaaactttacaatctaaaatctctaaaaatctgaatattaaaaacaaaattttgaaagaaatttacaatacagatgaaatttcagaaaaatatatatttgaaaaaattaaagagtggaataacaagttatctaaatatattgctaacaccgaacaaattctttatgaaaatattgagaaaaataaatttatacttttagaaggagcgcaaggcgcgcttcttgatatcgatcatggaacttatccttatgttacatcttctaactctatatcaggaggatcattaacgggcttgggattgggagctaaagatatagataatgttatgggagtatttaaagcctttacaacaagagttggagaaggtccatttccaactgaaatctttggtaaagatgcagaaacaataagagaaatagcaggtgaatttggaacaacgacaggaagaccaagaagaattggttggttcgatgctgtagcagctaaatattcggtaaaaattaatggattagatggaatggtaataactaaattggatattcttgataaatttgaaaaaataaaaatttgtacacattatgaatataaaggagaagtactttcatatttcccatctgatgaaaatattcttagcaatataaaaccaatctacaaagaatttgaaggttgggatgaatcaacttttgatgttagttcatacgaagcattaaattctaaagca

SEQ ID NO: 316348 - DNA, 319 bp, Unknown
  Bacterial polypeptide expressing nucleotide sequence isolated from the Sargasso Sea
catgggtaagaacgtcgtcgtcctgggcacccagtggggtgatgagggcaagggcaagatcgtcgacctgctcaccgagcaggctgctgcagtcgtgcgttatcaggggggccacaatgccggccataccctggtgatcgacggtgagaagaccgtcctgcacctgattccgtccggcatcctgcgcgaaggcgtcgagtgcctgatcggcaacggcgtggtggttgcgcctgacgcgctgctgcgcgagatcacccagctggaagagaagggcgtgccggtgcgcgagcgcctgcgcatcagcccggccctgcccgtt

SEQ ID NO: 316349 - DNA, 1000 bp, Unknown
  Bacterial polypeptide expressing nucleotide sequence isolated from the Sargasso Sea
atggcaaacgttgtagttgtcggcgctcagtggggagatgaaggtaaggggaaaattgttgactggctcagtgaaagggccgacatcgttgttcgctttcaaggtggtcacaatgctgggcatactcttgttattgacgggaagacttacaaattacatgcccttccgtccggagtggtgaggggaggtaaactatcagtcattggaaatggtgtggttttagacccttggcatttgatcgaagaaattaaaatagttaggtcgcagggcgtggatatatctccagaaaatttaatcatagccgaaaacacaacacttatcttacctattcatggagaattagatcgtgcccgtgagggcttaaacaaagttgccaaaattgggactactggaagaggcattgggccagcttatgaagataaggtgggtcgaagagctatacgtatagctgatttggcggatcgaactactttggaggctcgcattgacagattactgctacaccataatactttacgaagaggaatggagcttgaagcaattgataaatcgaagttattttccgatctgactgaaattgcgccgatgattttaaaatactctgcccctgtttggaaaattttgaatgaaaagaggaaagcgggaagccgtattctttttgagggtgcacaaggagcgttactagatattgattttggaacttatccatttgttacgtcatcgaatgtgattgccggccaggcggcgactggttcgggcctcgggcccaacggtattgattttgttttaggaattgtcaaagcctacacaactagagttggagaaggccctttccccacagaactaaacgataatgatggcactcgtttaggggaaagaggaaatgaatttggcaccacaacgggccgaaagcgccggtgtggttggtttgattctgtattggttcggcaaacttgtgcaacttctcggtgtgactggtatttctcttacaaaacttgat

SEQ ID NO: 316350 - DNA, 1222 bp, Unknown
  Bacterial polypeptide expressing nucleotide sequence isolated from the Sargasso Sea
ctggtgtctgaaaatactttaatcttaggccttcaatggggagatgaaggcaaagggaaaatagtagataatctaagtgaatcaattgacatagtttgtaggtttcaaggtggacataacgccggacataccatcaaagttaatggacaaaaaactgttcttcaccttattccatcaggtattttacataacaatacaaaatgtttgatcggtaatggagttgttctggctctagatgctttatataaagagataaaacatttacaagaaaaaggaatttcttttaaagatagattttttataagttcagcatgcgccttgatactgccaactcacatcacattagatatagttaaagataaaaaagaatcaataggaactactggcagaggtattggaccagcatatgaagacaagattgggagaagagcaattagattcggtgatttaggtaatttgaagtcacttaaagaaaaaattaattcacttgttaaatatcataatcgattacttgaaaatatatatcaacataaacctcatgatgttgaagaggtttttaatgaagttgtaaagtataaaaaattacacgataaatactctatagatactcacaagactatacatcaatggataaaaaatgataaatctatattattcgaaggcgctcaaggcacattactggatattgatcatggaacctatccttatgtcacatcttctagtacaacagctggcggagtttcaactggtctgggcataggaccaaaatttattgataagattattggaataacaaaagcttacacaactcgagtaggtgagggtccttttccaactgaattgcacgatgaatcaggctcaatgcttgcagaaaaaggcaatgaatttggtgcaacaacaggtcgtcctagaagatgcggatggctagatttagtgctattaaaaaaagcaatatttataaactctgtaactgatttatgtataacaaaacttgatgttttagatgaaatgcaagagattaaagtttgtatagattatgaaaatggagttccagtttataaaaattttgaaggttggctgacaaagactgagggtgttagtgtcttttcagatttacctgaaaaagccagactttacatccagtttattgaagattttgttgaatgtaatgcatcgattatttcaactggcccatccaggaatcaaaccattctaaggtaag

SEQ ID NO: 316351 - DNA, 625 bp, Unknown
  Bacterial polypeptide expressing nucleotide sequence isolated from the Sargasso Sea
tttagaggagctcagggaacagcactcgatctcgaccacgggacgtatccgttcgtgacatcttcgaacacgacggcaggcagtgccgcaaccggatctggtatcggcccgacgcagattactgatgttatagggattgttaaggcctatacgacccgggtaggtgaggggccattacccagctccatggccccacaaatggacgagcatgtgagaatgttgggaggagagttcggggcgaccaccggtcggccccgccgctgtggctggtttgattccgtacttacacgttttgcatctcaggtgaacggattgacggggattgctgtcacaaagctcgacgtgctcgacacactcgacgaggtcaagatcgccacggcttacaagaccgcggatggacgcacccgcgagttctttccagcggatacgtggtcgctggctgaggtggagccagtatatgagactatgccgggctggcattcgtccacatgtgatgtgcgacggattgaggatcttcccaggaacgcgagagcatacctggatcgcatagaggagctaacgaacgcacccgtctgtttcgtgtctgtcggtactaaacggagtcagatcatcacggtggattagg

SEQ ID NO: 316352 - DNA, 1294 bp, Unknown
  Bacterial polypeptide expressing nucleotide sequence isolated from the Sargasso Sea
atgaaaaatatagttgtagttggatctcaatggggggacgaaggaaaaggaaaaatagtagattggctttcagagcaagcagatgttgttgtaagatttcaaggaggacataatgctggccacacattagttattaagggagtcacctataaattaagattattaccatcgggaattgttagaaaaaataaaatttcaattattggaaatggtgttgtagttgatccttgggcattattagatgaaattcaagaaataagatcaaaaggtgttgatgtaaatgttgataattttattatctctgaggctgcgaatttaatattaccatttcatatagaaatggacgaaatcagggaagatattgctggcaaaggtaaaattggaacaacaagaagaggaatcggtcccgcatatgaggataaagtaggcagaaggtcaataagagtaatggatttaagatctgaaaataatttggatcaaagactagagtccgttcttgatcatcataatgcaattagaaaaggtttaggaaaaaatctggtcaaaaaagatcaattaaaatctgaattattaaaaattgcaccaaaaatattacaattttcgcagcctgtctggcttaaaattgatgagtttaaaaaacaaaaaaagaaaattttatttgaaggtgctcaaggaattttattagatgtagatcatggcacatatccatacgttacatcatctaatactgtagcttcaagcgccgcaactggttcaggatgtggaccaaattcaattaactatgttcttggaattacaaaagcttatactactagagttggagaaggtccctttccaacagaattaactgataatgtaggagaattattaggtactcgtggaaaagaatttggaacagtaactagtagaaaaagaagatgtggttggtttgatggagttttggttaggcaaacaattaaaatttcaggtatagacggcattgccttaacgaaattagatgttcttgacgaactagatgaaattaaaatgtgcgttgaatacgagcttgatggaaaaagattagattatctacctgcggctgtagaagatcaattaaaaataaaacctatttacaaaactttcccaggatggaaaacttctacgaatggaattaaaaacatggatttacttcctgaaaatgcaaaaaaatatatatttgcagttgaaaaatttataggcgcaaaagtatctagtgtatctaccagcccagaaagagacgatacaattttagtagaaaatccttttaatatttaat

SEQ ID NO: 316353 - DNA, 1119 bp, Unknown
  Bacterial polypeptide expressing nucleotide sequence isolated from the Sargasso Sea
ttagtaattgatggtataacttataaacttaggttacttccttcaggaatcgtaaggaagaataaaatttcagtaattggaaatggagtagtagttgatccttgggctttactggatgaaataaaagaaattcagtcaaaaggtattgttgttaatccaagtaattttataatttctgaggctgcaaatttaatacttccatttcatagagaaatggatgaaataagagaagatgctgctggaaaaggaaaaataggaacgaccagaaggggtataggtcctgcttacgaagacaaggttggaagaagatctataagaattatggatttaagatcagaaaaaaatcttaatcaaaggttagagtcagttttgttacatcataatgctattcgaaaaggtttaggtaaaaaaatctttaagaaagaaaaattaaaaaaagatttattaaaaattgctccagaaattttaaagttttcacaaccagtttggttaaaacttgatgagtttaaaagacaaagaaaaagaatattatttgaaggagctcaaggaatattattggatgtggatcatggaacatacccctttgttacttcatcaaatactgtagcgtctagtgcgtctactgggacgggttgtggtccaaattctataaactatgtattaggaattactaaagcttacacaactagagtaggcgaaggcccttttccaacagagttaaaagatagtattggcgaacttttaggaactagaggtaaagaatttggaacagttacaagtcgaaaaagaagatgtggatggtttgatggagttttggttagacaaacaataaaaatttcaggtatagatggaattgctttaactaagcttgatgtcttggatgaatttgatgaaattaaaatgtgcattcattatgagcttgatggaaaaaagataaaccatttaccagcttcagtagaagaccagttgaagataaagccaatttataaaacatttcccggttggaaagtatctacgaaaggaataaagaacatggaggaacttcctgataatgcaaaaaattatatttatgctgttgaggattttatagagactaaaatatcaagtatttcgacaagt

SEQ ID NO: 316354 - DNA, 1300 bp, Unknown
  Bacterial polypeptide expressing nucleotide sequence isolated from the Sargasso Sea
atgccggcttatgctgtaataggtgctcaatggggagatgaaggcaagggtaaaatagtagatctgctggcagaaaatatggattttgtggtccgttatgcgggtggaaacaatgcgggtcataccgtaaaaaatcccacaggggacttccagttgcatttgatcccgtcagggatttgttctcccggagttgtgagtataatcggaaatggtgttgttatagacccggatgctctatttaaagaattggaatcattagatgagcttggactaatcaacaataatcttttcttgagtgatcgcgcgcatgtcattatgccctaccatattttaatagacttgctagaagagagagcgagaggggatgcatcaataggaactacaggcagaggagtgggtccggcctatatggacaaaattggtagatctggtgtccaaataggtgatttagttagattgagttctactaatgatcctgaaatgataaaaaggctaaaagatatttttaaatcaaagaatgatgttattacaaaaatttatggaaaagaaaaacttgatgtacagcaattagttgagcaatctgtacactgggggcaaaaattagagccgtttgttagacataccgagcagatgattcatgaagctttgaaaaataaccagcgtatattacttgaaggagctcaaggaacactgttagatgtggatcatggatcttatccatatgttacatcttcttccccttcgattggtgggacttgtacggggttaggaatcaatactaatgaaatacaagaaattgttggtatatataaggcgtattgcaccagagttggaagtggacccatgcctacagagatggataaggctacggcacatgaattaagagaaatagctggagaatatggtgttaccacaggccgtcccaggagaataggttggtttgatggggtagcaggaagatacagtcaatcaattaatggatttacatctatggtggtgactagactggatatattagataagttccctgttatcaaatattgtgtagggtatgaagtagatggagagagagtggattattttgttcccaatgcgtcatatttgaataaagtgacaccaatatatgaagaaataaaagggtgggatcaagtcacatacggtacaaccaaactcgaagatctgcctaagcaggctaggatgtatttggataaaatagaagaattagtggattgtaagattagtgcagtatcaacagggccaagaagagaagaaacaatcttgttagatcagatcaactagg

SEQ ID NO: 316355 - DNA, 1269 bp, Unknown
  Bacterial polypeptide expressing nucleotide sequence isolated from the Sargasso Sea
ggggggatgagggtaaaggtaaaattgttgatttacttacggaccgcgcttcagttgtcgtaagatttcagggtggccataatgcgggtcacacattagtagtcaacggtgagaagactgttttacatctcttaccgtctggtattttaagagaaagcgtttgctgcgtaataggcaatggtgttgtggtggatctgcacgcccttaccaaagagattgatgaactctcagaaaaagggattgaggtttcagagcgattgtcaattagtaatgcttgcccactaattctacctagccatattgcgcttgatcagcatagagagatgctcaagggagataaaaaaattggcactacagggcgaggtattggtcctgcatatgaggataaagtagcaagaagaggtatacgtctcggtgaaatctttgattcatcagtctttagtgacaaactaagggagttactagattaccataatttttggttaaccgaatatttcagcgcttccgcagtcgattacaaaaaaaccttagatgattgctataagttatttgattcggtaagcccaatggtcactgatactattgaggtactccattcttaccgagcggcaggcaagaatattttatttgagggagcgcaaggctctcttcttgatattgatcatggaacctatccatttgtaacttcctccaatactactgctgggagttcttcggcagggagtggttatggcccactttttcttgattatgttttgggtattactaaagcatatacgaccagagtaggttctggtccttttcctacggagttgtttgatgaagtaggccaacatttggccacgataggagcagaaaaaggggcaactacgggaagagatagacgatgtggctggtttgatgctaacgcggttaagttggctgtgcgtataaacagtgtgagtgggatttgtctaaccaagctcgatgttttggatggtcttgatcggattaaagtttgtactggatatcagggcattggcactcatgagacagttggatttgctaaagctgaccagctcgaaaaggtagaaccgatttacgtggagatgccaggatggaaacagtcaacggtaggtataacatcgttaaaagagcttccaagagaagctttgaattacataagatttttagaagatcagatcgaagccccagtagacattatatcgactggccctgacaggctagagactttaattttgcgcaatcctttcgacactgaaatctaag

SEQ ID NO: 316356 - DNA, 686 bp, Unknown
  Bacterial polypeptide expressing nucleotide sequence isolated from the Sargasso Sea
cgtgtggcttaaaattgatcaatttaaaaagcaaaaaaagaaaattttatttgaaggtgcacaaggtattttgcttgatgtagatcatggaacttatccttttgtaacttcatctaatacagttgcttcgagtgcagctaccggaacaggctgtggtcctaattcaataaactatgttttaggaattacaaaagcttatacaacaagagtaggggaaggaccttttccaactgaactaattgatgaagtaggtgaacttttgggtacacgtggaaaagaatttggaactgttacaagtagaaaaaggagatgtgggtggtttgatggtgttctagtaagacaaacaattaaagtttcaggtatagatggtatagctttaactaaattggacgtccttgatgaattagatgaaattaaaatgtgtgttgcttatgaactagatggagaaaaattagattatttacctgctgctgttgaagatcaaattaaaataaaaccaatttataaatcttttccaggctggaaggtattaactagtggaattaaaaatattgactctttacctgataatgcaaaaaaatatatttttgcagtagaagattttattggagcaaaaatatctagcgtttctactagtcctgaaagagacgatacaattttaattgaaaatccttttgaaacttaat

SEQ ID NO: 316357 - DNA, 1306 bp, Unknown
  Bacterial polypeptide expressing nucleotide sequence isolated from the Sargasso Sea
atgtcgaatgttgttgtggttggcgcgcagtggggcgatgaggggaaaggccggattgtggattggcttgccgagaaggcggacatcgttgcccgctacaacggtggccacaacgccgggcatacgcttgtggtggacggtcagacgtacaaactggcgctgcttcccagcggtatcgtgcgcggcaagcctggtctgatcggcaacggtgttgcccttgacccggaggcgctgcttgcggagatcgaccgcatggccgcgctgggcattcgcgtaacgcccgaggtgttgcagatcgccgagacggcgacgcttgtcctgccgctccatcgtgcgatcgacgccgctcaggaacgcttgcgcgccaggccgatcggcaccacgctacgcggtatcggtccggcatacgaagacaaggttgggcgccgaggcttgcgcgtttgcgatcttgcagaacccgaactgttcgccgaaaagctcgacgcactgcttgaacaccataacgcgtggtttcgcggcctcggtctggagcctttccagcgggacccgatgttgagcgatctgcttgccatggcgccgagaatcttgcccttcatgggacgcgtctgggagacgctcgaccacgcgcatgcctcgggcaagcgcacgctgttcgagggctcgcaagccgtgatgctcgacgtggactggggcagctatccgtatgtaacgtcgtcgagcactgtcgccgctggggcggccagtggcaccggcatcgccccttctcaccttgggcaggtgcttggcgttagcaaggtctatgcaacgcgtgttggcgaaggcccgttcacatctgaagtcgacggaacactcggcgaggtgctccggcagcgcggcggcgagtatggcgtcaataccggccgcccgcgtcgctgcggttggctggacacagtgcaactgcggcacagctgcaaggtcgccggcatcagcctgctggcgctgaccaagctcgatgtgctcgatggcttcgattcgatctacgtgtgcgtaggctatgaactcgacgggaagcgcatcgactacatgccgtccactaacgccgggcagcaacgcctgcagccggttctcaggcgttttgagggttgggacggttcgacccggggtatccgctcttatggcgatctgccgcgccaggccgcgtcgctgattgaagcgattcagcaggaggtgggtattccggtgtcagtggtcactacgggccctgagcgtgacgacgcgattgtcttgcgatccccgtttgcggaaacggacggcatggcaatctgat

SEQ ID NO: 316358 - DNA, 1306 bp, Unknown
  Bacterial polypeptide expressing nucleotide sequence isolated from the Sargasso Sea
ttgataggtaaatatgtgaacaatatagtagttgttggaagtcagtggggtgatgaaggtaagggaaagattgttgattacctgtcagaaaatgctgatgtaattgtaaggtttcagggaggccataatgcaggccatactcttgtaatcaacggaaaaacctataaattgtctatattaccttctggtattgtaagacaagataaaatttctgtgataggaaatggggttgtaatagatccgtgggcactgttagatgaaatagaggttataaaaaaaacaggtatcaaaatttcgagtgaaaatttgaaaatttcaaactctgctccattaatattaccaattcattctcaaattgataaagcacgtgaaatccaaagaggtgactctaaaattggtacaactggtagaggtattggacctgcatacgaggataaggtagcaagaagggccataagggtttcagatttaaaagataaaagtctactcaaggaaaaagtaaacaaacttttgaatcaccataatatttggctcaaagcacaaaattttgagactttagatcctgaggatattattgcaaatatacttgatatatctcagtatattttggaatttgctgatgaaacttgggttactctttataactataatttaaaaggcaaaaggattttatttgaaggtgctcaaggcactatgcttgacgttgatcatggaacatatccatttgtaacgtcctcttctacagtttcaggtaatgctgctagcggatcaggttttggattattaaatattagtaaagtattaggtataacaaaagcatacaccaccagagttggatcaggtccatttccaactgaacaaaaaaatgagattggaaataaacttggcgaattaggacatgagtttgggaccgttactggtcgcaagaggaggtgtggttggtttgacgctgttatggttaaacaagcaattaaaatttcaggtatctcatctatagctttaactaagttagatgtattggacaaatttgatgaattgaaagtatgcacatcatataaaattggaggcaaagatataaatttttttccttcctgtcaaatagatcaaaataaaattgaaccaaattatgaaactattgaaggatggaatatgaaaactgaaggtataagtgattttgataaattgcctggaaatgcgattaaatacataaaaagattggaaagtctaattgaatgtaaaataaatataatttcaacaagcccaagaagagaagatacaattatactggagaatatttttaattaat

SEQ ID NO: 316359 - DNA, 1255 bp, Unknown
  Bacterial polypeptide expressing nucleotide sequence isolated from the Sargasso Sea
atgacaggtgttgtaattgttggatcccaatggggagacgaggggaagggaaagattgtcgattggttatcaagccaggccgatattgtaataagatttcaaggaggtcataatgccggtcatactcttgtaataaataatgaaacattcaaattaaatattctaccctccggaattttaagaaaaggcaaaatttcgataattggaaatggcgtggttttagatttagctgcttttcaaaaagaagtagctgggttaaaagaaagaggagtagatataactccttcaaatttatacatatcggacagagcgacaataattttaccccttcatcaatcactcgatgaattaagagaaaataacaacttaataaaaattggtacaacaaaacggggaataggacctgcttacgaagataaagttggaagaagagcaataagattatgtgatttatttgataaggaaaaattaaacaagaaaattgaaattttactcaaccatcataatgcgataatgagaggttttggattggatgaatacaatttagaagaagtagtcagtgaaatatataaattaggggaatatgccaaaccttttgcaaaaacaataaatgacataactaacgtaataaacagcggcaaagaaaaaattttatttgagggagctcaaggatttcttttagatattgaccatggaacctatccttttgtaacatcatcaaatgttcacgctagttatgcatctattggcagtggattgaatccaaaagttattaatcatatccttgcaattacaaaagcatatacgacgagagttgggaatggtccttttcctacagagcaagacaatgaaataggcaataaacttggagaaattggccatgaatttggaacagtgacaaatagaaagagaagatgtggttggtttgactcagttttagttcgtcaagctttaactcaatcgggagcaacaggtattgctcttactaaaatcgatgtattagatcactttgatgaaattaaaatgtgtgtaggatataatttaaatggaaaagaaatagactactacccaagctctgaacaagatcaagagactatagagccaatctatgagacctttcaaggatggatgagcacaacaaatggcataagcagcttcgatgagttgccagagaacgcaaaaaagtatgttaaacgtattagtgagctaacaaagactaagatagatttaatttccactagccctagacgtgagg

SEQ ID NO: 316360 - DNA, 654 bp, Unknown
  Bacterial polypeptide expressing nucleotide sequence isolated from the Sargasso Sea
aaggaaaaaaaatattatttgaaggtgcacaaggtattttgcttgatgttgatcatggtacatatccgtttgttacatcttcaaatacagttgctgcagctgcagcaacaggatctggttgtggtcctggctcaatcaattatgttctgggcatcacaaaagcatatactacgagagttggagagggccctttcccaacagagttaaaagatgaaataggagaaaagctgggaagtataggaaaagagtttggaacggttacaagcagaaaaagaagatgtggatggtttgatggtgttttagttagacaaacaattaaaattgctggaataaacggaattgcattaaccaagttagatgtgttagatcatttagatgaaattaaaatgtgtatagcatatgaagtagatggaaaaaaaatggattacttacctgcgtcattagataatcaacttaaagcaaaacctatttataaaaattttaagggttggaattgttcaactaaaggtataaaaaaatttgatgatcttccagataatgcaaaaaattatattaaagaattagaaaaatttatagaaacaaaagttgcaagtatttctacaagtccagaaagaaaagatactatattactagataatccttttagtgtctaat

SEQ ID NO: 316361 - DNA, 643 bp, Unknown
  Bacterial polypeptide expressing nucleotide sequence isolated from the Sargasso Sea
tttgtttgaaggggcacaagggtctcttcttgatattgattttggaacttatccttatgtaacttcctcaaacacatcgtctggacaaatttttgctggtactggatttggactcaaacaaaacaataaagtatttggtataactaaagcctataccactagagtgggggctgggccttttcctacagaattaaataataagattggtgattatttgggtaaaaaaggaaaagaatttggtacagttactctaagaaaaagaagatgtggttggtttgatgcaaatttagttaaacaatctgtaataattagtggagttgaaaatatagttttaacaaagttagatgtcttagatgaacttgatgaattaaaaatttgtattggttatagaatagatggaaaaaaatttgattatttaccttttggtgaaaatcttcaatcaaaagcaaaaccaatttatacaaaaattccagggtggaaaaaatcaacctatggattgactaaatggtctgatttacctgttgcagcaaagaattatataaaaacaatagaaacaataattggtgtagatattgcaattatttcaactgggcccgaaagatcacaaactattgatagaaaaaaaatattaggtaatttttaa

SEQ ID NO: 316362 - DNA, 580 bp, Unknown
  Bacterial polypeptide expressing nucleotide sequence isolated from the Sargasso Sea
aatggccaacgtcgttgttgtaggttctcaatggggagacgagggaaaaggaaaagtagttgattggctctctgagagggccgatgtggtagtaaggtttcaaggtggacacaatgcgggacacacacttgttatcaatgataagacatacaaattaagccttctgccatctggtatcgttcgaaaaaaaaagttgtcgattatcggcaatggagtagttgttgatccgtgggccttaaaatcagaaatagaaatacttaaaaataatggagtagatatttcaacaaaaaacctaatgattgctgaaaatgtgtctttaatcctccctcttcaccaaaacttggacaaatatagagaagaggcattaggtagcgctaaaataggaaccaccggccgcggaattgggccagcatatgaagataaggtaggaagaaggtccattcgtcttggtgatttgtcagataaaacactacttgaagagagggtagaacggctcctaatgcatcataataccttgttaaaaggttttggctttccaaaattagaaaaaaagaagattttgcaccaattaatgaaatag

SEQ ID NO: 316363 - DNA, 1165 bp, Unknown
  Bacterial polypeptide expressing nucleotide sequence isolated from the Sargasso Sea
catgaaaaattccctaatccttgttggaacacagtggggagatgaaggtaaaggaaaaattgttgactacttttcagaaaaattttcagcagtatgtagattccaaggtggacataatgctgggcacaccatctacaatgacgagaaaaaatttgtattgcatttaattccctctgggattttctatgatcacgtttcctgctttattggccaaggagtaattttgtcattggattcattgctcgaagagattgagacaattgaatctaaaggaataaatcttgatggaaaactacgcataagtcgttactgtagcctcttgcttcccatccatgcaaagattgatcaattaagagaagataataaaaataaaattggaactactagaagaggtattggaccagcatacgaggacaagacagccagaagaagtattaaagcttttgatcttgaagatgactctcttcttgaagacaaattgaaaaaccttctggattactataattttcaaatagaaaatattcataaagctgaaaaatttaactatcaagaagtatttgataatctcaaagagacctatagtaaaacttcaaaattttttggagatgttacagactcactcgaagaaatttatgaaaaaggaaaccatatactttatgagggtgcacaaggaactttacttgatgtagattatggtacttatccatatgttacgtcttcaaatactcttgccacatcagtaggtgtgggctctggatttcctaaaagcatctatgctgatgtattgggtattgttaaagcctacacaacaagagtaggtgagggtccatttccaactgagctgcatgatgaatatggtgagaagattgcaaacatagggaatgagtttggcgccacaacaggcagaccaaggagatgtgggtggctagatcttgtagctttgaagtactctgcaaaactaaataatctaaccagtttatgtgtcacaaaacttgatgtgctcgattcattttctgaaataaaagtatgtgatgaatatgaaattgataatgaaattgttcaatataaatctaggcagctgcataaagtcaaaccaaaatacaagatatttaaggggctgggaacaatctctcagtcagtgccaaaattattcagagttacctaa

SEQ ID NO: 316364 - DNA, 1297 bp, Unknown
  Bacterial polypeptide expressing nucleotide sequence isolated from the Sargasso Sea
aatgggcaaaaacgtagttgttctcggcacccaatggggtgacgaaggaaaaggtaagattgtcgaccttctaacagaacaggcaaaatatgtagttcgctaccaaggcggtcacaacgcgggtcacactctagtgatcaatggcgataaaaccgtacttcatctgatcccatcaggcatcctacgcgacaatgtgaaatgcattatcggtaacggtgtggtgcttgcaccagacgccctgatgaaagagatcaaaatgctcaaagagcgcggtattcctgtagaggaacgtctgctgatctctgaagcatgtccgctgatcctaccattccactgtgccttagacatcgctcgcgaaaaagcgcgcggtaacaaagctattggtactacgggtcgtggtattggtcctgcgtatgaagacaagatttcccgtcgcggtctgcgtgttggcgatctgttcaatgctgaactatttgctgaaaagctgaaagaagttatggcatatcataactttatgctgacagagtactacaaagttgacgccgtagattacgagcaaacactgagcgacgcgttagccttagctgactacctgaagagcatgtgtgttgacgtaactgagctgttggataacgcgcgtaaagcgggtgagccaattctgttcgaaggtgcacaaggtacactgttagacatcgaccacggtacttatccgtttgtgacttcgtcaaacactaccgcaggtggtgtggcgacaggcagcggctttggtccgcgtcatttagactatgtcttaggtatcatgaaggcatacaccactcgcgtgggtgcaggtcctttcccaactgaactcttatgtgaagtgggtgatcatttagggactaaaggtcatgaatttggtgcgactactggtcgtaagcgtcgtcctggttggttagatgcagtggcaatgcgccgcgcagtacaaatcaacagtgtaagcggcttctgcttaactaagttagacgtactcgatggcctgaaagaagtgaagatctgtgtgggttaccaacatccagatggcactatctctaaggttacgccattagcggctgaaggttatgagcaggtcacgcctgtttatgaaactatgccaggctggagcgagtcaactttcggtgcgacctctttagagcagttaccgcaagcagctatcaactacatcaagcgtattgaagagttgttagaaacgccgatcgacatcatttctaccggtccagaccgtaatgaaacgatgattttagttagtccatttaactaa

SEQ ID NO: 316365 - DNA, 564 bp, Unknown
  Bacterial polypeptide expressing nucleotide sequence isolated from the Sargasso Sea
aatgaagaatgtagttgttgttggatcccagtggggtgatgagggaaaaggaaaaattgttgattggctttcaagtgaagcagatgtagttattagatttcaaggtggccataatgctggacatactttagttatagatgggataacatataaattaagattactaccatcaggcattgtaagaaaaaataaaatatcagtaattggtaatggtgttgtcgttgatccttgggcattattaaatgaaatagaagaaattaaatctaaaggtatagagatatctgaaaaaaatttaattttgtcagaatcagcaaatttaattctaccttttcataaagagatggatgaaataagagaagatgctgccggaaaagctaaaattggaaccacaagaagaggtataggaccagcttatgaggacaaagttggcagaagatcaataagagtaatggacttaatttctgaggataatttagatcatagacttgaaactgttttacttcatcataatgctattagaaaggggcttggtaaagaattatttaaaaaagatgaattaaaaaa

SEQ ID NO: 316366 - DNA, 1297 bp, Unknown
  Bacterial polypeptide expressing nucleotide sequence isolated from the Sargasso Sea
atggcgaatgtagtagttgtcggttcccaatggggagatgagggaaaaggaaagattgttgattggctatcaagcagagcagatgtagttgttaggtttcaaggtggtcataatgcaggtcatacattagtcatagacggtaaaacttataaattatcactatttccatcaggcattgttagggaagaaaaagtttccatcatcggaaatggagtagttgtagatccttgggctttttctgaggaattagaaactcttatcaatcaagatgttaagataagttcagaaaatttaaaaattgctgaaaatgcttccttaatcttacctgtgcatagaaatttagatattttaagagagcacagaagttcaaatgattcaaaaataggcactaccaaaagaggaattggaccagcatatgaagataaagtcggaaggcggtctataagagttggtgatttaactgatttaaaagctcttagatcaaaagtcgataatcttgttgatcatcacaatattattcttcgaggcatgaatgaagaggaaattaattcagatgttatttatgaagaattagtagaagtttcagaaaccataaaaccatttataactagaactcaagaatttttaattaaagctagaaaagatagaaaaagaatattgtatgaaggagcgcaaggcgcactgcttgatattgatcatggtacttatccttatgtcacttcttcaaatacaattgcctctgccgctgctacaggttctggacaaggtgttaatactataaactatgtattgggaatcactaaggcttacacaacaagagttggggagggtccatttccatctgaacaagataacgatataggaaatgaactcggagaaaaagggcatgaatttggaacagttacaggaagaaaaagaagatgtggttggtttgatgctgttctagttaaacatgcgatcgaagtatcaggaattgatggtatggctctaacaaaattagatgttctagatggatttaagaaaataaatatttgtatagcttacgaacttgatggaaaaaggattgattatttcccatcttcagcagagcaacaatcaagaattaaacctatttttgaagaatttgatggttgggatggtactacttttggggctaggcagtggaatgatcttccagctgaagctgtaaaatatgttaaaagaattgaagaattgactagtactccagtagctttactatcaacaagtcctgaacgagaagatacgatactagttaaagatcctttcgaggattaat

SEQ ID NO: 316367 - DNA, 1294 bp, Unknown
  Bacterial polypeptide expressing nucleotide sequence isolated from the Sargasso Sea
atgaaaaatattgttgttgttggttctcaatggggagatgagggaaaaggcaagatagttgattggttatctgaacaagctgatgttgtagttagatttcaaggtggtcacaacgcgggccatactcttgtaataaatggtgtgacttataaacttcgactacttccatccggaatcgtaagaaaaaataaaatatcaataattggaaatggagttgtcgttgacccctgggcattattagatgaaattgaggaaattaaatcaaaaggagttagggtcgacactgataattttataatttcagattctgcaaatttaattttaccttttcatagggaaatggatgaaatccgtgaagatagtgcgggtaaaggaaaaattggaacaacgagaagaggtatcggaccagcatatgaagataaagttggtagacgatcaataagagtaatggacttgagatctgaaaaaaatctagatcaaaggttagagtctgttcttttacatcataatgcaattagaaaaggcctaggtaaaaaaatttatgagaaggatcaattaaaaaaagatttattaaaaattgctcctaagatcttgaaatattcaaaaccagtttggttgaaacttgacgaattcaaaaaacaaaaaaaaagaatattatttgagggagctcaaggcatattactagatgttgatcatggtacatatccatttgtgacatcctcaaatactgtagcgtcaagcgctgctactggtacagggtgtggactaaacacaattaattatgttttaggaatcactaaagcatatacgactagggttggagaaggtccgtttccgacagaattaaaggatgatattggcgaacttttaggaacaagaggaaaagaatttggaacagttacaagtcgaaaaagaagatgtggttggtttgatggtgttttagtaagacaaactattaaggtctcagggattgatggtatagcacttacaaagctggatgttttagatgaattagatgaaataaagatgtgcgttaaatatgaattagatggaaaaaaaattaattatttaccagcagcagtagaggatcagctcaaaataaaacctatttataaaacttttgatggctggaaaaaatcaacaagtggtattaagaatatagatgatcttccagaaaatgccaaaaattatattaaagaggttgagaattttattgagacaaaaatatcaagtatttcaaccagcccagaacgtgatgatacgatattaatcgaaaatccttttgagatttaat

SEQ ID NO: 316368 - DNA, 1192 bp, Unknown
  Bacterial polypeptide expressing nucleotide sequence isolated from the Sargasso Sea
ggtggtcataatgctggacataccttagttatagatggagtaacttacaaacttagattgcttccttcaggaatagttagaaaaaataaagtttcgattatcggaaatggtgttgtcgttgacccctgggcattgttggatgaaattaaagaaattggagaaaaaggcgtgaatgtaaattcagaaaatttcatgatttctgaggcagcgaacctaattttaccatttcaccgagaaatggatgaaataagagaagatgcagcaggtaaaagtaaaattggaacgacaaggagaggtattggacctgcttatgaggataaagttggaagacgttcaattcgagtaatggatcttagatcagaaaaaaatttgaaccaacgattagaaacagttttactgcatcataatgctattagaaaaggtttgggtaaaaagatatttgagaaaaatcagcttaaagatgatcttctaaaaatcgctcccgaaattctaaaatattcagcaccagtatggcttaagattgatcaatttaagaaacaaaagaaaaaaatattatttgaaggtgcacaaggaattctattagacgttgaccatggaacatatccttttgtaacttcttccaatactgtggcctcaagtgctgcaacaggaaccggatgtgggcctaactcaatacattatgtattaggtataaccaaagcttacacgacaagagtaggtgaaggaccttttccaacagagttagtagataaaattggtgagttattaggtacaagaggtaaagaatttggaactgttacaagtcgaaaaagaagatgtggatggtttgacggtgttttggtgagacagacaataaaaatttctggaattgatggcattgcgcttacaaaactcgacgttttggatgaactagatgaaattaagatgtgtgtcgaatatgatcttaatggaaaaaaaatagattatcttccagcagcagttgaagatcaacttaaaatcaaacctatatataagacttttgatggatggaaaacttcaaccaatggggtcaaaaatattaacgacctaccagagaatgcaaaaaaatatctatttgcaattgaagactttattggagcaaaaatatcaagtatatcaactagtcctgaacgggatgacacaatcttagttgaaaatcctttcgagatttaat

SEQ ID NO: 316369 - DNA, 689 bp, Unknown
  Bacterial polypeptide expressing nucleotide sequence isolated from the Sargasso Sea
accttatgtcggtaatgttattcaagaggtaagagacttacaggatgcagataaaaaaatactttttgaaggcgctcaaggggctctattggacatcagcttagggacctatccatatgtaacatccagcaactcttctgttggcggtatagcttcaggaataggaatacgtccaacaaatatagatttctctcttggaatagcaaaagcttatacaaccagagttggtgaaggaccttttccaactgagttatttgatgatatgggaacttatttagccgaaaaaggaggagaagttggtgcaaccactggaagacctagaagatgcggttggttggatgcctttttgctttcccatacagtacaattaaatggtattgatggtctttgtataaccaagatagatgtattggatggtttagagtccataaaggtttgtactgattattcgagtaatttgagcaaggcagaaatattggaaaccttgactttggagggaattgaaccaatttatacagaatttaaaggatgggaagagcctaccgcaggaaaacaatcttttgaagaattgaatgatatggccaaagagtttattctaaatattgaagatctttgtaaggtgcctgtgattatgatttccactgggcctaaaagagaagatacaattataagagaatacccattgtgat

SEQ ID NO: 316370 - DNA, 701 bp, Unknown
  Bacterial polypeptide expressing nucleotide sequence isolated from the Sargasso Sea
ttttgtcaccgaaaccccggtcctggtccattctctggtgaaacaaggcctacgactgcttttcgagggcgcccaggggacattccttgatattgatcacggaacctatccttttgtaacttcatccaatacggtttccggaaatgcctgtgccgggggcggaatcggcccgaggcatatttcagatgtggtaggcatcgttaaggcctacacgacacgtgtcggcagtggtcccttccccacggaactgctggatcaaaacggagagttccttcgcagcgaaggacaggaatttggcgcgaccaccggacgaccccgccgttgtggctggtttgacgcggtgttggtgaggtatgccgtacgtctgaacggaatcacttcgctggctttgaccaaactcgatgtgcttgataaaattgaaaccttgaaactttgtgtcggttaccgcgtgaaggatggcagcatccagaccgattttcccttcgaggggcatgatgaggttgaaccggtttatgaggaattgcccggctggaacacaaaaaccgcaggcatcacggaatatgatcaactgccaaaaaacctgctcgactatctggcccgcatcgaggaattggtggaggctcctgcatcgatcatctccaccggtcccaaacgggaggatacgattgtgcttcaacccgaccgattctggaagtcatgag

SEQ ID NO: 316371 - DNA, 853 bp, Unknown
  Bacterial polypeptide expressing nucleotide sequence isolated from the Sargasso Sea
agactttgtgatttaaatgatttaaaaaatctaaaattaaaaattcaaaatctatataattttcataagcctagacttgatcagtttaaaaaaattgctgattatgaaaaaacttttaatgatttagttgaaatatcagaacaaattttgatatttagctcaccggtatggaaaataattaatgatgcaggaaagcaaaacaagtttattttatttgagggtgcgcaaggttcattattagatatagactttggcacttatccatatgtaacttcttcaaatacatcttcaggtcaaattttttcaggaactggttttggtataaaagaaaatcataatatactaggcataacaaaagcgtatacaactagagttggctctggtccttttactactgaactaaatgatgaaataggtaatcattttgtagaaaagggacaagagtatggaactgtaactaaaagaagacgtagatgtggatggtttgatagtgttctagtaaaacaatcaatagcaattaatggtatcacaaacatcgttttaacaaaacttgatgttttagatgatttaaaagaaataaaggtttgcattggttatgatgatggaaataaaaaatacaattatcttccatttgatgaaaaaattcaaaaaaaattatttccaatatatgaaactttgccgggatggcaatcttcaacttatggattaactggttggaatgatcttcccaaaaatgctcaaaattatataaattttttggaagaaacgattgaaaaaaatatatcaattatttctacaggacctgatagaattcataccattgatagaaataatttattgagtaatagctgaa

SEQ ID NO: 316372 - DNA, 796 bp, Unknown
  Bacterial polypeptide expressing nucleotide sequence isolated from the Sargasso Sea
ttatcataactttcttcttgaagagctctataaatccgatggaacagatcttgaagacacatacaaagagtggatgggttatttttctaaaataaaggaccttgttgttgatagctcaaaagaattaaacaatttgaagttaaagcagtcaaatatactctttgaaggagctcaaggctcaatgctagatattgatcaaggcacatacccatttgttacatcatcaagcactttatctggggcctcttcgttaggttctggtatcggaccattggatatcgatggagtgctgggtatcaccaaagcatatgctaccagagttggctcaggcccattcccaacagaaatcgatgatgattacggtaagcatatggcaaaggttggtgttgagtttggagcaacaacagggagacctcgaagatgtggttggctagacctcgttgcattacgtaaagcagtcaatatcaattcaatatcacaactctgcatcacgaaaatcgatgtgcttgatgggctagacaagattcttgttgctgaagaatatgaaattgacaaaaagatatatgacactctccctgctatgagtcaaaatcgatttgaaagaatttcaccaatatacaaggaatacaaaggttggtcaggaatcacatctggactgaaatcttttgatcaattaccaacagaagctaagactttgattaaaggaatagagggctcaatcggtgttcctgtatctttgatatcaacagggcctgatagaaacgacatgattgtcattgatcaaattttttcatga

SEQ ID NO: 316373 - DNA, 514 bp, Unknown
  Bacterial polypeptide expressing nucleotide sequence isolated from the Sargasso Sea
atctggatttccaaaagtatatattctgatgttttaggcgttacaaaagcttatacgactagagttggttcaggcccgtttccaactgaacttttttgtgaagaaggtgaaaagttagcagagctagggcatgaatttggggcaactacaggaagaccaagaaggtgtggttggcttgatcttgttgctttaaagtattcagctaaactcaataatctaactgaactttgtatcactaaactagatgtattagatagctttgaaaccataagagtttgccatagttacaaaatagacggagttgatacttcatttaaatctaggctcctacataaagttgaaccagtctatgagaatctcaaggggtggaatacttcattaaataactgcaaagattttgatagtttgccagaagaaactaaagcttttataagctacgttgaagattatgttggagtaaaggtaactttaatttcgaatggtccaaatagatctgatttaatccatagataat

SEQ ID NO: 316374 - DNA, 802 bp, Unknown
  Bacterial polypeptide expressing nucleotide sequence isolated from the Sargasso Sea
gtactagtccatcataatgcaattagaaaaggcctaggaaaaaagatttttgaaaaagatcagcttaaatctgatttgcttaaaatagcacccaaaatattagaattttctcagccagtttggctaaagattgatcaatttaaaaaacaaaaaaagagaattttattcgaaggagcccaaggtattttacttgatgtagatcatggaacttatccttttgtaacttcatccaatactgttgcctcaagcgcagctacaggaactggttgtggccctaattcgattaattatgttcttggaattacaaaagcttatacaacaagagttggtgaaggtcctttccctacagagttaacagatgatgttggtgaacttttaggaacacgtggaaaagaatttggaactgttacaagtagaaaaagaagatgtggatggtttgatggtgttttggtaaggcaaactattaaagtttcagggattgatggtatcgctttaacgaaattagatgtactcgatgaattagatgaaattaaaatgtgtgttgcttatgagcttgatggtaaaagattagattatttacctgctgctgtagaagatcaaataaaaataaaaccaatttatgaaacttttccaggttggaaagtttctacaaatggagttaaaaatctggattcattacctgaaaatgcaaaaaaatatatttttgcagttgaagattttattggtgcaaaagtatcaagtatctcaactagtccagaaagagatgatactattttaattgaaaacccttttgaagtttagt

SEQ ID NO: 316375 - DNA, 1192 bp, Unknown
  Bacterial polypeptide expressing nucleotide sequence isolated from the Sargasso Sea
acttcaatggggtgatgagggtaagggtaaaatagttgataatctaagcgagaatgtagatgtagtatgtcgttttcaaggcggacataatgctggacatactattaaagtaaatggagaaaaaactgtacttcatttaataccatctggcatattacataataattcaaaatgcttaataggtaatggcgtggtgttggccttagatgcacttgataaagaaataaatgaacttaaaagtagagatattaactttaaggatagattttttgttagctcagcttgctcattaattttgccttctcatatatcaatagaccaaacaagagataaaaaagagtcaattggaacaactggaagaggcataggtcctgcatatgaggacaagattggtagaagagctataagatttggtgacatagcaaatcaggataaattgagagaaaaagttgaactacttatcaattaccataatcgactcctaaaagatttatacaaaaaagagccacataaacctgatgatgtttttaatgagatcatgaaatataagcatttgcatgaagaattttgtgttgactctcaagatttaatgtatgaatgggtgaaaaataaaaaaacaattttatttgagggtgcacaaggcacactgttagatattgatcacggaacatatccttacgtaacatcatctagcactacagcaggcggagtatcaactggattgggaataggtccaagatacataaataaaataataggcatatctaaagcttataccactagggttggagaaggcccatttcccactgaattatttgataaagatggtgaactacttgccaaaaaaggtaatgagtttggagctacaactggaagaccacgaaggtgtggctggttagatttagtggcactaaagaaagcaatttttacaaactctgtaacagatttatgcataaccaagctagatgttcttgatgagacagaacttatcaaagtttgtattgaatatgataacgataaacctatctataaagtatttgatggttggctttcatccacagaaggcattactgaatattcagaactaccagaaaaagcaaaagaatatatagaatttattgaagattttgcagaatgctctgcttccattatctcaactggaccatcaagagatcaaacgatctctaaatag

SEQ ID NO: 316376 - DNA, 351 bp, Unknown
  Bacterial polypeptide expressing nucleotide sequence isolated from the Sargasso Sea
gaggaacattgttaattcatgctcatagagcaattgaatctgtcactctagataaagaaacaatgcataaaaaagataatgtaatgtctagatatgctgaactaatttacaatggttactggtactcaaaagaaaggtttaaatttcagaaaattgtcgatctcaaaaaaaataaggtcaatggatcagtcaaacttaagctttataagggcaatataacaattcaatctagagttactaatagtacagcttactctatgaaaaaagtttctttcgaggaaaataaatctttcaataggtcaaatgttgagaaatttataaactttcataaaaaaaagttaagaaactaac

SEQ ID NO: 316377 - DNA, 240 bp, Unknown
  Bacterial polypeptide expressing nucleotide sequence isolated from the Sargasso Sea
atggttattggtattcaaaagaaagattaaaacttcaaaaaattatagatcttaaaaaaaagaaagttaatggttcggttaaacttaaactttataagggcaatgtaatcatccaatctagaaaaacgaaaagctcagcttattcaatgaaaaaagtttcttttgaagaaaataatacatttaataaatcaaatgtcgaaagatttataaattatcacaaaacaaaattacgatcataaa

SEQ ID NO: 316378 - DNA, 562 bp, Unknown
  Bacterial polypeptide expressing nucleotide sequence isolated from the Sargasso Sea
aatttgcccgaaaaaccttcgtatttgaaaattaaatttgttaaaggagtaccaacagaagttgatggtaaaaaactacctcctgtaaaattaattgaatatatcaataaaaaagcaggaaataatggtgttggaattgttgatcatattgaagatagggtggttggaataaaatcacgagaagtgtatgagactccagcagcaatttgtctgatagaagcacattccgatcttgaaaaaatggtacatacaaaacatgaaacaaagttcaaaacattagttgatgacgaatgggcatggatggtttattcgggtttgtgggatgacccattaagaaaagaattagatcaatttatcgaacaagctcaaaaacgtgttactggtactgtaaagctaaaacttcacaaaggaaatgtcagggtagtcggaagagaatcaaaatattcactgtatagtcacgacatagccacttatggaaaggattccacgtttgatcagaaattagccaaaggtttcgttgaattatggggaatgcagtcaacagaagctaataaattctaga

SEQ ID NO: 316379 - DNA, 861 bp, Unknown
  Bacterial polypeptide expressing nucleotide sequence isolated from the Sargasso Sea
cacgggttcttgcgtttcgatcacgttcgtataccgcgacgcgccatgctgatgggacactcaagagttgagccggatggtatgtatgtgccagcacccgtatcgaaagtctcttacggtacaatggtttttattcgttctgatatcgtcatgaatgctgcactctatatgaagaaagcagtaacgatcgcaattcgatacaacttggtaagaaggcagtcaaatccggatacggcgactggcaaggagtgccaggtcattgattatcaacacagccagcgcaccctcttcccgattctcgccaaagcttttgcctttcacgttacatctgattacatgcgtcgtatgtacttcgaattccaaaagaattcacgcaaaaagaatgatttttcggcgcttccagagctgcacgccacatccagtggtttgaaggcgtactgttcctgggctacaaaagatgcgattgaggcgtgtcggttaacgtgcggcgggcatggttacatgaacctggcaggattcggcactacactcgcgtcatacgctccgaacgtgacgtacgaaggagacaacaacgtcttatgtttgcaaactgctcgttacttgctgaaagtctaccgcaaaatgctcacaggcgagactccccctcaagtacttggttatctcaccggtgcgagttctcgcagctctctcgctctcggtgcgagtttacgagatgagaaagccattttggacgcgtacgcacaccgtgcatggcgtctcgttaccgaagcatgcaaagtgtcgggggagttaacaccagacgatgcaatgcgggtgcacatggtgcaatggatcacagccgccaaagcccattgtgctttc

SEQ ID NO: 316380 - DNA, 210 bp, Unknown
  Bacterial polypeptide expressing nucleotide sequence isolated from the Sargasso Sea
tacaaaatttaattgactcaacacaacataaagtttcaggagaggtcaaactaaaaatatttaaaggcaatgtaattgtttgtggtagaagatcattaaatagcctctatgataactcattagtttcatttgatgaaaatggaaattataatcagaaagacgctgaaggttttataaaaatacaatctttgagattaaaaaataaataat

SEQ ID NO: 316381 - DNA, 478 bp, Unknown
  Bacterial polypeptide expressing nucleotide sequence isolated from the Sargasso Sea
aaattgagaccttcaaaattacttgaaaaattaaatcagttagctggaaaaaatgggataggaagagttgatcttgttgaaaatagatttctaggaattaaatcaagaggtgtttatgaaacaccaggagggacattattaatccatgctcatagagcgatggagactgttactttagatagagaaactatgcataaaaaagaaaacgtaatgtctagatatgcagaactgatttataatggctattggtattcaaaagaaagatttaaacttcaaaaaattatggatctcaaaaaaaacaaagttaatggatcagtcaagcttaaactttacaagggcaacataacaattcaatctagagttactaatagtacagcttactcaatgaaaaaagtttcttttgaggaaaataagtcttttaataaatcaaatgttgagagatttataaattttcataaaaaaaagttgagaaactaac

SEQ ID NO: 316382 - DNA, 462 bp, Unknown
  Bacterial polypeptide expressing nucleotide sequence isolated from the Sargasso Sea
aaagcttatgcagtatctcatggtgcaacaggaaaaggaaatgatcaagttagattagaacttggttatcatttttttggaccaaaaattaaaataattgcaccttggagaatatggaatcttaaatctagaactgatcttattaaatatgcaaaaaaaaataaaatttctattccaaaagataaaaaaggagcttcacccttttcagttgatgataatctttttcatacctcaactgaaggtaaagttttagaaaatccaaaaaactctgctccagaatttatatttgaaagaacagtttccccagaaaaatctcctaataatgcaacatttgtatctattaattttaaaaatggtgatccaattggaattaatggaaaaaaattaagtcctgctaaattacttgaaaaattaaataaaattgccggaaaaaatggaataggtagagttgatttagtcgaa

SEQ ID NO: 316383 - DNA, 346 bp, Unknown
  Bacterial polypeptide expressing nucleotide sequence isolated from the Sargasso Sea
actcttttaatcaatgctcatcgagcaattgagtctgttactttagacaaagaaactatgcataaaaaagatcaggtaatgtctagatatgctgaattaatttataatggttattggtattcaaaggaaagatttaaacttcaaaaaattgttgatctaaaaagaaacaaagttaatggctcagtgaaacttaaattgtataaagggaatattacaattcaatcaagagttactaatagtagcgcatattcaatgaagaaggtatcttttgaagaaaataaatcatttaataaatctaacgttgagagatttatcaattttcataagaaaaagcttcgtacttaga

SEQ ID NO: 316384 - DNA, 976 bp, Unknown
  Bacterial polypeptide expressing nucleotide sequence isolated from the Sargasso Sea
ctattccacaatttaacaataagtgcgaatacagcttcttatcaatatgctgatggtgcttttagaagctctggcgggctagacactttattgaattgcatattctggaataataattcagattatcaaattcataatgaaagtggaaatgtaattatcgattattgtgacatacaggatggcgagaatggtatctcaaatagttctgttgtcacttatggaaattcaaacatagagaccgatccattgtttgtaaatccatcagctgggaattatcatcttcaatctgcatcaccttgcatagacgcaggtgacccctctttaccacttgattctgatggaaccatatcagatatagggacttactccattaatcaaaataattcagatctaactgtctactttgtttctcctaatggcagtgatatcctaggtactggtacagaggaaagtccatatgcttccataaatcaaggtatgggtgctgctggggatggagatacagtgatggtacttccaggcacctactatgagcatattaattatggtggtaaggcagtattactaaaaagtacagatggttcagagatgaccatcattgatggttctcaatctgatattgttgtcagatttgaatcaggggaaaccaatggatctattttagatggatttacgattcaaaatggctatacaaattatggtgcagctggtgcgggtataaacattggctcagggtcctctccagtagtgcgctattgtcttgtaatagataataatgccaatacagcaggaggagctatcaatagttatggttctggtctattccacaatttaacaataagtgcgaatacagcttcttatcaatatgctgatggtgcttttagaagctctggcgggctagacactttattgaattgcatattctggaataataattcagattatcaaattcataatgaaagtggaaatgtaatta

SEQ ID NO: 316385 - DNA, 521 bp, Unknown
  Bacterial polypeptide expressing nucleotide sequence isolated from the Sargasso Sea
tttgaagaataaaaacaaaataatactcgcttatagtggtggtttagatacttcagtcattttaaaatggctggtaaatttagattatgaagtagtttgctttataggggacattggacagtctgatgattttgtaaacgctaaaataaaagcagaagaattaggtgcttcgaaagtaatcatagaagatttaaaaaattcttttattattgattacgtatatcctgctttgcaaggcaatgccatttatgagggaagatatttattaggaactgcacttgctagacctgtacttgctaaagcacaaatcgagattgcgcataacgaaaatgcatctattgtttctcacggttctacagctaaaggaaatgatcaagtaaggtttgaattagcatatcatgcattggatcccaatataaaggtcttttcgccatggcgagatgaagaatttttccatcagtttaaaggaagaaatgacctattaaactatgctgataaatggaaaattccgataactgctt

SEQ ID NO: 316386 - DNA, 217 bp, Unknown
  Bacterial polypeptide expressing nucleotide sequence isolated from the Sargasso Sea
atgggtaaagaaaaagtagtcctggcctattcgggggggcttgatacttctgtgattgtccactggctggcctcacaggggtatgacgtgattgccctctgcctggacctcggacaaaaagtcgaaaatctcgatgaaatccggcaaaagggtctcaaggccggagccgttgatgtgttgatcgaagatgtgcggaaagaattcgttgaggattatg

SEQ ID NO: 316387 - DNA, 422 bp, Unknown
  Bacterial polypeptide expressing nucleotide sequence isolated from the Sargasso Sea
tggtattggaagagttgatttggttgaaaacagatttattggaataaaatcaagaggtatttatgaaactcccggaggaactttactaattaatgcccatagagctattgagtcagttaccttagataaggaaacaatgcataaaaaagacgagatcatgccaaaatatgctgaactaatttacaatggctactggtattcaaaagaaagattaaagctacaaaaaattgtggatttaaaaagaaataaagtaaatggatctgttacgcttaaattgtataagggtaatattacaattgtctcgagacaaactgaaagtaatgcttattctataaaaaaagtttctttcgaggaaaataaaacatttaataaattaaatgtagaaaaatttattaattttcataaaaagaaactgcgttaat

SEQ ID NO: 316388 - DNA, 373 bp, Unknown
  Bacterial polypeptide expressing nucleotide sequence isolated from the Sargasso Sea
tcgagaggggtatacgaaacacctgggtggcactcttttaatcaatgcacatagagcaattgagtctgttactttggataaattaactatgcataagaaagatcgaataatgtctagatatgcagagttaatttataatggttactggtattcaaaagagagatttaaacttcagaaaattgttgatttgaaaagaaataaagttaacggcgcagtcaagcttaaattatataaagggaatattacaattcaatcaagagtaactaatagtagtgcttattcaatgaagaaagtttcttttgaagagaacaagtcatttaataaatctaacgttgagaaatttatcaattttcataaaaaaaagcttcgttaa

SEQ ID NO: 316389 - DNA, 676 bp, Unknown
  Bacterial polypeptide expressing nucleotide sequence isolated from the Sargasso Sea
aaaaaaggagcctctcctttttcggttgatgataacttgtttcacacttctactgaaggtaaattattagaaaatccaaaaaatgctgcgcctgaatttatttttcaaagaacaaactctccagaaaaatctcccaataaaccaacttttattactattggatttaaaaaaggcgatcctgtaactattaatggaaaaaaattaactccttcaaaacttttagaaaagttaaatgtactggccggcaagaatggaattggaagagttgatcttgttgaaaatagatttattggaataaaatcaagaggtgtttatgaaacccctggaggaactttgttaattaatgctcatagagcaatggaatcagttactttagataaaaaaaccatgcacaaaaaagatgagataatgccaaaatacgcagagctcatttacaatggttattggtattcaaaagcaagatttaaactacaaaaaatagttgatctaaaaagaaataaagtaaatggatctgttaagcttaaattatataaaggaaatattacaattgtctcaagacaaactaagagcaatgcttattctatgaaaaaagtttcatttgaagaaaataagacatttaataaatctaatgttgaaagattcattgactatcataaaaaaaaattaaataagtaaa

SEQ ID NO: 316390 - DNA, 143 bp, Unknown
  Bacterial polypeptide expressing nucleotide sequence isolated from the Sargasso Sea
taccatgattacaggtcgtgagtcctcaatgagtttatacaatcctaatctagcaacttttgagtcagataatatttactctcaaaaagatgctgagggcttcattaaattgaatgctttgagattaagagagaaaaaataat

SEQ ID NO: 316391 - DNA, 238 bp, Unknown
  Bacterial polypeptide expressing nucleotide sequence isolated from the Sargasso Sea
ctgaaaaaatctccgaataagcaaacaatcgtgagtgttggtttcaaaaatggagaccctatttctgtaaatggaaaaaaattgtcgccaggaaaacttttagaaaaactaaataatcttgcaggaaaaaatggaattggtagagttgatttggtcgaaaatagatttattgggataaaatctagaggtgtatatgaaactcctggcggaactatactaatgatagcgcacagaacaa

SEQ ID NO: 316392 - DNA, 289 bp, Unknown
  Bacterial polypeptide expressing nucleotide sequence isolated from the Sargasso Sea
atgcatctaaaagatggggccatgccaaaatatgctgaattaatttataatggtttttggttctcaaaagctagatttaaattacagaaaactattgatcttaaaaagaataaagtaaatggatcagtaaaactaaaattgtacaaaggaaacattacaatcctttcaagacatagcagaagcaaagcttactcagtaaaaaaagtatcttttgaagagaataaatctttcaaaaagtcgaaagtagagagatttatattaggtgcggcaagaaagctaagagcttaga

SEQ ID NO: 316393 - DNA, 185 bp, Unknown
  Bacterial polypeptide expressing nucleotide sequence isolated from the Sargasso Sea
aatgattagcgttaataaagttgttctggcttattccggaggccttgatacctcggtgatcgttcgatggttgcaagaaacctatgactgtgaggttgtgacgtttacggcgggtatcggtcaaggtgaggaggttgggctagcgcgcgccaaagctgaagcattaggtataaaagagatatata

SEQ ID NO: 316394 - DNA, 259 bp, Unknown
  Bacterial polypeptide expressing nucleotide sequence isolated from the Sargasso Sea
gtatgcccccgagagggaggccctccaggctttcatcgaccagagccagtccaccgtcaccgggacggtccggctcaaactgtacaagggcaacgtcattaccgtgggccggaaatccgatctctccctctacgacgaggggatcgcgtccatggacgacgacgagagcgattatcagcccgaggacgccggtggattcatccgtctcaatgcgctccggctcaaggagcgttacaggaaacaggactacaagggataa

SEQ ID NO: 316395 - DNA, 283 bp, Unknown
  Bacterial polypeptide expressing nucleotide sequence isolated from the Sargasso Sea
gcataaaaaggatgagataatgccaagatatgctgaattaatttataatggatattggttttctaaagaaagatttaagttacaaaaaattattgataataaaagaaacaaagtaaacggctcagtaaaattgaagctatataaaggaaatatcactatttattcaagactaactaaaagcaaagcttattcaatgaaaaaagtttcgtttgaggaaaataaaacgtttaataaatctaacgtagagagattcattaattttcacaaaaaaaagctaaaataa

SEQ ID NO: 316396 - DNA, 762 bp, Unknown
  Bacterial polypeptide expressing nucleotide sequence isolated from the Sargasso Sea
caacagacgccaatatttggggtgcaacccatgaagcgaaagccttggaggagttgaaccaaagtatggagattgttgctccgattatgggtgtgcctcactggaatcaggatgaatcaatcgctgaggaagaggtttctctgagttttgaggatggctggccggtagctataaacggagcctcttacgatgaccctgtagcgcttgtccttgaagctaacttgatcgcgggccggcacggccttggtatgagtgatcaaatagagaatcgaattatcgaagctaaatcacggggaatctatgagagccctgctttggctttgcttttcattgcttacgaacggttggttagcgcgattcacaacgaagatacgattgagaattaccgcaccatgggtcgaaggctggggcgtttgctctatgagggccgatggtttgacccgcaaagtctaatgttgcgagagtcgttgctgcggtgggttggctcagccgtctccggtgatgtcacactacgccttcgtcgaggagacgattattcgattctgaacaccgaaggtccgaacctaacctacgaacctgatcgtttgtctatggagcgagtcgaggatcaagcttttgggccgcttgatcgcattggtcaattgaccatgcgcaaccttgatatcgacgacagcagatcgaagttgcatatctatggtgacgctgggaccctcgaagctaaccaggcgcttgggctggagtcgaaggttaaggatgcatagt

SEQ ID NO: 316397 - DNA, 107 bp, Unknown
  Bacterial polypeptide expressing nucleotide sequence isolated from the Sargasso Sea
aatggataaaataaataaagtagttcttgcatactcaggcggtttagacacatcagtcattttaaggtggctgaaagaaacgtatcaatgtgaagtagcaactttta

SEQ ID NO: 316398 - DNA, 821 bp, Unknown
  Bacterial polypeptide expressing nucleotide sequence isolated from the Sargasso Sea
ggtggagcgtccgccaggccgtatcggcctgctcagcccgggcccggatgcctggtacgcgggcatgttgccggggctgatcagcggccgtttcagccccgctgactgccgggtggagctgcagccgctgtgtcgcgcggccaaggtcgagttgatcgagggcgaaatcgccgcgctcgatgccgatacgcgcatcctgcagcttgcggacgggcgccaactgcagggcgaatggctgtcgctgaatgtcggtgccggtatggccataccgccgcagcagggcgatgccatgcaggtgctggccgccaggccgatcgaacggctgctcgaaggctggcagcagtggcagagcgagccccggcgcatggcgattctcggcggaggtgccggtggcgtggaactggctctggcgctggccgaccaggtgccggcgctggcgctgttctgcggtggctcgttgctcgacgggctggcccccgggctgcgcctgcgcgcgctggggcacttgcgccagcgcggcgtgcaggtgcgtgagcattgcccgattggacgcatcgaagacgactggctgctcagcggtgacgagccggtctggcgtgggcgccgtctgctgctggccagtggcgcacggccctggccgtggctggcagccagccaactgagcagcgatgcggccggcttcatcgccattcgtccaaccctgcaatgcgaatcccatgcgcagatcttcgctgttggcgacagcgccagtctcgacggcatgcgtcgcagtggccgtttcgcggtgcgtcaggcgccggtgctcaccgccaacctgcagg

SEQ ID NO: 316399 - DNA, 169 bp, Unknown
  Bacterial polypeptide expressing nucleotide sequence isolated from the Sargasso Sea
atggtaaaaaaaatagtattagcttattcaggtgggttagacacaagtgtaatattaaaatggttacagctaaaatacaattgtccagttgcaacctttacagctgatttaggacaaggagatgaactagagccagtaagagaaaaagcagaatcacttggagtaaaag

SEQ ID NO: 316400 - DNA, 887 bp, Unknown
  Bacterial polypeptide expressing nucleotide sequence isolated from the Sargasso Sea
catgacccagtacgatcttattttggccggggccggccatgcccaccttggcgtgttgcgccgctgggcgctggtggagcgtccgccaggccgcatcggcctgctcagccctggcccggaagcctggtacgccggcatgttgccggggctgatcagcggccgtttcagcccggcagactgccgtgtggagttgcagccgctgtgccgggcggccaaggtcgagctgatcgagggcgagatcgcgtcgctcgatgccgatgcgcgcatcctgcagctcgcagacggccgtagcctgcagagcgagtggctgtcgctcaacgtcggtgccggcatggccattccaccgcagcagggcgaagggatgcaggtgttggccgccaggcccatcgaacggatgctcgaaggctggcagcaatggcaggccgagccacggcgcatggcgattctcggtggtggggccggtggtgtggaactggccctggcgctggccggcaaggtaccggcgctggcgctgttctgcggcggaaccctgctcgacgggctggggccggggctgcggctgcgcgcactggggcatctgcgtcagcgcggcgtgcaggtgcgcgagcattgcccgatcggccgtatcgaggatgactggctgctcagtggtgacgagccggtatggcgcgggcggcgcctgctgctggccagcggtgcgcgtccctggccatggctgacggcgagccaactggccaccgacgcagccggattcatcgccattcgcccgaccctgcaatgcgagtcccacgcgcagatcttcgccgtcggtgacagcgccagcctcgacggcatgcgccgcagcgggcgtttcgcagtgcgtcaggcgccggtactcagcgccaatt

SEQ ID NO: 316401 - DNA, 277 bp, Unknown
  Bacterial polypeptide expressing nucleotide sequence isolated from the Sargasso Sea
agatttgattatgccaagatacgctaaacttatttataatggttattggtattcaaaagaaagatttaaacttcaaaaaattgtagatcttaaaagaggtaaagttaatggatcggtcaaacttaaactttataaaggcaatgtcataattgagtctagacaaacaaatagttctgcttactctttaaaaaaagtttcttttgaggaaaataaaacttttaataagtcaaacatagaaagatttatcaattatcacaaaaaaaaattaagatactag

SEQ ID NO: 316402 - DNA, 586 bp, Unknown
  Bacterial polypeptide expressing nucleotide sequence isolated from the Sargasso Sea
ccagaatatatttttcaaagaacggtttccacctgaaaaagcacctagcaaaccaacttatgtaaccgtaggatttaaaaaaggtgatcccatatcagtaaataataaaaaattagcaccagcaaaactacttcaaaaattaaatttacttgcaggtaagaatggagttggaagagttgatttagttgaaaatagatttattggaataaaatcgagaggagtttacgaaactccaggaggaactcttttgatgatagcacatagagctatggagtccgtaactttagataagaaaactatgcatgataaagatgaaattatgcctaagtatgctgaactgatttacaacggtttttggtattcaaaagcaagattcaaaatgcaaaaaatcgtagataaaaataaaattaaggtaaacggacaagttaaattaaaactttataaaggcaatattacaatcatgagtagaacatcttcaagcaaggcttattctatgaaaaaagtttcatttgaagataataccttttttagaaaaggggctattgaaaaattcctaaagatacatacatcttcattgaggaaataa

SEQ ID NO: 316403 - DNA, 368 bp, Unknown
  Bacterial polypeptide expressing nucleotide sequence isolated from the Sargasso Sea
tatttatgaaactcctggcggtacaattttaataagtgctcacagggcaatggaatccgtaacccttgataaagaaacaatgcataaaaaagatgccattatgtcaagatatgctgaacttatttataatggatattggtattctaaagaaagatttaaacttcaaaaaattgttgacctaaaaaaacacagtgtaaatggatccattaaacttaaactgtataagggtaatattacaattcaatctagaataactaaaagtaaggcatattcgatgaaaaaggtgtcatttgaagaaaataaggcttttaataaatcaaaagtagaaaaatttataaattttcaaaaaaaaaaaattaaaaattaat

SEQ ID NO: 316404 - DNA, 484 bp, Unknown
  Bacterial polypeptide expressing nucleotide sequence isolated from the Sargasso Sea
aatgggaaaaaaattatccccatataaacttttagaaaaactcaatcaattagcagggaaaaatggaattggtagagttgatttggtagaaaatagatttattggaataaaatcaagaggtatttatgaaactcctggcggtacaattttaataagtgctcacagggcaatggaatcagtaactcttgataaagaaacaatgcataaaaaagatgccattatgtcaagatatgctgagcttatttataatggatattggtattctaaagaaagatttaaacttcaaaaaattgttgacctaaaaaaacacagtgtaaatggatccattaaacttaaactgtataagggtaatattacaattcaatctagaataactaaaagtaaagcatattcgatgaaaaaggtatcatttgaagaaaataaaacttttaataaatcaaacgtagaaagatttattaattttcacaaaaaaaaacttagataa

SEQ ID NO: 316405 - DNA, 199 bp, Unknown
  Bacterial polypeptide expressing nucleotide sequence isolated from the Sargasso Sea
aatgccaacaaaaattgttttagcttattcaggtggattagacacaagtgtcattcttaagtggcttcaaaataaatatgaatgcccagtagttactttcacagcagatttaggtcaaggagaagaactttcactggttgaaacaaaagcaaaaagtctaggtgttgaagaaatatttattgaaaatcttcaagaggaa

SEQ ID NO: 316406 - DNA, 331 bp, Unknown
  Bacterial polypeptide expressing nucleotide sequence isolated from the Sargasso Sea
aatgctcatagagcaattgaatctgtaacattagataaagaaacaatgcataaaaaagatgagatagtggctaaatacgcaaaacttatttacaatggatattggtattcaaaagcaagatttaaacttcaaaaaattgtagacaaaaacagaaataaagtaaatgggactgttaaactaaagctttataaaggaaatatcattattgtttctagacaaacaaaaagtaaggcttactcgataaaaagagtttctttcgaagaaaataaatcgttcaaaaaatcaaatattgaaaaatttattaatcttcacaaaaaaaaattaaagtagt

SEQ ID NO: 316407 - DNA, 373 bp, Unknown
  Bacterial polypeptide expressing nucleotide sequence isolated from the Sargasso Sea
ctgaccggcgtgcgcacgcagcgcgccgcgctgttcgcgctgtccggcgacatcaccgcgcaatggctcggcaacgagggcggggtgctcgagcacgacgatcccgaattcgtgcaccagatgcgtgtcgcgctgcgccgcctgcgcacgctgatgcgcttcttcccgcgctttgccgatcgccagtggcgcgacacgctcggtgtcgacctgcgctggcttgcgtcgctgctcggcacggtgcgtgactgggacgtgttcgcgaccgaaagcctgcccgcactgatcgcggccgacggcggcgacggcgagtggaacggtacgctcgacgccgcgcaatggctcggcaacgagggcggggtgctcgagcacg

SEQ ID NO: 316408 - DNA, 265 bp, Unknown
  Bacterial polypeptide expressing nucleotide sequence isolated from the Sargasso Sea
ttatgaattaataaaaagtcgagctacaagtataggggcgacacaaagctatatcccagacttaagaaaagaatttgttgaaaattttatttttgaatctgttaaagctaaggccctatacgaaggaagaaacctacttggaacttcattagctagaccacttacagcaaaagctcagggtgaaattggtaaacaagaaaaagcacaattattatctcatggtgctactgggaaaggtaatgaccaagcaaggttcgaatttact

SEQ ID NO: 316409 - DNA, 211 bp, Unknown
  Bacterial polypeptide expressing nucleotide sequence isolated from the Sargasso Sea
aatgcttcaggctttaatagacaaaagtcaagaaagagtagaaggtgaggtaagaatatatctacgacaaggtacaatgaatgtaaaaggaagaaaatctaaatatagcctgtataataaagatttagcaacgtttgaagaagataaaatttataaccaaaaagatgcagaaggatacataaggattaagtctttaagattgagacattaa

SEQ ID NO: 316410 - DNA, 250 bp, Unknown
  Bacterial polypeptide expressing nucleotide sequence isolated from the Sargasso Sea
atgccaaaaaaaattgttttagcttattctggcggactagatacaagtgttatacttaaatggcttcaattgaaatacagttgtcccgttgtaacttttacagctgatattggtcaaggtgatgagttagacccagttgaaagcaaggctaaaagccttggggttcaagaaatatatattgaagatcttaaagaggaatttgtaagaaaatatgtttttcctatgtttagagctaataccactttatgaa

SEQ ID NO: 316411 - DNA, 435 bp, Unknown
  Bacterial polypeptide expressing nucleotide sequence isolated from the Sargasso Sea
tagctggtaaaaatggaataggaagagttgatttagttgagaatagattcattggtattaaatcaagaggcgtatatgaaactcctggtggaactttactgattcacgctcatagagcaatggaatcagtaactctagataaagaaactatgcataaaaaagaggagatcatgccaaattattcagaacttatttataatggatattggttttcaaaagcaagattcaaacttcaaagaattattgataaaaataaaaataaggtgaatggatcaattaaacttaaactttataaaggaaatattactatcttatctagacaaactaatagtaaagcctattcaatgaaaaaagtatcttttgaggaaaataaaacttttaataaattaaatatcgaaaaatttataaatttacataaaagaaaattaaaataat

SEQ ID NO: 316412 - DNA, 721 bp, Unknown
  Bacterial polypeptide expressing nucleotide sequence isolated from the Sargasso Sea
gatctaattaattatgcaaaaaaacatggaatacctattcctacagataaaaaaggagcgccgcccttctcagtagatgataatttattccatacctcaacggaaggtaaagttttggaaaacccaaagaattcagcacctgaatttatatttcaaagaacaacttcccctgaaaaggccccaaataaaccaagttttataacaattaattacaagaacggtgatccaattggtctaaatggaaaaaaattatctccagcgaaagtattgattaaactcaatcaattagccggcaaaaatggaataggcagagtggatttagtcgagaatagatttattggaataaaatcgagaggagtttatgaaactcctggaggaacattattgcttgtggcacacagagccgttgagtctgtaactctagataaagatacaatgcataaaaaagatgaggttatgccaaggtatgcagagcttgtttataatggttattggtattcgaaggaaagatttaaactacaaaaaatagttgatctaaaaagaaataaagtaaatggatctgttaaactaaaactttataaaggtaatattacaattcaatccagacaaacctcaagtaatgcttactcaatgaaaaaagtctctttcgaggaaaataaaactttcaataaatcaaacgttgaaagattcattaactttcataagaaaaaattaagataaa

SEQ ID NO: 316413 - DNA, 100 bp, Unknown
  Bacterial polypeptide expressing nucleotide sequence isolated from the Sargasso Sea
atggataaaataaataaggttgttcttgcatactcaggcggtttagacacatcagtcattttaaggtggctgaaagaaacgtatcaatgtgaagtagcaa

SEQ ID NO: 316414 - DNA, 437 bp, Unknown
  Bacterial polypeptide expressing nucleotide sequence isolated from the Sargasso Sea
attagctgaagaaaatggaataggtagagtggatttagttgaaaatagatttattggtgtaaaatcaagaggtatttatgagacacctggtggaactcttctattgaatgcacatagagcaattgagtctgtaactttggataaagaaacaatgcacaagaaagatgcaataatgtctaggtatgcagagttaatttataatggatattggtattctaaagaaagatttaaacttcaaaaaattgtagatctaaaaagaagtaaagttaatggatcagttaaattaaaactttataaaggtaatattactattcaatctcgagttacaaagagtagtgcttattcaatgaaaaaggtgtcttttgaagaaaataaaacttttaataaatcaaacgttgaaaaatttattaactttcacaaaaataagataagataag

SEQ ID NO: 316415 - DNA, 319 bp, Unknown
  Bacterial polypeptide expressing nucleotide sequence isolated from the Sargasso Sea
ggtacacacaaaacatgaaactaaattcaagactttggtggatgacgaatgggcatggatggtatattctggattatgggatgatccattaagagaagaattggatcaattcattgaacaagcccagaaacgtgtaacaggtactgttaagctaaaactttacaaaggaaatgtcagagtagttggaagagaatcaaaatattcactgtacagtcatgacattgccacatatggcaaagattctacatttgatcagaaattggcaaagggatttgtagaattatggggaatgcagacaacagaagctaataaattctag

SEQ ID NO: 316416 - DNA, 243 bp, Unknown
  Bacterial polypeptide expressing nucleotide sequence isolated from the Sargasso Sea
aatggagaaatctttgtcaaaaaaaatttcaaaagttgttcttgcatattcaggaggtctagacacttctgtaattttaaaatggcttcaagacaaatatgaatgtgaagtagtcacttttacagccaatattggtcaaggagatgatgtaaaagttattaaatctaaggcgcaaaactttggagttaaggatattttcattgaaaaccttgaagaaacttttgttaaaattatgtttttcaa

SEQ ID NO: 316417 - DNA, 316 bp, Unknown
  Bacterial polypeptide expressing nucleotide sequence isolated from the Sargasso Sea
tatgaaaagaaaaaaactagttttagcttattcagggggtcttgatacctcagtaattgttcattggcttaataatcagggatatgaagtaatcgctctttgtcttgatttaggacaaaaaggggaagacattgagaaaatacttgcaaaaggcaaaaaggctggtgctgcaaaagttctggttgaaaatgtagaagaggagtttgttaaggactatgtttttaactctattaactggaatgccttatatgaaggaacttatctgcttggaacttctctagcacgtcctttgattgccaaaaaacaaattgaaatt

SEQ ID NO: 316418 - DNA, 223 bp, Unknown
  Bacterial polypeptide expressing nucleotide sequence isolated from the Sargasso Sea
tctaaagaaagattcaaacttcaaaaaattatagatttaaaaaaaaataaagtaaatggatcgattaaattaaaattatataagggaaatgtctctattctatcaagaataaccaaaagcaatgcttactcgatcaaaagagtttcatttgaagaaaataaaactttcaacaaaagtaatgttgaaaaatttatcaattttcacaaaaaaaaattaagataac

SEQ ID NO: 316419 - DNA, 643 bp, Unknown
  Bacterial polypeptide expressing nucleotide sequence isolated from the Sargasso Sea
ttatttcatacgtctacggagggcaaagttttagaaaatccaaaaaattctccaccagaatttatatttcaaagaacagtttcaccagaaaaagctcctaataaaaaaactaagctcagaattgcctttaaaaatagtgatccggtatcattaaacggacaaaaactaaaaccagaaaaacttttggaaaaattaaatttactagccggaaaaaatgcggttggtagagttgatctagttgaaaatagatttattggaataaaatcaagaggagtttatgaaactcccggagggacagtactatacatcgctcatagagctattgaatcagtaacgttagataaagaaacggtacacgcaaaagagagaataatgcctgaatatgctgaattagtttataatgggtattggttttcaaaaaaaagattaaaattacaaaaaataatcgacaaaaacaaaaataaggtatcaggtgaagttgtcttaagtctctacaaaggaaatataaatattttatctagaagtacaaaaaacaaagcttattcaatgaaaaaagtttcttttgaggaaaataaaacttttaataagtcaaaagttgaaaaatttattaaataccactctaaacagttatataaatcctaaa

SEQ ID NO: 316420 - DNA, 178 bp, Unknown
  Bacterial polypeptide expressing nucleotide sequence isolated from the Sargasso Sea
aatggataaaataaataaagttgttcttgcatactcaggtggcttggatacgtcagtcattttaagatggctaaaagaaacctataaatgtgaagtggcaacttttacagcaaatctaggtcaagatgaagactatgatttagtaaaagcaaaggctgaaaagcaaggaacaaaagaa

SEQ ID NO: 316421 - DNA, 681 bp, Unknown
  Bacterial polypeptide expressing nucleotide sequence isolated from the Sargasso Sea
ataaaaaaggtgaaccgcctttttctgtagatgataatatttttcacacttcaactgaaggaaaaattttagaaaatcctaataattcagctccagagtttatttttcaaagaacaaaagcattagataaaactcctaataaagcttcgattataaaaattggatttaaaaatggagatccaatttcaatcaatggaaaaaaacttagtccagaaaaacttttacaaaaattaaacttgatagcaggaaataatggggttggtagagttgatttagttgaaaatagatttattggaataaaatcaagaggtgtttatgaaacacctggcggaactgttttatatgttgctcatagagcgattgagtcagtaacactagataaagaaactatgcacgaaaaagaaagaataatgcctgtttatgctgaactagtttacaacggatattggttctcaaaaaaaagggtaaagctacaaaaaatcatagataaaaaaagaaatctggtcgtaggacaagttgtcctaaagatttttaagggaaatgtgatacttctttcaagaaagactaataataaagcatattcgatgaaaaaagtttcttttgaagaaaataaatcttttaacaaaaagaaagttgaaaactttattaagtaccactcaaaaaaattgaataaattataaa

SEQ ID NO: 316422 - DNA, 151 bp, Unknown
  Bacterial polypeptide expressing nucleotide sequence isolated from the Sargasso Sea
atgcaacaggtaaaaaaagttgtactagcttattcaggtggcgttgatactagcgtttgtattccatatttaaagaatgaatatggcgtttcagcacgttgttacttttgtagcagatcttggacaaggcgaggatttagaacttattagg

SEQ ID NO: 316423 - DNA, 1273 bp, Unknown
  Bacterial polypeptide expressing nucleotide sequence isolated from the Sargasso Sea
gctgttcacgctcgtctatctggtgcaggcctggctacgctccgaaggcgtcaatctgaaggaaatcggcctgtttgcgctgatccagttcccgtacacctggaaattcgtctgggcgccgctgatggaccgctacgtgccgcgtttgccgggctggcgtccgggcagacggcgcggctggatgctggtcacgcagattctggtcgcgggcgcgattgccgcgctaggtttcgtgtcgccgcgcgactcgatctggacggtggcggccttgaccgcgctggtcgcgttcttcggcgcgagccaggacatttcgatcgacgcctaccggcgcgagttgctgagcgatacccagcagggtcttggcaatgcggtgcacgtgaacgcttacaagatcgccgcgctggtgccgggttcgctagcgctgattttgtccgaccatctgccgtggaccaccgtcttcatcgtcaccgctgcattcatgctgcctggcatggttatgacgctggtcgtgcgcgagcccgaagtgcatggcacgccgccgaagaatctgcgcgacgcgatcatcgagccattccacgagttcattcaacgcgacggctggcgcggtgcgctgttcgtgctcggcttcatctttctttataagctcggcgacacgatggcgaccacgctgtccacgtcgttctttctcgacatcggctattcgcgcacgcagatcggcgtgatcgccaagaccaccgcgttcggcgcgagtctggcgggcgggattgtcggcggaatctggctcatgaaaatcggcatcggccgcgggctgtggatcttcggcatcctgcagatggtgtccacgctcggctttgcatggcttgcgcatcttggcccggcgtcgccgggtcttgccgtgatctatgacatcgctgtctggctgagccagggtacgtcgaagctgcttgcgctagtcggcatcgactgggcggtgcagctcgatccgcgctcggtcgcgctggcgctggtctacggtctcgaaaccttcgctaccggtctgacgatggcggccttcaccgcttacatcgccagcaccaccgacccgcgttacaccgctacgcagttcgcgctctttacgagcctggcttcggtaccgcgcacgctggcatcggcggcaagcggctatgtggtcgcgcggatcggctggttcgactacttcatcgtgtgtaccgcgctggcattgcccggcatgctgcttctgctgcgcatcgctccgtggagaacccggtcgtga

SEQ ID NO: 316424 - DNA, 1186 bp, Unknown
  Bacterial polypeptide expressing nucleotide sequence isolated from the Sargasso Sea
atgaaaaataaaactatagttttagcttacagtggaggtctcgatacttcattttgtttaaagagactatctagtgatggctttgatgttcacgctatattagtgaatactggtggctttaataaatcagaactaatcaatataaaaaaacaagcgattgaattaggtgcttcaaaatttatttcaattgatgcaaagaaaccattctacgataaaataattaagtttttaatttttggtaatgttctcaagaataattcttatcctctttcagttagttctgaaagaataatacaagcaattgaaataatgaattattcaaaaaaaaataatataaatactattgctcatggatcaactggtgcaggaaacgatcaagtgagatttgattcaatttttcaaatattaaatccaaatattaaaataattactccaataagagataataatattacaaggaaacaggaaatatcatacttaaaaaaaatgggtataaagttaaaatggaataactctaagtactcaataaacaaaggagtatggggtactacaattggtggtgatgagactttaacctcttataaaactcttccaaacaaggcatttacaaaaaaattaatagaaaagagaaaaaaagtattaaatataaaatttataaaaggtgaaatagtatcaattaataataaaagatctaatcccattgatttgatagattaccttgaggaaatatccagtaaatatgctattggaagggatattcacgttggtgatactataataggtattaagggtagagtaggttttgaagcatctgcagcaagaattataattaaggctcatgaacttttggaaaagcatactatgtcgaaatggcaaatttttcaaaaagaatctatttcaaaattatatggtatgttaatccacgaagggcaatactttgatccagtaattgaagatattgaagcatattttgaaaaaagtcaaagatatgtcactggaaatgtttttgtggaattaagtccatataattttaaattaaatggaattaaatctaaacatgatttaatgaatgataattcaggagtttatggagaagaaaatttaaactggtcttctgatgacattaaaggatttattaaaatttattcaaattcttcaagaatatttaaacaaataaataaatagt

SEQ ID NO: 316425 - DNA, 709 bp, Unknown
  Bacterial polypeptide expressing nucleotide sequence isolated from the Sargasso Sea
ctgggaatacagatcgttgatcattttccagatgattccgtcctcattagcattgcaccatggagaacaggtgaccaaatcgacaccatccaagaattgaatcaagttaggtgggtcggtcagtttcctgcgatgtggaagatttctaattcactgtacccgttaatggatctcgatggggccctggttgacctcgatatcactccttctccctctaactctcccgacgacctatcgaatcttgaaagggaactttttgagaaaatgggagaattacacctgcagtcacactgcgacaaatatctatgtaaggtaaaatccgctaaaacatctctaatatcctcccttgccactgattcccgggttctaagggtggagatggggcctgtcctgacaatacataactcaaatgctagcatgatctcaggagtagactatgcaagatcactatcggaattagatttacgcggagagggagaggtcataggcatttcagacacgggtcttgacgtagatcacggggacttcgggaatcgtctcagaaatccgatctacaacttatttggtccagacagttctggtgccgactccaatagtggtcacggaacccatgttacagccactctccttggagacgggacgggagactcaaattccacgggcattgttcccgagtctacatttcatttctaccagttagaagtggata

SEQ ID NO: 316426 - DNA, 1188 bp, Unknown
  Bacterial polypeptide expressing nucleotide sequence isolated from the Sargasso Sea
ggtggctacagcttcagccaaagccaatacaaccggcgtgacccaagcaaaacgtcaattaggttcgaatattaaacctttcatctatgctgcggcattagagaaaggctttaccctcgcgactctgattaacaacgcgccgattaacaaacccgatattagccaaggtacggcgtggcgccctaaaaactcgcccgatatctatggcggtccaacacgcctgcgtgtgggcttagcgcaatcgatcaacgtaatgtcggttcgtgccatgcgtcatattggtttagatgctgccatcgccgagctgactaagtttggcttcgaccctaacgacttacctcgtaacgagtcgttagccttaggttctccttcggtcaccccgctgcaagtggcaaccgctttcaacgtgttcgcgaacggcggcttcttggtggaaccttactatatcgaacgagtagaagactccttcggtaatgtgattgagaaggccaatccgaccttggcctgtaagcctaacaacggctcaatccagccgaacatcgatccaatgagttttggcgagccaacgactactcagaccgatgaacctgttgcccattgctttgagcaaacgggccgttatgctccgcaaattatctctgaacaaacggcattcctgatcaccgaagcgctgaagagtgtgatctggggtggtggcgattggagtaaaggcactggctggcaaggtacagcttggcgtgcggcgcagttaatcaaacgtcatgatatcgctggtaaaacgggtacaaccaacgaatcacgcgatacttggttcagtggttttggcccgacactgaccagcactttctgggtgggttttgacgatcatggtcgccagttaggcagaaccgcatggaactctaacggcgaaaaggatcagatcacggggaccgaggcgggcgctaagaccgcaggcccaggctggaacgagtttatgaataacgtgctgaagggcgtacctgaaaccacagcgattccgcccgaaggaattgtctcggtgcggatcgatctagcgaccggtaagctaactcgtaagacagattacaccagcgcatttgaatactttatctcgggcactgaacctaaggaatacatcagtgaaagccaagatgaaaacaacttattcatcgatgcgccgacagacgattt

SEQ ID NO: 316427 - DNA, 654 bp, Unknown
  Bacterial polypeptide expressing nucleotide sequence isolated from the Sargasso Sea
tttctatagatgacaatttattccatacatcaactgtaggtaaaatattagaaaacccaaaaaatccagctccagaatttatttttcaaagaactatttctcctgaaaaagcgccgaataaaccaacatttgtgacaattaattttaaaaatagcgatccgatcgggatcaacggaaaaaaattatccccatataaacttttaggaaaactcaatcaattggcagggaaaaatggaattggtagagttgatttggtagaaaatagatttattggaataaaatcaagaggtatttatgaaactcctggcggcacaatactgataagtgctcatagagcaatggaatccgtaacgcttgataaggaaacaatgcataaaaaagatgctgttatgtcgagatatgctgaacttatttataatggatattggtattctaaagaaagatttaaacttcaaaaaattattgacctaaaaaaaaacactgtaaatggatccattaaacttaaactgtataagggtaatattacaattcaatccagaataactaaaagtaaagcttattcgatgacaaaagtatcatttgaagaaaataaaacttttaataaatcaaatgtagaaaggtttattaattttcataaaaataaacttagataaa

SEQ ID NO: 316428 - DNA, 226 bp, Unknown
  Bacterial polypeptide expressing nucleotide sequence isolated from the Sargasso Sea
tatgaatagtgttcaaaaattttcatcaggtgaagttaagctaaagctctacaaaggaaatgtaactgttattggaagaaaatcaaagttttctctttatgactatgatatgtctacatactctactacagatacttttaaccatcaatctgctgaaggatttattgatatttactctttgcctgcaagaattcaggcaaaaaaacaaaaatttaacgatttataa

SEQ ID NO: 316429 - DNA, 208 bp, Unknown
  Bacterial polypeptide expressing nucleotide sequence isolated from the Sargasso Sea
aaggcttaggttatataaagggtccgtaaatactgttggtaggtggtcggagtacagcttgtattctgaaaaacatgtgacctttgaagatgatgcaggtgcttacgatcaaaatgatgcagctggttttattcagttgaatgcattacgcctcaagttattggcccatcagaaactaaaaaatactaaggggcctaaacttagctga

SEQ ID NO: 316430 - DNA, 387 bp, Unknown
  Bacterial polypeptide expressing nucleotide sequence isolated from the Sargasso Sea
taggaattaaatccagaggaatttatgaaactcctggaggtactgttttaatttttgctcatagagctatggaatcaataacactaagtaagaaacttatgcatcaaaaagataagattatgccaagatatgccgaactcatttataatggattttggttttcaaaagaaagaataaaattacaaaaaataattgataaaaaaaaaaataaagtacaaggagaaataacagttaaactctacaaaggtaatatatatataattggaagagaatctaataaaagcatttattcaaaaaaaaaatcttcattcgaaagtggtaaagtattctcaaaaaaatatgtagaaaaattcataaaagttgcggcaaaaaggctcaaaaaataaa

SEQ ID NO: 316431 - DNA, 488 bp, Unknown
  Bacterial polypeptide expressing nucleotide sequence isolated from the Sargasso Sea
aatgtcaaaaggaaaatgtatactagcttattctggtgggatggattcaactatttctgtagtatggattaaagaaaaatatgacctagatgttattacattaactgttgatttaggtgcagggccagaaatagaaggtgttcgagaaaaatcaaaaagtgcaggagctatagattctgtagttatagatgcaaaagatgaatttgtaaacgaatatattttcccagctttaaaatcaggtggtatgtatgaagatgtctatgcactatccactgcattggctaggccgttaatgtctaaaaaaatagtagaaactgccaggaaatatggagctgaatatgtatctcatggatgtacaggtaaaggaaatgatcaagtgcgatttgatgcatctataatgactctttctggagacggtgaatcaatcaaaattattgctccagcgagagaatggggtatgacaagagatgaagaaaaagaatatgcag

SEQ ID NO: 316432 - DNA, 477 bp, Unknown
  Bacterial polypeptide expressing nucleotide sequence isolated from the Sargasso Sea
taagtccagaaaagcttttaaataaattaaatattctagctggaaaaaatggagtaggaagagtagatctagttgagaatagatttattggaattaaatcaagaggtgtttatgaaactcctggtggtactttgttgtatgctgcacatagagctatagagtctgtaactcttgataaagaaactgctcataaaaaagagagaataatgccagagtatgctgaactagtttataacggttactggttttctaaaaaaagattaaaattacaaaaattaattgataaaaaaagaggtaaagtatctggtgatattattttaagtttatgcaaggggaacataactattctgtcaagaagaacaaaaaataaagcttactcaatgaaaaaagtttcttttgaagagaataaaacttttaacaaaaaaaaggttgaaaacttcataaaatttcactctaaacagttaaacaaagcataaa

SEQ ID NO: 316433 - DNA, 319 bp, Unknown
  Bacterial polypeptide expressing nucleotide sequence isolated from the Sargasso Sea
ggcaattgagtctgtaactttagataaagatacaatgcataaaaaagatgaggttatgccaagatatgctgagcttatttacaatggttattggtattctaaggaaagatttaaacttcaaaaaataatcgatctaaaaagaaataaagtaaatggatcagttaaactaaaactctataagggaaatattacaattaaatcgcgacaaacatctagtagtgcctactctatgaaaaaagtttctttcgaggaaaataaaactttcaataaatcaaacgttgaaagatttattaactttcataaaaaaaaattaagataa

SEQ ID NO: 316434 - DNA, 166 bp, Unknown
  Bacterial polypeptide expressing nucleotide sequence isolated from the Sargasso Sea
ttggttaagcttaaattatataagggaaatgttacaattttatcgagacaaagcaaaagtaaagcttactctgtaaaaaaagtttcttttgaggaaaataaatcttttaaaaaatcaaaagttgaaagatttatatcaagtgcgtcaagaaagcttagagcttaaa

SEQ ID NO: 316435 - DNA, 318 bp, Unknown
  Bacterial polypeptide expressing nucleotide sequence isolated from the Sargasso Sea
gatgcagcaggtaaaaaaagttgtactagcttattctggtggcgtagacacgagcgtttgtattccatatttaaagaatgaatatggaatttcagaggtagttacttttgtagcagatcttggacaaggagaggacttagaacttattagacaaaaagctttaaactctggtgcatctaaatcaatcgttggcaatttaattaatagttttgttgagagatacgcttttccagcgattagagcaaacgcactatatttagataaatatcctttatctactgctcttgctaggcctttaattgctgaaaatctcgtaaa

SEQ ID NO: 316436 - DNA, 663 bp, Unknown
  Bacterial polypeptide expressing nucleotide sequence isolated from the Sargasso Sea
gtatgacccaaaatttatggggaagggcaattgaaggaggagtattagaaaatccatttaatgaacctccagacgatgcgttcatttggattaagacaaaaaatttgcccgaaaaaccttcctatttgaaaattaaatttgttaaaggagtgccaacagaagttgatggtaaaaaactacctcctgtaaaattaattgaatatatcaataaaaaagcaggaaataatggtgttggaattgttgatcatattgaagatagggtggttggaataaaatcacgagaagtgtatgagactccagctgcaatttgtctgatagaagcacattccgatcttgaaaaaatggtacatacaaaacatgaaacaaagttcaaaacattagttgatgacgaatgggcatggatggtttattcgggtttgtgggatgacccattaagaaaagaattagatcaatttatcgaacaagctcaaaaacgtgttactggtactgtaaagctaaaacttcacaaaggaaatgtcagggtagtcggaagagaatcaaaatattcactttatagtcacgacatagccacttatggaaaggattccacgtttgatcagaaattagctaaaggtttcgttgaattgtggggaatgcagtcaacagaagctaataaattctaga

SEQ ID NO: 316437 - DNA, 349 bp, Unknown
  Bacterial polypeptide expressing nucleotide sequence isolated from the Sargasso Sea
ggtactttgttaatgcatgcccatcgtgctatggagtctgtaactcttgataaagatacgatgcataaaaaagatcaaattatgccaagatatgcagagcttatttataatggctactggtattcgaaagaaagatttaaacttcaaaaaattgtggacctgggtaaaaataaagttaatggttcagttaaactaaaactttacaaaggaaatgttacaataatttctagacaaactaagagtgcagcctactcaatgaaaaaagtttcttttgaagaaaataaaacctttaataaaacaaatgttgaaagatttattaattttcataagaaaaaactacgttcttaat

SEQ ID NO: 316438 - DNA, 408 bp, Unknown
  Bacterial polypeptide expressing nucleotide sequence isolated from the Sargasso Sea
atcttgttgaaaatagattcctaggcatcaagtctagaggagtttatgaaactccaggaggtacattgttaatccatgcacatagagcgattgagtcagttacgcttgataaagaaacaatgcacaaaaaagatgcaataatgtcaaggtacgcagaattgatctataatggatattggttttcaaaagaaagatttaaacttcaaaaaattgtggatttgaaaaaaaataaaataaatggatctgttaaactaaaactttataagggaaatattacaattcaatcaagaatgacaaaaagcaatgcttactcaatgaaaaaagtttcgtttgaggaaaataaatcatttattaaatcaaatgttgagaaatttataaattttcataaaaaaaagttaagaaactagc

SEQ ID NO: 316439 - DNA, 781 bp, Unknown
  Bacterial polypeptide expressing nucleotide sequence isolated from the Sargasso Sea
tattttggacctaaaataaaaattattgcaccatggagaatttggaaattaaaatcaagaacagacctaataaaatatgcaaaaaaacatggtatacctattccaaaagataaaaaaggcgctcctcctttttcaatagatgacaatctttttcatacatccacagaaggaaaaattttagaaaatcctagaaacattgcacctgaatttatatatcagagaactacagcacctgaaaaagcacctaataaaccaagttttgtaacaattaattttaaaaatagcgatccatttgcaattaatggaagaaaattgtctccatcaaaattattaaaaaaactcaatcagatcgctggtaagaatgggattggaagaattgatttagttgaaaatagatttattggaattaaatctagaggagtatatgaaactcctggaggaactttgctaatttatgcacatagagcaatggagtctgtaactttagataaaaaaacaatgcataaaaaagatgaaatcatgccaaaatttgcagaactaatatataatggttattggttttcaaaattaagatttaaacttcaaaaaattgtggataagaacaaatataaagttaacggatctattaaacttaaactttacaaaggtaatataactatattatcgagacaaactaaaagtaatgcatattcgatcaaaaaagtttcatttgaggaaaacaaaactttcaataaattaaatgttgaaaggtttataaatttccataaaaaaaagttataat

SEQ ID NO: 316440 - DNA, 334 bp, Unknown
  Bacterial polypeptide expressing nucleotide sequence isolated from the Sargasso Sea
atgcagcaggtaaaaaaagttgtactagcgtattctggaggggtagatactagcgtttgtattccatatttaaagaatgaatatggaatttcagaagtagttacttttgtagcagatcttggacaaggcgaagatttagaacttattaggcaaaaagctttaaattctggcgcatctcaatcaatcgttggtaatttagttaataattttgttgagagatacgcttttccagctattagagcaaacgcattatatttagataaatatcctttatctacagctcttgcaagacctttgattgctgaaaatctcgtaaatatgctagagagataat

SEQ ID NO: 316441 - DNA, 656 bp, Unknown
  Bacterial polypeptide expressing nucleotide sequence isolated from the Sargasso Sea
tttttctgtgattgataatctatttcatacctcaacagaaggaaaagcactgagggatccaaaaaatcctgcacctgattttatttttcaaagaacactttctcctgaaaaatctccaaataaacccactttcatagttatcaattttaaaaatggagatccggttggaatagatggtaaaaaattatccccatcgaatcttttaactaagttaaataatgttgcaggtagaaatgggattggaagggttgatttagttgagaatagatttatagggattaaatctcgaggagtttacgaaacaccaggcggttcattattaatgattgcacatagagcaatggagtctgtaacgcttgataaaaaaataatgcataaaaaagatgagattatgccaagatatgctgagcttatctacaatggatattggtattctaaagagagatttaaattacaaaaaataattgataataatagaaagaaagttaatggctcagttaaattaaaactatataaaggtaatataaccattcattcaagaaggacgaaaagtaaggcttactctatgaaaaaagtatcatttgaggaaaataaaactttcaataaatctaatattgagaaatttatcaattttcataaaaaaaaattaagataaa

SEQ ID NO: 316442 - DNA, 385 bp, Unknown
  Bacterial polypeptide expressing nucleotide sequence isolated from the Sargasso Sea
ataaaatcaagaggtgtttacgaaactcctggaggtaccttattaattaatgctcatagagcaatcgagtctgttaccttggataaagaaaccatgcataaaaaggatgaaataatgccgaaatacgcggaactaatttataatggatattggtattcaaaggcaagacttaagcttcaaaaaattattgacttaaaaagaagtaaagttaatggagttgttaaactcaaactatataaaggcaatgttacaattgtatctagaataactaaaagtaatgcttattcgatgaaaaaagtttcgtttgaagagaataaatcatttaacaaatctagtgtagaaagatttattaacttgcataaaaaaaaattaagatctttttaat

SEQ ID NO: 316443 - DNA, 339 bp, Unknown
  Bacterial polypeptide expressing nucleotide sequence isolated from the Sargasso Sea
aagctagaagagcaatagagagtattactttagataaaggagaatcacatattaaggatgaattgatgcctaaatatgctgaagtaatttataatggtttttggttttcttctgaaagaatttcaatgcaaaaattaatagattcaatgtcacataaagttaatggagatgtcaaaattaaaatatttaaaggtaacgtaattatattaggtagaagatcaagcaactctctttatgataattcattagtttcatttgatgaggtaggtgaatataatcaaaaagatgcagaaggatttattaagataaactcaataagacttcgtaaaaataattaat

SEQ ID NO: 316444 - DNA, 365 bp, Unknown
  Bacterial polypeptide expressing nucleotide sequence isolated from the Sargasso Sea
aatgtctaaaaaaattgtactggcatattctggggggctagataccagtgtaatactgaagtggcttcagcaagaatttaattgtcccatagcaacatatactgcggatattggtcaaaatgatgactttaaggaaattaaattaaaagcagaaaaaatgggtgttaaagaaatttgtattgaagatttaaaggaagaatttgtaaaagattatgtatttccaatgttcagggctaatgcagtatatgaaggggtttatttattaggaacagcaattgcaaggcctttaattgcaaaaaaacaagttgaatatgcaaattcaattggcgcagatgctgtagcacatggatcaactggaaaaggaa

SEQ ID NO: 316445 - DNA, 296 bp, Unknown
  Bacterial polypeptide expressing nucleotide sequence isolated from the Sargasso Sea
aatgaagaaaattgttttagcctactcaggcggtttggatacatctattattttaagatggttacaagaaaactataaagctgaagtgattgcttatacctctgatattggtcaaataattgataagagaaaaattattagaaatgcgaaaaaattaggtgttaaaaaaataattattgagaatctgaaaaatacttttgtcaaagattacgtttttcctatgataagagcccacgcagtatatgaaggagtttatttactaggcacatcaatagcaagaccgttgattgcaaaaa

SEQ ID NO: 316446 - DNA, 589 bp, Unknown
  Bacterial polypeptide expressing nucleotide sequence isolated from the Sargasso Sea
aaactctgctcctgaatttatatttcaaagaaccaacgctccagaaaaagccccgaataaaccaacatatgtaataataaattttaaaaatagtgatccaattggattaaatggaaaaaaactaacacctgcaaaacttcttgaaaaattaaatcaattggctggaaaaaatggaattggaagagtggatttagttgaaaatagatttattggaataaaatcaagaggagtttatgaaacaccaggtggaactcttttattaaatgctcatagagcgattgaatctgtaactttagataaagaaacaatgcataaaaaagatatgataatgcctagatatgcagagttaatttataatggatattggtattctaaagaaagaattaaacttcagaaaattgttgacctaaaaagaaaaaaagtaaatgggtcagttaaacttaaactttataaaggcaatattactattcaatctcgagttactagaagtggggcttattcaatgaaaaaagtttcatttgaggaaaataaaacttttaataaatcgaatattgagagatttattaactttcacaaaaataagctatga

SEQ ID NO: 316447 - DNA, 364 bp, Unknown
  Bacterial polypeptide expressing nucleotide sequence isolated from the Sargasso Sea
aatgaaaaaaaaaagaaagattgtactggcctattcaggtggcctagatacttcaataattctaaaatggcttcaggaaaagtataatgcagaagtcatatcttatactgcagatattggacaaaaaattgaaataaaaaaaatttttaaaaatgcaaaagcacttggagttaaaaaagtaattattgaagatttaaaaaatttatttgtaaaagaatatatatatccaatgataagaggacacgccatttatgaaagggtttatttgctgggaacttctatagcaagacctttaattgcgaaaaggcaaattagcatagctaaaaaatataaagcttatgcagtttctcatggttcaaccggt

SEQ ID NO: 316448 - DNA, 496 bp, Unknown
  Bacterial polypeptide expressing nucleotide sequence isolated from the Sargasso Sea
gagatcattcaaaaagctaatgaactttcaggtgtgcatggttttggaagaatagatatgattgaagacagagtagtagggattaaaagtagagaaatttacgaaacacctggcctcttacttttaattaaagctcacaaagaattagagagtattacattaaacccagacgttattgattttaaaggaatagtggaaaaaaaatggggtcaactagtttatcaagggttttggtttgggcctcttaaagatagtttagatgcatttatttcgtcgactcaaacttcagttaacggaagagtaaagattagacttcataagggcaacgcagtagtaattgggagaatgtctgacaataattcactttacagggaagatttggcaacatatagcaaagacgatatttttaatcattctttagctgagggttttatttatatgtggggtatgtcaaataaaatatgggcagagttaaattcaaaaatcaaagattaat

SEQ ID NO: 316449 - DNA, 424 bp, Unknown
  Bacterial polypeptide expressing nucleotide sequence isolated from the Sargasso Sea
tggaattggaagagttgatcttgttgaaaatagattcctgggcatcaagtctagaggagtttatgaaactccaggaggtacattgttaatccatgcacatagagcgattgaatcagttacgcttgataaagaaacaatgcacaaaaaagatgcaataatgccaaggtacgcagaattgatctataatggatattggttttcaaaagaaaggtttaaacttcaaaaaattgtggatttaaaaaaaaataaaataaatggatctgttaaactaaaactttataaaggtaatattacaattcaatcaagaatgacaaaaagcaatgcttactcaatgaaaaaagtttcgtttgaagaaaataaatcatttattaaatcaaatgtagagaaatttataaattttcataaaaaaaagttaagaaactag

SEQ ID NO: 316450 - DNA, 490 bp, Unknown
  Bacterial polypeptide expressing nucleotide sequence isolated from the Sargasso Sea
catgaatagagaaaaactagttttagcttattctggtggtcttgacacctctgtaattgtacattggctcaataaccaaggatatgaagtaatcgctctttgtcttgatttaggacaaaaagtagaagacttggatgaaatccttgaaaaaggggaaaaagccggtgctgcaaaagttataatagaaaatgtagaagaagagtttgttaaggattatgtttttagctccattttctggaatgccttatatgaaggtacttatctgcttggaacttctctggcacgtccactgattgccaaaaaacagattgaaattgcagaattggtaggtgcttcagctgtatctcatggtgcaacaggcaaaggcaatgatcaggttcgctttgagttaagttactatgcacttaaacctgatattagagtgattgctccctggaaaattcccgagttttacaagaaatatcctggacgtactgaattactgggctat

SEQ ID NO: 316451 - DNA, 334 bp, Unknown
  Bacterial polypeptide expressing nucleotide sequence isolated from the Sargasso Sea
atgaaaaaacaaaaaaagattgtgctcgcctattcaggtggtttggatacgtctatcattctcaaatggcttcaggaaaattatgatgctgaagttatagcatacactgctgatattgggcaggaaatggatagaaaaaaaataattaagaatgcaaaaaaattgggagttaaaaaaatcataattcaagatttaaagaacatttttgttaaagattatgtttatccaatgataagaggtcatgctctttatgaaggtgtttatttattaggcacatcaattgcaaggccactaattgcaaaagatcaaattagagtagctaaaaaatttaatg

SEQ ID NO: 316452 - DNA, 423 bp, Unknown
  Bacterial polypeptide expressing nucleotide sequence isolated from the Sargasso Sea
aaaatggagttggcagagttgatttggtgaaaaatagatttattggaataaaatctagaggagtttatgaaactccaggtggaacttttttaatgattgcgcatagagcaatcgagtccgtaactttagataaacaaacgatgcacaaaaaagatgaggttatgcctaagtatgccgagctcatttacaacggtttttggttttctaaagcaagacacaagttacaaaaaatcgtagacaaaaataaaaacaaggtgaacggaaaagttaaactaaagttgtataaaggtaatattacaataatttcaaggcaaactaaaagtaaggcatattcgttaaaaaaagtgtcattcgaagaaaataaaacttttagtaaaaaaaatgtagaaaatttcattagaaaaaattttaaaaagttgtgag

SEQ ID NO: 316453 - DNA, 619 bp, Unknown
  Bacterial polypeptide expressing nucleotide sequence isolated from the Sargasso Sea
acctgaagatatatttgcgataacatcgtcaattgataattcacctgattctcctcaagatatagaaattgtctttaaaaatggatttccagtaggaattaatgatgaatttttaacaccagtagagattattcaaaaagcaaatgatctttcaggtgctcatggttttgggagaatagatatgattgaagatcgagttgtaggaattaaaagtagagagatatacgaaacacctggccttttacttttaatcaaagctcataaagaattagagagcattacattaaaccctgatgttattgactttaaagggatagtggaaaaaaaatggagtcaattagtttatcaaggtttttggtttagccctctcaaggagggtttagattcctttatttcatctactcaaacttcagtgaatggaagagtaaagattagacttcataaggggaacgcaatagtaatcggtagaatgtctgaaaacaattcactttacagggaagacttggcaacctatagcaaagacgatgtttttaatcattctttagcggagggttttatttatatgtggggtatgtccaataaaatatgggctgagttaaattcaaaaacaaaggattaa

SEQ ID NO: 316454 - DNA, 131 bp, Unknown
  Bacterial polypeptide expressing nucleotide sequence isolated from the Sargasso Sea
aaaaaagattaaagttattgccccgtggagagagtggaagctacaatcaagaactgatttaataaaatatgccaaaaaatataaaatccaattccaaaagataaaaaaggtgcgccgccattttctgtaga

SEQ ID NO: 316455 - DNA, 340 bp, Unknown
  Bacterial polypeptide expressing nucleotide sequence isolated from the Sargasso Sea
atgaaaaaaattgttttggcctattctggaggtcttgatacttctataatcttacgttggctccaaaaaaattataaagctgaagtgattgcttataccgcaaatattggtcaagttattgataaaaaaaaaataataaagaatgcaaaaaaactaggagtaaaaaaaataataattgaagatctaaaaaatacttttgtcaaagagtatgtttttccaatgataagagcgcacgctttatatgaaggtgcgtatttattgggaacatcaatagcaagacctttgattgcaaaaagacaagttgcagttgcaaaaaaatataaagcatttgcggtttcgc

SEQ ID NO: 316456 - DNA, 745 bp, Unknown
  Bacterial polypeptide expressing nucleotide sequence isolated from the Sargasso Sea
ttgaattcaagaaatgacttagttgcatttgctaaaaaatatcaaatacctgttcctaaagataagatgggagaacctccatttagtacggatgctaacctgctacatacctctgctgaaggtaaaattttggaagatccttgggtggaagctcctgaatatgtttattcaagaacaagctctatagaagatgcaaaaaaagaatctgaggaaattattataagttataaaaatggagatccagtttctgttaataatgaaaatttaaaatctcatgacttattaaaaaaattaaataaaattgccggtgaacacggagtaggcagaaaagatattgttgaaaatcgttttattggtatgaaatctagaggtatttatgagactcctggaggaacaattttacatgaatctcacaaagcaattgaaagcattactcttgataagggtgaggctcatctaaaagatgaaataatgccaaaatatgcagaattgatttataatggactatggttttcttcagaaagaaaagcattacaagaattgattgactctactcagcacaaagttaatggggatgtaaaattaagagttttcaagggcaatgttattattacaggtagaagatcacttaatagtaaatatgatgaatctctagtttcttttgatcaagaaggtaattttgatcaaaaagattcagaaggttttataaaaattaattcactaagattaaaaatggataagtagc

SEQ ID NO: 316457 - DNA, 421 bp, Unknown
  Bacterial polypeptide expressing nucleotide sequence isolated from the Sargasso Sea
ggaataggaagagtggatttagtcgagaatagatttattggaataaagtctagaggagtttatgaaactcctggaggaacattattgcttgtggctcacagggcaatcgagtctgtaactttagataaagagacaatgcataaaaaagatgaggttatgccaaggtatgcagagcttgtttacaatggctattggtattcaaaggaaagatttaaactacaaaaaatagtcgatttaaatagaaataaagtaaatggattagtaaaacttaaactttataagggaaatgttacaattcaatcgagacaaacttctagtaatgcttactcaatgaaaaaagtttctttcgaagaaaataaaacttttaataaatcaaatgtagagagatttattaactttcataaaagaaaattaagataaa

SEQ ID NO: 316458 - DNA, 452 bp, Unknown
  Bacterial polypeptide expressing nucleotide sequence isolated from the Sargasso Sea
acaaaaattaaatattcttgctggtaaaaatggcgttggtagagttgaccttgttgaaaatagatttattggaataaaatcaagaggtatttacgaaactcctggcggcactatattaatggtagcccatagagcaattgaatccgttactttagataaagaaactatgcacaaaaaagataaggtcatgccaaaatatgccgagctcatttacaatggatactggtattcaaaaacaagatttaaatttcaaaaaattgtggatctaaaaagaaataaagtgaacggatctgttaagcttaaattgtataaaggaaatataacaattatttcaagacaaacaaaaagtagcgcctattccatgaaaaaagtttcttttgaagaaaacaaaacatttaataaatcaaatgtagaaagatttattaactttcataaaaaaaaactaagttaat

SEQ ID NO: 316459 - DNA, 288 bp, Unknown
  Bacterial polypeptide expressing nucleotide sequence isolated from the Sargasso Sea
atgcagatttagtttatgatggaagatggtttacaccgttaaaagatgctttagatgcttttgtcaatcaaacacagctatcagtcacaggatctgtaaaacttaagttatataaagggaacgttgtattagcaggaactacagcgtctaagtcactttatttacaagatttagcgtcgtttactgactcagaactatatgatcagaaagacgctaatggatttattaaattatttggattgccgatgaaagtccaaggattagtcgatcgaaaaggagatacataat

SEQ ID NO: 316460 - DNA, 615 bp, Unknown
  Bacterial polypeptide expressing nucleotide sequence isolated from the Sargasso Sea
gtaaagttttagaaagccctgtaaactatgcaccagaatttatattccaaagaactacttctccagaaaaagcacctaataaaccaacgtttataacaattaattttaagaatagtgatccttatggaataaatggaaaaaaactttctccttctaaattacttgaaaaattaaatacgatcggaggcaaaaatggaataggaagagttgatctagttgaaaatagatttataggaataaaatctagaggagtttatgagacgccaggtggtacaattttaataagtgcacatagagctatggagtcagtaactctagacaaagaaaccatgcataaaaaagataaggtaatgcctagatatgcagaactaatttataatggttattggttttctaaagaaagatttaatattcaaaaaataattgaccaaaaaaagaacaaggtaaatggatctgttaaattaaagctttacaaaggaaatattaccattcattcaagaattactagaagtaatgcctactcaatgaaaaaagtctcatttgaagaaaataaaacttttaataaatctaatgtagaaagatttattaattatcataaaaaaaaacttaaataat

SEQ ID NO: 316461 - DNA, 658 bp, Unknown
  Bacterial polypeptide expressing nucleotide sequence isolated from the Sargasso Sea
tcctttttctgtagatgacaatttatttcatacatcaaccgagggtaaagttttagaaaatccaaaaaattcggctcctgaatttatatttcaaagaacaacttcgcccgaaaaagcacctaataaacctacatacgtttctattggatttaaaaacggtgatccaattaatgttaatggtaagaaattaactccaaaaaaactgttagaaaaattgaaccagctcggtgggaaaaatggaattggaagagttgatctggttgaaaatagatttatcggaattaaatcaagaggagtttatgaaactcctggaggaacattgcttttaatcgctcatagagcaatggagtctgtaacactagataaagagactatgcataaaaaagatacgataatgccaagatatgcagaattaatttacaatggttattggttttcaaaagaaagattcaaattacaaaaaattgtggatctaaaaagaaacaaggtaaatggaactgttaagcttaaactttataaaggaaacgttacaattcaatcgagaatgactagtagtagtgcatattcaatgaaaaaagtttcttttgaagaaaataaaacttttaataaatcgaatgtcgaaaaatttattaatttccacaaaaaaaaattaaaataa

SEQ ID NO: 316462 - DNA, 335 bp, Unknown
  Bacterial polypeptide expressing nucleotide sequence isolated from the Sargasso Sea
aatgaaatcaaataaaagaatcgtgctcgcatattctggcgggctggatacttcagttattttaaaatggcttcaagaaaattataaagctgaaattattgcttatacggctgacattggacaagaaattgataaaaaaaaaataattgaaaacgcaaagagcctgggtgtaaaaaaagtaataataaaagatttaaaagatgtttttgttaaaaattatgtctacccaatgataagaggtcatgcaatttatgagggtgtttatttattaggaacttctattgcaagacccttaattgcaaaagatcaaataagaattgcaaaaaaatttaaag

SEQ ID NO: 316463 - DNA, 751 bp, Unknown
  Bacterial polypeptide expressing nucleotide sequence isolated from the Sargasso Sea
gagaatttggaaattaaaatcaagaacagattttttcaactatgcaaaaaagaatgggataccaataccaaaagataaaaaaggagcgccacctttttcagtagatgataatttatttcacacatcaacagaaggtaaggtattggaaaatccaaaaaattctgcaccagaatttatttatcagagaacggtttctcctgagaacgctccaaacaaaccatcatttgttactatcaattttaaaaatggtgatcctattggaattaatggaaaaaaaatgtctccagctaaattattaacaaagttaaatgagctagcaggtaaaaatggaataggaagagttgacttagtagagaatagatttttaggtatcaaatctagaggtgtatatgaaacacctggtggaactcttttaataaatgctcatcgagcaattgagtctgttactttagataaagaaactatgcataaaaaagataagataatgtctagatatgctgaattaatttataatggttattggtattcaaaagaaagatttaaactccaaaaaattgtagatttaaaaagaagtaaagttaatggctcagttaaacttaaattgtataaagggaatattacaattcaatcaagagttactaatagtaatgcttattcaatgaagaaggtttcatttgaggaaaataagtcatttaataaatctaacgttgaaagatttatcaattttcacaaaaaaaagcttcgttcatag

SEQ ID NO: 316464 - DNA, 614 bp, Unknown
  Bacterial polypeptide expressing nucleotide sequence isolated from the Sargasso Sea
gggtaaagttttagaaaatccaaaaaattcagcgcccgaatttatttttcaaagaacaacttctccagaaaaggcacctaaaaagccttcttttataactataggatttaaaaatagtgatccagtaaacattaacggtaaaaaattatctcccgcaagacttttagaaaaattaaattccattgctggcaaaaatggaattgggagagttgacctcgttgaaaatagatttattggaataaaatcaagaggtgtttatgaaactcctggtggaactctgttaataaatgctcatagagcaattgaatcagttacattagataaaaaaactatgcataaaaaagatgaaataatgccaagatatgcagaactcatttacaatggctattggtattcaaaagaaagatttaaacttcaaaaaattgttgaccaaaaaagaagtaaagttaatggatcagttaaactaaaactatataaaggaaatattacaattatatctagacaaacaaaaagtaatgcttattcgatgaaaagggtttcctttgaagaaaataaaacatttaacaaatcaaacattgaaaaatttattaatttccacaaaaaaaaactctaaa

SEQ ID NO: 316465 - DNA, 625 bp, Unknown
  Bacterial polypeptide expressing nucleotide sequence isolated from the Sargasso Sea
acttcaacagaaggtaagatgctcgaaaatcctaaaaatactgctccagaatttatttttcaaagaacaaagccaatagaaaaaactccaaacaaagctacacttattaaaataaactttaaaaatggggatccaatttctattaacggaaagaaacttaaaccagaaaaacttttagaaaagctaaatcaaataggaggcaaaaatggagttggtagagttgatttagttgagaatagattcattggaataaaatctagaggggtttatgaaacaccaggagggactatattatattgtgctcatagggctatagaatcaattacattagataaagacaccatgcacaacaaagaaagaataatgccagtttattcggaacttgtttataatggctattggttttcaaagaaaaggatgaagcttcaaaaaattattgataaaaaaagaaatctggttgtaggacaagttgtcctgaagatttttaagggtaatgtgataattttgtctagaagaagtaataataaagcttattcaatgaaaaaagtatcttttgaagagaacaagcactttaacaaaaagaaagtagaaaattttattaaatatcacgcaaaaaaactataat

SEQ ID NO: 316466 - DNA, 331 bp, Unknown
  Bacterial polypeptide expressing nucleotide sequence isolated from the Sargasso Sea
agagcaatagaaagtataaccttagataagggagaagctcatcttaaagatgagataatgccaaaatatgctgaagtaatatacaatggattttggttttcgactgaaagaatagctatgcaggaattaatagactccatgcaaactaaagttaatggacatgttaagcttaaaatttttaaaggtaatattattattctaggtagaaaatcatcaaatactttatatgacgctaggatagtttcttttgacgaaaaaggagattataaccaaaaagatgctgagggatttataaaaataaattctatcagacttaaaaacaataaatagt

SEQ ID NO: 316467 - DNA, 553 bp, Unknown
  Bacterial polypeptide expressing nucleotide sequence isolated from the Sargasso Sea
tcctgaaaaatctccaaataaacccactttcatagttatcaattttaaaaatggagatccagttggaatagatggtaaaaaattatccccatcgaatcttttaactaagttaaataatgttgcaggtagaaatgggattggaagggttgatttagttgaaaatagatttatagggattaaatctcgaggagtttacgaaacacctggcggttcattattaatgattgcacatagagcaatggagtctgtaacgcttgataaaaaaataatgcataaaaaagatgagattatgccaagatatgctgagcttatctacaatggatattggtattctaaagagagatttaaattacaaaaaataattgataataatagaaagaaagttaacggctcagttaaattaaaactatataaaggtaatataaccattcattcaagaaggacgaaaagtaaggcttactctatgaaaaaagtatcatttgaggaaaataaaactttcaataaatctaatattgagaaatttatcaattttcataaaaaaaaattaagataa

SEQ ID NO: 316468 - DNA, 319 bp, Unknown
  Bacterial polypeptide expressing nucleotide sequence isolated from the Sargasso Sea
aatggagtcagtaactcttaataaagatacaatgcataaaaaggatcaaattatgccaagatatgcagagcttatttacaatggctactggtattcaaaagaaagattcaaacttcaaaaaattatggatctaagtaaaaataaagttaatggttcagttaaactcaaactttataaaggaaatgttacgataatttctagaaaaactaaaagtgtagcttactctatgaaaaaagtttcttttgaagaaaataaaacctttaataaaacaaatgttgaaagatttattaattttcataagaaaaaactacgttcttaa

SEQ ID NO: 316469 - DNA, 673 bp, Unknown
  Bacterial polypeptide expressing nucleotide sequence isolated from the Sargasso Sea
aagggtgctcctcctttttcagtagatgacaatttatttcatacatcaactgaaggtaagattttagaaaatccaaaaaattctgctccagaatttatttttcaacgaacagtttctccagaagaagcacctaacaaaccatcttttgttactatcaattttaaaaatggtgatccttttggaattaatggaaaaaaaatgtctccagctaaattattaacaaagctaaatgacctagcaggtaaaaatggaattggaagagttgacctggtagagaatagatttttaggtatcaaatctagaggagtatatgaaacacctggcggaactcttttaattaatgctcatagagcaattgagtctgttactttagataaagaaacgatgcacaaaaaagatcaggtaatgtctagatatgcagaattaatttacaatggttattggtattcaaaagaaagatttaaacttcaaaaaattgttgatctaaaaagaaacaaagttaatggctcagtaaaacttaaattgtataaagggaatattacaattcaatcaagagttactaatagtagtgcctattcaatgaagaaggtctcttttgaagaaaataaatcatttaataaatctaacgttgaaagatttatcaattttcacaagaaaaagcttcgtacttaga

SEQ ID NO: 316470 - DNA, 517 bp, Unknown
  Bacterial polypeptide expressing nucleotide sequence isolated from the Sargasso Sea
tattagttttaaaaaggagatcctattaaaattaatgggaaaaaaattatctccagcaaaattacttgaaaaattaaataaacttgctggtaaaaatggaattggtagagttgacttagtcgaaaatagatttttaggaattaaatctagaggagtttacgaaactcccggaggaacaatattaattcatgctcatagagcaatggaatccgtgaccttagataaagatacgatgcacaaaaaagattctataatgccaagatatgcagaactaatctataatggttactggtattcaaaagaaagatttaagcttcaaaaaatagtagatcttaaaaagaacaaagttaatggaactgttaaactgaaactttataaaggcaacataacaattgagtcacgaataactaaaagtaatgcatactcaataaaaaaagtttcatttgaggagaataaatcttttaataaattaaatgtagaaagatttattaattttcataaaaaaaaattaaaataa

SEQ ID NO: 316471 - DNA, 451 bp, Unknown
  Bacterial polypeptide expressing nucleotide sequence isolated from the Sargasso Sea
actaaattctattgctggaaaaaatggagtaggcagggttgatttagttgaaaatagatttattggaataaaatctagaggtgtttacgaaacaccagggggaacaatattgtatgctgcccatagagcaattgagtcggtaactcttgataaaaaaacaatgcacgataaagagagagtaatgcctctttatgcagaacttgtttataatggttactggttttcgaagaaaagaattaatttacaaaaagtaattgataaaaaaagaaaatatgtctcaggagaagttaaaataaaaatttataaaggaaatgtcacaatactttctagaaagaccaaaaataaagcatattcaatgaaaaaagtctcttttgaagaaaataaaacatttaataaaataaaaattgagaaatttattaaatttcactcaaaacagttaaaaaaagcctaa

SEQ ID NO: 316472 - DNA, 452 bp, Unknown
  Bacterial polypeptide expressing nucleotide sequence isolated from the Sargasso Sea
agaaaaattaaattatattgctggtaaaaatggaattggcagagttgacctagtagaaaatagatttattggaataaaatcaagaggagtttatgaaactcctggtggaactttattaattaatgctcatagggcaattgaatctgtaacattggataaaaaaactatgcacaaaaaagatgaaataatgccaaaatatgcagaacttatttacaatggttattggtattcaaaagcaagatttaaacttcaaaaaatcgttgatagaaaaaggaataaagtaaatggatcagtaaaacttaaattatataaaggaaatattataattatgtctagacaaactaaaagtgcggcttattcgatgaaaaaggtatcatttgaagaaaataaaacttttaataaattaaatgtagaaaagttcattaactttcacaaaaaaaaacttaaataat

SEQ ID NO: 316473 - DNA, 178 bp, Unknown
  Bacterial polypeptide expressing nucleotide sequence isolated from the Sargasso Sea
gatgtctatcgagaacaaaaatactggcgtgaaaaaagtcgttttagcctattcgggtggtctagatacttcggccattattccttggttaaaagaaacctacgacaactgtgaaatcatcgccttttgcgcggacgttggtcagggtgaagaagagttagtgggtctgactgaaaag

SEQ ID NO: 316474 - DNA, 760 bp, Unknown
  Bacterial polypeptide expressing nucleotide sequence isolated from the Sargasso Sea
attgcgccatggagaatttggaaattaaaatcaagaacagacctaattaattatgcaaaaaaacatggaatacccattccaaaagataaaaaaggtgcaccacctttctcagttgatgataatttatttcatacttcaacagagggaaaagttttagaaaatcctaaaaattctgcacctgaatttatttttcaaagaacaacttctcctgaaaaggctccaaataaaccaagctttattactattaattacaaaaatggtgaccctattggtttaaatggaaaaaaattatctccagccaaagttttagataaactcaatcaattagctggaaaaaatggaataggaagagtggatttagttgagaatagatttattggaataaaatcaagaggaatttacgaaactccaggaggaacattattactagttgcacatagagcaattgagtctgtaactctagataaagatacaatgcataaaaaagatgaggttatgccaagatatgcagagcttgtttataatggttattggtattcaaaggaaagatttaaactacaaaagattgttgatttgaataaaaataaagtaaatggatcagtaaaactcaaactttataaaggaaatgttacaattcaatcaagacaaacttcaagtaatgcttattcaatgaaaaaagtttctttcgaggaaaataaaacttttaataaatcaaatgtagaaagatttatcaactttcataaaaaaaaattaagataaa

SEQ ID NO: 316475 - DNA, 908 bp, Unknown
  Bacterial polypeptide expressing nucleotide sequence isolated from the Sargasso Sea
tctaggtcagccagatgaagaaaatttagatactgtaaaatctcgtatgctagattgtggagcaaagtcagcacagataatatctggtagaaaagaactcgctgaagctggattgaaaatgattcaatctcaagctaaatacgaaggaggatattggaatactacaggtatagcaaggcctataactactaaattgattttatcttctatgtataataagaatattgaaacattatttcatggtgctacaggtagaggaaatgatcaagttaggtttcaattagcttcaaacatgttgtatccaaatgttgaagtttatgctccttggagagacccagaatttttagaagaatttccgggacgtaatgaaatgcttgattattgtatctctaattctcttccaattaaatcaaagtcagaatcaaaatattcaactgatgctaattttttaggcctaacgcatgaagcaggagatctagaagatgtaactatatctcctttctttgtgaagccgggaatgggtgtatggccatgggaagctgaagataagtatgaaattatttctattgagtgggacaagggagttcctgtatcaataaatggagaaaaattggacttagtgtctatatttgaagtttcaaatacaattggaagtaagcatggagtgggtattggaacacatgttgtagaaaatagatttgtaggaattaaatctagaggtatttatgaatcaccaggaatggaaatattagggaaatcatatgagtatttacttcaatttatattagatagaagagctagagagttatttgaatttttatcgaatacaattagtactcaagtatatcagggttactggcttgatcttactacttctgcagctttagatatgttaaataaaaataatt

SEQ ID NO: 316476 - DNA, 327 bp, Unknown
  Bacterial polypeptide expressing nucleotide sequence isolated from the Sargasso Sea
aatgaaattaaagaaaagaatagttttagcttattcaggcggtctagatacatcggtaatactcaaatggttacaagaaaattacaaagctgatgtaatttgttatacagctgatattggtcaaaaaattgatcgaaaaaaaattatttcaaatgcaaaaaaatttggggttaaaaatatcattattaacgatttaaaagatatttttgtaaaagattatgtctatccaatgatacggggtcatgcaatttatgaaggtttatatttattaggaacttcgattgcaagaccacttatcgcaaaagatcaaattaaaatagcaaaaaa

SEQ ID NO: 316477 - DNA, 229 bp, Unknown
  Bacterial polypeptide expressing nucleotide sequence isolated from the Sargasso Sea
gatgggccgcgccaagaaggtggtactcgcctattccgggggagtggataccagtgtctgcatcccgtacctcaagcaggaatggggtgtggaggatgtgatcacattcgctgcagatctcggccagggcgatgagctggaaccgattcgtcagaaagccctcgatgccggtgccagtcagtcgctggtgggagacctgatcgagccgttcatcaaggatttcgctttt

SEQ ID NO: 316478 - DNA, 280 bp, Unknown
  Bacterial polypeptide expressing nucleotide sequence isolated from the Sargasso Sea
aatgcagcatgcgagaaaggttgttttagcatattcgggaggggttgatacaagtgtttgtattccgtatttaaagaatgaatatggtatttcagaagttattacttttgttgcagatcttggtcaaggagaagatttagaatttattagacaaaaggctttaaattctggagcatctgaatcaattattggtagtttagtggataattttgtggagagatatgccttcccagcaattagatctaattccctatatctagagaaataccctttatcaact

SEQ ID NO: 316479 - DNA, 196 bp, Unknown
  Bacterial polypeptide expressing nucleotide sequence isolated from the Sargasso Sea
atgcagcaggtaaaaaaagttgttcttgcatattccggaggggttgatactagtgtctgcattccatatttaaaaaatgaatacggtatctcagaagttgtaacttttgtagctgatcttggccaaggagatgatttagagattgttagacaaaaagccttaaattcaggtgcaacaaaatctgtgattgggaatt

SEQ ID NO: 316480 - DNA, 358 bp, Unknown
  Bacterial polypeptide expressing nucleotide sequence isolated from the Sargasso Sea
aatgaaatctaagaaaaaaattgttttagcttattctggtgggcttgatacttctataattttaaaatggcttcaagaaaattataatgcagatgtaatttgttatactgctgatatcggacaagaaattgatagaaaaaaaattatagctaatgcaaaaaaatttcatgttaaaaatataattattaaagacttaaaaaataaatttgttaaagattatgtttatccaatgattagagggcatgcaatttatgaaggtgtttatttattaggtacatcaatagcaagaccactaattgcaaaagatcaaattagaattgcaaaaaaatttaaagccctatgcagtttcacatggatc

SEQ ID NO: 316481 - DNA, 253 bp, Unknown
  Bacterial polypeptide expressing nucleotide sequence isolated from the Sargasso Sea
ttggtttgctccggaaaggcagatgttgcaagaagctatagatttaagtcaaaaaaatgtaaatggaacagtaagagcaaagctttataagggaaacgtaattattactggtagaaagtctcctaactctctatacgatcaagatttggttacatttgaagatggatctattgattataatcatcaagatgcagagggtttcataaagttaaatgccctaagattaatgatgaacaaaattaaacaagattag

SEQ ID NO: 316482 - DNA, 217 bp, Unknown
  Bacterial polypeptide expressing nucleotide sequence isolated from the Sargasso Sea
atgcaaaacgttaaaaaaatcgtgttggcctactccggcggacttgatacctcagctatcattccatggcttaaagaaaactatgactgtgaagtagtggcgtttgccgctgatgtaggtcaaggcgatgaagaacttgaaggccttcatgaaaaagcgatcgcttcaggtgctagcgagtgccacatcatcgatttgaaagaaagagtttgttaac

SEQ ID NO: 316483 - DNA, 800 bp, Unknown
  Bacterial polypeptide expressing nucleotide sequence isolated from the Sargasso Sea
tttgaattgggatatcattatttttggtccaaaaataaagataattgcaccttggagaatttggaaacttaaatctagaactgatttaattaaatatgcaaaaaagcacagaattccaattccaaaagataagaagggagctccacctttttcggtagatgacaatctatttcatacctcaacagaaggaaagattttagaaaatccaaaaaaatcagctccggaatttatatttcaaagaacaatatctccagaaaaagcacctaacaaatgttcctttgtaacaataggatttaaaaatagtgatccaataagtattaatggtaaaaaaatttctccttcaaagcttttagaaaagttaaatattattgccggaaaaaatggaataggtagagttgatttagtggaaaatagatttattggaataaaatcaagaggtgtttatgaaacgcctggtggcacacttttaatcaatgctcatagagcaattgaatctgtaacattagataaagaaacaatgcataaaaaagacgagatagtggctaaatacgcaaaacttatttacaatggatattggtattcaaaagcaagatttaaacttcaaaaaattgtagacaaaaacagaaataaagtaaatgggactgttaaactaaaactttataaaggaaatatcattattgtttctagacaaacaaagagtaaggcttactcgataaaaagagtttctttcgaagaaaataaatcattcaaaagatcaaatattgaaaaatttataaatcttcacaaaaaaaaattaaagt

SEQ ID NO: 316484 - DNA, 493 bp, Unknown
  Bacterial polypeptide expressing nucleotide sequence isolated from the Sargasso Sea
ttaaccggaaagaaatataaagctgaaattttgttagaaaaattaaataaaattggaggagcaaatggtgttggtagggtagatcttgtagaaaatagatttatcggaattaaatccagaggagtttatgaaacacctggtggaactatcttgtattttgctcatagagcgatggagtctgtaactctagataaagcaacgatgcacgccaaagagaaaataatgcctttgtatgcagaattagtttataatggttattggttttcaaaaaagagattaaaccttcaaaaaatagtagataaaaaaagaaatcaagttaatggagaagtagtccttaaactttataaaggtaatataaccattgtttcaagaagatcgaaaaacaatgcttattcactaaagaaagtttcttttgaagaaaataaaacatttaaaaaatctaaaattgagaaatttatcaaatttcactcaaaacaattacataaacaataaa

SEQ ID NO: 316485 - DNA, 314 bp, Unknown
  Bacterial polypeptide expressing nucleotide sequence isolated from the Sargasso Sea
aatgaaaaaaattgttttagcctactcaggcggtttggatacatctataattttaagatggttgcaagaaaattataaagctgaaatcattgcttacacctctgatattggacaagttttagataaaaaaaaaattataaaaaatgctaaaagattaggtgttaaaaaaataattattgaaaatttaaaaaatatctttgtgagagattatatttttccaatgataagagctcatgcagtttatgagggagtatatttattaggcacatctattgccaggccgttaattttgcaaaagacagttgaaattgcta

SEQ ID NO: 316486 - DNA, 709 bp, Unknown
  Bacterial polypeptide expressing nucleotide sequence isolated from the Sargasso Sea
ataattttaaaatggcttcaacaaaattataatacagaagttattgcttatactgcagatattgggcaagagataaataaaaaaaaaataattaaaaatgcaaaaaatcttggagttaaaaaaataattatagaagatcttaaagatatttttataaaagattatgtttttccaatgataaggggacatgctatttacgaaggcgtttatttattgggaacttcaattgcaagaccattaattgcaaaggatcaaattagagtagcaaaaaaatacaaagcttatgcagtatcgcacggttcaactggtaaaggcaacgatcaaattagatttgaattgggataccattattttgatccaaaaataaaaataattgctccttggagaatatggaatttaaaatctagaactgatttaattaattatgcaaaaaaacatggaattcctataccaaaagataaaaaaggtgctccacccttttcaattgatgataatttgtttcatacttcaacagagggtaaaattttagaaaatcccaaaaatcctgcacctgaatttatttttcaaagaacaactcctcctgaaaaagcaccaaacaaacctacattaattacgatcaatttcaaaaatagtaatccaattggtataaatggaaaaaaattatctccttataggctcttaaataatttaaataaatttgcaggaaaaa

SEQ ID NO: 316487 - DNA, 541 bp, Unknown
  Bacterial polypeptide expressing nucleotide sequence isolated from the Sargasso Sea
tccaaataaaccaagctttattactattaattacaaaaatggtgaccctattggcctaaatggaaaaaaattatctccagcaaaagttttagataaactgaatcaattagctggaaaaaatggaataggaagggtggatttagtcgagaatagattcattggaataaagtctagaggagtttatgaaactcctggaggaacattattgcttgtggctcacagagccattgagtctgtaactttggataaagacacaatgcataaaaaagatgatgttatgccaaggtatgcagaacttgtttacaatggctattggtattctaaggaaagatttaaacttcaaaaaatagttgatctaaaaagaaataaagtaaatggatctgttaaactaaaactttataaaggtaatattacaattcaatctagacaaacctcaagtaatgcttactcaatgaaaaaagtctctttcgaggaaaataaaactttcaataaatcaaacgttgaaagatttattaattttcataagaaaaaattaaggtaa

SEQ ID NO: 316488 - DNA, 496 bp, Unknown
  Bacterial polypeptide expressing nucleotide sequence isolated from the Sargasso Sea
atgaaaagagaaaaactagttttagcttattctggcgggcttgacacctcagtaattgtacattggcttaataatcaaggatatgaagtaattgctctttgtcttgatttaggacaaaaagtagaagacttagatgaaattcttaaaaaaggcaaaaaagctggtgctgcaaaagttatattagaaaatgtggaagaagagtttgttacggattatgtatttaattccatttactggaatgcattatatgagggtacttatcttcttgggacttcgctggctcgtccactgattgccaaaaaacagatcgaaattgcagaaatgttaggtgcttctgctgtttctcatggcgctacaggcaaaggcaatgatcaggttcggtttgagttaagttattatgcacttaatcctgatattcgagtaattgctccgtggaaaattccagagttttacaaaaaatatcctggacgtaatgaattattaaaatacgcaaaaa

SEQ ID NO: 316489 - DNA, 469 bp, Unknown
  Bacterial polypeptide expressing nucleotide sequence isolated from the Sargasso Sea
atctccttcaaaacttttagaaaaactcaaccaattagctggtaaaaatggaattggaagagttgacctggttgaaaatagatttattggaataaaatcaagaggtgtttacgaaactcctggaggaactttattaattaatgctcatagagcaattgaatctgtaacattagataaaaacaccatgcacaaaaaagatgagataatgccaaaatatgcagagcttatttacaatggttattggtattctaaagctagatttaaacttcaaaaaattgttgatcaaaaaagaaataaagtaaatggatctgttaaacttaaactatacaaaggcaatattacaattgtatcaagacaaactaaaagtaatgcctattcaatgaaaaaagtatcttttgaggaaaacaaaacatttaataaatcaaacgttgaaagatttattaacttgcacaaaagtaagttaagataa

SEQ ID NO: 316490 - DNA, 331 bp, Unknown
  Bacterial polypeptide expressing nucleotide sequence isolated from the Sargasso Sea
aatgaaaaaaatagttttagcttactctggtggtttagatacttctattattcttaaatggttacaagaaaactataaagctgaggtaattgcttatacagctgatattggccaggaaatgaataaaaaaaagattattagaaacgcaaaaaaattaggggttaaaagaataataattaaaaatctcaaaaatatttttgtaaaagattatgtatttccaatgataagaggtcatgccatttatgaaggagtttatttactgggtacatctattgcgagaccattaattgcaagagatcaaatacaagttgcaaagaaattcaaagcattc

SEQ ID NO: 316491 - DNA, 157 bp, Unknown
  Bacterial polypeptide expressing nucleotide sequence isolated from the Sargasso Sea
atgagcgatatcaagaaagtggtgctggcttattcgggcggtcttgacacatccattattcttaaatggttgcaggagacttatgcctgcgaggttgtaacattgaccgccgatctgggccagggtgaagagcttgaaacggcgcgcgccaaggccg

SEQ ID NO: 316492 - DNA, 680 bp, Unknown
  Bacterial polypeptide expressing nucleotide sequence isolated from the Sargasso Sea
catggcgcaaccctgcgtccgagatcgggtcgtggcaaggtggggcgtcgcgtgggtcgacagatcgcgggtcaatcgctacgtccagcggccaccatctcccgaccaacaagaggtccacgtgaagatcgtctgcgcctacagcggagggctcgacacctcctgcatgatcccctggctctcggagcgctacgacgccgagatcatcacctacacaggcgatctcgggcagggcgaagacctgccggccatccgtcagaaggcgctggacacgggagccgccatggccgtcgtagacgacctgcgcgagcgcttcgtccgcgagttcgtgttcccgagcatccaggctggcgcgctgtacgagggcacgtacccgctgcacaccgccctcgggcgtccgctcctcgcccagcgcctcgtcgaagtcgccctcgagaacggggcggacgccatcgcccacggctgcaccggaaagggcaacgaccaggtgcgcttcgaggtcgccgctcaatgcctcggaccgcagctgaaggtcatcgcacccctgcgcgagtgggacctcgtcacccgcgagatggagatcgactacgcgctggagcgcaacatcccgatccccatcaccaaggagaagccctactccatcgaccagaacatctggggaagcgccatcgagtgcggtg

SEQ ID NO: 316493 - DNA, 694 bp, Unknown
  Bacterial polypeptide expressing nucleotide sequence isolated from the Sargasso Sea
catgaaaagagaaaaattagttttagcttattcaggcggtcttgatacctcggtaatcttacattggctgaataatcaaggatatgaagtaattgctctttgtcttaatttaggacaaaaagtagaagacttggataaaatccttgaaaaaggcgaaaaagccggtgctacaaaagttctagtagaaaatgtggaagaagagtttgttaaggattatgtgcttaaagctattaactggaatgcattatatgaaggaacttatctacttggaacttcccttgctcgtccactgattgctaaaaaacagattgaaattgcagaaaaggaaggtgcttctgtagtatcccatggtgctacaggcaaaggcaatgatcaggttaggtttgagttaagttactatgcacttaagcctgatatccgagtgattgctccctggaaaattgcagagttttaccaaaaatatcctggacgttctgaattactgaaatatgcaaaaaaatttggtatcccagtgaaggctaccaaagaaagtccctggagttcggatgaaaatcttatgcatatcagttttgaatcaggaatgctggaagatccttggcaagctccgctgcaagaaatgtttgaattatcaaattctccacaacaagctccctctaatcctcatgaaattctaattgaatttaaaaatgggagc

SEQ ID NO: 316494 - DNA, 432 bp, Unknown
  Bacterial polypeptide expressing nucleotide sequence isolated from the Sargasso Sea
tcgagaaccgcgtgttggggatcaaatcccgggagatctacgaaacgcctggccttttgctgttgatccaggcccaccaggaactggaaagcctgactctggccgctgatgtgctgcgcagcaagcggcagttggaaatgcagtgggccgatctcgtctaccagggcctttggtttggccctctcaaggatgctctggacggcttcatggaccgcacccagaccaccgtcaatggtgtcgttcgtctccggctgcacaaaggaacggccacggtcaccggccgcggttcagccgacagcagcctttacgtccccgaaatggcgtcctacggcagtgaggatcagttcgatcaccgcgctgcagagggctttatctacgtctggggtctgccgacccgcctctggtcagcatcccagcgccgttcaagctgag

SEQ ID NO: 316495 - DNA, 272 bp, Unknown
  Bacterial polypeptide expressing nucleotide sequence isolated from the Sargasso Sea
agtttataccggcttctggttttcacccgagcgcgaaatgctgcaaacagctattgatagctgccgcgatgcggtaaatggtgttgtgcgagtaaaactatataaaggtaatgtttccataacaggacgaaaatcaccaaattcactttataatgctgatcttgtaaccttcgaagaaggtgcgattgattacgaccatagcgatgcaaacggatttatcagattaaatgcgctgcggctgagggttaataaaatggtgcaggataaatagg

SEQ ID NO: 316496 - DNA, 316 bp, Unknown
  Bacterial polypeptide expressing nucleotide sequence isolated from the Sargasso Sea
tattgaaagtattacattaaataaagaaattgctcacaacaaagactctataatgccaagatatgcagaattaatttataatggcttttggttttctggagagagaagtgaattacaaaaaatagttgatagtgataaaaatcaagtaaatggtgaagttaaattaaaattgtttaaaggtaatgtgattgttttaggaagaaaatctaaaaatagtttatatgatttatctaaagtttcttttgaaaaaaacaatgaggaggatcaaaaaaaagccaacgaatttataaaattacaattttcaaaaataaattaa

SEQ ID NO: 316497 - DNA, 460 bp, Unknown
  Bacterial polypeptide expressing nucleotide sequence isolated from the Sargasso Sea
ttgcttcaaaaattaaattcgattgctggtaaaaacggaattggaagagttgatttagttgaaaatagatttatcggaataaaatcaagaggtgtttacgaaacgccaggtggaactcttttaatgattgcacatagggcaatggagtcagtaacattagacaaagaaactatgcatcaaaaagatactgtaatgccaaagtatgcagaacttatttataatggtttttggttttctaaagctagatttaaattacaaaaaattattgatcttaaaaaaaatcaagttaacggattaattaaattaaagttgtataaaggaaatgttacaattatatcgagaaatagcaaaagcaaagcttactcaattaaaaaagtttcttttgaggagaataaatcttttaaaagatcaaaagttgagaaatttatagcgggtgcgtcaacaaaactaagggtctaaa

SEQ ID NO: 316498 - DNA, 296 bp, Unknown
  Bacterial polypeptide expressing nucleotide sequence isolated from the Sargasso Sea
gatgcagcaggtaaaaaaagttgtgctagcgtattctgggggggtagatacaagcgtttgtattccatatttaaagaatgaatatggaatttcagaagtggttacttttgtagcagatcttggacaaggcgaggatttagaaattattaggcaaaaagctttaaattccggtgcatctcaatccatcgttggtaatttagttaatagttttgttgagagatacgcttttccagctattagagcaaattcattatatttagataaatatcctttatctacagctcttgcaaggcctt

SEQ ID NO: 316499 - DNA, 367 bp, Unknown
  Bacterial polypeptide expressing nucleotide sequence isolated from the Sargasso Sea
gaaacaccgggaggaacaattttattacatgcaagaagagcgatagaaagtataactttagataaaggtgaagctcaccttaaagacgagataatgccaaaatatgctgaagtaatatacaatggcttttggttttctactgaaagaatggccctgcaggaattaatagactctatgcaaaataaagttaatggacatgtcaaacttaaaatttttaaaggtaatattattattctgggtagaaaatcacccaatactttatatgactctaggatagtttctttcgatgaaaaaggagattataaccaaaaagatgcagagggatttataaaaataaattctatcagactcaaaaataaaaaatagt

SEQ ID NO: 316500 - DNA, 769 bp, Unknown
  Bacterial polypeptide expressing nucleotide sequence isolated from the Sargasso Sea
aacaatatctgtggattggataaaaaaaaattatggttatgatgtaataactttaactgttgatcttgggggtggtcaattttctacagatttaaaaaaaagagcaaagaaggccggagcatctgattgtattatttgggatgtaaaagaagaatttgctaaagattttatacttccaagtttgttagccggagcaatttacgaaaatgaatacctgttagctacctcaattggcaggccattaatggcaaagaagttggttgaagctgcattagaatatggagctaaggctgtagcacatggttgtacaggaaaaggaaatgaccaagttagatttgatacagccattaaaactctctcttcggatgccccattagagataatagctccagcaagagaagcttctttaacaagagatgaagagaaagaatatgctaaaaaacttgatattaaattgcccggagtagacgaaagagtttattcaattgataggaatttatggggacttgcaatagaaggtgaagacttggaagatccatggctagagcctcctgaagatgcatatttgataacctcttccctagaagattcacctaatgagccaaaatatatagaaatatcatttaataaaggaaccccagttaagttaaatggtaagaaacttagtttggtaaatttaattgaagatctcaatgatatagctggtttgtgtggagtaggcagaacaattcatgttgagaatagattagtgggtattaaatccagagaa

SEQ ID NO: 316501 - DNA, 468 bp, Unknown
  Bacterial polypeptide expressing nucleotide sequence isolated from the Sargasso Sea
ctcctgcaaaacttttaaaaaaactgaatcatcttgctggaactaatggtataggacgagtagatttagtggaaaatagatttttaggaattaaatctagaggtgtttacgaaacaccaggtggtacattgctgatgatcgcacacagagcgattgagtcagtttcattagacaaatcaacaatgcatttaaaagaaaatataatgtctagatacgctgaattaatttataatggttattggttttctaaggaaagatttaaattacaaaaaattattgatttaaaaagaaataaagtaaatggctatgttaaactaaaactttataaaggaaatacaacaatcatttcaagaaatacaagtagcaaagcttactcacaaaaaaacgtctcttttgaagaaaataaaagttttaataaaaagaatgtagagagatttataaatttccacaaaaaaaaattgagataat

SEQ ID NO: 316502 - DNA, 223 bp, Unknown
  Bacterial polypeptide expressing nucleotide sequence isolated from the Sargasso Sea
tatgggaaaggctaacaaagttgttttggcttattcaggaggggtcgatactagcgtttgtattccttacttgaagaaggagtatggagtcgagcatgtaattgcttttgcagcagatcttggacaaggtgatgaactggatgaaatcaaaaaaaaggctatttcagcaggagcttcacaatcactaattggcaatttagtaaagccctttattgaagacttt

SEQ ID NO: 316503 - DNA, 465 bp, Unknown
  Bacterial polypeptide expressing nucleotide sequence isolated from the Sargasso Sea
ccagaaaaattttagaaaaactaaatcatcttggtggaaaaaatggagttggaagagttgatctagttgaaaatagatttattggaattaaatcaagaggagtttatgaaactcctggaggaacattgcttttaattgctcatagagcaatggagtctgtaacactagataaagatactatgcataaaaaagactcaataatgccaagatacgcagaattaatttacaatggttattggttttcaaaagaaagattcaaattacaaaaaattgtggatctaaaaagaaacaaggtaaatggaattattaagcttaagctttataaaggaaatgttgtaattcaatcaagaatcactaccagtagcgcttattcaatgaaaaaagtttcttttgaagaaaataaaacttttaataaatctaatgttgaaagatttattaatttccaaaaaaaaaaattaaaataaa

SEQ ID NO: 316504 - DNA, 412 bp, Unknown
  Bacterial polypeptide expressing nucleotide sequence isolated from the Sargasso Sea
gtcgatcttgttgaaaatagatttttaggaataaaatcaagaggagtttatgaaactccaggaggaacattattaattctagctcatagagcaattgagtctgttactttagataaagaaacaatgcataaaaaagataatatactatctagatatgcagaactaatttacaatggctattggtactcaaaagaaagatttaaacttcaaaaaatcgttgatctcaaaaaaaataaagttaatggatcggttaaacttaagctttacaaaggcaacataacaattcaatctagagttactaatagtgcggcttactctatgaaaaaagtttcttttgaagaaaataaatcttttgataggtcaaatgttgaaaaatttattaactttcacaaaaaaaagttaagaaattaac

SEQ ID NO: 316505 - DNA, 529 bp, Unknown
  Bacterial polypeptide expressing nucleotide sequence isolated from the Sargasso Sea
atgcagcaggtaaaaaaagttgtactagcttattttggtggcgtagatacgagcgtttgtattccatatttaaaaaatgcatatggaattgctgaagtagttacttttgtagcagatcttgggcaaggcgatgatttagaacttattaggcaaaaagctttaaactctggtgcatctaaatcaatcgttggcaatttagttaatagttttgttgagagattcgcttttccagccataagagcaaacgcattatatttagataaatatcctttatctactgctcttgctcggcctttaattgctgaaaatctcgtgaatattgctagagagattaatgccgatgcagtagctcatggatgcactggtaaagggaatgatcaagttcggtttgatttagcaattaatgctttaggtcctgatttaaaaataattactcctgcaagggagtggaatatgagtagagaagaggcaatagtctatggagaaaaatttggtatacctgcaccagtatcaaaaaaatcaccatatt

SEQ ID NO: 316506 - DNA, 253 bp, Unknown
  Bacterial polypeptide expressing nucleotide sequence isolated from the Sargasso Sea
catggataaagtaaataaagttgttcttgcgtactcaggtgggctagatacatccgttatattaagatggcttaaagaaacctactcgtgcgaggtcgttacgtttaccgcaaacttaggccaagatgaagattatgatttggttgagaaaaaagcaactcaacaaggtgtcaaagaagtattcattgaagatctcaaagaagaattcgtccgtgattacgtattcccgatgtttagagctaatccactttat

SEQ ID NO: 316507 - DNA, 517 bp, Unknown
  Bacterial polypeptide expressing nucleotide sequence isolated from the Sargasso Sea
tttatttatttaaatgaactaggtaacaagcatggtattggtcgagtcgacatggtagaaaatagatttattggtattaagtcaagagggatttatgaaacacctggtgctaccatattatgggctgcccacagagatttagaaggtatagcaatggataaagaagtgatgcatattcgtgatatgcttattccaaaattttctgaattaatttataatggtttctggttttcgcctgaaatggattttctactcacttcaatcgccaaaagtcaagaggctgtagatggaacggttcgattagcgctgctaaagggaaatgtaatcccaatcggtagaaaatcgcctacatcactttatgatcagaaaatttctagtatggaagtagaaggaggttttaatgctcaagattctgaagggtttataaaaattaattcgatcaggttaaaagctcacaacctagttttaaaaaataaaactccatacaaatggagaaagggaaataaaaatggctaag

SEQ ID NO: 316508 - DNA, 791 bp, Unknown
  Bacterial polypeptide expressing nucleotide sequence isolated from the Sargasso Sea
tcattattttggtcctaaaattaaaattatagctccatggagaatttggaaactaaaatctagaacagacttaattaattatgcaaaaaaacatggcatagctattcctaaagataaaaaaggtgcacctcctttttctgtggatgataatttattccatacatcaactgaaggtaaggttttagaaaatccaaaaaattctgcaccagaatttatttttcagcgaacagtttctcctgaaaaagcacctaacaaaccatcttttgtgactatcaattttaaaaatggtgatccttttgggattaatggaaaaaaaatgtctccagctaaattattaacaaagctaaatggcctagcaggaaaaaatggaattggaagagttgacttagtagagaatagatttttaggtataaaatctagaggggtatatgaaacacctggtggaactcttttaataaatgctcatagagcaattgagtctgttaccttagataaagaaactatgcataaaaaagatcaggtaatgtctagatatgccgagttaatttataatggttattggtattcaaaagaaagatttaaacttcaaaaaattgtagattttaaaagaagtaaagttaatggctcagttaagcttaaattgtataaaggaaatattacaatacaatcaagagttactaatagcagcgcatattcaatgaagaaggtatcttttgaagaaaataaatcatttaataaatctaacgttgagagatttatcaattttcataagaaaaagcttcgtacttaga

SEQ ID NO: 316509 - DNA, 557 bp, Unknown
  Bacterial polypeptide expressing nucleotide sequence isolated from the Sargasso Sea
tattttggtcctaaaattaaaataatagcaccttggagaatatggaagttaaaatctagaactgatctaattaactatgcaaaaaaacatggaattcctattccaaaagataaaaaaggtgcacctcctttttcagttgatgataatttgtttcatacatcaaccgaaggcaaagttttagaaaatccaaaaaactctgcgccagagtatatatttcaaagaacaacttcagcggaaaaagctccaaatagaacgtcatttgtaacaattaattttaaaaatagtgatccaattggcattaatggcaaaaaattatctccatctaaacttttagaaaaacttaaccaattagcaggaaaaaatggaataggtagagtggatttagttgaaaatagatttattggaataaaatcaagaggagtttacgaaactccaggtggaacgttgttacttgcagcacatagagctatagagtctgtcacattggataaagaaactatgcataaaaaagatgctattatgtctagatacgcagaacttatttataatggctattg

SEQ ID NO: 316510 - DNA, 211 bp, Unknown
  Bacterial polypeptide expressing nucleotide sequence isolated from the Sargasso Sea
gattgataaaagtcagattaatgtaaatggaattgtaaaactaaaggtttataagggtaacgttattgtattgggtcgtaaatctaattcaagcatctattcgtcaaaaatggctacttttgaaagagatgatatttataatcaaaaagatgcagaaggcttcattaaactaaacgccctaaggttaaagctactcaagaaaagaacttaa

SEQ ID NO: 316511 - DNA, 708 bp, Unknown
  Bacterial polypeptide expressing nucleotide sequence isolated from the Sargasso Sea
caaaaaaacatggaataccaatcccaaaagataaaaaaggtgcgccacctttttctatagatgataatttatttcatacatctactgagggtaaggttttagaaaatcctaaaaattctgcaccagaatttatttttcaaagaacaacttgtccagaaaaagcacctaacaagcctgcttttataactatcggatttaaaaatggtgacccagtaaacattaacggtaaaaaattatctcctgcaaaacttttagaaaaattaaattccattgctggcaaaaatgggattgggagagttgatcttgtcgaaaatagatttataggaataaaatcaagaggtgtttatgagactcctggtgggaccctattaataaacgcacatagggcgattgagtcagttacattagataaacaaactatgcacaaaaaagatgagattatgccaaaatatgcaggactcatttacaatggttattggtattcaaaagcaagatttaaacttcaaaaaattattgatcaaaaaagaaataaagtaaatggatcagttaaactaaaactatataaaggaaatattataattatatctagacaaaccaaaagtaatgcttattcgataaaaaaagtttcctttgacgagaataaaacattcaataaatcaaacgttgaaaggtttattaattttcataaaaaaaagctaaataattaat

SEQ ID NO: 316512 - DNA, 385 bp, Unknown
  Bacterial polypeptide expressing nucleotide sequence isolated from the Sargasso Sea
attgggaataaaatcaagaggagtttatgaaacaccaggtggaactcttttattaaatgctcatcgagcgattgaatctgtaactttagataaagaaacaatgcataaaaaagatatgataatgcctagatatgcagagttaatttataatggatattggtattctaaagaaagaattaaacttcaaaaaattgttgaccaaaaaagaaataaagtaaatgggtcagttaaacttaaactttataaaggtaatattagtattcaatctcgagttacaaaaagtggggcttattcaatgaaaaaggtttcatttgaggaaaataaaacttttaataaatcaaatgttgaaagatttattaactttcacaaaaataagcttagataa

SEQ ID NO: 316513 - DNA, 414 bp, Unknown
  Bacterial polypeptide expressing nucleotide sequence isolated from the Sargasso Sea
gaagagttgatttagttgaaaatagatttatcggaattaaatcaagaggagtttatgaaacaccaggtggaacattacttttaattgctcatagagcaatggagtctgtgacactagataaagatacaatgcataaaaaagattctattatgccaagatacgcagaattaatttataacggttattggttctcaaaagaaagatttaaattacaaaaaatagtggatctaaaaaaaagtaaggtaaatggaattgttaagcttaaactatataaagggaatgttgcaattcaatcgagaattacaaaaagcagtgcttactcattgaaaaaagtttcttttgaagaaaataaaacttttaacaaatccaatgttgaaaggtttataaatttccataaaaaaaaattaaagtaaa

SEQ ID NO: 316514 - DNA, 680 bp, Unknown
  Bacterial polypeptide expressing nucleotide sequence isolated from the Sargasso Sea
tgttgcaaaaaaattcagtattgatcaaaatttgtggggaagggcaattgaaggaggagtgttagaaaatccatttaatgaacctccagatgatgcatttatttggattaaaacaaaaaatttgcctgaaaaacctgcttatttgaaaatcaaatttgttaaaggaataccaacagaagttgatggtaaaaaattaccacctgtaaaattaattgaatatatcaataagaaagcaggaaaccatggcgttggaattgttgatcatattgaagacagagtggttggaataaaatcacgagaagtgtatgagacaccagcagcaatttgtctaatagaagcacattcagatcttgaaaagatggtacatacaaaacatgaaacaaaattcaagacattagttgatgacgaatgggcatggatggtttattcaggtctgtgggatgacccattaagacaagaattagatcagtttatcgaacaagcacaaaaacgtgttaccggcactgttaagctaaaacttcacaaaggaaatgtcagagtagtcggaagagaatcaaaatattcactttacagtcatgacatagccacttatggaaaagattccacatttgatcagaaattagccaaaggctttgtcgaattgtggggaatgcagtcaacagaagctaataaattctaga

SEQ ID NO: 316515 - DNA, 730 bp, Unknown
  Bacterial polypeptide expressing nucleotide sequence isolated from the Sargasso Sea
ttctcgaactgatcttattaagtatgccaaaaagaataaaattccgataccacaagacaaaaaaggagaaccgcctttctcaattgatgataatttatttcatacatcaaccgagggaaaggttttagaaaatccgaagaatcaagcgccagaatttatattccaaagaactaattcacctgaaaaggctcctaataaagtatcctatgtgactattaattttaaaaaaagtgatccaataggtttaaacgataagaaattgtctccagcaaaacttttacagaagttaaatcatcttgctggaaataacggcataggaagagtagatttggtggaaaatagatttttgggaataaaatcaagaggagtttacgaaacacctggtggaacattacttatgattgcacatcgagcaatagagtcggtatcattggataaatcaacaatgcatttaaaagaaaacattatgccaagatacgctgaattaatttataatggttattggttttcaaaagaaaggtttaaactacaaaaaatagttgacttaaataaagacaaagtaaatggctcaattaagcttaaactttataaaggaaatgctacaattgtttcaagggttacaaacagtaaagcttactcacttaaaaatgtttcttttgaggaaaataaaagttttaataaaaagaatgtagaaagatttattaattttcacaaaaaaaaattacgataa

SEQ ID NO: 316516 - DNA, 460 bp, Unknown
  Bacterial polypeptide expressing nucleotide sequence isolated from the Sargasso Sea
ttggaaagattaaatattttagctgggaaaaatgctgttggaagagtagatttagttgagaatagatttataggaattaaatcaagaggtgtatatgaaactcctggtggcacactgctatatatagctcatagagcgatcgagtctgttactttagataaagaaactgcacatcaaaaggaaagaatcatgcctgaatatgcagagttggtttacaatggatattggttttcaaaaaaaagaattaaactacaaaaaataattgacaaaaaaagaagtcaagtatcaggtgatgtaattctaagcctttataagggtaatgtaactattttatccagaaaaacaaaaaataaagcttattctatgaaaaaagtttcatttgaagaaaataaatcttttaataagtctaaagtagaaaaatttatcaaatatcactctaaacagttatataaatcttaaa

SEQ ID NO: 316517 - DNA, 316 bp, Unknown
  Bacterial polypeptide expressing nucleotide sequence isolated from the Sargasso Sea
tatggcgtttcagcacgttgttacttttgtagcagatcttggacaaggcgaggatttagaacttattaggcaaaaagctttaaattctggtgcatctcaatcaattattggtaatttagttaataattttgttgagggatatgcttttcccgctattagagcgaacgcattatatttagataaatatcctttatctacagctcttgcaaggcctttaattgccgaaaatcttgtaaatattgctcgagagattaatgttgatgcagttgttcatggatgcactggtaaaggcaatgatcaagttcgatttgatttg

SEQ ID NO: 316518 - DNA, 487 bp, Unknown
  Bacterial polypeptide expressing nucleotide sequence isolated from the Sargasso Sea
ttaaatggaaaaaaattatctccagcaaaagttttggataaattaaatctattagctggaagaaatggaataggaagagtggatttagtcgagaatagatttattggaataaagtctagaggagtttatgaaactcctggaggaacattattgcttgtggctcacagagctattgaatctgtaactttagataaaaacacaatgcataaaaaagatgaaattatgccaaggtatgcagaacttgtttacaatggctattggtattcaaaggaaagatttaaactacaaaaaattgtagattcaaagagaaataaagtaaatggatcagtaaaactcaaactttataaaggtaatattacaattcaatcaagacaaacctccagtaatgcttactcgatgaaaaaagtttctttcgaagaaaataaaacttttaataaatcaaatgtagaaagatttattaactttcataaaagaaaattaagataat

SEQ ID NO: 316519 - DNA, 792 bp, Unknown
  Bacterial polypeptide expressing nucleotide sequence isolated from the Sargasso Sea
attttggtaaaaataagattaaaacaatagcgccatggagagaatggaaattacaatcaagagcagatttaattaaatacgctaaaaaaaataatataccaattcctaaagataaaaaaggtgcacctccattttctgtagatgacaatatttttcatacatcaactgaaggcaaagttttagagaacccaaaaaactctgctcctgaatttatttatcagagaacagtttcaccacaaaaagctcctaacaaacctacaaaagtaaaaattacttttaaaaacagtgatccaattgcaataaatggaaaaaaattaagtcctgaaaagcttttaagtaaattaaatattctggctggaaaaaatggaatagggagagttgatctagttgaaaatagatttattggaattaaatctagaggtgtttacgaaactccaggtggcacattgttatatactgcacatagagctatagaatctgttactcttgataaagaaaccgctcataaaaaagagagaataatgccagagtatgctgagctggtatataacggttactggttttcgaaaagaagattaaaattacaaaaactaattgataaaaaaagaaataaagtatctggtgatattgttttgagtttatgcaagggaaacgtaactattttatcaagaagaacaaaaaataaagcttattcaatgaaaaaagtttcttttgaggagaataaaacctttaataaaagaaaagttgaaaatttcataaaatttcactctaaacagttaaataaagcctaaa

SEQ ID NO: 316520 - DNA, 788 bp, Unknown
  Bacterial polypeptide expressing nucleotide sequence isolated from the Sargasso Sea
ttgcccctgcagagaagcatctttaacaagggatgaggagaaagaatatgccgaaaagttaggaataactttgccgggagtcgaagagagagtttattctatagatagaaatttatggggacttgctattgaaggcgaagaccttgaagacccttgggttgagccacctgaagatgcatatttaatcactaatagcatagatgatacaccaaaaaaaccaacttatttagaaataagttttaaagaaggtgttcctattaaattagatggaaagtctttaaattttttagagattattgaaaaattaaatattatagctggagagaatggcataggaagggttgttcatgtagaaaataggttagttggaataaaatccagagaagtttatgaagcacctgcagccacagtaattcatgagtcatttcaatctcttgaaaaattagttttaaatagagatcagtcaagaatgaaaaattttgtatcaactacatactctgacttagtttatgatggaagatggttttctggtttaagggaaaatttagatgcttactgcaaaagctcatctagatatatgacaggagatgttaggctaaaattatttaaatctaaatgtgatgttgttggagctaaatctccttactcgttatattcttatgatcttgcgacatattcaaatgacgataaatttaaacatggttcagctgttggatttattgacatctatagccttccatctagaattcaaagaaaacaacaagttcatgacgaattggcagaatgaa

SEQ ID NO: 316521 - DNA, 991 bp, Unknown
  Bacterial polypeptide expressing nucleotide sequence isolated from the Sargasso Sea
atgcagtggcaggctcgatatgaggggacatacctccttggaacatccatcgcccggcctcttatcagtaaggtttgtgttgatcttgcacatgctgagggtgcaactgtttttgcgcacggttcgacaggaaagggcaatgaccagtgtcgctttcagcttgctgctgaggccattgacccgtcaattgaagtacttgcaccgtggcgaatagaagcatttcgtgaacgctttcctggtcgtaaagaactcattgaattctgtgaagaaaaatcgattcccgtgaaggcttccaaagcgaaaccatatagctcggatgaaaattgcctgcataccagttatgaggcaggtcttttggaagaacttgatacagatggctacgaacttgttgattttggtatgtctgtgtcgccacaacaagcagcagatgctgtcgagacggtccgaattgaatttgagtctggcgttcctgtgaggctcaacggcgagccgcttccttctcacgaaatggtgctgaaactcaatgagattggtggtcgaaatggaattggccgcattgatattcttgaaaaccgtctcgtaggaatgaaaagccgaggagtgtatgaggcacccgggatgactcttttgtatgaatcacaccggtttattgagcagttgacgcttgatcgtgacctggttcatctccgagatcgattgtcgccagagtttgccgaatcggtgtattacgggttttggtattgcgcaaagatggatgctcttctggcgtttattcgtgaggcacaacagccggttacaggcattgttgaactcaacctttacaagggaaacatacttgtaaaaagtagagaaagctctgagagtctctatgacgcagcgattgcttcaatggaaggtggtgggtcttatgaccagactgatgcggaaggctttcttcggattctcgggctgccgctgagggttcagggtggaattcgccccaggaattaag

SEQ ID NO: 316522 - DNA, 340 bp, Unknown
  Bacterial polypeptide expressing nucleotide sequence isolated from the Sargasso Sea
tttgatgatagcacatagagctatagaatctgtaactttagataaaaaaactatgcatgagaaagatgagattatgcctaagtatgctgaactgatttataatggtttttggttttcaaaatcaagacttaaattacagagaaaagtcgacctgaaaagaaatcaagtaaatggaaatattaaacttaagttatacaaaggtaatgttacaattttatcaagacaaagtaacagtaaagcatactctattgataaagtgtcttttgaagaaaataaaagtttcaaaaagtcaaaagttgagagatttatattgggtgcggcaagaaagcttagggtttaa

SEQ ID NO: 316523 - DNA, 733 bp, Unknown
  Bacterial polypeptide expressing nucleotide sequence isolated from the Sargasso Sea
tattgcctatggagaaaaatatggaatagttcctcctgtaagtaaaaaaaatccctactcgattgatttgaatcttttggggagaagtattgaagctggtcctcttgaagatccatttcagatgccatcagaagaagtttttggcatcacttcctctattgctgattcaccaaacgagcctgagatcgcagatattttgtttgaaaatggttatccagttgcaattaatggagaagcaatggagccagtatctttgatcaaaaaagctaacagccttgcaggaaagcatggttttggacgtttggatattattgaagacagagtagtaggaattaaaagtcgagaaatttatgagactccaggattgctattattaattaaagctcatcaggaaattgagagtttaactttacctgctgacttattagatactaaatctagactcgaacgacaatgggcagacttggtttataaaggtttttggtttagtcctctaaaagaagctttggatggatttattaattattctcaaaagcaggtgaatggaacagtcagggttaggctttttaagggtaatgtcgatgttattggccgcaagtcaaaagaaaatagtttgtatatttcagatatgtctacttatggaagtgaggataagttcaatcacaaatccgcagaaggatttatatatgtatggggattgcctagtcgaatttggtcttggataaacaagtaa

SEQ ID NO: 316524 - DNA, 388 bp, Unknown
  Bacterial polypeptide expressing nucleotide sequence isolated from the Sargasso Sea
aatgcttcaaaaaaagcttgtagttaatttaatgaaatttaaaaaaaaaattgttctagcttactctggaggcctagatacttctataattttaaagtggcttcaagaaaattataaagctgaagttatttgctatactgctgatattggacaaaaaattaataaaaaaaaaatcattactaatgcaaaaaagtttggtgttaaaaatattattattaaagatttaaaaaatacatttgttaaagattatgtttatccaatgattagaggtcatgcaatttatgaaggtgtttatttattaggtacatcaatagcaagaccattaattgcaaaagatcaaattagagttgcaaaaaaattcaaagcttatgcagtttctcatggttca

SEQ ID NO: 316525 - DNA, 368 bp, Unknown
  Bacterial polypeptide expressing nucleotide sequence isolated from the Sargasso Sea
aatgaaatcaaaaaaaaaaattgttttagcctactccggtggactagatacctccattatacttaaatggcttcaggaaaattatgatgcggaagtcattgcatacacagctgatgtgggtcaggaaatggataaaaaaaaaattatcaataatgcaaaaaaacttggtgtaaaaaatattataatcaatgatttaaaggatgtttttgtaaaggactacgtttatccaatgatcagaggtcatgctttgtatgaaggttcatatttacttggcacatctattgcaagacctttaattgctaaagatcaagtcagaattgcaaagaaatttaaagcatttgccgtatcacatgttcaacggaaaagga

SEQ ID NO: 316526 - DNA, 772 bp, Unknown
  Bacterial polypeptide expressing nucleotide sequence isolated from the Sargasso Sea
aaaataaaaattatagcaccttggagaatttggaaacttaaatccagaaccgacttaattaattatgcaaaaaagcatggaataccaattccaaaggataaaaagggtgcaccaccattttcagtagatgataatttgtttcacacatcaactgaaggaaaagctttagagaatccaaaaaattcagctcctgaatttatttttcaaagaacaacttctccagaaaaagcaccaaataaagcctcctatgtaataataggatttaaaaatggagaccctgtaactattaatggtaaaaaattatctccttcaaaacttttggaaagtctcaaccatctagctggtcaaaatggaattggaagagttgatcttgttgaaaatagatttattggaataaaatcaagaggtgtttatgaaactcccggtggaactttattgatcaatgctcatagagcaattgaatctgttacgttagataaagaaactatgcataaaaaagatgatataatgcctaaatatgcagaactcatttataatggttattggtattcaaaaacgagatttaaacttcaaaaaattgtcgatcaaaaaagaaacaaagtcaatggatctgttaaacttaaactatacaaaggtaatattacaattgtatctagacaaactaaaagtaatgcttattcaatgaaaaaagtttcgtttgaagaaaataaaacatttaataaatcaaatgttgagagatttattaatttccataaaaaaaatttaaaataaa

SEQ ID NO: 316527 - DNA, 318 bp, Unknown
  Bacterial polypeptide expressing nucleotide sequence isolated from the Sargasso Sea
aatgaaatcaaaaaaaaagatagtacttgcctattcaggtggtctagatacatctataattttaaaatggttacaagaaaattataaagcagaaatcattgcctatactgctgatatcggtcaagaaatagataaaaaaaaaataataaaaaatgcaaaaaaacttggtgttaaaaaaataataataaaagatttaaaagatacttttattaaagaatatgtttacccaatgttaaggggacatgcaatttatgaaggtgtctacttattaggaacttctattgcaagaccattaattgctaaggaccaaataagaat

SEQ ID NO: 316528 - DNA, 478 bp, Unknown
  Bacterial polypeptide expressing nucleotide sequence isolated from the Sargasso Sea
aaaattaaattcctggaaaacatttcttaccaaattaaattttttattggctggaaaaaatggcataggaagagtcgacctagttgaaaataggtttcttggaattaaatcaagaggagtttatgagacaccaggtggaacacttttgatacacgcccacagagctatcgagtcagtgacattggataaagaaacaatgcacaaaaaagattccattatgccaaggtatgccgaactgatttacaatggttattggtactcaaaagaaagatttaaattacaaaaaattattgatcaaaaaaaaaataaggtaaatggatctgtaaaacttaaactatacaaagggaatattactatcctatctagaattacaaagagtaatgcatactcgatgaaaaaagtttcttttgaagaaaataaaacgttcaataaatctaatgttgaaagatttattaattatcataagaaaaaactgtaa

SEQ ID NO: 316529 - DNA, 757 bp, Unknown
  Bacterial polypeptide expressing nucleotide sequence isolated from the Sargasso Sea
attgcgcctggagatttggaaattaaaatcgagaacagatctaatcaattatgcaaaaaaacatgggatacccattccaaaagataaaaaaggtgcaccacctttctcagttgatgataatttatttcatacgtcaacagagggaaaagttttagaaaatcctaaaaattctgcacctgaatttatttttcaaagaacaacttctcctgaaaaggctccaaataaaccaagctttattactattaattacaaaaatggtgaccctgttggtttaaatggaaaaaaattatctccatcaaaagttttggataaattaaatctattagctggaagaaatggaataggaagagtggatttagtcgagaatagatttattggaataaagtctagaggagtttatgaaactcctggaggaacattattgcttgtggcacacagagcaatagaatctgttactctagacaaaaatacaatgcataaaaaagatgaggttatgccaaggtatgcagagcttgtttacaatggcttttggtattcaaaggaaagatttaaactacaaaaaattgttgattcaaagagaaataaagtaaatggatcagtaaaactcaaactttataaaggtaatattacaattcaatcaagacaaacttccagtaatgcttactcgatgaaaaaagtttctttcgaagaaaataaaacttttaataaatcaaatgtagaaagatttattaactttcataaaagaaaattaagataa

SEQ ID NO: 316530 - DNA, 574 bp, Unknown
  Bacterial polypeptide expressing nucleotide sequence isolated from the Sargasso Sea
atttttcaaagaacaatttctccagaaaaagcacctaataagccttcttttgtaactataggatttaaaaatggagatccagtaactgtgaatggtaaaaaattatctccttcaaaacttttggaaagacttaatcatctagctggtaaaaatggtattggcagagttgatcttgttgaaaatagatttattggaataaaatcaagaggtgtttatgaaactcccggtggaactttattaatcaatgctcatagagcaattgaatctgttacattagataaagaaactatgcataaaaaagatgaaataatgcctaaatatgcagaactcatttacaatggttattggtattctaaagcaagatttaaacttcaaaaaattgtcgatcaaaaaagaaacaaagtcaatggatctgttaaacttaaactatacaaaggtaatattacaattgtatctagacaaactaaaagtaatgcttattcaatgaaaaaagtttcgtttgaagaaaataaaacatttaataaatcaaatgttgagagatttattaatttccataaaaaaaatttaaaataaa

SEQ ID NO: 316531 - DNA, 358 bp, Unknown
  Bacterial polypeptide expressing nucleotide sequence isolated from the Sargasso Sea
actgcaaaaaaaagttgtgcttaaaaaaaaaactaaaattgttttagcttattcaggagggctagatacctctataattcttaaatggttacaagaaaattataaagctgaagtgatagcttataccgcagatattggacaagaaataaataaaagaaaaattattcaaaatgcaaaaagattaggagtaaaaaatattatcattgaagatttacaaaatatatttgttaaagactatgtttttcctatgataagaggtcatgctttgtatgaaggaacttatttattaggcacatcaatagctagaccccttattgctaaaagacaaattgctattgcaaaaaaatttaaggcattt

SEQ ID NO: 316532 - DNA, 691 bp, Unknown
  Bacterial polypeptide expressing nucleotide sequence isolated from the Sargasso Sea
catagtaatacctaaagataaaaaaggtgctcctccattttctattgatgataatttattccacacttcaactgagggcaagattttagaaaacccaaaaaactatgcaccagaatttatctttcaaagaaccacgtctccagaaaattcacctagcaaaccaacatttgtaactataaattttaaaaatagtgatccatatggaattaatggaaaaaaattatctccttctaaattgttggaaaagttaaatatattagcaggtaaaaatggaataggcagagttgaccttgttgaaaacagatttataggaataaaatctagaggagtatacgaaacacctggtggtacacttttaataaatgcacatagggctatagagtctgtaactcttgataaagaaactatgcataaaaaagatgagatcatgccaagatatgctgaactaatttacaatggttattggttctccagagaaagatttaagcttcaaaaaataattaaccataataaaaacaaggtgaatggatcagtgaaattaaagctttataaaggaaatattactatttattcaagaaatactaaaagcaattcatactcagtgaaaaaagtttcatttgaagaaaataaaactttcaacaaattaaatgttgaaaattttataaatttccataaaaaaaaattaaaataa

SEQ ID NO: 316533 - DNA, 340 bp, Unknown
  Bacterial polypeptide expressing nucleotide sequence isolated from the Sargasso Sea
attgcttttaattgctcatagagcaatggagtctgtaacactagataaggaaactatgcataaaaaagacaccataatgccaagatatgcagaattaatttacaatggttactggttttcaaaagaaagattcaaattacaaaaaattgtggatctaaaaagaaacaaggtaaatggaaatattaagttaaaactttataaaggaaatgtttcaattcagtcaagaatgactactagtagtgcttattcaatgaaaaaagtttcttttgaagaaaataaaacttttaataaatccaatgttgaaagatttatcaatttccacaaaaaaaaattaaaataa

SEQ ID NO: 316534 - DNA, 778 bp, Unknown
  Bacterial polypeptide expressing nucleotide sequence isolated from the Sargasso Sea
tggtcctaaaattaaaataattgcgccatggagaatttggaaattaaaatcaagaactgatcttattaaatatgcaaaaaaacatggaatattaattccaaaagacaaaaaaggtgcaccacctttctcagttgatgataatttatttcatacttcaacagagggaaaagttttagaaaatccaaaaaattctgcacctgaatttatttttcaaagaacaacttctcctgaaaaggctccaaataaaccaagctttataactattaattacaaaaatggtgaccctattggtttaaatggaaaaaaattatctccagcaaaagttttagataaactcaatcaattagctggaaaaaatggaataggaagagtggatttagtcgagaatagatttattggaataaaatcaagaggagtttacgaaactccaggaggaacattattacttgttgcacatagagcaattgagtctgtaactttagataaagatacaatgcataaaaaagatgaggttatgccaagatatgcagagcttgtttataatggttattggtattcaaaggaaagatttaaactacaaaagattgttgatttgaagaaaaataaagtaaatggatcagtaaaactcaaactttataaaggaaatattacaattcaatccagacaaacttccagtaatgcttactcgatgaaaaaagtctctttcgaggaaaataaaacttttaataaatcaaacgttgaaagatttatcaacttccataagaaaaaattaagataa

SEQ ID NO: 316535 - DNA, 178 bp, Unknown
  Bacterial polypeptide expressing nucleotide sequence isolated from the Sargasso Sea
atgagttcaattaaaaaagtcgttttagcctattcaggtggtctagatacatcggctatcgtgccatggttaaaagagaactacggctgtgaagtaatcgcgtttgttgccgatgtaggtcaaggcgcagaagagcttgaaggcgttgaagaaaaagccatcgcatcaggcgcatcag

SEQ ID NO: 316536 - DNA, 718 bp, Unknown
  Bacterial polypeptide expressing nucleotide sequence isolated from the Sargasso Sea
tttgattaagtacgcaaaaaaaaacaaaatacctatccctaaagataagaaaggtgcaccacccttttctgttgacgataatttatttcatacctctacagagggaaaggcattagaaaatccaaaaagctttgccccagagtttatatatcaaagaacaatatctccagagaaagctccaaataagccaagttttgtgaccatcaattttaaaaatggagatccttatggaattaatggaaaaaaaacttctcctgctaaacttttagaaaaacttaatcagttagctggtaaaaatggaattggaagagttgatctagttgaaaatagatttataggaattaagtctagaggcgtttatgaaactcctggtggaacattattacttcatgctcatagagcaatagagtccgtcactcttgataaaaagactatgcataaaaaagatgaggttatgccaagatatgcagaattaatttataatggatattggttttcaaaagaaagatttaagttacaaagagttattgatgataaaagagataaagtgaacggttcagtaaaattaaaactctataaagggaatataacaattttctcaagacaaactaaaagcaaagcttattcaatgaaaaaagtttcgtttgaggaaaataaaacatttaataaatcaaacgttgagagatttattaattttcacaaaaaaaagctaaaataa

SEQ ID NO: 316537 - DNA, 765 bp, Unknown
  Bacterial polypeptide expressing nucleotide sequence isolated from the Sargasso Sea
ttattgcgccttggagaatttggaaacttaaatctcgaactgatttgattaattatgcaaaaagacatggaatacctatcccaaaagataaaaaaggtgctccaccattttcagttgatgataatttatttcatacttctactgagggtaaagttttggaaaatccaaaaaattcagctcctgaatttatttttcaaaaaacaacttctccagaaaaagcacctaacaaaccttcttttataactataggatttaaaaatagtgatcctataactattaatggtaaaaaattatctccttcaaaacttttagaaagactcaaccaattagctggtaaaaatggaattggaagagttgacctggttgaaaatagatttattggaataaaatcaagaggtgtttacgaaactcctggaggaactttattaattaatgctcatagagcaattgaatcagtaacattagacaaagataccatgcacaaaaaagatgaaataatgccaaaatatgcagagctcatttacaatggttattggtattcaaaagcaagatttaagcttcaaaaaattgttgatctaaagagaagtaaagtgaacggatctgttaagctcaaactatacaaaggtaatattacaattgtgtctagacagactagaagtaatgcttattcaatgaaaaaggtttcttttgaagaaaataaaacattcaataaatctaacgttgaaagatttatcaattttcataaaaaaaatttaaaaaaataaa

SEQ ID NO: 316538 - DNA, 959 bp, Unknown
  Bacterial polypeptide expressing nucleotide sequence isolated from the Sargasso Sea
ttaaactcgggtgcatctaaatcaatcgttggcaatttagttaatagttttgttgagagatacgcttttccagccattagagcaaacgcattatatttagataaatatcctttatctactgctcttgctaggcctttaattgctgaaaatcttgtgaatattgctagagagattaatgccgatgcagtagctcatggatgcactggtaaagggaatgatcaagttcggttcgatttagcaattaacgctttaggtcctgatttaaaaataataactcctgcaagggagtggaatatgagtagagaagaggcgatagtttatggagaaaaatttggtataccagcgccagtatcaaaaaaatcaccatattcagtagacgttaatttacttggtaggagtatcgaagcaggtatattagaagacccaatggaagaagcacctgaggatatattttcgatgacatcatcagttgataattcacctgatttccatcaagatatagaaattgttttcaaaaatgggtttccagttggaattaatgatgaatttttaactccagtagagatcattcaaaaagctaatgatctcgcaggtaaccacggttttggaagaatagatatgattgaggatcgagtagtaggaatcaaaagtagagagatttacgaaacccctggcctcttacttttaatcaaagctcacaaagaattagagagcataacattaaaccccgacgttatcgattttaaaggaatagtcgaaaaaaaatggggtcaattagtttatcaaggtttttggtttgggcctcttaaagaaagtttagatgcatttatatcatctactcaaacttcagttaatggaagagtaaagattagactttataaggggaacgcaatagtcattgggagaatgtcggaaaataattcactttacagggaagatttggcaacttacagcaaaga

SEQ ID NO: 316539 - DNA, 783 bp, Unknown
  Bacterial polypeptide expressing nucleotide sequence isolated from the Sargasso Sea
aaataattgctccttggagagaatggaatttaaactcaagaacaaaacttttaaactatgctaaacaaaataaaattgattttccatcctcaaaaaaaaatgagccaccatactctatggatgcaaatttattacatatctcttatgagggaaaaattttagaagacccgtggaaatctccgccagaaaatatgtggacttgggtaaattcagtgcaaaaagcaccaaataaacctacagacattattatagaatttcaaaaaggagacccaataaaaatcaattcaaaaaaatattcgcccgctaccattttagaaaaattaaataatttaggagcaaaaaacggtgttggtagaattgatattgtcgagaacagatatattggcatgaagtcaagaggatgttatgaaactccggggggaaccataatattaatggccagaagagctctagagggaattacagtcgataaagaattacttcacatgaagcaagagcttatgcctaagtacgcaaaactaatttataatggttattggtggagcccagagaggaacgcattacagggacttattaatgaaagtcaaaataaagtaagtgggcatgttaagttaaggcttataaaaggtaatgtaattattttaggaagaaagtctgaaaattccatttataacgctgatttatcaacttttgaagatgatatgggcgaatataatcaaaaagatgcagagggttttattaagctgaatgctttgaggcttaaatctttggcaaaaaagtaat

SEQ ID NO: 316540 - DNA, 808 bp, Unknown
  Bacterial polypeptide expressing nucleotide sequence isolated from the Sargasso Sea
atgaggtctaggaaggttgttctagcttactctggtggcttggatacttccgtcattgcgaaatggcttatggaagagcatgaccttgaagtagtcacctttacagcagacattgggcagggagaggaaacaagagatgctagggttaaagcaaaaaaattaggtatcaaaaaaatttatattgaggatttacgtgaagattttgttaaaaattacgtatatccaatgtttagagcaaatgcgatttatgaaggagaatattttttaggaacgtcaattgcaagaccattaatcagcaaacggcttatagaaatagcaaaaaaagaaaaagctgattacatatgtcatggtgcaacaggtaaaggaaatgatcaagttaggtttgaactagccgcctatgcattaaatccaaaaataaaagtaatagcgccatggagagaatgggacttcgtttctagatctgatttgatgagatatgctaaaaaacatcaaatcgcagttgattttgatcatggaaaaaaaagtccttattcaatggatgcaaatattttacatacatcatatgaaggagggatacttgaagatccatggaggaaaccagaagaatctatgtggctaagaactaaatcgctcgaaaatagcaaatcaaaaccacagcgtttagatcttaccttcaccaagggtgatatttctgccgtcaatggcaagaaaatgagtccttcgaatgtacttcatcatttaaatatcatggcaggtaatcatggtataggtagggatgatatagtagaaaatagatatgttggaatca

SEQ ID NO: 316541 - DNA, 661 bp, Unknown
  Bacterial polypeptide expressing nucleotide sequence isolated from the Sargasso Sea
tgcatctagtgaaggaaaaattttggaagatccctggattgaggcagaagagtttatttattcgcgcactatagctccggaagatgcacccgataaaccaacttatattgaaattggttttgataaaggagatgcaaccagcattaacggcacagctcttagcccagccaacctcctgtctcaactaaatcaatttggaacggaaaatggtataggacgtcttgatttggtagaaaaccggtttgttggtatgaaaaatcgcggtttgtatgaaacgccaggtggcacaattttacatgccgctcatcgcgccatcgaaagtttaactttggaccgaggcatggcacacttaaaagatgagttaatgcctcgttatgctgaactaatatacaatggtttttggtattcacctgaacgagaaatgcttcaatcagcaatagattttagccaaagaaatgtcaacggcaccgtgcgcttgaaattatacaaaggtaacacgattgttgtcggaagaaagtccgaaaaaagtctttattcagcggactatgtgacatttgaacaaggagctgctgattacaatcatgctgacgcgcatgggtttattcggctcaacgcactgcggttgcgcttaaataaaatgatgttagacgatgaaaaataa

SEQ ID NO: 316542 - DNA, 915 bp, Unknown
  Bacterial polypeptide expressing nucleotide sequence isolated from the Sargasso Sea
cagaaaatctcgtaaatattgctcgagaggttagtgctgatgcagtggctcatggatgcactggtaaagggaatgatcaagttcgatttgatttagcaataaatgctttaggtcctgatttaaaaataattactcctgcaagggaatggaatatgagtagggaagaggcaatagtgtacggagaaaagtttggtattccagcaccagtatcaaaaaaatctccatattcaatagatgttaatttactgggtaggagtattgaagcaggcatattagaagacccaatgaaagaagcacctgaagatatttttgcaatgacatcatctattgagaattcacctgattctcctcaagaagtagaaattattttcaaaaatgggtttcctgttggaattaatgatgaatctctaacccccgtagagatcattaaaaaagctaatgttctcgcaggtgagcatggttttggaagaattgatatgattgaagaccgagtagtaggaattaaaagtagagagatttacgaaacaccaggcctcttgcttttaatcaaagctcacaaagaattagaaagcattacattaaatccagacgttgtcgactttaaaggaatagttgaaaaaaaatggggtcaacttgtctatcaagggttttggtttggacctcttaaagatagtttagattcatttatttcgtcgactcaaactacagttaatggaagagtaaagattagacttcataaggggaacgcaataataatcggcagaatgtccgaaaataattcactttacagagaagatttagcaacttatagcaaagacgatgtttttaatcattctttagcggagggttttatttatatgtggggtatgtctaataaaatatgggctgaattaaattcaaaaacaaaagattaat

SEQ ID NO: 316543 - DNA, 928 bp, Unknown
  Bacterial polypeptide expressing nucleotide sequence isolated from the Sargasso Sea
aatgctacaaaaaaagcttgtagctaatttaatgaaatctaagaaaaaaattattttagcttattctggagggcttgatacttctataattttaaaatggcttcaagaaaattataatgctgatgtaatttgttataccgctgatatcggacaaaaaattgataaaaaaaaaattataactaatgcaaagaaatttggagttaaaaatataattattaaagacctaaaaaataaatttgttaaagattatgtttatccaatgattagagggcatgcaatttatgaaggtgtttatttattaggaacatcaatagcaagaccactaattgcaaaagatcaaattagagtagcaaagaaatttaaagcctatgcagtttcacatggatcaactggaaaaggaaatgatcaagtaagatttgaattaggctatcattattttggacctaaaataaaaataattgctccttggagaatttggaaattaaaatccagaacagatcttattaattatgcaaaaaaacatcatatacctattccaaaagataaaaaaggagcccctcctttttcagttgatgataatctttttcatacatcaacagaaggtaaagttttagaaaatccaaaaaattctgctcctgaatacattttccaaagaacaatatcgcctgaaagagcacctaataaagctagttttattacaatcaattttaaaaatagtgatccaataggagtgaatggaaagaaacttgctccttcaaaattattacaaaaattaaatcaaattgcaggaaaaaatggaataggaagaatcgatttagtagaaaatagatttattggaataaaatctagaggagtttatgaaacgcctgggggaactttattaatgcaagctcatagagcaatagagtcggtaactctagataaagaa

SEQ ID NO: 316544 - DNA, 754 bp, Unknown
  Bacterial polypeptide expressing nucleotide sequence isolated from the Sargasso Sea
tatgaaagatataaagaaagttgtactcgcttattcaggaggtctcgatacctccataattttgaaatggcttcaggaaatttatgactgtgaggttgtgacatttaccgcagatctcggtcagggagaagaacttgaaccagcgcgtagcaaggctcaaagcatggacgtaaaagagatttacattgaagatttaagagaagagtttgtttccgagtacgtattcccaatgtttagagctaatgctatttacgaaggagagtatcttctaggaacttctatagcgagacctcttattgcaaaaagattagtagagatagcagaagagacaggggcagatgcaattagtcatggtgcgacagggaaaggcaatgatcaggtccgttttgaacttggcgcctacgctctaaatccaaatattaaaataattgcaccatggagagagtgggatctgggttcaagaaaaagtcttctagattacgcagcaaagcatggaataccagttgaaatgaaaaggggtaatgaatcgccatattcaatggatgcgaatctgctgcacatttcttacgaaggcggtcctttagaagatccatggaacgagccttcctcagagatgtggcgttggacagtaaatccagagcttgcacccaacgaagccacctatgtagatttagagttcgaaaatggcgacccagtcgggatcgatgattcgaagatgtccccttcagaactcctaactgaactgaatcgatta

SEQ ID NO: 316545 - DNA, 838 bp, Unknown
  Bacterial polypeptide expressing nucleotide sequence isolated from the Sargasso Sea
ttcacatggatctacaggaaaaggtaatgatcaggtaagatttgaacttggttatcattactttggtccaaaaattaaagttattgcaccttggagaatttggaagcttaaatctagaactgatttaattaattatgcaaaaaaacatggcatacctattccaaaagataaaaaaggtgctccaccattttcagtcgacgataatttatttcatacttctactgaaggtaagcttctcgaaaatccaaaaaattcagctcctgaatttatttttcaaagaacaacttctccagaaaaagcacctaacaaatcttcttttatatctataggatttaaaaatggtgacccaataaatattaacggtaaaaaattatctccttcaaaacttttagaaaaattaaattccattgctggtaaaaatggaattggaagagttgacctggttgaaaatagatttattggaataaaatcaagaggtgtttatgaaactcctggaggaactttattaattaatgctcatagagcaattgagtctgtaacattagataaagaaactatgcacaaaaaagatgaaataatgccaaaatatgcagaacttatttacaatggttattggtactcaaaagcaagattgaaacttcaaaaaattgttgatcaaaaaagaaataaagtaaatggctcagttaaactaaaactatttaaaggaaatattacaattgtatctagacaaaccaaaagtaatgcttattcgatgaaaaaggtttcctttgaagaaaataaaacattcaataaatcaaacgtcgaaagatttattaatttccacaagaaaaaactataa

SEQ ID NO: 316546 - DNA, 574 bp, Unknown
  Bacterial polypeptide expressing nucleotide sequence isolated from the Sargasso Sea
aatgaattttaaaaaaaaaatcgtactcgcctattctggtgggttagatacttctataattttaaaatggttacagaaaaattataaagcagaagtaatcacttacacagcagatattggacaaaaagttaataaaaaaaaaattattaataatgcaaaaaaacttggagtaaaaaaaataattataaatgatttaaaaaatgtatttgtaaaagaatatatatttcctatgataagaggacatgctatttatgaaggggtatatttgcttggtacttcaatagcaagacctttaattgccaaagatcaaatacaaattgcaaaaaaatataaagcgtatgcagtttctcacggttcaactggaaaaggtaatgaccaagttagatttgaattgggatatcattattttggacctaaaataaaaatcatagcaccgtggagactttggaaacttaaatcaagatcagatttaataaaatatgcaaagaaacataaaataataattcctaaagacaaaaaaggtgaaactcctttttcagtagatgacaatttatttcatacatctactgaaggt

SEQ ID NO: 316547 - DNA, 790 bp, Unknown
  Bacterial polypeptide expressing nucleotide sequence isolated from the Sargasso Sea
cccctggcgcgagtgggatctcaactcccgggagaggctcgtggcctatgcaaaagaacatggcatcccggtagagacccgcaaggatggcggtgcagattattcgatggatgcaaacatgctccatatttcctacgaaggtggagagttggaagatccatgggtagctcctgatgaagccatgtggcgttggacagtatcgccacaggaggctcccaacgcgccagaatctatcgagctgaccttcgcgcggggtgacccggtcgccgttaatggagaattgctcagccctgcccagatgcttgaagcgttgaaccaacttggggcgcgtcacggaatcggccggatagaccttgtagaaaaccgctatgtcggcatgaaaaaccgggggtgttatgagacgcccggcggaacgattttgctaaaagcgcatcgggctatcgagtccatcacacttgaccgcgaggtcgcccacctcaaggacgagttgatgcctcgctatgcatctctgatctataacggttactggtttgcgccggaacggcagatgcttcagcggatgattgatgaatcgcagcgggcagtgaacggcgtcgttcgactcgagttgtacaagggaggggtgatggtggcgggccggtcttcggcaacagattcactgtttgatgagagcgtggtgacgtttgaggatgatcagggggcctatgaccaggcggatgcagatggctttatcaagttaaatgctctcagattaagaattgctggtcgtaagggtcgaacacagacctga

SEQ ID NO: 316548 - DNA, 514 bp, Unknown
  Bacterial polypeptide expressing nucleotide sequence isolated from the Sargasso Sea
atggataaagtaaataaagttgttcttgcttactcaggtgggctcgatacatccgttatattaagatggcttaaagaaacctactcgtgcgaggtagtaacatttaccgcaaacttaggccaagatgaagattatgatttggttgagaaaaaagcaactcagcaaggcgttaaagaaatcttcattgaagatctcaaagaagagtttgtccgtgattacgtttttcctatgttcagagccaatccactttatgaaggctactatcttttaggcacatctatcgcgagacctttgattgcacaaaaacaaattgaaattgcaaacaaagtaggagccgatgctgtttcacatggcgcaacaggtaaaggtaatgatcaaattagatttgagttaggttattattatcataaacctgatattaaaatcatcagtccatggagagaatgggatcttacttctcgaacatctttggttgaatatgctgatcaacacggtatgaaatgcaaaagataaa

SEQ ID NO: 316549 - DNA, 511 bp, Unknown
  Bacterial polypeptide expressing nucleotide sequence isolated from the Sargasso Sea
accctgagcccggccgatgtgctgaccaagctgaacaagctgggtggagataacggcattggccgcctggatatcgtggaaaaccgctatgtgggcatgaagtcccgtggctgctacgaaacacccggtggcactattatgttgccggctcaccgtgccatcgagtctctgacactggatcgtgaatctgcacacttgaaagattcggtaatgcccaagtacgcggagctgctgtacaacggttactggtggagcccggaacgtctggctctgcagaagctgattgatgccacccaggaacacgtgaacggtgaagtacgcctgaagctctataaaggcagcgtgactgtggtgggtcgtcgttccgacaatgacagcttgttcgacgcctccattgctacttttgaagacgatgccggtgcttatgatcagaaggacgcggaaggctttattaagctaaatgctctgcgcttacgtattgcggctaaaaccggccgtaagcttagctaag

SEQ ID NO: 316550 - DNA, 466 bp, Unknown
  Bacterial polypeptide expressing nucleotide sequence isolated from the Sargasso Sea
tatgaaaagaaaaaagaaaattatcttagcttattcaggtggactagatacgtctgtgattttaaaatggcttcaagatcatcatggttacgaagtagtgacctttactgctgatattggtcaaggtgaagaactcagtccagcgaaagaaaaagcggtcaatctaggtgttaaaaaaatatatattaaagatttgcgtgaagagtttgttcgagattttgtttttcctatgtttagagcaaatactgtctatgaaggtgaataccttctaggtacttctatagctagacctttgatagcaaaacacctagttgaaatagctaagaaagaaaaaactgatattatttctcatggcgcaactggaaaaggaaatgatcaggttcgctttgaaattggagcttatagtcttttccctagagtacaaattgttgctccatggcgagagtggaatttaacatcaagagaa

SEQ ID NO: 316551 - DNA, 797 bp, Unknown
  Bacterial polypeptide expressing nucleotide sequence isolated from the Sargasso Sea
tggaggacttgatacgtctataattttaaaatggcttcaagaaaattatgatgcagaggtaatttgctacactgcagatgttggccaagagattgatagaaaaaaaattatctctaatgcaaagaaatttggtgtaacaaaaataattattaaagatttaaaagatgtctttgtaaaagattatgtttatccaatgatcagaggtaatgctatttatgaaggtgtctacttgttaggtacgtctatcgcaagaccgcttatagctaaagatcaaatcagagttgctaagaaatttaaagcatatgcagtctctcatggtgcaaccggtaaaggaaatgatcaagtgagatttgaactaggttatcattactttggaccaaaaataaaaatcatagcaccttggagaatatggaaattaaaatctagaactgaccttattaattatgcaaagaaaaataatattaatattccaaaagataaaaaaggtgctccccctttttcggtagatgataatttatttcacacctctacagagggtaaacttttagaaaatccaaaaaattctgcccctgaatttattttccaaagaactgttgctcctgaaaaagctccaaataaagcttctttagtttcaatcaattttaaaaatggagatccttacggtgttaatggaaaaaaaatttctccagcaaaattattagaaaaattaaaccaactcgcaggtaaaaatggaattgggagagttgatttagttgaaaacagatttattggaattaaatccatgaggggtttatgaa

SEQ ID NO: 316552 - DNA, 382 bp, Unknown
  Bacterial polypeptide expressing nucleotide sequence isolated from the Sargasso Sea
atagaaattgctaaaataactggtgctgatgctgtttcacatggtgctacaggaaaaggaaatgaccaagttcgatttgaattaagttattatgctcttaatcctgatattaaggttatagctccctggagaatttgggatttaagctctaggagtaaattaattgattttgctgaaaaaaaccagatatatatatccaaagataagagaggtgaagcaccatattcagttgactcaaatatcttacatacatcaagtgaaggaaaagttttagaagatcctagtatagaaccagaggagtatgtgttttcaagaactctatctcctgaaactgctccaaacgaacctatatatacagaattaatttttgaaaaagtgtgat

SEQ ID NO: 316553 - DNA, 607 bp, Unknown
  Bacterial polypeptide expressing nucleotide sequence isolated from the Sargasso Sea
accacctgagcatattttttctagaacaaaatctattcaagatactccaaataaagcagaaattatcacaattggatttgaaaacggcgacccaatttatttagatgaaaacaaactaaaacctcacgaaattcttaaaagattaaattctatagctggaagtcatggagtaggaagaatagatattgttgagaatagatttgttggaatgaaatcaaggggcatttatgaaacacctggaggcacaatattattacacgctcgaagagcaattgaaagtataactctagacaaaggtgaagcacatctaaaagatgagataatgccaaaatattctgaaataatctataacggtctttggttctcttctgaaagaatagcaatgcaatctttaatagattctagtcagaataaagtaaacggagaagtgaaagtaaaaatttttaaaggtaatgtaattactattggaaggagatctcaaaattctctatacgactcatcattagtttcatttgatgaaaagggagattatgaccaaaaggatgccgaaggttttattaaaataaactcaattcgattaaaaaaagcaaaattagatcaatcataa

SEQ ID NO: 316554 - DNA, 563 bp, Unknown
  Bacterial polypeptide expressing nucleotide sequence isolated from the Sargasso Sea
aatgaaatcaaataaacgaattatactcgcttactcgggtgggctagatacctcaattattttaaaatggcttcaagaaaattataaagcagaagtcattgcttatacagctgatattggacaagaaattaatcgaaaaaaaataattaataatgcaaaaaaactaggtgttaaaaaaatagtaataaaagatttaaaaaatacttttgttaaagattatgtttacccaatgataagaggacatgctgtttatgagggtgtctatttattgggaacttctattgcaagaccattaattgcaaaagatcaaataagagttgcaaaaaaatttaaggcttatgcggtttctcatggttcaacaggtaaaggaaatgatcaagtaagattcgaattgggttatcattattttggaccaaaaataaaaataatagctccttggagaatttggaaactgaaatctagaactgatttaattaattatgcaaaaaaatatggaatagcaattccaaaagataaaaaaggtgctccaccattttccgttgatgataatttattccacacat

SEQ ID NO: 316555 - DNA, 404 bp, Unknown
  Bacterial polypeptide expressing nucleotide sequence isolated from the Sargasso Sea
aatgaaatcaaaaaaaagaattgttttagcttactcgggagggttggacacatctataattttaaaatggctccaagaaaattataatgctgaagtaatttgctatacggcaaacataggccaagaaattaataaaaaaaaaattatttctaatgcaaaaaaatttggagttaaaaatataattattaatgatctaaaagatatttttgtaaaagattatgtttacccgatgatccgtggacatgccatttatgaaggtgtgtatttattaggaacttcaattgcaagaccattgattgcaaaagaccaaattaaagttgcaaaaaaatataaagcgtatgcagtttctcatggtgctactggcaaagggaatgatcaagttagatttgaacttggataccatt

SEQ ID NO: 316556 - DNA, 913 bp, Unknown
  Bacterial polypeptide expressing nucleotide sequence isolated from the Sargasso Sea
tttgtaaaagattatgtttatccaatgattagaggacatgctttatatgaaggaacttatttgcttggaacttcaatagctagacctttgattgcaaaaagacaaattgctattgcaaaaaaatttaaagcttttgcagtttcacatggagcaactgggaaaggaaatgatcaagttagatttgagctgggatattattattttggaccaaaaataaaagtaattgcgccttggagaatctggaaattaaaatccagaacagatttaattaaatatgcaaaaaaacataaaatacctgtgcctaaggataaaaggggtgcacctcctttttcggttgatgacaatctttatcatacttcaactgagggtaaagttcttgaagatccaagaagacaagctccagagtatatttttcaaagaacagtttctcctgaaaaagcacctaacaaatcatcttatgtaactattggatttaaaaaaggtgatcctgtttctgtaaataataaaaaattatctccagcaaaactgctccaaaaattaaatataattgcaggcaaaaatggtgttggaagagttgatttagttgaaaatagatttatcggaataaaatcaagaggtgtttatgaaacacctggtggaactcttttaatgactgcacatagagcaattgaatctgttactttagataaaaatactatgcataaaaaagacgagattatgccaaaatatgcggaactcatttataatggtttttggtattctaaagctagatttaaattacaaaaaattgttgatattaaaaaaaatcaagttaatggatttgttaaacttaaattatataagggaaatgttacaattttgtcgagacaaagtaaaagcaaagcatattctgtaaaaaaaagtttcttttgaa

SEQ ID NO: 316557 - DNA, 313 bp, Unknown
  Bacterial polypeptide expressing nucleotide sequence isolated from the Sargasso Sea
gatgggccgcgccaacaaggtggttctcgcctactccggcggggtggatacaagcgtctgcattccctacttgaagcaggaatggggtgttgaagaggtcatcaccttcgccgctgatctcggccagggcgatgagctggaaccgattcgtcaaaaggccttggatgccggcgcgagtcagtcgttggtgggggatctgattcagcccttcatcgaagagttcgccttccccgctatccgcgccaacgccctgtatgagggtcgctaccccttatccacagcactggcgcggccgttgatcgctcgccgactg

SEQ ID NO: 316558 - DNA, 895 bp, Unknown
  Bacterial polypeptide expressing nucleotide sequence isolated from the Sargasso Sea
tgcgtcttatgtatctcatggtgctacaggcaaaggcaacgatcaagttcggtttgagctaagttattacgcacttaaacctgatattcaagtgattactccttggaaaattccagagttttacaaaaaatatcccggacgttcagaattactagactatgcaaaaaaatttggtatacctgtcaaggccaccaaagaaagtccatggagttcagatgaaaaccttatgcatataagttttgaatcaggaatgctagaagatccatggcaagccccaattcaagagatgtttgaattatcaaattcaccacaaaaagctccttctaattctcaggaagttataattgaatttaaaaatggcaacgcaactgcagttgatggaaatgagtattcccctgcaaagttgctgaaacatttaaatgaaatagctggaaaacatggaattggcagagtagatatggtggaatcaagatttgtagggatgaaaaatcgtggtgtttatgaaacacctggtggaactatattacatatttcccatcgtgcaatagaatcaattacattaaaccgtggagttatcaatttaaaagattcgcttatgccaagattcgcacaattgacatacgatggtttctggttttcacctgaaatggaaattttactcgatatggtgaaaaaaactcaggaaccagttaatggcactgttcgtctggaactttacaagggaaattgcattgttacaggacgaaaatctcctaatagtttatacgttgaggatatggcaactatggaagcagatcatggcgcttatgatccaaaagatgctataggcttcatcaagcttcatgcgttgcctttaagaattcatgcaggattgaaagcaaactcagaaaagtag

SEQ ID NO: 316559 - DNA, 634 bp, Unknown
  Bacterial polypeptide expressing nucleotide sequence isolated from the Sargasso Sea
aatgaaaaaaattgttttggcctactcaggtgggcttgatacttcaataattctaaaatggcttcaagagaactataaagctgaagttattgcttatacttctgatattggtcaagaaatgaataccaaaaaaattattaagaacgcaaaaaaattgggtgtcaaaaaaatcattattgagaatttaaaaaatatatttgttaaagactacgtttttccaatggtaagagctcatgcagtctacgaaggtgtttatctattaggaacatcaatagcgagaccattaattgcaaaaagacaaatagctattgccaaaaaatttaaagcctttgcagtttctcatggcgcaactggaaaaggaaatgatcaagtaaggtttgagctagggtatgctttttttggtggaaaaaaaattaaagttatagctccttggagagaatggaaattacaatctagaactgacttaataaattatgccaaaaaaaataatattcctattccaaaagacaaaaaaggagcgcctcctttttcagtagatgataatctcttccacacttcaaccgaaggaaaagtacttgaaaatccaaaaaattctgctccagagtatatttatcaaagaactacttctcctgag

SEQ ID NO: 316560 - DNA, 399 bp, Unknown
  Bacterial polypeptide expressing nucleotide sequence isolated from the Sargasso Sea
gatgcagcaggtaaaaaaagttgtgctagcttattctggtggtgtagatacgagcgtttgtattccatatttaaagaatgaatatggaatttcagaggtagttgcttatgtggcagatcttggacaaggcgaggatttagaacttattagacaaaaagctttaaattctggtgcatctcattcaattgttggcaatttagtgaatagttttgttgagagatacgctttttcagccattagagcaaacgcattatatctagataaatatcctttatctacagctcttgctaggcctttaattgcagaaaatcttgtaaatattgctcgagagtttagtgctgatgctgtagctcatggatgcactggtaaagggaatgatcaagttcgatttgatttagc

SEQ ID NO: 316561 - DNA, 754 bp, Unknown
  Bacterial polypeptide expressing nucleotide sequence isolated from the Sargasso Sea
aatgaaattaaaaaaaaaaatagtacttgcctattcgggcggactagatacatcaataattctaaagtggttacaaaaaaactacaatgctgaaataatagcttatacggctgatattggacaaaaaataaataaaaaaaaaattattaaaaatgcaaaaaaacttggtgtaaaaaaagtaataataaaaaatttaaaagatatttttgtaagagactacgtttatccaataataagaggacatgctatttatgaaggtgtttatttattaggcacttctattgcaagaccattaattgccaaagaccaaattagaattgcaaaaaaatttaaagcttatgcggtttcgcatggatcaacaggtaaaggaaatgatcagataagatttgaactaggttatcattactttggatcaaaaattaaaattatagctccttggagaatttggaaacttaaatctagaaccgatttaattaattatgcaaaaaaacatggaataacaattccaaaagataaaaaaggtgcttcgccattttcagtcgatgataatttatttcatacatctacagaaggaaagattttagaaaatccaaaaaattcagctccagagtttatttttcaaagaacaactgctccagaaaaagcacccaacaaaccctcttttataactatagggtttaaaaatagcgatccaataactattaatagtaaaaaattatctccttcaaagcttttaagtaaattaaattttatt

SEQ ID NO: 316562 - DNA, 748 bp, Unknown
  Bacterial polypeptide expressing nucleotide sequence isolated from the Sargasso Sea
tatgaataacaaaataaataaagtagttttagcatattctgggggcctagatacttcagtaataatcaagtggttacaagaaaaatatgattgtgaaattgtcacatttacagctgacttaggtcaaggggctgaattagaagaggcagaaaacaaggcaaaatcattaggtattaatgaaatatttaccgaagatttgaaagaagagtttgtttcagaatatgtattcccaatgtttagggctaacactttgtatgaagggcagtatctactaggcactgcaattgcaaggccgttaattgctaaacgtcaaattgagattgctaaactgactggtgcagatgctgtttcacacggagctacaggcaaaggaaatgatcaaattagatttgaattaagttattactctttgaaccccgatataaaagtcatagctccttggagaacctggaatttaacttctagaagtaaattaatagattttgcagaaaaacatcagatttttattgcaaaagataaaaggggtgaggcgccgttttctattgattcaaatattttacatacatctagtgaaggcaaggttcttgaagaccctagtttagaaccagaggaatatatttattcaaggacaatttcacctgaaaaggctcctgataaggctactgtaactgaattaatttttgagaagggcgatttaatctcagttgatggcttaaattcatctccagctgttttgcttgaaactttg

SEQ ID NO: 316563 - DNA, 838 bp, Unknown
  Bacterial polypeptide expressing nucleotide sequence isolated from the Sargasso Sea
aaaaaaaataaaattgttttagcttactctggagggctagacacctctataatcttaaagtggcttcaagagaattttaattcggaaataattgcttatactgcggatattggccaagaaataaataaaaataaaattattaaaaatgcaaaaaaattaggcgttaaaaatatagttatagaggatttaaaaaatacttttgttaaagattacgtttatcccatgataagaggtcacgcattatatgaaggtgtttatttgttgggcacatcaatagctagacctttaattgcaaaaagacaaatcgcaatagcaaaaaaatttaatgcatttgcagtgtctcatggtgcaacaggcaaaggaaatgatcaagttagatttgaacttggttactattattttggaccaaaaattaaggttattgctccttggagaatctggaaattaaaatcaagaagagatttaattaaatatgcaaaaaagcacaatataccaatacctaaagacaaaaagggtgcaccacccttttcggtagatgataatctttttcatacatcaaccgaaggaaaaattttagaggatccaagaaaacaggcaccagaatatatttttcaaagaacaatctcacctgagaaggcacctaataaaccatcttatataactatagtgtttaaaaagggtgatcctgttgccatcaacaacaaaaaattatctccagcaaaacttctccaaaagttaaatttagttgcgggcaaaaatggtattggaagagttgatttagttgaaaatagatttattggaataaaatcaagaggagtttatgaaacgcctggaggaa

SEQ ID NO: 316564 - DNA, 438 bp, Unknown
  Bacterial polypeptide expressing nucleotide sequence isolated from the Sargasso Sea
aatgaaaaaaattgttttagcttactctgggggtttagatacctcaataattcttaaatggttacaaataaattataaagctgaagtcatcgcttatacttccaatataggccaagatttaaataaggagaaaataattcaaaatgcaaaaagactgggtgtaaaaaaaattataattgaggatttaaaaaatatttttgttaaagactatgtatttccgatgataagagctcatgctgtttatgagggcgtttatttacttggaacctcaatagcaagacctttaatagcaaaaagacaaattgaaattgcgaaaaaatttaaagcttttgccgtttcacacggtgctactggaaaaggaaacgatcaagtcagatttgagcttgggtactctttttttggtaaaagaatcaaagtaatagccccttggagagagtg

SEQ ID NO: 316565 - DNA, 640 bp, Unknown
  Bacterial polypeptide expressing nucleotide sequence isolated from the Sargasso Sea
tatgaagggaaagtttttggaagatccatggaaatctcctgatgagtcaatgtttatgagaacaatttcttacgaaaaagcgcctaataaagctactgtaatagaaattgaattcaaaaaaggagacccaattgcattaaacggaaaaaaattatccccatcatctctcttatcgaagttaaatacaattggtggaacaaatgctgttggaagaattgatatagttgaaaatagatttattggaatgaaatcaagaggtgtttatgagactccaggtggcacaatcttacaaatagctcatagagcgatagaaagtattacattggataaaggggcctctcatttaaaagatgaaataatgccaagatatgctgaattaatttataacggtttttggttttcgcccgaaagggaaatgcttcagtcattaattgataaaagtcagattaatgtaaatggaattgtgaggctaaaaatttacaagggaaacgtaattgtgttaggtcgtaaatcaaactcgagcatttattcgtcaaaaatggctacttttgaaagagatgacatttacaatcaaaaagatgctgagggttttatcaaactcaatgctttaaggttaaagttacttaagaaaggaacttag

SEQ ID NO: 316566 - DNA, 616 bp, Unknown
  Bacterial polypeptide expressing nucleotide sequence isolated from the Sargasso Sea
ccatctgaacaggtttggatgtggactaaatcacctgagcaggcaccggatcacgcggcctatgttgaactgagttttgttaaaggtgaactgactcaaatcaatggcaatgccatagcgcctgttgctgctattgagctactgaatgagattggctcagagcatggcgttggccgtattgatatcgtcgaaaaccgtctggttggtatgaaatcacgcggctgttatgaaacacctggcggcactattctgatggctgcattgaaagggctggaagcgctggtatatgaccgcacttctttgaaataccgtgaagaagtcggtctggagtttgcgcagctggtctatgacggccgctggttcacaccgctgaaagacgctttattggcagctgccacctcgttggcagaacagctgaccggtgatgtagtgatcaagctgtataaaggcaatgtcacggtagcgaagcgtcgctcacctaactctctgtactcagaggcgtttgcaaccttcgaaggtgatgaagtgtataaccagaaagatgcagcaggctttatccggttgtacagtctggccagtcggatccgcgcgctgcatcagcaacaaaaggattaat

SEQ ID NO: 316567 - DNA, 940 bp, Unknown
  Bacterial polypeptide expressing nucleotide sequence isolated from the Sargasso Sea
aattcttaaatggttacaattaaaatttgattgttctatagctgcctacacagctgatattggtcaaaatgacgattttaatcaaattagaattaaagctgaaaatttaggtgttaaagaaatttgtattgataacttaaaagaagagtttgttaaagattacatttttcctatgtttagagctaatgcagtttatgaaggagtttatcttttaggtaccgctatagccagacccctaattgcaaaaaagcaagtagaatatgcaaacaagattggagctgatgctgttgctcatggttcaacaggtaaaggcaatgatcaagtaaggtttgagattggatattatgcaacaaatccaaatattgaaattatagcgccgtggagactttgggattttaaatcaagagaagatttaataaattttgctaacaaatatcaaattagtgttcctaaagataaaattggagaacctccttttagtgtagacgaaaatatactacacacatcagctgaaggaaaggtattagaagatccgtggatttcacctcctaactatgttttttcaagaacaaaaagtatagaagattcttcttctacatcagacgaaataattatatcttttgattacggggatcctgtaaaaattaacgatgaaaattatagtccctatgaaatcttgaaaaaattaaatgaactaggcaataaacatggtatcggaagggtagatattgtagaaaatagattcattggaatgaaatccaggggaatttatgaaactccaggaggcaccatattatttcatgctcacagagctattgaaagtatcacattagatgctgaaacagcacacaaaaaagatagcataatctccgaatacgctgagttagtttataatggtttttggtttagtaaaaaagaaaaaacttacaggaaattgtag

SEQ ID NO: 316568 - DNA, 535 bp, Unknown
  Bacterial polypeptide expressing nucleotide sequence isolated from the Sargasso Sea
aatgaaaaaaattgttttagcctattcaggcggacttgatacttcaataattctaaaatggcttcaagaaaactataaagctgaagttatagcttatacttcagatattggccaaaaaatgaataaacaaaaaattattagaaatgcaaaaagattaggtgttaaaaaaataataattgaaaatctaaaaaatacatttgttaaagactatgtttttccaatggttagagctcatgcagtctatgaaggggtttatttattaggaacatcaatagcaagaccattaattgcaaaaagacaaatagctatagcaaaaaaatttaaggcctttgcagtttctcatggatctacaggcaaaggtaatgatcaagtgaggtttgagctggggtatgctttttttggaggaaaaaaaattaaagttatcgctccatggagagaatggaaattacagtctagaactgacctaattaattatgctaaaaaaaataacatacctgttccaaaggataaaaaaggagcgcccccgttttcagta

SEQ ID NO: 316569 - DNA, 625 bp, Unknown
  Bacterial polypeptide expressing nucleotide sequence isolated from the Sargasso Sea
atgagtaaaaatgttaaagtcaataaagtagtccttgcttattctggagggctggatacatctgtaatcttgaaatggctaaaagaaacctaccaatgtgaaattataacatttactgcagacataggtcagggtgaagaaatagagccagtgagaaaaaaagccagtgatcttggtattaaaaatatctttatagaagatttaaaagaagagtttgtaaaagattatgtctttcctatgtttagagcaaataccttatatgaaggggtttatcttctaggaacatctattgcaagacctttgattgcaaagaaacagattgaaatagcttgtgagatgaatgccgaagctgtttcccatggggcaacaggaaaagggaatgaccaagtaagatttgaattatcatatttaagtttaaatccaagaattataattattgccccctggagagagtgggatctttctagtagaactaaactcattcagtatgcagaaaaaaaccagatagcaatcccaaaagataaaaaaggcgaagctccatttagtgtagatgctaatttacttcatatttcagcagaaggaaaaattttagaagacccttggatagaacctaatgagttggttt

SEQ ID NO: 316570 - DNA, 880 bp, Unknown
  Bacterial polypeptide expressing nucleotide sequence isolated from the Sargasso Sea
aattagagttgctaaaaaatttaaagcttatgctgtttctcatggatcaacaggtaaaggaaatgatcaggtaagatttgagctcgcttatcattactttggaccaaaaataaaaataatagccccttggagaatctggaaacttaaatctagaactgatttaattaattatgcaaaaaaacaccgaatatctattcccaaagataaaaaaggtgctccaccattttcggtagatgataatttgtttcatacatcaactgagggaaaagttttagaaaatccaaaaaattcagctcctgaatttatttttcaaagaacaacttcgccagaaaaggcacctaacaagccttcttttgtaactataggatttaaaaatggtgatccaataagtataaatggtaaaaaactatccccatcaaagcttttagataaattaaattttattgccggtaaaaatggaattggaagagttgatctagttgaaaatagatttattggaataaaatcaagaggtgtttatgaaactcctggtggaaccctattaattaacgctcatagagcaattgagtcagttacattagataaaaaaactatgcataaaaaagatgaaataatgccaaaatatgcagaactcatttacaatggttattggtattcaaaagaaagatttaaacttcaaaaaattgttgatctaaaaagaaataaagtaaacggatctgttaagcttaagctatacaaaggtaatattacaattgtatctagacaaactaaaagtaatgcttattcaatgaaaaaagtgtcttttgaagaaaacaaaacatttaataaatcaaacattgaaagatttattaactttcataaaaaaaaactaaataaataa

SEQ ID NO: 316571 - DNA, 850 bp, Unknown
  Bacterial polypeptide expressing nucleotide sequence isolated from the Sargasso Sea
gcggtttctcatggttcaactggcaaagggaatgatcaagttagatttgaattaggttatcattattttggaccaagaattaaagtaattgcgccttggagaatttggaaattaaaatcaagaacagacttaataaactatgcaaaaaaaaatgatattccaattccaaaagataaaagaggagctccaccattttcggttgatgacaatatttttcatacttcaacggaaggtaaagttttagaagatccaaaaaattctgcaccggagtttatatttcaaaaaatcacctctccagaaaaagcacctaacaagccaagttttataactataaattttaaaaatagtgatccaataggtttaaatggtaaaaaattgtccccatcaaaacttttaagtaatctaaatgacttagcaggtaaaaatggaatcggaagagttgatttagttgaaaacagatttataggaataaaatcaagaggagtttatgaaacacctggtggcacaatactaatttcggcacacagagcaatggaatctgtgactttagataaaacgacaatgcatagaaaagatcaagtaatgcctagatatgcagaattaatatataatggttactggtattcaaaggaaagatttaaacttcaaaagattgttgatcaaaataaaaataaagtaaatggatctgtaaaattaaaactatataaaggcaacataactattcaatcaagaatcacaaaaagcaaagcatattctttaaaaaaagtttcatttgaagaaaataaaacttttaacaaatctaatgttgaaaaatttattaacttccataaaaaaaaactaagaaaatagg

SEQ ID NO: 316572 - DNA, 373 bp, Unknown
  Bacterial polypeptide expressing nucleotide sequence isolated from the Sargasso Sea
aatgaaaaaaattgttttagcttactccgggggtttagacacctcaataattcttaaatggctacaaataaattataaagctgaggtaatcgcttatacttcaaatataggtcaagatttaaataagaaggagataattcaaaatgcaaaaagacttggtgttaaaaaaattataattgaagatttaaaaaatatttttgttaaagattatgtctttccgatggtaagagctcatgctgtttacgaaggtatttatttactaggaacctcaatagcaagacccttaatagcgaaaagacaaattgagattgcaaaaaaatttaaagcttttgctgtttcacatggcgctactggaaaaggtaatgaccaagtt

SEQ ID NO: 316573 - DNA, 719 bp, Unknown
  Bacterial polypeptide expressing nucleotide sequence isolated from the Sargasso Sea
aatgaaaaagcaaaaaaagatagtgcttgcctattctggtggcttagacacttccataatacttaagtggcttcaggaaaaatataatgcggaagttatatcttataccgcagatattgggcaaaaaatcaatagaaaaaaaattcttaaaaatgcaaaaaaacttggtgtaaaaaaaatagtaattgaaaatctaaaagatttattcgtaaaagaatatatttatccaatgactagagggcatgcactttatgaaggcttttatttgttaggaacatctattgccagaccattaattgcgaaaagacagattgcaatagcaaaaaaatttaatgcttacgcagtgtcgcatggttcaacgggcaaagggaatgatcaagttagattcgaacttggatatcattattttggaccaaaaattaaagttattgcaccatggagaatatggaaattaaattcaagaacagatttaattaaatatgccaaaaaaaataaaataccaataccaagtgacaaaaagggagctccaccattttctgtagatgacaatttgtttcatacttcaactgaaggtaaagttttagaaaatcctaaaaatgcagcaccagaatttatttttcaaagaacaatctcacctgaaaaagcaaccaataaagcatcttatgtaacaatagaatttaaaaatggtgatccaataactgttaatggcaaaaaattat

SEQ ID NO: 316574 - DNA, 667 bp, Unknown
  Bacterial polypeptide expressing nucleotide sequence isolated from the Sargasso Sea
tggtaggagtattgaagcaggtatattagaagacccaatgcaagaagctcctgaggagatatttgcgatgacatcatcagttgataattcacctgattctcatcaagatatagaaattattttcaaaaatggatttccagttggaattaatgatgaatttttaactccagtagagatcattcaaaaagctaatgatctcgcaggtaaccacggttttggaagaatagatatgattgaggatagagtggtaggaattaaaagtagagagatttacgaaacacctggcctcttacttttaatcaaagctcacaaagaattagagagcataacattaaatcctgatgttatcgattttaaagcaatagtggaaaaaaaatggggtcaattagtttatcaaggtttttggtttggacctcttaaagaaagtttagatgcatttatatcatcgactcaaactgcagttaatggaagagtaaagattaggctttataagggaaacgcaatagtcattgggagaatgtcggaaaataattcactttacagggaggatttggcaacttacagcaaagatgatgtatttaatcattctttagcagagggttttatttatatgtggggtatgtctaataaaatatgggctgagttaaattcaaaaactaaagattaa

SEQ ID NO: 316575 - DNA, 473 bp, Unknown
  Bacterial polypeptide expressing nucleotide sequence isolated from the Sargasso Sea
aatggataaaataaataaagttgttcttgcatactcaggcggcttggatacgtcagtcattttgagatggctaaaagaaacctatcaatgtgaagtggcgacttttacagcaaacctaggtcaagacgaggactatgatttagtaaaagcgaaagctgaaaagcaaggaacgaaagaaatatttatcgaagaccttaaagaggaatttgtaagtgattatgtctttccaatgtttagagccaatccactttacgaaggctactatttactcggtacttctatcgcaagacctctaattgcaaaaaaacaaatagagattgcaaatcagataaatgctgatgcggtatcccatggcgcaacaggaaaagggaatgatcaaattagatttgagctcggatactattatcataaaactgatattaaaataatcagtccttggagagaatgggatttatcatcaagaacatcacttg

SEQ ID NO: 316576 - DNA, 703 bp, Unknown
  Bacterial polypeptide expressing nucleotide sequence isolated from the Sargasso Sea
aaagataaaaggggggaacagccttattcaatggatgcgaatttgttacatatatcttatgaaggcaaggcccttgaagacccttgggtagagccagaagaagatatgttcagatggacaatatctccgcagcaagccccaaatgaaccagagtatattactattgggtttagtaaaggtgaccccatatcaataaacgaccaaaagttatcagcaggaaatataatgcaaaagcttaatgaacttggtgtcaaacatggtattggcaggttagatattgttgaaaatagatatgttggaatgaagtcaagaggggtatacgaaactccaggtggaactattttactccaagcgagaagagcaatcgaaagcattacaattgatagagaagttgcccatcttaaagatgagctgatgccaaagtatgcagaactagtttataatgggtattggtttacgccagaaagagaagttcttcaaaccgcaattgacgcaacccagtataatgtaaatggagtaacaagactaaaattatataaaggcaatacaatcataacaggaagacaatcacccagtagtctatatagcaatgagcatgttacctttgaagaagattctgtatacaaccaactggatgctgagggttttataaagttaaatgctttacgtttgaaaattgggaaacactatataaataaatagg

SEQ ID NO: 316577 - DNA, 380 bp, Unknown
  Bacterial polypeptide expressing nucleotide sequence isolated from the Sargasso Sea
gatgggccgcgccaacaaggtggttctcgcctactccggcggggtggataccagcgtctgcattccctatttgaagcaggaatggggtgtggaggaggtcatcaccttcgctgctgatctcggtcagggcgatgagctggaaccgattcgtcaaaaggccttggatgcaggcgcgagccagtcgttggtgggggatctgattcagcccttcatcgaagagttcgccttccctgccattcgcgccaacgcgctgtacgaggggcgctaccccctttccacagcactggcccggccgttgatcgctcgccgactggtggaggtggcccgtgagatgggtgctgatgcagtggcccatggctgcactggcaggggcaacgacc

SEQ ID NO: 316578 - DNA, 722 bp, Unknown
  Bacterial polypeptide expressing nucleotide sequence isolated from the Sargasso Sea
aatgcctaaaaaaattgttttagcttactctggtggattagatactagtgttatacttaagtggcttcaaaataaatatgaatgtcctgttgttacattcacagctgatcttggtcaaggtgaagaattatctccagttagaaaaaaagcagagtctctaggggtgaaagagatttttgtagaagacttaaaagaagaatttgttaagaattatgtatttcctatgtttagggcaaatgctatttacgagggatcttattatttaggaactgcaatagcacgacctttaatagctaaaagacaaattgaaattgctgaagaagtaggtgcagatactgtagcccatggagcgacaggcaaagggaatgatcaagttagatttgaattaggctattatgcaaataactcaaaaataaacgtagtatctccatggagagagtgggatttgaattcaagaaaagatctaattaattttgcagaaaaaaaccaaatttctattccaaaagacaaaagaggagaggcgccattcagcactgatgctaacttactgcatacatcttctgagggtaaaattttagaggatccatggatagaagcacccgagtatgtttattcaagaactaaatcaatagataattctaaaaattcacctgatgaaattattctaagttttaaaggtggagatgtagtagctataaataaaaaagaactaaaaccccatg

SEQ ID NO: 316579 - DNA, 372 bp, Unknown
  Bacterial polypeptide expressing nucleotide sequence isolated from the Sargasso Sea
cacctggaggagaaatacttttaagtgcaaggagagcaatagagagcattactcttgacaaagaatcagctcatctgaaagacgaacttatgccaaaatatgctgaattgatttataatggtttttggttttctcctgaaagagaaatgcttcaaaaattaatcgatcaatcacaaaagctggttagtggatttgtaaaattaaaaatttataaaggaaatgttattatattaggtcgaaaatcaaatcaaactttatattcgccggaaatggctacgtttgaagaagacttggtttataatcaaagtgatgcggatggttttataaaactaaatgccttaagattgaaattactcaagaatagaggataag

SEQ ID NO: 316580 - DNA, 831 bp, Unknown
  Bacterial polypeptide expressing nucleotide sequence isolated from the Sargasso Sea
cagccaaaggaaatgatcaagtgagatttgagcttgggtatcattattttgatcaaaaaataaaaatcattgctccatggagaatttggaagcttaagtctagaactgatttaattaactatgcaaaaaaaaatagaataccaattccaaaagataagaaaggcgcttcgccattttcagtagatgataatttatttcatacatcaactgagggaaaagttttagaaaatccaaaaagttcagctcccgaatttatttttcaaagaacaatttctcctgaaaaagcaccaaataaagcagcatttgtaactataaatttcaaaaatagtaatccggttggaattaataataaaaaattacccccatctaaacttttagaaaaacttaatcaattggctgggaaaaatggaattggtagagttgatttagttgaaaatagatttattggaataaagtcaagaggtgtttatgaaactcctggtggaaccctattaattaacgctcatagagcaattgagtcagttacattagataaaaaaactatgcataaaaaagataaaataatgccaaaatatgcagaactcatttacaatggttattggtattcaaaagcaagatttaagcttcaaaaaattgttgatctaaagagaagtaaagtgaacggatctgttaaacttaaactatataaaggtaatattacaattgtatctagacaaactaaaagtaatgcttattcaatgaaaaaggtttcttttgaagaaaataaaacattcaataaatctaatattgaaaaatttattaactttcataaaaaaaaactaaataaataat

SEQ ID NO: 316581 - DNA, 688 bp, Unknown
  Bacterial polypeptide expressing nucleotide sequence isolated from the Sargasso Sea
gaggctccatttagtattgatgctaatttattacatatctcagctgaaggaaaaattttagaagatccatggatagaaccaagtgaattagtattttcacgtactaaatcacctatagatgctaaagatgaaatctctgaaatacagcttagatttaatcagggagatcctgtagaattaaatggaaaaagcttatcagctgctgaaatgctacatcaattaaatattttaggtggtgaaaatggtataggaagaattgacattgtagaaaaccgttttgttggaatgaaatctagaggaatttatgaaactccagggggtactattttatttcatatgagaagagctatagaatcaattacactagatagaggtgcatcacatcttaaagatgagttaatgcctaaatatgctgaattgatttataatgggttttggttttctccagaaagacaaatgcttcaaaaagcaattgatgaaagtcaaaaaaatgttaatggagtagtgagagcaaaactatataaaggtaatataataattacaggaagaaaatcacctaattctctttatgatgaagatttagtcacctttgaagaaggttcatttaattataaccatcatgatgctgaaggctttatcaaattaaatgccctcagacttatgatgaacaacattaaacaaaaataaa

SEQ ID NO: 316582 - DNA, 787 bp, Unknown
  Bacterial polypeptide expressing nucleotide sequence isolated from the Sargasso Sea
gcagagataattgcttatactgcagatattggtcaagaaatggatagaaaaaaaatcatctcaaatgcaaaaaagttaggtgttaaaaaaattattatcgaagatttaaaaaatacttttgttaaagattatgtatatccaatgataagagggcatgctctttatgagggtgtttatttattaggaacatctattgcaagaccactgattgcaaaagatcaaattagagtagctaaaaaatttaatgcttatgctgtctcacatggttcaacaggaaaaggaaatgatcaagtaagatttgaattaggatatcattactttggtcctaaaattaaaataattgcaccatggagaatttggaaattaaaatcaagaactgatcttattaattatgcaaaaaaacatggaataccaattccaaaagacaaaaaaggtgcaccacctttttcggttgatgataatttattccatacctcaacagaggggaaagttttagaaaatcctaaaaattcagcacctgaatttatttttcaaagaacaacatctcctgaaaaggctccaaataaaccaagctttattactattaattacaaaaatggtgaccctgttggtttaaatggaaaaaaattatctccagcgaaagttttggataaacttaatcaattagcaggcaaaaatggaatagggagagtagatttggtagaaaatagatttattggaataaaatcaaggggtgtttatgaaacccctggcggtactttgttgctcatagctcatagagcaatcg

SEQ ID NO: 316583 - DNA, 871 bp, Unknown
  Bacterial polypeptide expressing nucleotide sequence isolated from the Sargasso Sea
taaagcgcaagttgaaattgcacgtaaagtaggtgccgatgcgctgtcgcatggttgtacgggtaaaggtaacgaccaggtacgttttgaatcatgctttgcagcacttgcacccgatttaaaagtcattgcaccatggcgtgagtgggacttatcaagccgtgagtcactactcgattacttagccgagcgcgatataccgtgttctgcttcagcaacaaaaatttacagccgtgatgctaacgcgtggcatatttctcacgaaggtggcgagcttgaagatccatggtgtgagcctagcgatcaagtatggacttggactaactctcctgagcaagcacccgataaagccgagctagtaacattaaaagttgttgaaggtgaagtggttgccgtcaatggcgaagagcttaaaccttatgattgtttagttaaattaaacgacattgcatcaccgcatggtgttggccgtgttgatatagtagaaaaccgtttagtcggcatgaaatctcgtggttgttacgaaaccccaggtggtacggtgatcatggcggcccttcaagcaatagacgagctagtacttgataaatcaagccgtaagtggaaagaagtattaggcggcgaattttcgcacctagtgtacgacggacgttggtttacgccgcttaaagactctattttagcgggcgctgaggcgttatctacattagcaacgggtgaagtggtacttaagctttataaaggccaagtgactgcggttcagaaaaaatcacctaacagcctatacagcgaagactttgcgacctttggcgaagatgacgtgtatgaccaatcacatgctgaaggctttattcgtttattctcgctttca

SEQ ID NO: 316584 - DNA, 404 bp, Unknown
  Bacterial polypeptide expressing nucleotide sequence isolated from the Sargasso Sea
tatgaaaaaagttgtcttagcatattcaggtggattagatacttcagtaatcttaaaatggattaaggaaacatatcaatgtgaagttgcaacttttacagcagaccttgggcaagatgaagattttgatgctgttaagaaaaaagctgaagcacaaaacgtcactgagatctttattgaagatttaaaagatgaatttgtaaaagactatgtattcccaatgcttagggcaaatcctttatatgaaggatattatttacttggaacatcaattgcacgacctttaattgcaaaaaaacaaatagaaatagcaaaccaagtaaatgcggatgctgtagcccatggagcaactggcaaaggtaatgatcagatccgttttgaattagggtattattatcataatc

SEQ ID NO: 316585 - DNA, 862 bp, Unknown
  Bacterial polypeptide expressing nucleotide sequence isolated from the Sargasso Sea
gcaactggaaaaggcaatgatcaagtcagatttgaattgggatattatgcaaataattcacaaattaaagttatttcgccttggcgagagtggaaattgaattcaagaaatgaattaattaaatttgcagaacaatatcaaattccaatctctaaagataaaagaggagaagcacctttcagcacagatgcgaacttgctccacacttcttctgaaggaaagattttagaagatccttggattgaggccccagactatgtttattcaagaactaagtcaattcaagattcaaaacctaatccagacgaaataataatttcttttgaaaagggtgatgctactgcaataaataataaaaaattagagccgcatctattattaaccaaattaaatgaatatggaaatcaacatggaattggaagagaggatattgttgaaaatcgttttctaggtatgaaatctaggggaatttatgaaactcctggaggaacaatactatctaaggcacatagagcaattgaaagtattaccttagatagaggagaggcacatttgaaagatgaaattatgcctaagtacgctgaaacaatatataatggtttttggttttcttctgagagaaatgcaatgcaaaaaatgattgatgaaactcagttaaatgtaactggagatgttagactaaaactttttaaaggtaatgttattattttaggaaggagatcaccaaaaagtaaatataatttatcccttgtttcatttgatgaaaaaggggattataatcaaagagatgcggaaggttttatcaaaataaattctttaagattaagaaatatttctaataaaaataataaaaaaaattaag

SEQ ID NO: 316586 - DNA, 650 bp, Unknown
  Bacterial polypeptide expressing nucleotide sequence isolated from the Sargasso Sea
cgcaaatcttcttcatacatcatcagaaggtaagattcttgaagatccttggcaagaggctcctgaatatgttttttcaagaacaaaatctattgaaaattcaaaaaataaattagacgaaataataatttcgttcgaaagaggtgatgcagtagcaataaatgagaaaaaaatgaaaccgtacgaggtgttaagtaagttaaacgattatggttatgagcatggaattggaagagaagatattgttgaaaatcgttttgttggaatgaaatcaagaggggtctatgagactcctggaggaacaatattgtcaaaagcccatagagcgattgaaagcataactctagatagaggtgaggctcatttaaaagatgatattatgcctaaatatgctgagactatttacaatggattatggttttcctccgaaagaaaagctatgcaaagtatgattgatgaaacccaaaaaaatgtatcaggagaagttaagctaaagctatttaaaggaaatgttattgttactggaagaagatcgccttacagcaaatataagttatcactcgtatcatttgatgaggagggagattataatcaaaaagacgctgaaggatttataaaaattatgtctttaagatcaaaaagtaattaat

SEQ ID NO: 316587 - DNA, 604 bp, Unknown
  Bacterial polypeptide expressing nucleotide sequence isolated from the Sargasso Sea
atggaccaggtaaaaaaagttgtactagcgtattccggtggagttgatactagcgtttgtattccatatttaaagaatgaatatggaatttcagaagtggttacttttgtcgcagatcttggacaaggtgaagatttggaatttatcaagcaaaaagctttaaattctggtgcatctaaatcaattattggtaatttagtaaatagttttgtggaaagatacgctttcccagccattagagctaatgcattatatttagacaaatatcctttgtctacagctcttgctagacctttaattgctgaaaacctcgttaatattgcgagagagattaatgctgatgcagtagctcatggatgtactggtaaagggaatgatcaagttagatttgatttagcaattaatgctttaggtcctgatttaaaaatcattacgcctgcaagggagtggaatatgagtagggaagaggcaatatcgtatggagagaaatttggtattcctgcaccagtgtcaaaaaaatctccttattcaatagatgttaatcttcttggtaggagtattgaagctaggtatattagaagacccaatgcaagaagcacctgaa

SEQ ID NO: 316588 - DNA, 873 bp, Unknown
  Bacterial polypeptide expressing nucleotide sequence isolated from the Sargasso Sea
catgtttagagctaacacactttatgagggtaattatttacttggtactgcaattgcaagaccattaattgcaaaaagacaagttgagattgctaaggaagttggggcagatgccgtagctcatggagcaacaggaaagggaaacgaccaagttagattcgagctaggatactattctaacaatcctaatatcaaagtaattgcaccatggagggattgggatttagtttcaagaaaagatttggttgagtttgcaaaaaaaaatcaaatatcagttccaaaagataaattaggagaacctccatttagtacagattctaacattctccatacatcttctgagggaaaaattttggaagacccttggattgagccaccagaccatgttttcactagaactaacgatttaaatcatactccagatcagccagatataataaatattgagtttgtaaatggtgacccaacaaagatagatggaaaaaaacttaaaccacacgaattactatcttttctaaatataattgctggaaaacatggagttggcagaattgatattgttgaaaatagatttgtgggaatgaaatctagaggcgtttatgagacacctggtggtacaatattgattcatgctagaagagccattgaaagtattacccttgatagaggtgaggcacatataaaggacgagataatgccaaaatatgcagagataatttataatggtttatggttttcatccgaaagattagcaattcaaagtttaattgactcaacacagtcgaaagtaaatggagaggtaaaagttaaaatctacaaaggaaatgtaatcatattaggaagaagatcgtctaacagtctttatgatacatc

SEQ ID NO: 316589 - DNA, 673 bp, Unknown
  Bacterial polypeptide expressing nucleotide sequence isolated from the Sargasso Sea
aatgaagtcaaaaaaaagaatagttttggcttattcaggtggtttagatacatctataattcttaaatggcttcaagaaaattataatgcagaaattatttgttacactgcggatattggccagaaaattgataaaaaaaaaattatttttaatgctaaaaaatttggtgttaaaaaaattgttattaatgatttaaaaaatatttttataaaagattatattttcccaatgattcgtggtcatgcaatttatgaaggtaattatttgttaggaacttcaatcgcaagacccctgattgcgaaagatcaaattagaattgcaaaaaaatataaagcatatgctgtatctcatggtgctactggaaagggtaatgatcaagttagatttgaacttggatatcattattttggaccaaaaataaaagttatagctccttggagaatctggaaattaaaatctagaactgatttaatcaattatgcaaaaaaatataaaatagaaattcctaaagataaaaaaggagctccacctttttctgttgatgataacttgtttcatacatcaactgagggtaaagttctagaaaatccaaaaaattcagctcctgaatttatttttcaaagaaccagttctccagaaaaagctcctaataaaccatcattcataacaata

SEQ ID NO: 316590 - DNA, 859 bp, Unknown
  Bacterial polypeptide expressing nucleotide sequence isolated from the Sargasso Sea
taacgctttcgctgtatcgcatggtgcaacaggaaagggtaatgaccaagttagatttgagttaggttattattattttggacccaaaattaaagttattgcgccatggagaatttggaaattaaaatctagaacagatttgataaaatatgcaaaaaaacatggtattcaaataccgaaagataaaaaaggggccccaccgttttctattgatgataatctttttcatacatcaaccgagggaaaaattttagaggacccaaccaagcaagctcctgaatatatttttcaaagaactgtttctcctgagaaagctcctaatagaccatcttatctaaaaattgggtttagaaaaggggatcctgtttcaataaacaataaaagattgcagccagcaaagcttttaaaaaaattaaattttattgcaggcaagaatggtgtcggaagagttgatttggttgaaaacagatttattggtattaaatcgagaggggtttacgaaactcctggaggtactcttttgatgacagcacatagggcgattgagtctgttactttagataagaagactatgcacttaaaagatgagataatgccgaaatatgcagaacttatttataatggtttttggttttcaaaaaatagatacaaattgcaaaaaattgttgatctaaaaaaaaacaaagttaatggatttgtaaaacttaaagtatataaaggaaatgttactatcctatctagagtcagtaaaagcaaagcttattcgataaaaaaagtatcatttgaagaaaataaatcttttaaaaagtcgaaagttaaaagatttataatgggtgcggcaagaaagcttagaacttaa

SEQ ID NO: 316591 - DNA, 595 bp, Unknown
  Bacterial polypeptide expressing nucleotide sequence isolated from the Sargasso Sea
ggatgtggactaaaatcaccagagcaggcgccggataaagccgaacatattcagttaagttttgaaaaaggcgaactgacgaaattaaacggtgaagctgtagctcctgtcaaagccattgaagtgctgaatgctattggttcagagcatggtgtaggccgtatcgacatagtagaaaaccgtttagtgggtatgaaatcccgcggttgttacgaaacacctggcggcactattttagtggcggctttacgtgcactggaatctttggtgtatgaccgcacttcactgaaataccgtgaagaagtgggcttagagtttgctcagctggtctatgatggccgttggtttacaccgttaaaagatgccttgttagcagcagctacttcacttgctgatcaactgacaggcgacatagtggtcaaactgtacaaaggcaacgtgactgtaacgcaacgccgttcacccaacagcctgtactcagaagctttcgcgacttttgaaggcgatgaagtgtacaaccaaaaagatgctgcaggttttatccgcctgtatagcttagccagccgtattcgtgctttgcatagcaaaggttaag

SEQ ID NO: 316592 - DNA, 925 bp, Unknown
  Bacterial polypeptide expressing nucleotide sequence isolated from the Sargasso Sea
gtcttatttattaggtacttcaatagcaagaccacttattgcaaaaagacagattgctatcgcaaaaaaatttaatgcttttgcagtttctcatggtgcaacaggcaagggcaatgaccaagttagatttgagcttggatattattactttggtccaaaaataaaagtaattgcaccttggagaatatggaaattaaaatctagaactgatttaattaaatacgcaaaaaaaaataagatatctatacccaaagacaaaaaaggcgcgccaccattttctgttgatgataatctttatcatacatctacggaaggaaaagttttagaagatccaagtaaagatgcacctgaatatatttttcaaagaaccatttcaccagaaaaagcaccaaacaaaccatcttacgttacgatcggatttaaaaaaggtgacccagttacaataaatggtaaaaaattacttccagcaaaacttcttcaaaagctaaataatgttgcaggtaaaaatggtataggtagggtcgatctagttgaaaatagatttattgggataaaatcaagaggagtttatgaaacacccggaggtagtctcttaatgaaagctcatagagcaatggagtctataactttagataaaaatacaatgcataaaaaggatgagattatgccgagatatgcagaacttatttacaatggtttttggttttctaaagctagatttaaattacaaaaaattgttgatacaaaaaaaaaccaagttaatggctcgattaaactaaaactttataagggtaatatttctatattatctaggcaaagcaaaaataaagcatactcaattaaaaaggtctcttttgaggaaaataaatcttttaagaagtcaaaagttgagaaatttatatcaggtgcggcaagaaagctaaga

SEQ ID NO: 316593 - DNA, 793 bp, Unknown
  Bacterial polypeptide expressing nucleotide sequence isolated from the Sargasso Sea
aatggaattaaaaaaaaaaattgttcttgcctattcaggcgggctggacacttctgtaatacttaaatggcttcaagaaaattataattcagaggttatttgttatactgctgatattggacaacaaattgatagaaaaaaaatcataaaaaacgctaaaaaacttggcgtaaaaaaaattattattaaaaatctaaaagatacttttgttaaaaattacgtttatcccatgattagaggacatgctatttatgaaggtttttatttattaggtacttcaattgcaagaccgctgattgcaaaagatcaaattagagttgcaaaaaaatataaagcttatgccgtttctcatggatcaactgggaaagggaatgatcaactcagatttgaacttggttaccattactttggtcgaaaaataaaaattatagcaccttggagaatttggaaacttaaatctagaactgacttaattaattttgcaaaaaaacatcaaatacctattccaaaagataaaaaaggtgcacctcctttttctgtggatgataatttatttcatacttctaccgaaggtaaaatattagaaaatccaaaaaattctgctccggaatttattttccagagaactatttctcctgaaaaagcaccaaataaagcaacattcgttactattaatttcaataaaagtgatccagttggaattaatggtaaaaaattatcaccatttaaacttctagaaaaacttaatcaattagctggaaaaaatggaataggtagagttgatttagtagag

SEQ ID NO: 316594 - DNA, 835 bp, Unknown
  Bacterial polypeptide expressing nucleotide sequence isolated from the Sargasso Sea
atggataaagtaaataaagttgttcttgcttactcaggtgggctcgatacatcagttatattaagatggcttaaagaaacctactcgtgcgaagtagttacttttactgcgaatttaggtcaagatgaagattatcatttggttgagaaaaaagcagctcagcaaggtgttaaagaaatattcattgaagaccttaaagaagaatttgtccgagattatgtttttcctatgttcagagcgaatccactttatgaaggctactatcttttaggcacatctattgcgagacctttgattgcaaaaaaacaaattgaaattgtaaataaagtaggtgccgatgctgtatcacatggtgcaacagggaaaggtaatgatcaaattagatttgaattgggttattattatcataaacctgatattaaaattatcagtccatggagagaatgggatcttacatccagaacatctttggttgagtatgctgatcaacatggtattgaaatttccaaagataaaagaggtgaacaacctttcagcattgatgaaaatattttgcactcctctgctgagggtaaagtccttgaagatccctggaaagaagctcccgattatgtatatacaagatctgtgtcaccagaaaatgctcctgatactccagaagaaattactattgagtttaaacaaggcgatgcttgcgctttaaacggagaaagtatgacaccctttgaattattgaaagccttgaacgagatgggcggaaaacatggtattggcagggtggatttggttgagaacagatatatcggcatgaaatcgaggggcatatacgagacgc

SEQ ID NO: 316595 - DNA, 659 bp, Unknown
  Bacterial polypeptide expressing nucleotide sequence isolated from the Sargasso Sea
gatgaagaaaatcgttttagcttattctggcggtttggatacaagcgttattcttaaatggttacagaatacttataattgtcccgttgttactttcactgccgatatcggtcaaggagaagaacttaaacctgtagaaaaaaaagcacaaagtcttggagtagaagagatttacattgaaaatttacaagaagaatttgttagagattatgtatttccaatgtttagagcaaatactatctatgaaggaaattatttgctaggtacagctattgcacgaccgctcattgcaaaaagacaaatagagattgcaaaagaagttggggcagacgcagttgcacatggagcaactggtaagggaaatgatcaggttagattcgaacttggatactatgcgaataatccaaaaattaaagttatttcaccttggagagattgggaatttgaaactagaaatgatttaattaaatttgccgagttaaatcaaattcctgttactaaagacaagttaggtgagccgccttttagtacagatgctaatatactccatacatcctcagagggaaaaattttagaggatccatggattgagccacctggatatgtatttaccagagtcaaagatctactggaaacaccagatgaacctgaaactataa

SEQ ID NO: 316596 - DNA, 806 bp, Unknown
  Bacterial polypeptide expressing nucleotide sequence isolated from the Sargasso Sea
attggccaagaaatggataaaacaaaaataataaagaacgcaaaaaaattaggggtaaaaaatataattatcgaaaatttacaaaatacatttgttaaagaatatgtttttccaatgattagaggtcatgctttatatgagggcgtttatttattaggaacatcaatcgcaagacccttgattgctaaaagacaaattgcaattgctaaaaagtttaaggcatttgctgtatcacatggttcaacaggaaaaggaaatgatcaagtaagatttgaacttggatattattattttggaccaaaaataaaagtcattgccccttggagaatttggaaattaaaatcaagaactgatctaattaagtatgcaaaaaaacataacataccaataccaaaagataaaaagggagcgccaccgttttctgttgatgataatctttatcacacttcaacagaaggtaagattttagaagacccaaaaaaacaagctcctgagtatatttttcaaagaacgttttctccagaaaaagcacctaataaaccatcttatgtaactataggatttaaaagaggtgatcctacttcaataaataataaaaaattatctccagcaaaactacttcagaaattgaatattattgccggtaataatggaattggaagagttgatctagtcgaaaatagatatataggaataaaatcaagaggagtgtacgaaacgcctggaggaacacttttaatgattgcacacagagccatagagtctgttactttggataaaaaactatgcatcaaaaagatgagata

SEQ ID NO: 316597 - DNA, 686 bp, Unknown
  Bacterial polypeptide expressing nucleotide sequence isolated from the Sargasso Sea
taagaaagagtctccgtacagtgtagatgcaaatgttcttcatcgatctgctgaaggaaaaatccttgaagacccttggaaaagaccacctgaaaatgtttttggtatttcaaaaagtcctctgtcagcaccgaacaaagagacattgataactattcaatttaaaaatggtgatcctattgctattaacggaaaaaaactctcaccattcaatctattagaaaagttaaataaactaggagcagtaaacggaattggaagaatagatattgtagaaaatagatacgtgggaattaaatctcgaggagtatatgaaacaccaggcggtacaattcttcttaaagcccaccgtgctatggaaagcattactttggacagagaagaggttttcacaaaagacgaacttatgcctaagtatgcgagattagtttataatggatattggttcgcaccagaaagagtaatgatgcaaaaagcaattgatgccacgcagaaaagagttaacggtgaagtaagattggctctatataaaggcaatgtgattgttattggaagacagtcacctaatagcttatatgatgaagacctagcaacttttgagacttcaaattatgatcaacgtgattcagagggttttataaaacttaatgcactaaggctaaaaaaaaataaaattaaattctagg

SEQ ID NO: 316598 - DNA, 783 bp, Unknown
  Bacterial polypeptide expressing nucleotide sequence isolated from the Sargasso Sea
tatcggacaagatcatgaccctgaacaagtcaaggaaagagcaaatgctattggagcttcaaagattcttatagaggatttgaaggaagaatttacaaagaattatatttttccaatgatcaaggcaaatacattgtacgaaggtgagtatcttttaggaacatcaattgcaaggccattaattagtaaaaggttgattgaaattgcagaagaagagggtgcagacgcaatagctcatggagctactggtaaaggaaatgatcaaattagatttgaaattggatcttactcattaaatccagatattcaagttatagccccctggagaacctgggactattcttcaagagctgacttagtagattattgcaaagaacatcagatagaaattgaagcaagcccagatgatcctttatattcaactgatgagaatttacttcacacgtcttatgaaggagagatactagaagacccatctataaaagcaccggaagaaatttggcaaagaacatcctcattaaaagatgctccagatgaagaagagacaatttcgatagagtttagatctggtgaaccaatttccatcaataatgttattggttcttcttcggaaatcttgtcagaattaaatcatctagccggaaaacatggaattggtagacttgatcttgttgaaaacagatatacgggcatgaagtcaagaggatgttatgaaactcctggaggaactattcttttgaaagctcatcgtgcaatagaatctataacactagatgctgaagc

SEQ ID NO: 316599 - DNA, 388 bp, Unknown
  Bacterial polypeptide expressing nucleotide sequence isolated from the Sargasso Sea
atgaaatcaagaggtgtttatgaaacccctggaggaactattctctatcatgcacacagagcaattgagagcattaccttagataaggaagcatctcatatgaaagaaagtatttcatccaaatatgctgagcttgtttataatggttattggttttctcctgaacgagaaatgatgcaagcattaatagatcagtcacaaaaaaatgttgagggtaaggttcgattaaaactctacaaaggcaatgttttaatcactggaagagaatctccattaagtctctataatcctgatcttgcaacatttgaatcagatgaagtttatagccagaaagatgctgaaggctttattaagctaaatgctttaaggcttagagaaaaaaaataaa

SEQ ID NO: 316600 - DNA, 502 bp, Unknown
  Bacterial polypeptide expressing nucleotide sequence isolated from the Sargasso Sea
tgatggaaagcaatttagcccaaacctaattttagaaaaattaaatcaattaggcggcagacatggagtaggaagaattgatttagttgaaaacagatttgttggtatgaagtcaagaggtatatatgaaacacccggcggcacaattttattaaatgcaagaagagctatagaaagtattactctagataaaggcgagtctcatctcaaggatgaaattatgccaaaatatgcggagtcaatctataatggcttctggttttcatcagagagatttgctatgcaaaaattaatagattcaactcaacataaagtaaacgggcaagtaaagattaaattatataaagggaatgttgttatattaggaagaaaatcagaaaacagcttgtatgacgctaatatggtttcatttgatgttaaaggagattatcatcaaaaagatgctgagggatttattaaaattaattctataagactcaaaaaaaatattaataacaattaa

SEQ ID NO: 316601 - DNA, 712 bp, Unknown
  Bacterial polypeptide expressing nucleotide sequence isolated from the Sargasso Sea
atgccaaagaaaatcgttttagcttattctggagggcttgacacaagcgttattctaaaatggcttcaagtaaagtatgaatgcactgttgttacttttactgctgatttgggacaaggtgaagagcttagtcctgttaaaggcaaagcacaatctcttggagttgaggaaatttttatagaggatttgagagaagagtttgtaagagactatgtatacccaatgtttagagcgaatgcaatttatgaaggaacatattttttaggaacagcaattgcaagaccactaattgcaaaaagacaaattgaaattgccaatatagtgggggcagatgcggttgctcatggagctacaggaaaaggaaatgatcaagtaagatttgaacttgggtattatgcaaacaaacatgatattaaagttatatctccctggagagaatgggatttaaattccagaaatgaattaataaattttgcagaaaaatatcagataccaatagcaaaagacaaaagaggtgaggctccttttagtacagacgcaaatatactacatacttcttctgagggtaaagcccttgaggatccctgggttgaagcacctgaacatgtttattcaagaacaaaatctctagaaaactcaaaagaagaacctgaagaaatcatagtttcttttaaaaatggggatgctgttgctataaataacaacaacctaa

SEQ ID NO: 316602 - DNA, 855 bp, Unknown
  Bacterial polypeptide expressing nucleotide sequence isolated from the Sargasso Sea
tatcttaaatggttacaaaagaattatgattccgaagtaattgcctatacagctgatattggtcaagaaattgatagaaaaaaaatttttagaaatgcaaaaaaactcggtgttaaaaatgttattattaaaaatttaaaagatacttttgtaaaagactacgtttatccgatgattagaggccactcattatatgaaggtgtttacttgttaggaacatcgatagcaagacctttaattgcaaaagaacaaatagctgtagcaaaaaaatttaaagcttatgctgtgtctcatggctctacagggaaaggtaacgaccaaataagatttgagcttggatatcattattttgcaccaaaaataaaaattatagctccctggagaatttggaaacttaattcaagatcagatcttataaaatatgcaaaaaaatataacattcctataccccaagataaaaaaggtgctccacctttttcagttgatgacaatttgtttcacacttcaactgagggaaaggttttagaaaaccctaaaaaccctgcacctgaatttgtatttcaaagaacaaattcccctgaaaaggcacctaacaaaccttcttttgtaactataggttttaaaaaaggtgatccaataactgttaatggtaaaaaattaacaccttcaaaactattagaaaatctaaatttcattgctggaaaaaatggaattggtagagtagatcttgttgaaaataggtttattggaataaagtctagaggtatctatgaaacacctggtggaactttgttaattaatgcccatagagcaattgagtcagttactttagataaagaaacgatgcacaaaaaa

SEQ ID NO: 316603 - DNA, 793 bp, Unknown
  Bacterial polypeptide expressing nucleotide sequence isolated from the Sargasso Sea
tacccaatgattagaggtcacgcaatttatgaaggggtatatttattgggaacttctatagctagaccgttaatctcaaaaagacaaattgctttagcaaaaaagtttaaagcatatgcagtatcacatggatcgactggcaaaggaaatgatcaagtaagatttgaacttggttatcattactttggacctaaaattaagatcatcgctccttggagaatatggaaattaaattcaagaacagatttaattaaatatgcaaaaaaaaataaaataccaattcctaaagataaaaaaggaaaaccacccttttctgttgatgacaatttgtttcatacatcaactgaaggtaaagttttagaaaatcctagaaacgcagctccagagttcatttttcaaagaacaatttctcctgaaaaagcaccaaataaacctacatatttaagtatagaatttaaaaatggagatcctataaaagttaatggtaaaaaattatctccaggaaatctgttacaaaaattaaatatccttgcgggcaaaaatgggattggtagagttgatttagttgaaaatagatttattggaataaaatctagaggtgtttatgaaacaccaggtgggaccttattaattaccgctcatagagctgtcgagtcagttactttagataaagcaactatgcataaaaaggatgaaattatgcctagatacgctgaacttatttacaatggatattggttttcaaaagcgagatttaaacttcaaagaatagtagatctaaagaggaataaag

SEQ ID NO: 316604 - DNA, 789 bp, Unknown
  Bacterial polypeptide expressing nucleotide sequence isolated from the Sargasso Sea
gaaatagcagaactgactggagcggatgctgtagcgcacggcgcgactggaaaaggtaatgaccaagtacgctttgaactttgctactatgcattaaatccacatataaaaattatcgccccatggcgtgaatgggacttcgaaggacggcaagacttaatcgaatatgcagagtcaagacaaattcccatcgcgaaggacaagcgtggagaggcacctttctccgtggacgctaatcttttgcatgcttccagcgaaggaaaaattttggaggacccttgggtggagggagaggaattcatttattcgcggacgacagcgccggaagaagcacctgataaaccgacttacattgaaatcggcttcaccaaaggagatgcaactagtatagatggcatagcgatgagccctgccacacttctaacccgtctaaacgaattaggaaaagagaatggcataggccgattagatttagtcgaaaatcgttttgtaggtatgaagaaccgtgggttatatgaaacaccggggggcacaattttgcatgttgcgcatcgcgcaatggagagtttaacgctagaccgcggcatggcacatttgaaagatgagctaatgcctcgatatgctgaacttatatataatggtttttggtattcacctgagagagaaatgcttcaggcggcgatagactacagccagagcaatgtaagtgggactgttcgtttgaaattatataaaggcaacacaatagttgtaggaagaaaatcagagaaaagcctctattcagccgac

SEQ ID NO: 316605 - DNA, 577 bp, Unknown
  Bacterial polypeptide expressing nucleotide sequence isolated from the Sargasso Sea
taccagaagtgtttcacctgaagaggcgcctgataaagcagaagaaataacgattgaatttaaaaaaggtgacgcctgcgcactcaacggaaaggctctaacaccatttaaaatattaaaatctcttaatgagcttggtggaaaacatggaattggacgagttgatcttgttgaaaatagatacattggcatgaaatctagaggaatttatgaaactcctgggggaaccattctatatcacgcacacagagccattgagagtattacactcgataaagaagctgcacatatgaaagatgagttggcgcctaaatatgctgaacttatctataacggttattggttctctcctgaaagagagatgatgcaatcaatgattgataaatcacaggaaaaagtagagggcaaagtaagacttaaactctttaaaggtaatacgataattacaggaagagagtcatcaatgagcctatacaatccaaatcttgcaacatttgagtcagatcaagtttattctcaaaaagatgctgaaggttttataaaattaaacgcactaagattgagagaaaaaaaatag

SEQ ID NO: 316606 - DNA, 894 bp, Unknown
  Bacterial polypeptide expressing nucleotide sequence isolated from the Sargasso Sea
catgtttagagcgaaccctctttatgaaggcgaatatttgttgggaacttctattgctcgcccgctgatttccaaaaggatggttgaaatcgcccgggagactggtgcagatgcaattgctcatggagcaactgggaaaggaaatgaccaagttcgttttgagttgggagcatatgctcttagtccctctgtgaaagtcattgcaccgtggcgggagtgggaccttacctctagagatcgactgctcaaatattgtgctgagcacaacattcctgttgaaaaaaagagaggaaagaaatcaccttattccatggatgcaaatctgttacatatttcttatgaaggggatgtccttgaaaatcctgcaaatgaaccagaggaggatatgtggcaatggacggtttccccggaaagtgctcctgatgaagcaacttatatcgacctagagtatgacaggggcgacccggtgtctgttaatggagaaaatttatcgccagctgatttgctatatgtgctgaacaagacagccggcgctcagggtatcggaagagtagatattgttgaaaatcgctatgttggaatgaagtcaagaggatgctatgaaacgccaggaggcacaattcttctaaaggcgcatcgagcaattgaatctattaccttggatcgagagcttgctcacctgaaggacgatcttatgcccaggtatgtctcacttatttacaatggttactggtggtctccggagcgagaggcgatccaggctctgattgatcaatcccagaaatttgtctgtggccgcgttcgattgaaattgtataagggcaacgttatcgtggttggtcgtgaatccgacaactctctatttgatgaggacatagcaacatttgaggagga

SEQ ID NO: 316607 - DNA, 864 bp, Unknown
  Bacterial polypeptide expressing nucleotide sequence isolated from the Sargasso Sea
gccagacccttaattgcaaaaagacaaattgaaattgctaaaattgtaggagcggatgcagtagctcatggcgctacgggtaaaggaaatgatcaagttagatttgagcttggttattatgcaaataatccaaaaattgaagtcatagctccatggagggattgggaatttgaaagtcgaaatgatttaatagaatatgcagaaaaaaatcagattacagtaccaaaagacaaaatgggtgagcctccattcagtacagactctaatctcctccacacttcttcagaaggtaaacttcttgaagatccctgggtagagccaccagaacatgttttttctagaacaaactctatagaaaaaacaccagacgcacctgagatattaactattggatttagtaatggggatccagtttctattaatcaagaaaatttgaaaccccatgagattttagcaaagttaaatttgatagccagtacacatggtgttggtagaattgatattgtagaaaaccgatttgtcggaatgaaatcaagaggtgtctatgaaactccgggaggtacaatattattaatagctaggagagctatggagagtataactttagacaaaggtgaatcccatttgaaagacgaattgatgcccaaatatgcagagtgtatttataatggttattggttttcctcagaaagaatatctatgcaaaaaatgatagatgccatgcaaaacagagttaatggttatgttaaagtcaaaatatttaagggaaatacaattatattaggtagaaaatcaaataacagtttatataatacttcacttgtttcttttgatgaagttggtgaatataatcaaaaagatgct

SEQ ID NO: 316608 - DNA, 743 bp, Unknown
  Bacterial polypeptide expressing nucleotide sequence isolated from the Sargasso Sea
gatgataagagggcatgccttgtacgagggtgcatatttactaggaacctctatagcaagacctttaattgcaaaaagacaaattgctattgcaaaaaaatttaaagcatttgcagtttctcatgggtcaacaggtaaaggtaatgaccaagttagatttgaacttggatattattattttggacctaaaataaaagttattgccccttggagaatatggaagttaaaatcaagaacagacttaattagatatgcaaaaaaaaataaaataacaataccaaaagataaaaaaggtgcaccaccattttctgtggatgacaatctttaccatacttctacagagggtaaaattttagaagatccaaaaaaatcagctccagaatatatttttcaaagaacagttgctcctgaaaaagcgcccaacaaagcatcttttgttacaataggttttaaaaaaggtgatccagtatctataaataataaaaaattttctcctgcaaagcttctagaaaaattaaattttattgctggtaaaaatgggattggaagagttgatttggtagaaaatagatttataggaattaaatcaagaggagtttacgaaacacctggtggaacacttttaatgatagctcacagagccatggagtctgtaactttagataaaaaaactatgcatcaaaaggacgagatcatgccaagatatgcggagctgatttataatggtttttggttttcaaaag

SEQ ID NO: 316609 - DNA, 417 bp, Unknown
  Bacterial polypeptide expressing nucleotide sequence isolated from the Sargasso Sea
gatgaaaaaaattgtattagcctactcaggcggattagatacttcaattattctaagatggttacaagaaaattatgaagcagaagtgattgcttacacttcagatattggccaagaaattaataggaaaaaaattataaccaatgcaaaacgacttggagtaaaaaatataataattgaagatctcaaaaaaatttttgtaaaagattatgtgtttccgatgataagggcgcatgctgtttatgagggtgtttatttacttggcacttcaattgctaggcctttaatagctaaaagacaaattgctattgcaaaaaaatttaaggcttacgcagtgtctcacggagcaacaggaaaaggtaatgatcaagttagatttgaacttggttatgctttttttggtggaaaaaaaattaa

SEQ ID NO: 316610 - DNA, 736 bp, Unknown
  Bacterial polypeptide expressing nucleotide sequence isolated from the Sargasso Sea
atgtcggagattaaaaaggttgtattagcttattcgggagggcttgatacttctgttatagctagatggctgcaacaggtatatcagtgcgaagtggttactttcaccgcagacattggacaaggagaggaggtggaacccgctcgaaaaaaagcagaggccatgggaattaaagagatttatattgaggatctcaaagaagagttcgttcgagattttgtttttccgatgttcagatcaaatccactttatgagggcgaatatttattaggcacttccattgcacgccccctaattgctaaaaggatggttgagatagtgaaggaaaccggagctgatgcaattgcgcatggtgcgacaggaaagggtaatgatcaggttcgatttgaattaggagcatatgctttaagtccatcaatcaaagttattgcaccgtggcgagagtgggatctaacatctcgagatcgtttgctaaagtattgtgctgagcacgatatcccggttgaaaaaaagagaggagccaagtcgccttattctatggatgctaatctgcttcacatttcctatgaaggagatgtgcttgagaacccggcaaatgaaccagaggaagatatgtggcaatggaccatatctccagagaatgcgccagataagcctacttacatagatttagcatatgagaaaggcgaccctatttcaattaatgaccaggcgctatctcctgctggtttttaga

SEQ ID NO: 316611 - DNA, 963 bp, Unknown
  Bacterial polypeptide expressing nucleotide sequence isolated from the Sargasso Sea
tgtttagagcaaatacactttacgaaggtggatatttattaggaacagctatagcaagaccattaattgctaaaagacaaatcgaaatagcaaatgaagttggtgcagatgcagtagctcatggtgctactggtaaaggtaatgatcaagtaagattcgagctaggatattatgctaataactctaatattaaagtaattgcaccatggagagattgggattttgaaagtagaaaagatttaatcgagtttgcaaaaaaaaatcaaatagaagtaacaaaagataaaatgggagatccgccttttagtactgatgcaaatttattacacacttcttcagaaggaaaaatactcgaagatccttgggttgaacctccagaatacgtatacacaagaacaaataatattaaagaaacacccgatgatcctgaaattattactattgaattcaagaagggtgatccagtttccttaaataaaatcaatcaaaaacctcatgaaattttaacaaacttaaatcttatagctggaaaacatggtgttggcagaatcgatattgttgaaaataggtttgtaggaatgaaatctcgtggagtatatgaaaccccaggaggaacaattttaataaatgctcatagagctatagaaagtattactcttgatagaggtgaagctcatctcaaagatgaaattatgccaaagtatgctgaagctatttataatggactatggttttcctctgagagaattgcaatgcaaaagttgatagattcttcacaagttaatgttaatggattcgtaaaattaaaaatattcaaaggcaatgtaatagttgttggtcgtaaatctgagaacagtttatatgataacacattagtttcttttgatgaaaaaggagattatgatcaaaaagatgcagaaggatttattaaaattaattcattaagattaaaaaataaataat

SEQ ID NO: 316612 - DNA, 875 bp, Unknown
  Bacterial polypeptide expressing nucleotide sequence isolated from the Sargasso Sea
gttggtgcctaaaaataaaagtaaaattgtcttggcttattctggggggctagacacctccataattcttaaatggcttcaagagaattacaattctgaagtaatagcctataccgccgatattgggcaagaaattgataaaaaaaaaataattaaaaatgcaaaaagattaggtgttaaaaatattattattgaagatttaaaaaataattttgtaaaagattatgtttttccaatggttagagggcacgctttgtatgaaggtacatatttattgggtacctcaattgcaagacctttaattgcaaaaagacagattgccgttgcaaaaaaatttaaagcatttgctgtatcacatggtgctactggaaaaggaaatgatcaagttagatttgaattaggatattattattttggaccaaaaataaaagtcatagccccatggagaatttggaaattaaaatctagaacagatttaattagatacgcaaaaaaacacaaaatcccaatacctaaagataaaaaaggagcacctcctttttcagtggatgacaatctttatcacacttcaactgaaggaaaggttttggaagatccaaaaaaacaagctcctgaatatatttttcaaagaactgtttctcctgaaaaagcacccaagaaaccctcttatgtaaccataggatttaaaaaaggtgatccagtatcagtaaataataaaaaattagcacctgctaaacttttacaaaaattaaatttagtcgctggtaaaaatggaattggaagagttgatctagttgaaaatagatttattggaattaaatcaagaggagtatacgaaacaccaggtggcactcttttgatgacagcacatagag

SEQ ID NO: 316613 - DNA, 476 bp, Unknown
  Bacterial polypeptide expressing nucleotide sequence isolated from the Sargasso Sea
aatgaataagataatactagcttactcaggcggactagatacaactgttattcttaaatggctgcaagaaaactatgatgctgaagttattacgtataccgcagatttagggcaaaacgacctaagagatgacgtggaagataaagcttcacaagctggagcatctcactcaatagtcgaagatattaaagatgattttgtaaaaaatttcgtttttcccatgtttagaggaaatgctatttatgaaggcgaatatcttttaggtacttcaattgcaagacctttaatcgccaaaaggctcgttgaaattgcaaaagaggagggagctcaattcatatctcatggggctacaggtaagggcaacgatcagattagatttgaattaggtgtttatggactagctcctgaattgaaaattattagtccttggcgcgaatgggatctagtatcgaggaaggatttagttaaatactgca

SEQ ID NO: 316614 - DNA, 379 bp, Unknown
  Bacterial polypeptide expressing nucleotide sequence isolated from the Sargasso Sea
aaatccagaggtgtttatgaaacaccagggggcacaattttagctaaagcacacagggcaattgaaagcattacactagatagaggtgaagcacatttaaaggatgaaataatgccaaaatatgcagagaccatttataatggtttgtggttttcctctgaaagattaagtatgcaaagtttgatagactctactcaaaaaacagtaaccggagatgttaggttacaacttttcaaaggaaatgttattgtaaaaggcagaagatctcctttcagcaaatataatttatcacttgtatcatttgatgaggcaggtgattataatcaaagagatgcagaaggatttataaaaataaattcattaagactaaaacattgag

SEQ ID NO: 316615 - DNA, 622 bp, Unknown
  Bacterial polypeptide expressing nucleotide sequence isolated from the Sargasso Sea
aatgagtaaagaaaaagtagtcctggcctattccggagggcttgatacttctgtgattgttcactggctggcctcccaggggtatgacgtgattgccctctgcctggacctcggacaaaaagtcgaaaacctcgatgaaatccggcaaaagggtctcaaggccggggccgtggatgtgttgatcgaagatgtgcggaaagaattcgttgaggattatgtttttcgggcaatagagtggaacgcggtttacgagggtacctatctgctgggaacctctctggctcgtcctttgatttcaaaaaaacaaatcgaagctgcggaacggtttggtgcttccacagtaagtcatggtgcaacaggaaaaggtaatgaccaggttcgttttgagttgggatattatgccctgaatccggacatcaagatcattgctccctggaaggtaccggaattctatcaacgctatccaggacgagctcaattaattgaatatgctcagcaaaacggaatcccggtaaaagccactgcggaacaaccctggagcactgatgaaaacctgatgcatattagtttcgagtcaggaatgctcgaagatccctggcaggaaccgaaagaagagatgttc

SEQ ID NO: 316616 - DNA, 527 bp, Unknown
  Bacterial polypeptide expressing nucleotide sequence isolated from the Sargasso Sea
gatgaatttaaataaaagaattgtactcgcatattcaggtgggttggatacttcaattattttaaaatggcttcaagaaaattacaaagcagaagttatcgcctataccgctgatattggtcaagaaattgatagaaaaaaaataataaagaacgcaaaaaaacttggtgtaaaaaaaataataattaatgatttaaaagatacttttgtaaaaaattatgtttaccccatgataagaggacatgcgatttatgaaggtgtttacttattaggtacttcaatagcaagaccacttatagcaaaagatcaaattagaattgcaaaaaaatataaagcttatgctgtttcacatggatctacaggtaaaggcaatgaccaggtaagatttgagcttggatatcattactttagcccaaaaattaaaattatagctccttggagaatttggaaacttaagtctagaactgatctaattaactatgcaaaaaaacatggaatagaaattccaaaagataaaaaaggtgctt

SEQ ID NO: 316617 - DNA, 797 bp, Unknown
  Bacterial polypeptide expressing nucleotide sequence isolated from the Sargasso Sea
ttggttatttttatttggcccaaaaataaaagtgatagctccttggagaatatggaaattaaaatccagatcagatttaatcaaatacgcaaaaaaacataacataccaataccgaaagataaaaaaggtgcaccgcctttttctgtagatgataatctttaccatacttcaaccgaaggaaaggtattagaagatccaaaaaaacaagcacctgaatatatttttcaaagaactgtttctcctgaaaaagctcctaacaaaccatcttacgtaacaataggttttaagagaggggatcctgtatcggttaataataaaaaattacctccagcaaaacttttaaaaaagttgaatattcttggtggtaaaaatggaattggaagagttgatcttgttgaaaatagatttattggtataaaatccagaggagtttacgaaacaccaggaggaacacttttgatgacagcacatagggcaattgaatctataactttagataaaaaaactatgcatcaaaaagatgcaataatgtctaagtatgctgaacttatttacaatggtttttggttttctaaagctagatttaagttacagaaaattgttgatttaaaaaaaaacaaagtaaatggatctgtaagacttaaaatttataaaggaaatatcacaattttatctaggcaaagcaaaagtaatgcttactccctagaaaaggtatcttttgaagaaaataaatcttttaaaaagtcaaaagtggagagatttatatcgggtgcggcaagaaagctaagagcctaga

SEQ ID NO: 316618 - DNA, 517 bp, Unknown
  Bacterial polypeptide expressing nucleotide sequence isolated from the Sargasso Sea
aatgaaatcaaaaaaaagaattgtgttagcttactctggtggcttagacacgtctattatactaaaatggcttcaagaaaattatagcgcagaagtaatttgttacactgcagatattggtcaagaaattaataaaaaaaaaattatatcaaacgctaaaaaatttggtgttaaaaaaataattataaaagacctaaaaaatgaatttgtaaaaaattatgtgtttccaatgcttagaggccatgcagtttatgaaggtgtttacttactaggaacttcaatagcaagaccattaattgcaaaagatcagattagagtagcaaaaaaatataaagcgtatgcagtatcccacggatcaactggaaaaggtaatgatcaagttagatttgaacttggctatcattactttgggccaagcattaaaataattgctccttggagaatatggaaattaaaatctagaacagatttaattaattatgcaaaacaaaatggaatttctattcctagagacaag

SEQ ID NO: 316619 - DNA, 532 bp, Unknown
  Bacterial polypeptide expressing nucleotide sequence isolated from the Sargasso Sea
cgacgtggtggccattgatgggcatcggctctcgccagcagaggtgctcgcaaaacttaacgagcgcggcggcgccaatggcattggcagagccgatattgtggagaatcgctacgtcggtatgaagtcacgaggctgttatgagacaccggggggcagtattttgcttcgggcacatcgggctattgaatcaatcacgctcgatcgcgaggtggcgcatctgaaagacgagttaatgccgcgttacgccaagctgatatacaacggatactggtggtctcccgagcgccatgctctgcaggccgcgatcgaccagacccagtcggttgtcaacggcgatgtgcgtgttgctctgtacaaggggaacgtgactgtaacgggcaggcggtcggcagactctctctttgatgagcacatcgcgaccttcgaggctgacggtggcgcatatgatcaagctgacgccgagggcttcattaagcttaatgccctaagactgcgaatcgccgctaacaaggggcgtcagcaccactag

SEQ ID NO: 316620 - DNA, 803 bp, Unknown
  Bacterial polypeptide expressing nucleotide sequence isolated from the Sargasso Sea
aatgcaaaaagacttgggtgtaaaaaaagttataatcgaaaatttaaagaacgtttttgttaaagattacgtatttccaatgattagagctcacgcgctgtacgaaggagtttatttacttggtacttcaatagcaagacctttaatagcaaaaagacagatcgaaattgcaaaaaaatttaaagcttttgcggtatcgcatggggcaactggaaaaggaaatgatcaagttagatttgagcttgggtatgctttctttggaaaaaaaattaaagtgatagccccgtggagagaatggaagctgcaatcaagaacggatttaattaaatatgctaaaaaatataaaattccaattcctaaagataaaaaaggggctcctccgttttctgtggacgacaatttgttccacgtttcaaccgagggaaaagttcttgaaaacccaaaaaactcgcctccagaatttatttttcaaaaaactatttcgccagaaaaagcaaaaaataaatctactagggttaagattggttttaaaaatagtgatccagtttctattaatggaaagaaatacaaaccagaattacttttagagaaattaaataaaattgggggagcaaatggcgtgggtagagttgaccttgtagaaaatagatttattggaataaagtctagaggagtttacgaaacgccaggaggtaccatcttatattgtgctcatagagcaatggagtctgtaactctagataaagcaactatgcatacaaaagagaggataatgcctttgtacgcagaattagtttataatg

SEQ ID NO: 316621 - DNA, 936 bp, Unknown
  Bacterial polypeptide expressing nucleotide sequence isolated from the Sargasso Sea
atctattattttaaatggttacaggaaaattacgatagtgaagtaattgcctacactgcagacattggtcaagaaatggaccgaaagaaaattgttaaaaacgcaaaaaaacttggtgttaaaaaaataattattaacaatttaaaaaatacgtttgtaaaagaatatgtcttcccaatgattagaggtcatgcaatttacgaaggggtttaccttcttgggacatcaattgctcgacctttaattgcaaaagatcaaattaaagttgctaaaaagtttaaagcctttgctgtttcgcatggttcaaccggaaaaggtaatgaccaagttagatttgaacttggatatcattactttggtccaaaaataaaagtgatagctccttggagaatttggaaattaaaatcaagaacagatttaattaattatgccaaaaaacataacattcctattccaaaagataaaaagggtgcaccacctttttcagtagatgacaatttatttcatacatcaactgaaggtaaagttttagaaaatccaaaaaattcagcccctgaatttatttttcaaagaacaacttcacctgaaaaggcacctaataagcccacatatgtttccattggtttcaaaaacagtgatccggttagtattaacggaaaaaaattaaatccagaaaaacttttagaaaaattaaatcaaatcggtggaaaaaatggagttggaagagttgatttagttgaaaacagatttatcggaattaaatcacgaggagtttatgaaactcctggaggaacattgcttttaattgctcatagagcaatggagtctgtaacattagataaagatactatgcataaaaaagattctattatgccaagatatgcagaattaatttataacggttattggttctcaaaagaaagatttaaattacaa

SEQ ID NO: 316622 - DNA, 898 bp, Unknown
  Bacterial polypeptide expressing nucleotide sequence isolated from the Sargasso Sea
tatgtctttccgatggtgcgagcccatgcagtttatgaaggaatttatttattaggaacatctatagcaagacctttaataggaaagagacagatacagattgcaaaaaaatttaaagcttttgcagtctctcacggtgcaacaggaaaaggaaatgatcaagttagatttgaattagcttatgcttactttggaaaaaaaattaaggtaattgccccttggagagaatggaagttgaagtcaagaacagatttgattaattatgcaaaaaaaaacaaaattcctataccaaaagataaaaaaggagctccgccattttctgtagatgacaatatttttcacacatcaacagaaggaaaaattctagaaaaccctaaaaattcagctccagaatttatttttcaaagaacaaaatctctagaaaaaactcctaataaagcaactattgttaaaattgattttaaaaatggagatccaatttcaattaacggaaaaaaacttagtccagaaaaacttttacacaaactaaatcagataggtggaaataatggagtgggtagagttgatttagttgagaatagatttattggaataaaatctagaggtgtttacgaaacaccaggtggaaccattttatatattgcgcatagggctattgagtcagtaacactagataaagaaactatgcacgaaaaagagagaataatgcctgtttatgctgagcttgtctataatggatattggttctcaaaaaaaaggactaagcttcaaaaaatcattgataaaaaaagaaatctggtcgcaggacaagttgtcctaaagatttttaaaggaaatgttataattatttcaagaaaaactgaaaataaagcttattcgatgaaaaagtttcttttga

SEQ ID NO: 316623 - DNA, 919 bp, Unknown
  Bacterial polypeptide expressing nucleotide sequence isolated from the Sargasso Sea
tgccttatatgaagggacctatatgcttgggacttctttggcgcgtccattaattgcaaaaaaacagataaaaattgcagaaatggaaggtgcttctgttgtatctcatggtgctacaggtaaaggtaatgatcaggtacgttttgagttaagttactatgcacttaaaccggatattcgagtaattgctccctggaaaattccagatttttataaaaaatatcctgggcgttctgaattactagaatatgcaaagaaatttgggatacccgtgaaggccacaaaagaaaacccatggagttcagatgaaaaccttatgcatatcagttttgagtcaggaatgctagaagatccatggcaagctccaatcccggaaatgtttgaattatcaaattcacctcaaaagggacctcctgatcctcaggaaattataattaaatttaaaaatggtaatccaattgaaattaacgaaaaaaagtactcccctgcaaaactactccgaaagctgaatgaattaggtggtaaacatggaattgggagagcagatgttgtggagtcacgatttgtagggatgaaaaatcgtggtgtttatgaaactcccggtggaacaatactccatatcgcacatcgggctattgaatcaattacattaagccgcggagtcatcaatttaaaagattcactgatgcctcgattcgcacaattgacatacgatggattctggttttctcctgaaatggaaatattactagatatggtaaaaaaaactcaagaaccagtaaatggtactgttcgcctagaacttttcaaggggaattgtattgttacaggacgcaaatcacctaatagcttgtatgttgaggatatagcgacaatggaagcagataatggtgcttatgatccagaagagatgctattg

SEQ ID NO: 316624 - DNA, 740 bp, Unknown
  Bacterial polypeptide expressing nucleotide sequence isolated from the Sargasso Sea
attggagaacgttagtgtgtcggaaataaataaagttgtacttgcctattcgggtggtctagatacttctgtcattgtcaaatggctacagcaggaatatcaatgtgaagtggtcacttttactgccgacatcgggcagggagaggagttggaacctgctcgaaaaaaagcagaggcgatgggaatcaagcagattttcattgaagaccttagggaggaattcgtccgtgattatgtgtttcctatgtttagagcgaaccctctctatgaaggagaatatttgttgggaacttctattgctcgtccgctgatttctaaaaggatggtcgaaatcgcgcaggagactggtgctgatgcaattgcacatggagcaacgggaaaaggaaatgaccaagttcgttttgagttgggagcatatgctcttagtccctctatgaaagtcattgcgccgtggcgagaatgggacctcacatctagagatcgacttctcaaatattgtgcggagcacaacatccctgttgaaaaaaagagaggaaagaaatcgccttattccatggatgcaaatttgctacacatttcttatgagggggatgtacttgaaaatcctgcgaatgaaccagaggaggatatgtggcaatggacggtttctccggaaagtgctcctgacagggcaatttatatcgacctagagtatgacaagggggatccggtctctgttaatggagaaagtttatcgccag

SEQ ID NO: 316625 - DNA, 568 bp, Unknown
  Bacterial polypeptide expressing nucleotide sequence isolated from the Sargasso Sea
ggaaaagcccacctacgaggaactcacctacaagaagggcgacatcgttgccgttgatggtcaggaaatgaagccccacgtggtgctggaaaccctgaacaaactggccggtgaaaatggtattggccgcctggacatcgttgagaatcgctacgtgggcatgaagtcccgcggctgctacgaaaccccgggcggcactatcatgctgcgcgcccaccgcgccattgagtccatcaccctggaccgcgaagtggcccacctgaaagacagcctgatgccccgctatgccgaggtcatctacaacggctactggtggtccccggagcgtgaggccctgcaggcgctgatcgaccagacccagaactacgtgaacggcaccgttcgcctgaagctgtacaagggcaatgtggacgtggtcggccgtaagtctgacgattctctgttcgatgagaagatcgccacctttgaagaagaccagggtgcgtacgatcagaaagatgcggaaggctttatcaagctgaacgcgctgcgcctgcggattgccgctggcaaaggccgcaagctttga

SEQ ID NO: 316626 - DNA, 532 bp, Unknown
  Bacterial polypeptide expressing nucleotide sequence isolated from the Sargasso Sea
atttgttacacagctgatataggacaagaacttaataaaaaaaaaattgttaataatgctaaaaatttaggtgttaaaaatatcataattgaggacttgcaagacgaatttgtaaaagaatatgtatttccaatgataagaggtcacgctgtttatgaaggtgtatatttattgggaacatctatagccagaccgttaattgcaaaagcacaaattaaggttgctaaaaaattgaaagcttatgcagtatcacatggttctacaggaaaaggaaacgaccaagttagatttgaacttggttaccatttctttagtccaaaaatgaaagtaattgcaccatggcgtatttggaagttaagttctagaactgatctcattaaatatgctaagaagaataaaattccaataccaaaagataaaaaaggtgagccacctttttcaattgatgataatttatttcatacatcaactgaagggaaagttttagaaaacccaaaaaatcaagcaccagaatttatattccaaagaacta

SEQ ID NO: 316627 - DNA, 418 bp, Unknown
  Bacterial polypeptide expressing nucleotide sequence isolated from the Sargasso Sea
atgaaatcgaaaaagaaaattgttctagcttattctggggggcttgatacctctataattttaaaatggcttcaagaaaattatgatgctgatgtaatttgttatacagcagatgtaggtcaagaaattgatagaaaaaaaattataactaatgcaaaaaaatttggtgttaaaaatataattattaaagatttaaaagatatttttattaaggattacgtttatcctatgatcagaggacatgcgatctatgaaggggtttatttattggggacatctatagcaagacctttaattgcaaaagatcaaataagagtagctaaaaaatttaaggcctatgcagtttctcatggagcaactggtaaaggcaatgaccaagttagatttgaattaggctatcattattttggtctctaag

SEQ ID NO: 316628 - DNA, 517 bp, Unknown
  Bacterial polypeptide expressing nucleotide sequence isolated from the Sargasso Sea
tatgaaaaagaagaaaattgttcttgcttattctggaggccttgatacatcagtaatacttcattggttaaaagcagaatacaacgctgatgtgattgcctacatagctgatttaggtcaaggtgaagatttaaagcttgctgcaaaaagagccaaacaagtaggtgcaactaaagtttatgtagaagatttaaaaaaagagttcatcaatgattttatttatccaatgatacaatcatccgcaatttatgaaggtacatatctattggggacatcgatagctagacccttgatagctaagagacaaattgaaatagcaaataaagaaaaagcttttgctgtatcacatggttcaactggaaaaggtaatgatcaagtaagatttgaattagcctttcatgcattgaatcctaagattgaaattatttctccttggagggtttggaattataaatccagagaggattgtattgaatatgcaaagaaaaataagattccaattactggacaaagcaaa

SEQ ID NO: 316629 - DNA, 781 bp, Unknown
  Bacterial polypeptide expressing nucleotide sequence isolated from the Sargasso Sea
aatgagtaaagaaaaagtagtcctggcctattcggggggtcttgatacttctgtgattgtccactggctcgcctcccaggggtatgatgtgattgccctctgcctggacctcggacaaaaagtcgaaaacctcgatgaaatccggcaaaagggtctcaaggccggggccgtggatgtgttgatcgaagatgtgcggaaagaatttgttgaggattacgtccttcgggcaatcgaatggaacgcagtttacgagggcacctatctgcttggaacctctcttgcccgtcctttgatttcaaaaaaacaaatcgaagttgcagagcgctttggtgcttccacagtgagtcatggtgcaacaggaaaaggtaatgaccaggttcgttttgagttgggatattatgccctgaatccggacatcaagatcattgccccctggaaggtcccggaattctatcaacgctatccaggacgtgctcaattaattgaatatgctcagcaaaacggaatcccggtaaaagccactgcggaacagccctggagcactgatgaaaacctgatgcatatcagtttcgagtcaggaatgctcgaagatccctggcaggaaccgaaagaggagatgttcgagctttcgcagtcactaaaaaatgctccagaccaggaacaggttttgaccatcgatttcgaggagggacttccggtaagacttgataggcaccagttcgaacccgtagagctattgacggagttaaacgaaatcggaggtcgtcatgggatcggcaga

SEQ ID NO: 316630 - DNA, 861 bp, Unknown
  Bacterial polypeptide expressing nucleotide sequence isolated from the Sargasso Sea
gatgtaggccaagaaattgatagaaaaaaaataataactaacgcgaaaaaacttggtgttaaaaatataattataaaagatttaaaagatatttttgttaaggattacgtttatcctatgatcagaggacatgcgatctatgagggtgtttatttattggggacatcgatagcaagacctctaattgcaaaagatcaaataagagtagctagaaaatttaaggcttatgcagtttcacatggagcaactggtaaaggtaatgaccaagttagatttgaattaggctatcattattttggtcctaaaattaaaatcatagctccctggagaatttggaaattaaaatctagaacagatttaataaattatgcaaaaaaacatggcatagctataccgaaagataaaaaaggtgcacctcctttttctgttgatgataatttatttcatacatcaactgaaggtaaggttttagaaaatccaaaaaattctgctccagaatttatttttcagcgaacagttgctccagaaaaggcacctaataaaccatcgtttattactatcaattttaaaaacggtgatccttttggagttaatggaaaaaaaatatctccagctaaattattaacaaaactaaatgacctagcaggtaaaaatggcattggaagagttgacttagtagagaatagatttttaggtataaaatctagaggggtatatgaaacgcccggtggaactcttttaatacatgcccatagagcaattgagtctgttactttagataaagaaactatgcataaaaaaaatcagataatgtctagatatgcggagttaatttataatggttattggtatcaaaagaaa

SEQ ID NO: 316631 - DNA, 697 bp, Unknown
  Bacterial polypeptide expressing nucleotide sequence isolated from the Sargasso Sea
atgaaatcaaaaaaaagaatagtattagcttactctggtggtttagatacatctataattctcaaatggcttcaagaaaattacaatgcagaagttatttgctacactgcagatattggtcaagaaatagacaagaaaaaaattattttgaatgccaaaaagcttggagtgaaaaatataattattaaagatcttaaaaatatattcataaaagactatgtcttcccgatgttaaggggtcatgcagtgtatgaaggagtttatttattaggaacatctatagcgagaccacttattgcaaaagatcaaataagagtggcaaaaaaatataaagcatacgctgtatctcatggatcaacaggaaaaggaaatgatcaaattagatttgaacttggttaccattactttggcccaaaaattaaaataatagccccatggagaatatggaaattaaaatctagaacagatcttattaattatgctaagaaaaaaggaattcctattccaaaagacaaaaagggtgctccaccattttcagttgatgacaatttgttccatacttcaacggaagggaaagttttagaaaaccctaaaaattctcctcccgaatttatctttcaaagaactacttctccagaaaaagctccaaataaaccaacatttatatcaattaattttagaaatggagatcctatgg

SEQ ID NO: 316632 - DNA, 661 bp, Unknown
  Bacterial polypeptide expressing nucleotide sequence isolated from the Sargasso Sea
gttgcacatctcgtacgagggtaacgcgttggaggatccgtgggtggagtactctgaggacatgttcacgcgttcggtgagcccggagaacgcgccggacgcgcctacgtacatcgaagtcgactttgagaagggtgatccggtggccatcgacggcgttcgatactctccggcggacatgttagccaagctcaacgaactcggcggtgcgaacgggatcggtcgattggacatcgtcgagtctcgtttcgtcggcatgaagtctcgcggcgtgtacgaaactccgggcgggaccattctcttggcggtgcgacgcgcgctcgaaaccgtctgcctcgatcgcggcgagatgcactacaaggatgaaatgatgccgcaatacgccgagctcgtctacaacgggttctggttctccccggaacgcgagatgatgcaagccgccatcgacaagtgctccgaaagcgtcaccggtaccgtgcgcgccaagctctacaaggggaacgtcatcgtcgtcggacgcaaggcggacaacacgttgtacgacgaccgactctcgacgttcgaggaagacggcggcgcgtacgaccaaaaggacgccgctggtttcatcaagttgcaagcgcttcgtctccgcaccctcaaggcggcgcgcgaaaagtaa

SEQ ID NO: 316633 - DNA, 473 bp, Unknown
  Bacterial polypeptide expressing nucleotide sequence isolated from the Sargasso Sea
aatgaaaaaaattgttttagcttattcaggaggtttggacacctcgattattcttagatggttacaagaaaactataaagcagaagtaattgcttacacttctgatattggtcaggaaattgataaaaaaaaaatcataaggaatgctaagcgcctaggtgttaaaaaaataattatcgaagatctaaagaatatttttgttaaagattatgtctttcccatggtaagagctcatgcggtttatgaaggagtttatttacttggaacatcgatagctagacctttgattgctaaaaggcagattaaaatagcaaaaaaatttaaagcatatgctgtatcacacggagctaccggaaaaggaaatgaccaggtaaggtttgagctcggttatgctttttttggtggtaaaaaaattaaaactattgctccgtggagagagtggaaattacaatcaagagcagatttaataaaat

SEQ ID NO: 316634 - DNA, 916 bp, Unknown
  Bacterial polypeptide expressing nucleotide sequence isolated from the Sargasso Sea
atgaaaaaacaaaagaagattgtactcgcctattcaggtggtttggatacgtctatcattcttaaatggcttcaagaaaattacgattctgaagttatagcatacactgctgatgttgggcaggaaatggataaaaaaaaaataattaagaatgcaaaaaaattgggagttaaaaaaatcataattcaggatctaaaaaatatttttgttaaggattatgtttacccaatgataagaggtcatgctctttatgagggtgtttatttattaggtacatctattgcaagaccactgattgcgaaagatcaaattagagtagctaaaaaatttaatgcttatgctgtctcacatggttctacaggaaagggaaatgatcaagttagatttgaattgggatatcattactttggtcctaaaattaaaataattgcgccatggagaatttggaaattaaaatcaagaacagacctaattaattatgcaaaaaaacatggaatacccattccaaaagataaaaaaggtgcaccacctttctcagttgatgataatttatttcatacttcaacagagggaaaagttttagaaaatcctaaaaattctgcacctgaatttatttttcaaagaacaacttctcctgaaaaggctccaaataaaccaagctttattactattaattacaaaaacggtgaccctattggtttaaatggaaaaaaattatccccagcaaaagttttggataaactaaatcaattagctggaaaaaatggaataggaagagtggatttagtcgagaatagatttattggaataaaatcaagaggagtttacgaaactccaggaggaacattattactaatcgcacatagagcaattgagtctgtaactctagataaagatacaatgcataaaaaagatg

SEQ ID NO: 316635 - DNA, 931 bp, Unknown
  Bacterial polypeptide expressing nucleotide sequence isolated from the Sargasso Sea
gtccataattttaaaatggcttcaagaaaattataaagctgaagtaatttgttacactgctgatgttggtcaagcaattgacaaaaaaaaaatttttaaaaatgcaaaaaaatttggtgttaaaaatattattatccaagatttaaaagatacttttgtaaaagattacgtttacccaatgattagagggcatgcgatttatgaaggagtgtatctactaggtacttctattgctagaccactaattgcaaaagatcaaataagagtagctaaaaaatttaaagctaatgcagtttcgcatggtgcaacaggcaaaggaaatgatcaagtaagatttgaattgggctatcattattttggaccaaaaataaaaattattgctccatggagaatttggaaattaaaatcaagaacagatttaatcaactatgcaaaaaaacatgggataccaataccaaaagataaaaaaggtgccccacctttttcagtagatgataatttatttcatacatcgacagaaggtaaagtattagaaaatccaaaaaattctgcaccagaatttatttaccaaagaactatttctccagagaaagctccgaacaaaccttcatttgttaatatccatttcaaaaatggagatccgtttggaatcaatggaaaaaaaatgtctccggctaaattattaacgaagctaaatgacctagcgggtaaaaatggaataggaagagttgacctagtagagaatagatttttaggtataaaatctagaggagtatatgaaacacctggtggaactctattaataaatgctcatcgagcaattgaatctgttactttagataaagaaactatgcacaaaaaagatcaggtaatgtctagatatgctgagttaatttataatgggttatgggtattcaaaggaaagatttaa

SEQ ID NO: 316636 - DNA, 412 bp, Unknown
  Bacterial polypeptide expressing nucleotide sequence isolated from the Sargasso Sea
atgaaaaagataatactagcttactccggcggattagatacaactgtcattcttaaatggttgcaagaaaactatgatgctgaagttattacgtataccgcagatttagggcaaaacgacttaagagatgacgtggaagatagagcatcacaagctggtgcatctcactcaatagttgaagatcttagagatgattttgtaaaaaattacgtttttcctatgtttagagggaatgctatttacgaaggtgaatatcttttaggcacttcaattgcaagacctttaatcgctaaaaggctcgttgaaattgcaagagaggagggagctcaattcatatctcatggtgctacaggtaagggaaacgatcagattagatttgaattaggagtttatggactagctcctgaatgaa

SEQ ID NO: 316637 - DNA, 514 bp, Unknown
  Bacterial polypeptide expressing nucleotide sequence isolated from the Sargasso Sea
caatttaacggtgaagctgtagctccggttaaggctattgaattactgaacgctattggttcagaacacggtgtaggtcgtatcgacatcgttgaaaaccgtttagtgggcatgaaatcccgtggttgctacgaaacacctggcggcactattttagtggcggcattgcgtgcgctggagtctctggtgtatgaccgtacttcactgaaataccgtgaagaagtgggcttagagtttgctcagctggtttatgatggccgttggtttacgccattaaaagatgctttgttagcagctgctacttctttagctgaccaactgacaggtgacattgttgttaagctgtacaagggcaacgtcactgtgacgcaacgccgttctccaaacagcctgtattctgaagcctttgcgacttttgaaggcgatgaagtgtacaaccaaaaagatgcggcaggttttatccgcctgtatagcttagccagccgtattcgtgctttgcatagcaaaggttaat

SEQ ID NO: 316638 - DNA, 877 bp, Unknown
  Bacterial polypeptide expressing nucleotide sequence isolated from the Sargasso Sea
aaattttatctttccaatgtttagagcaaatacgttgtatgaggggaattatttattgggtacagcaattgcaaggccacttattgcacaaaaacaaattgaaatagcaaaaaaatataatgcatcatatgtatctcatggagccacgggaaagggaaatgatcaaataagatttgagttaggctattattaccataacagcagaattagagtcattgctccatggagagaatgggaattaaattcaagagctaagttaataagctatgctcataaaaataatataccagtacctggaagcaaaaagaaagagcctccatattctatggatgctaacttacttcatatttcttatgaaggtaaaatattagaagacccttggaaacaaccagacaaaaaaatgtttagaattactaaagatccagaaaaatgtaataaagaaggtgaaacaatattaatttcatttaataaaggtgatgtagttaaaattaataataaaaaagtttctccttatgaaactttaaatattttgaataatataggaggaaggaacggtataggtagaaaagatttagtagaaaatagaactattgggatgaaatctagaggtgtttatgaaactcccggtggtacaatactactagatgcacatcgagctattgaaagtcttacactagatggacctacaataaacctaaaggatgaaataatgcctaagtatgcgagactaatctatgatggactatggtttagtccagaaagggagatgctacaagccctaattaataaaagccaagaaagagtttcaggtgatgtaaaggtatttgttaggcagggaaatttagttataaaaggaagaaaatcaaaatatagttta

SEQ ID NO: 316639 - DNA, 403 bp, Unknown
  Bacterial polypeptide expressing nucleotide sequence isolated from the Sargasso Sea
atgaataaaaagaaaaaaattgttctcgccttttctggtggactcgatacatcaataatacttaaatggttgcaaaatgaaatggatgcggaggttgttacatttactgctgatataggtcaaggaatagaaatagaagaagctaaaaaaaaagctaaactcttaggtgttaaaaaaatattcatcgaagatcttaaagaagaattcgttaaaaattatgtttttcctatgtttagagctaatgcaatttacgaaggattttacttactaggaacatctatagctagacctttaattgcaaagagacaaattgaaattgcaaagaaagttaatgccaattttgtggcacatggagcaacgggaaaaggtaatgatcaaataagatttgaattaggatactatg

SEQ ID NO: 316640 - DNA, 709 bp, Unknown
  Bacterial polypeptide expressing nucleotide sequence isolated from the Sargasso Sea
aatgccaaaaaaaattgttttagcttattcggggggtttagatactagtgttatcctaaaatggttgcaagaaaaatttgaatgtccagtagtaacctttacagctgacttaggtcaaggtgaagaactgagcccaattaaaaacaaagcagaatcacttggggtaaaggaaatatttatagaagatttaaaagaagaatttgtacaaaattatgtctttccaatgtttagagcaaatgcactttatgaaggaatgtattttttaggaactgcaatagcaagaccattgattgctaaaaagcaaattgaaatagcaaaagaagttggtgcagactctgtagcacatggatctactggaaaaggaaatgatcaagttagatttgagttaggatattatgcaaataatccaaaaattaatgttatttcaccatggagagagtgggaacttagttcaagaaaagatttaattagttttgcagaaaaacatcaaataaatattccaaaagataaacgcggagatgctccttttagtaccgatgcaaatttacttcacacatcatcagaaggtaaaatacttgaggacccttgggtcggtgcacctgaatatatatattctagaactaagtctttagaggatgcaaattctaaaccagatgaaataataatttcatttgaaaaaggagacccagtttctattaatgaaaaaaaa

SEQ ID NO: 316641 - DNA, 424 bp, Unknown
  Bacterial polypeptide expressing nucleotide sequence isolated from the Sargasso Sea
aatggtatgtggaagagtagatttagtggaaaatagattcttaggaattaaatcaagaggtgtttatgaaactccaggtggcacattacttatgattgcacacagagcaattgagtcgataactttagataaatcaactatgcatttaaaagaaaacattatgtttaaatatgcagaattaatttataatggtttctggttttctaaagagagatttaaattacaaaagataatcgataaaaaaaaaaataaagtaaatggatctgtaaaactaaaactatacaaaggcaacataacaattatttcaagaataagtaaaagcaaagcttattcggtgaaaaatgtctcttttgaggagaataaaagttttaataaaaaaaacgttgaaaaattcataaactttcataaaaaaaaattgatgtaa

SEQ ID NO: 316642 - DNA, 623 bp, Unknown
  Bacterial polypeptide expressing nucleotide sequence isolated from the Sargasso Sea
aatgaaaaaaattgttttagcctactcaggcggtttggatacatctataattttgagatggttgcaaaaaaattataatgctgaaataattgcttacacctctaatattggacaagttttagataagaaaaaaattattaagaatgctaagagactaggcgttaaaaaaataattattgaaaatcttaaaaatatctttgtgaaagattatgtttttccaatgataagagctcatgcagtttatgaaggagtatatttattaggcacatctattgccaggccgttaattgcaaaaagacaagttgaaattgcaaaaaaatttaaggcttttgcagtttcgcatggcgcgactggaaaaggcaatgatcaagtaagatttgagcttggttactcatattttggtaaaaataagattaaaacaatagcaccgtggagagaatggaaattacaatctagagcagatttaattagatatgcaaaaaaaaacaatataccaatccccaaagataaaaaaggtgctccaccattttctgtggatgacaatatttttcataccctcacagaaggtaaagttttagaggatccaaaaaactcagctcctgaatttatttttatcaagacag

SEQ ID NO: 316643 - DNA, 913 bp, Unknown
  Bacterial polypeptide expressing nucleotide sequence isolated from the Sargasso Sea
gttaaaaaaataataattaataatttaaaaaatacatttgtaaaagaatacgtctttccaatgattagaggtcatgcgatttatgaaggggtttaccttcttggaacatcaattgcgagaccattaattgcaaaagatcaaattaaggttgctaaaaaatttaaagcattcgctgtttcacatgggtcaactggaaaaggaaatgaccaagttagatttgaacttggatatcattattttggtccaaaaataaaagttattgctccttggagaatttggaaaataaaatcaagaactgatttaattaattatgcaaaaaaacataacattcctattccaaaagataaaaaaggtgcaccacctttttcagtagacgacaatttgtttcacacatctaccgagggtaaagttttagaaaatccaaaaaattcagcccctgaatttatttttcaaagaacaacttcaccggaaaaggcacctaacaaacctacttatatttctattggtttcaaaaatagtgatccagttagtattaatggaaaaaaattaaatccagaaaaacttttagaaaaactaaatcagatcggcggaaaaaatggagttggaagagttgatttagttgaaaatagatttattggaattaaatcaagaggagtttatgaaacaccgggtgggacattacttttaatcgctcatagagcaatagagtctgtgacactagataaagatactatgcataaaaaagattctattatgccaagatatgcggaattaatttataacggttattggttttcaaaagaaagatttaaattacaaaaaatagtggatctaaaaagaagcaaggtaaatggaagtgttaagcttaaactttataaagggaatgttacaatcaatcgagaatacaaaaagc

SEQ ID NO: 316644 - DNA, 769 bp, Unknown
  Bacterial polypeptide expressing nucleotide sequence isolated from the Sargasso Sea
gcaccctggagagagtggaatctgaactctagatctaagctgattgagtatgcgttagaacaccaaatacctgttcctaaagataaagaaggggaagcaccatattcaacagatgccaaccttctccatatttcttatgaaggtaaagctcttgaagatccttgggctgaaccccccagcaacatattcacaaggacctcttctcctgaagatgcaccccagactgcagaggttatagacataggcttcaacaaaggtgatgccacctcaatagatggggaaaaacttagccctgcgtcacttctcacaaaattgaactcactgggtggtaaacatggcataggacgtatcgatattgttgaaaacagatttgttggcatgaaaagtagaggagtatatgaaacccctgggggaacaattttgctagcagccaggagagcgatagaaagtctgactttagataagggtgcttcccatttaaaagacgagttaatgcctcgctatgctgaattggtatataacggattttggttttcgcctgaacgtaaaatgcttcaagcagctattgatagttgtcaggaaaatgtaacgggcgatgttcgtatcaagctatataaaggcaacgtaatcatcttgggtcgaaaatcccctaatagcttatatgacctggatactgttacctttgaagaagatgaagtttatgaccaaaaagacgccgagggatttataaaattaaatgcattgagactaagactctcaaaaaattaat

SEQ ID NO: 316645 - DNA, 778 bp, Unknown
  Bacterial polypeptide expressing nucleotide sequence isolated from the Sargasso Sea
atgaaatcaaaaaaaagaattgtattagcttattctggtggcttagatacatccataatccttaaatggcttcaagaaaattataaggcagaggtaatttgttatactgcagatattggtcaagaaattgataagaaaaaaattatttcaaatgctagaaaacttggagttaaaaatataataataaaggatctaaagaatatatttataaaagattatgttttcccgatgttaagaggtcatgcggtatatgagggagtttacctgttgggaacttcaatagcgagaccacttattgcaaaagatcaaataaaagttgcaaaaaaatacaaagcatatgctgtatcgcacggatcaactggaaaagggaatgatcaagttagatttgaacttggctatcattactttggtccaaaaataaaaataatagctccgtggagaatatggaaattaaaatcaagaacagacttaataaattatgcaaaaaaaaataaaatttctattccaaaagataaaaaaggtgctccacctttttcagttgatgataatttatttcatacttcaactgaaggtaaggttttagaaaacccaaaaaactctgcaccagaattgatttttcaaagaactgtttcgccagaaaaagcacccaataaaccaacatttgtttcaattaattttagaaacggagatccaatgggggttaatgggaaaaaattaactccagcaaagttgcttgaaaaacttaatcaattagctggaaaaaatgagagtagggaga

SEQ ID NO: 316646 - DNA, 412 bp, Unknown
  Bacterial polypeptide expressing nucleotide sequence isolated from the Sargasso Sea
attggttgaaaatagatttgttggaatgaaatctagaggggtttatgaaactccaggtggaacaatattattaaatgctagaagagcaatagagagtattactttagataaaggagaagcacatttaaaagatgaattgatgcctaaatatgctgaagtaatttataatgggttttggttttctcccgaaagaatatcaatgcagaaattgatagattcaatgtcacacaaagttaacggtgatgtcaaaattaaagtatttaaaggtaatgtaattatattgggtagaaaatcaagcaactctctttatgacaattcattagtttcttttgatgaagttggtgaatataatcaaaaagatgctgaaggttttattaaaataaactcaattagacttcgtaaaaataaataa

SEQ ID NO: 316647 - DNA, 649 bp, Unknown
  Bacterial polypeptide expressing nucleotide sequence isolated from the Sargasso Sea
gggcaaggtgaagaagttgaacctgccagaaagaaagcagaattattgggagttaaagaaatatttatagatgacttaaaagaagagtttgtaaaggattttgtttttccaatgtttagagctaatgctttatacgagggtatctatttattaggaacatctattgccaggcctttaattgcaaaaagacaaattgaaattgctaatctaacaaatgcagatgccgtttcacacggagcaacaggcaaagggaatgatcaagtaagatttgaaattggttactacagccttaaacctgatatcaaagtaatttcaccatggcgggaatgggatttatcaagcaggaccgaattgatcagttatgcagaaaaaaatcaaattcaagtacctaaggataaaagaggtgaagctccatttagcgtagatgctaatttattacatgtttctgctgaaggtaaaattttagaagatccttggattgagccagaggagtttatttattcaagaactaaatccccatttgaagcacctaataaactaacagaaattattttagaattcaaagatggagatccaatttcattaaatggaaaagatttatctcctgctaaaatgctacatgaattgaatgttttaggtggtaacaatg

SEQ ID NO: 316648 - DNA, 492 bp, Unknown
  Bacterial polypeptide expressing nucleotide sequence isolated from the Sargasso Sea
aatgtctaaaaagattgttctcgcttactcaggaggtctagatacatctattattttaaagtggttacaagaaaattataatgcagaagttattgcttacacatctgatattggccaagaattagataaaaaaaaaattattagaaacgctaaaaaacttggtgttaaaaaaataattattaacgatttgaaaaatatatttgtaaaagattatgtttttccgatgataagagggcacgcaatatacgagggtgtttatttgttgggtacatctatcgcaaggccgttgattgctaaagaccaaattaaagttgcaaaaaaatataaagcatatgctgtatcacatggatcaactggaaaaggaaatgatcaagttagatttgaattaggttatcattattttggaccaaaaataaaagtgatcgcgccttggagaatctggaaattaaaatcaagaacggatttaattaattatgctaaaaaacatggaat

SEQ ID NO: 316649 - DNA, 750 bp, Unknown
  Bacterial polypeptide expressing nucleotide sequence isolated from the Sargasso Sea
agaggacacgcgatctatgagggtgtttatttattagggacatcaatagcaagacctcttattgcaaaagatcaaataagagtagctaaaaaatttaaagcctatgcagtttcacatggagcaactggcaaaggcaatgaccaagttagatttgaattaggctatcattattttggtcctaaaattaaaattatagctccgtggagaatttggaaactaaaatctagaacagacttaattgattatgcaaaaaaacatagcatagctattcctaaagataaaaaaggtgcacctcctttttcagtggatgataatttatttcatacatcaactgaaggtaaggttttagaaaatccaaaaaattatgctcctgaatttatttttcagcgaacagtttctcctgaaaaagcacctaacaaaccatcttttgttactattaattttaaaaatggtgatccttttggaattaacggaaaaaaattatctccagctaaattattaacaaagttaaatgatctagcaggcaaaaatggaattggaagagttgacttagtagagaatagatttttaggaattaaatctagaggagtgtatgaaacacctggtgggactcttttaataaatgctcatagagcaattgaatctgttaccttagacaaagaaactatgcacaaaaaagatcagataatgtctagatatgcagagttaatttacaatggttattggtattcaaaagaaagatttaaactt

SEQ ID NO: 316650 - DNA, 943 bp, Unknown
  Bacterial polypeptide expressing nucleotide sequence isolated from the Sargasso Sea
aatgccaaaaaaaattgttttagcttattcaggcggactagatacaagtgtaattttaaagtggttacaacaaaaatacaaatgccctattgcagcttacactgctgatgtcggacaaaatgatgattttaatgaaataaattcaaaagcaaaaaaccttggtgttgaggaaatttgtatagacgacttaaaagaagaatttgtaaaagattatgtttttccgatgtttagggcaaatgcattatatgaaggtgtttatttattaggtacagctattgcaagaccattgatagcaaaaaaacaaatcgaatatgcaattaaaataggcgcagacgcagttgctcatggctcaacaggcaagggcaatgatcaggttagatttgaaataggatattttgcaacaaatcctaaaatccaaattatagcaccttggcgtatttgggattttaaatctagagaagacttaattgtttttgctcaaaaacatcagataagtgtgcctaaggataaaattggggagcctccttttagtgttgatgaaaatgttttgcatacttcggctgaaggaaaggttcttgaagatccttggaactctcctccagattatattttttcaagaacgaaaagcattgaagaagcttcgagtttgtctgacgaaataactattttttttgaaaacggtgacccaaaaatgattaatgatgaaaaacatagcccctttgatattttatctaaattaaatgattttggcttcaaacatggtattggacgtgtagatattgtggaaaataggtttattgggatgaaatctagaggcatatatgaaacaccagggggaacaattctacttcaagcacacagagcgattgaaagtataacattggacagagagactgctcataaaaaggatagtattgtttcagagtatgcagatttaatttaa

SEQ ID NO: 316651 - DNA, 841 bp, Unknown
  Bacterial polypeptide expressing nucleotide sequence isolated from the Sargasso Sea
tatgaagaagagtatcctttggctaccgctcttggaaggccattaattgctaaatgcttggtggatgttgccaaagcagaaggagcatatgcaatagcccatggatgtacggggaaaggcaatgatcaggtgagaattgaggttagtgctgctgcattgatgcctggtatcaaattgattgctcctatcagagattggggcatgagtagagctgatgaaattgattacgcgaatgagcgtaatttgcctattaacgttaaagatagcagattttcagtggatgaaaatttatggggtaggagtgcagaggcaggagaattagaagatccaggattggagccgcctgaagaagcgtttacatggacgatatctccagataaatcctcacaagataaggagtatattgaaataagatttgttgaaggcattccagtttcaattaataacaaggatatggatggagtagagcttattgttgaactcaatagaattgcagggaatcatgggataggccgaatcgatcatgtggaaaacagattggtaggaattaaatctagagaaatatatgaatctcctgctgggatagtactgcattcagcacataaagctttagaagatctaacattaagcagagatcaggctagattcaaacataatgtgtcaagagaatattcagagattgtatataacggcctctggtttagcagacatagactcaatttggacaggtatatagaagatacacagaaatatgtatctggaaccgttcaaatgtctttatataagggcaagtgtactgtaacagggagacaatcaaatcacggtttatattcaaagacat

SEQ ID NO: 316652 - DNA, 856 bp, Unknown
  Bacterial polypeptide expressing nucleotide sequence isolated from the Sargasso Sea
gctactggggaaaggtaatgatcaagtaagatttgagttaggttattatagtttaaacccaaaaattagagtaattgccccatggagagaatgggatttaaacagcagaaaaaaattaattgaatacgcagaaaataaccaaataagtattcaaaaagataaatcaggtgaggatccatatagtgttgacgcaaatttattacatatatctgctgaaggaaaaattcttgaagatccatgggttgagccgaacgaattagtctactctagaactaaatctcctatggatgccccaaactcagtaactgaaataactctaagattttatagaggagatccagttgaattaaataatgaaaaaatgtcacctgcaaatcttttggataaattaaataagttaggtggtgataacggtattggaagaatagatattgttgaaaatagatttgttggtatgaaatcaagaggtatatatgaaactccaggtggaactatattatttcatatgagaaaagctatagaatcaattactattgataaaggggcctcacatttaaaagatgaactaatgcctaagtatgcagaactaatttataatggtttttggtttgctccagaaagggaaatgttacaaaaagcaatagatttaagtcaaataaatgtaaatgggatagtaagagctaagctatacaagggaaatgtgattatttcaggaagaaaatctccaaactcattatatgatgaagatctagttacatttgaaaaaggatctattgattacaatcatcatgatgctgaaggttttattaaattaaacgctttgagattaatgatgaataaaatcaagcaagattag

SEQ ID NO: 316653 - DNA, 439 bp, Unknown
  Bacterial polypeptide expressing nucleotide sequence isolated from the Sargasso Sea
tgatctcgtcgagaaccgttatgttggtatgaagtcgcgagggatttatgaaacacctggcggcacaatattgatgaccgcgcgtcgcggaatggaaagcatcacacttgatcggggggcggcgcatctgaaagacgaactgatgccccgttatgccgagttggtttataatgggttttggttttcacctgagcgagaaatgattcaagcggcggttgatgaaagccaaaaatttgtcgcgggcacggttcggttgaaactctataaaggtttagtttccgttgttggtcgaaaatctttgaacagtctgtattcggaatcccatgtgacattcgaagctgatacggtctataaccagcgtgacgcgcagggttttatcaagcttaacgcattaaggctgaaacttctgcaagcggcacaaaaacgtttcaccacttga

SEQ ID NO: 316654 - DNA, 415 bp, Unknown
  Bacterial polypeptide expressing nucleotide sequence isolated from the Sargasso Sea
gatgggccgcgccaacaaggtggttctcgcctactccggcggggtggataccagcgtctgcattccctatttgaagcaggaatggggtgttgaagaggtcatcaccttcgccgctgatctcggccagggcgatgagctggaaccgattcgtcaaaaggccttggatgcgggcgcaagtcagtcgttggtgggggatctgattcagcccttcatcgaagagttcgccttccctgccatccgcgccaacgccctgtacgaggggcgctaccccctctccacagcactggccaggccgttgattgctcgccgattggtggaggtggcccgtgaggtgggtgctgatgcagtggcccatggctgcaccggcaagggcaacgaccaggtgcgcttcgatgtggcgattgcggctctcgct

SEQ ID NO: 316655 - DNA, 778 bp, Unknown
  Bacterial polypeptide expressing nucleotide sequence isolated from the Sargasso Sea
aatgaaaaaaattgttttagcctattcgggcggattggacacatctataattttaagatggttacaaaaaaattataatgctgagataatagcttacacctctgatattgggcaagttttagataaaaaaaagatttttaaaaatgctaaaaggttaggcgttaaaaaaataattattgaaaatctaaaaaatatctttgttaaagattatgtttttcccatgatgagggctcatgcagtttatgaaggagtatatctattaggtacatctatagccagacctttaattgctaaaagacagattgagattgcaaaaaaatttaaagcttttgcagtttctcatggcgcaactggaaaaggcaacgatcaagtaagatttgagcttggatatgcatattttggtaaaaataagattaaaactatagcgccttggagagaatggaaattacaatcaagagcagatttaattaaatacgctaaaaaaaacaaaataccaattcctaaagataaaaaaggcgcgccaccattttccgtagatgacaatatttttcatacctcaacagagggtaaagttttggaagacccaaaaaaccctgctcctgaatttatttatcaaagaaccgtatcgccgcaaaaagctcctaacaaaccaacaaaagtaaaaattacttttaaaaatagtgacccaattgcagtaaatggaaaaaaattaaatcctgaaaagcttttaagtaaattaaatattctagctggaaaaaatggaataggaagagttgat

SEQ ID NO: 316656 - DNA, 859 bp, Unknown
  Bacterial polypeptide expressing nucleotide sequence isolated from the Sargasso Sea
ctgccctcccaggggtatgacgtgattgccctctgcctggacctcggacaaaaagtcgaaaacctcgatgaaatccggcaaaagggtctcaaggccggggccgtggatgtgttgatcgaagatgtgcggaaagaattcgttgaggattatgtttttcgggcaatagagtggaacgcggtttacgagggtacctatctgcttggaacctctctggctcgtcctttgatttcaaaaaaacaaatcgaagctgcggagcgctttggtgcttccacagtgagtcatggtgctacaggaaaaggtaacgaccaggttcgttttgagttgggttattatgccctgaatccggacatcaagatcattgccccctggaaggtcccggaattctaccaacgctatccaggacgtgctcaattgattgaatatgctcagcaaaacggaatcccggtaaaagccactgcggaacagccctggagcactgatgaaaacctgatgcatatcagtttcgagtcaggaatgcttgaagatccctggcaggaaccgaaagaggagatgttcgagctttcgcagtctccaaaaaatgctccagaccaggaacaggttttgaccattgatttcgaggagggactttcggtaagacttgatgggcaggagttcgcacccgtagacctattgacggagttaaacgaaatcggaggccgccatgggatcggcagagtagatctggtcgagtcccgatttgtcgggatgaaatcgagaggggtttatgagactccgggagggaccatcctcaatattgctcatcgcgcgatggaatccctgaccttggaccgtggggtgattcatctgaaggacagcctaa

SEQ ID NO: 316657 - DNA, 941 bp, Unknown
  Bacterial polypeptide expressing nucleotide sequence isolated from the Sargasso Sea
cttggcgcaaaaaaaatattacatcgaaaatttaaaagaagagtttgttcgcgattatgtctttcctatgtttcgttgtaatacgatctacgagggggaataccttttaggaacgtctatcgctcgaccactgattgcaaaaagacaaattgaaattgcaaaaaaagaaaaagccaatgccgtctcgcatggcgccacagggaaaggaaacgaccaggttcgctttgagttttcttattacgcattagagcctaaaataaaagtgattgcgccttggagagaatggaacctgtcttctagaacaaaacttttagaattcgcagctaaaaataacattcctattatgaaacataataaaaaagagtcaccttatagtgtggacgccaatgtattacacaggtcagcagagggaaaaatccttgaagatccttggaaaagaccaccggaaaatgtatttggtatctctaaaagccctcagtcagctcctaataaagagacagtaatcaccattcaatttaaaaacggcgatcccattgcgattaatggaaaaaaactctcaccctttaatctattagaaaagcttaataaattaggcgctgctaatggaattggcagagtagatatcgtggagaacagatatgttggaataaaatcccgtggtgtttatgaaacaccggggggaacaattcttttaaaagcccaccgcgctatggaaagcattactctagatagagaggaagtttttacaaaagacgaactcatgccgaagtacgcgagattagtttacaacgggtattggtttgcaccagaaagagtgatgatgcaaaaagcaattgatgccactcagaaaagagtcaacgggcaagtaaggctagctctatataaaggcaacgtgattgttatcggaagacagtcgcccaacagtttatacgacgaagacc

SEQ ID NO: 316658 - DNA, 798 bp, Unknown
  Bacterial polypeptide expressing nucleotide sequence isolated from the Sargasso Sea
attactatcataaacctgatataaaaataataagtccctggagagaatgggatttatcgtcaagaacatcacttgttgaatacgctgataagcacgggattgaaatagcaaaagataaaagaggggaacaaccatttagcattgatgaaaatatcttgcactcttctgctgaaggaaaggttcttgaagatccatgggttgaagcacctgattatgtttataccagaagtgtttcacctgaagaggcacctgataatgcagaagaaataacaattgaatttaagaaaggtgatgcctgtgcacttaatggaaaggctttaacgccatttgaaatattaaaatctcttaatgagctcggtggaaaacatggaattggacgagttgatcttgttgagaatagatacattggaatgaaatctagaggaatttacgaaactcctggtggaacaattctatatcacgcacacagagctattgagagcataacactcgataaagaagctgcgcatatgaaagatgagttagcgcctaaatatgctgaacttgtctataacggttattggttctctcctgagagagagatgatgcaatcaatgattgataaatcacaagaaaaagtggatggtaaagtaagacttaaactctttaaaggtaatacaatgattacaggaagggaatcgtctttaagcctatacaatccaaatcttgcaacatttgagtcagatcaagtatattctcaaaaagatgctgaaggtttcataaaattaaacgctcttagattaagagagaaaaaataag

SEQ ID NO: 316659 - DNA, 931 bp, Unknown
  Bacterial polypeptide expressing nucleotide sequence isolated from the Sargasso Sea
gaaaatacatttgtcaaagactacgtatttccgatgtttagatgtaatacaatttatgaaggaatgtatttattaggaacgagtatagcaagaccattgattgcaaaacgccaaattgaaatagctaaatttgagggagctgatgcagtagcacatggtgctactggaaagggaaatgatcaagtaagatttgagctatcttaccttgcccaagacccagacataaaaattatagccccttggagagaatgggagctttcttcaagaacaaagttgattgaatatgcagaaaagcatcaaatcacaatctcaaaagataaaaggggcgaggctccttttagcgttgatgcaaatctacttcatgtttcggcagaaggtaaaattcttgaggatccatggatagaaccggaagaatatatttattcaagaacagtcaatccaatggaagctccagataaacctactgagataacaattgaattcagtaaaggtgacccaattgcattaaatcataagaaattagaaccagcacaaattttaaaaaaattgaatgaatttggcgggaagaatggtattggaagaattgatattgttgaaaatagatttgttggcatgaaatcacgaggtgtatatgaaactccaggcggaactattttactttatgcacgtagagctatggaatccattactcttgacagagaagaagcccacttaaaagatgaaatcatgcctaagtttgcaaaattaatttataatgggttttggttttcacctgaacgtgaaatgatgcaagctttgattgataaggcttccatgaatgttaatggtgtcgttagactcaagctttataaaggtaatatcattataacaggtagaaaatcggaatattctttatatgatgaatctttagtaactttgaagacagcaacag

SEQ ID NO: 316660 - DNA, 757 bp, Unknown
  Bacterial polypeptide expressing nucleotide sequence isolated from the Sargasso Sea
attgaaaaaaataagaaagattgtgctggcctattcaggcggcttggacacttctataattcttaaatggcttcaagaaacatataaagcagaggttattgcttttactgctgatattggacaaaaaattaataggaaaaaaattataaacaacgcaaaaaaattaggtgtcaaaaaaataatcattgaaaatctaaagaatacttttgttaaagattatatttttccaatgattagggggcacgctatttatgagggtgtttacttattgggcacatctattgcaagacctttaattgcaaaaaggcaaatcgctgttgcaaaaaaatttaatgcctacgcagtttcacatggttctactggtaagggaaatgatcagattagatttgaacttggttaccattactttggaccaaaaataaaaataattgctccgtggagaatatggaaattaaattcaagaactgatctaatcaaatatgcaaaaaaaaatagaataccgatcccaaaagataaaaaaggagctccaccattttctgtagatgacaatttatatcatacgtcaaccgagggtaagcttttagaaaaccccaaaaatgctgctccagaatttatttttcaaagaacaaattcaccggaaaaatcacctaaaaaagtttcatttgtaacaatagaatttaaaaatggagatccgataaaagttaatggtaagaaattatctcccggaattctcttacaaaaattaaatattcttgcg

SEQ ID NO: 316661 - DNA, 533 bp, Unknown
  Bacterial polypeptide expressing nucleotide sequence isolated from the Sargasso Sea
catgtcggccatcaaaaaaattgtattgtcgtactcgggggggttggatacgacggccatccttaagtggcttcagcagacatacgagtgtgaagtggtcaccttcacggcggatctcggtgacggtgacgactattcacatgttcgagaaaaggcgctggaaacaggcgccgtggacgcttacgtcgacgatgttcgggaggagtttgtccgcgatttcgtttacccgatgtttcgatgtaacaccatttacgaaggtgtatatctgctggggacctcgatcgctcgcccgctgattactaagcgtttggttgagattgccgaagagaccggggcggacgcgatcgctcatggtgcaacgggtaagggaaatgaccaagtccgattcgagctgggcgcctacgcgctaaaaccaaatattcaggtggtggcgccctggagggagtgggacttgacctctcgtgaatcattgatgcagttctgcgaaaaacatcagattcccgtagacaggaaacatgagggtgaaaaatcac

SEQ ID NO: 316662 - DNA, 544 bp, Unknown
  Bacterial polypeptide expressing nucleotide sequence isolated from the Sargasso Sea
atgaaaaaaattgttttagcctattcaggtggtctagatacaagtgtaattcttaaatggttacaaaacacctacaaatgttcagttgtaacatttacagcagacattggtcaaggtgaagaactttcacctgttgagagaaaggcaaaaaatctaggtgtaaaagaaatatttattgaaaatttacaagaggaatttgttaaagattatgtttttcctatgtttagagcaaatacaatttacgaaggaacttatttgttaggaactgcaattgcaaggccactaatcgctaagaggcagattgaaatcgctaaattggttggtgctgatactgtcgctcatggtgctacaggcaaaggaaacgatcaagtaagatttgaacttggttattatgcaaacaatccaaatataaaagttattgctccctggagggaatgggattttgaaagcagaaatgacttaattgattatgctagaaaaaatcaaatagaagttgctaaagataaaattggtgaaccaccatttagtacagatgcaaatctct

SEQ ID NO: 316663 - DNA, 341 bp, Unknown
  Bacterial polypeptide expressing nucleotide sequence isolated from the Sargasso Sea
aatggacaagatgaaaatcgttttggcgtattcaggcggactagatacttcggttatatgccgttggcttcaggaaacttatgatgcggaggtggtaacttttaccgcggatatagggcaaggaggtgaggttgaaccagccagagccaaggctcaacagatgggagtcaaagagatttacattgaggatttaactgagcaatttgtttcggaatatgtcttcccaatgcttcgcgcaaacacggtctacgagggagagtacttattgggtaccagtattgcgcggcctttgatcgctaaaaggttggtagagatcgcggaagagactggagcgcaagcaa

SEQ ID NO: 316664 - DNA, 720 bp, Unknown
  Bacterial polypeptide expressing nucleotide sequence isolated from the Sargasso Sea
tatgtccgatatcaataaagtcgtcctcgcctactctggtgggctggacacatcagtaattgcaaaatggcttcagacgacctaccagtgcgaggtcgtaacttttaccgctgacatcggtcagggcgaagaagtcgagcctgcacgagccaaggcgatggcgatgggtatcgaagtgatttatatcgaagaccttcgggaagagtttgtttctgattatgtctttccgatgttccgagccaacgcaatctacgagggagagtatctgcttggcacctcgatcgcgcgcccgctgattgcgaagcgcctcgtggaaattgcgcgagaaacgggggccgatgcgatttcacatggtgcaaccggtaaaggcaatgatcaggttcgctttgaactcggcgcttacgctctgagccccgatatccagataatcgccccgtggcgagaatgggatcttaactcccgcgaaaaacttttggcctactgcgaaacccatgcgattccggttgaaaagaaaagagggggtaaatcaccttattcgatggatgctaatctgctgcacatttcctatgagggcgacgttcttgaggacccagctgcggagccagaggaaactatgtggctctggagcgtcgcaccagaggcagcgccggaccagccagtatacctcgacctgacttatcagcggggcgatattgttgctataaacggagagacactttc

SEQ ID NO: 316665 - DNA, 763 bp, Unknown
  Bacterial polypeptide expressing nucleotide sequence isolated from the Sargasso Sea
aatgcagcaggtaaacaaagttgtactagcgtattctgggggagtagatacaagcatttgtattccatatctaaagaatgaatatggaatttcagaagtggttacttttgtagcagatctagggcaaggcgaggatttagaacttattaggcaaaaagcattaaattctggtgcatctaaatcaatcgttggcaatttagttaataattttgttgagagctatgcatttccagctattagagcaaacgctttatatctagataaatatcctttatctacagcccttgctaggcctttaattgcagaaaatcttgtaaatattgctcgagagtttaatgctgatgcagtggctcatggatgcactggtaaagggaatgatcaagttcgatttgatttagcaataaatgctttaggtcctgatttaaaaataattactcctgcaagagaatggaatatgagtagggaagaggcaatagtgtatggagaaaagtttggtattcctgcaccagtatcaaaaaaatcaccatattcaatagatgttaatttacttggtaggagtattgaagcaggcatattagaagacccaatgaaagaagcacctgaagatatttttgcaatgacatcatctattgagaattcacctgattctcctcaagaagtagaaattattttcaaaaatgggtttcctgttggaattaatgatgaatctctaacccccgtagagattattaaaaaagctaatgttctcgcaggtgagcacgga

SEQ ID NO: 316666 - DNA, 526 bp, Unknown
  Bacterial polypeptide expressing nucleotide sequence isolated from the Sargasso Sea
gtaaatactgctcgagagtttagtgctgatgcagtggctcatggatgcactggtaaagggaatgatcaagttcgatttgatttagcaataaatgctttaggtcctgatttaaaaataattactcctgcaagggaatggaatatgagtagggaagaggcaatagtttacggagaaaagtttggcattcctgcaccagtatcaaaaaaatcaccatattcaatagatgttaatttacttggtaggagtattgaagcaggcatattagaagacccaatgaaagaagcgcctgaagatatttttgctatgacatcatctattgagaattcacctgattctcctcaagaagttgaaattattttcaaaaatgggtttcctgttggaattaatgatgaatctctaacccccgtagagattattaaaaaagctaatgtttttgcaggtgagcatggttttgggagaattgatatgattgaagaccgagtagtagaaattaaaagtagagagatttacgaaacaccaggcctct

SEQ ID NO: 316667 - DNA, 691 bp, Unknown
  Bacterial polypeptide expressing nucleotide sequence isolated from the Sargasso Sea
caagtcaaggaaagagcaaatgctattggagcttcaaagattcttatagaggatttgaaggaagaatttacaaagaattatatttttccaatgatcaaggcaaatacattgtacgaaggtgaatatcttttaggaacatcaattgcaaggccattaattagtaaaaggttgattgaaattgcagaagaagagggtgcagacgcaatagctcatggtgcaactggtaaaggaaatgatcaaattagatttgaaattggatcttactcattaaatccagatattcaagtcatagctccctggagaacctgggactattcttcaagagctgacttagtagattattgcaaagaacatcagatagaaattgatgcaagcccagatgatcctttatattcaactgacgagaatttacttcacacgtcttatgaaggagagatactagaagacccatctataaaagcaccggaagaaatttggcaaagaacatcctcattaaaagatgctccagatgaagaagagacaatttcgatagagtttagatctggtgaaccaatttcaatcaataatgttattagttcttcttcggaaatcctgtcagaattaaatcatctagccggaaaacatggaattggtagacttgatcttgttgaaaacgagatatacgggcatgaagtcaagaggatgttatgaa

SEQ ID NO: 316668 - DNA, 276 bp, Unknown
  Bacterial polypeptide expressing nucleotide sequence isolated from the Sargasso Sea
tatgcctaaaaatataaaaaatcacaatattaaaaaagtagttttggcctactctggtggtttggatacttccgtaattcttagatggttgcaggatgagtataaatgtgaggttgtgacatttacagctgatattgggcaaggcgaggaaattgagccagccagagctaaggctgaagcaatggggataaaagaaatatatattgaagatttacgcgaagaatttgttagagattatgtattccctatgttccggtcaaatgcagtttacgaggg

SEQ ID NO: 316669 - DNA, 565 bp, Unknown
  Bacterial polypeptide expressing nucleotide sequence isolated from the Sargasso Sea
actgtttctccagaaaaagcaccgaataaaccatcctatataacaattggatttagaaaaggtgatcctgtttctgtgaatgataaaaaattatctccttcaaaacttcttcaaaaattaaatatagttgcaggcaaaaatggaattggaagagtagatttagtagaaaatagatttataggtataaaatcaagaggggtttatgaaacaccaggaggaacccttttgatgattgcacacagagcgattgaatcagtaactttagataaaaaaactatgcatgaaaaggatgagattatgccaaaatatgctgagcttatttacaacggtttttggttttcaaaagctagatttaaattacagaaaatcgttgatcttaaaagaaaccaagttaatggatcaattaaacttaaattatacaaaggaaatgttacaattctttcaagacaaagcaaaagcaaagcttactcagttaaaaaagtatcctttgaggaaaataaatcttttaaaaagtcaaaagttgagagatttatatcaggtgcggcaagaaagctaagaacttagt

SEQ ID NO: 316670 - DNA, 534 bp, Unknown
  Bacterial polypeptide expressing nucleotide sequence isolated from the Sargasso Sea
atggcgatccagtaaatttaaatggaaaagatttatctccagcaaaaatgttgcatcagttaaatattttgggcggggaaaatggaataggaagaatagatttagttgaaaatagattcgttggaatgaaatctagaggtgtttatgaaacacctggcggcacaattctgttccacatgcgaaaagcgattgaatctataactttagacagaggtgctgcacatctaaaagatgagttaatgccaaaatatgcttctttaatatataatggtttctggttttctcctgaaagagaaatgttacaatcagcaattgataaatctcagaataatgtatctggcactgtaagagcaaaactttacaaaggtaacgttataattactggtagaaaatcaccattttctttatataacgaaagcttagtaacttttgaggagggtacagctgattataatcattcagatgcagaaggttttattaaattgaatgctcttagacttagggttaaaaaaatgattgagaactctaagtaaa

SEQ ID NO: 316671 - DNA, 790 bp, Unknown
  Bacterial polypeptide expressing nucleotide sequence isolated from the Sargasso Sea
gccatggcgcgagtgggacctgtccagccgtacgaaacttcttgattttgctgagaaaaatcagatcccgattgccaaggacaaacgcggcgaagcacccttttcggtggatgcgaacctgttgcatacgtcgagcgaaggcaaggtcctggaagacccggcagagatggcgccggattacgtgtatcaacgcacggttcatcccgaagatgcaccgaatgagccgcaaatcatcgaaatcggctttgaaaaaggcgatgccgtgagcatcgacggcgaggcgcttagccctgctaacctattgacaaagctgaatgaattgggcggtaagcacgggattgggcggcttgacctggtggaaggccggttcgtgggcatgaaaagccgcgggatttacgagaccccgggtggcacgatccttctggaagcgcatcgcgggattgagcagatcacgctggaccggggggccgcgcacctcaaggatgagctgatgccgcgttatgcggagctgatctataacgggttctggtacagccccgaacgcgagatgttgcaggcagcgattgatgcctcacaacatcatgtgaccggaaccgtgaaactgaagctctacaaaggttcggcccgcacggttgcccggtggtcggatcacagcctgtattcggaggcgcatgtgaccttcgaggacgatgcaggtgcttacgatcagaaggatgccgccgggttcatccagctcaatgcgctgcgcctgaagctgctggcagcgcgggagcgtcggctgaaaggataa

SEQ ID NO: 316672 - DNA, 616 bp, Unknown
  Bacterial polypeptide expressing nucleotide sequence isolated from the Sargasso Sea
catgagtatcaaaaaagtagtgttagcgtattcaggtggtttggacacatcagccatagtgccttggttaaaagataactatgactgtgaagtgatagcttttgtggccaacgtaggtcagggtgatgaagaactggcgggcgtggaagaaaaagctattaagtcaggcgcaagctcgtgctatgtggtcgacctgcgtgaagaactgatcaaagaagtgatttacccgacgttaaaaacgggtgcagtgtatgaaggccagtatttactgggtacttctatggcacgccctgtgattgcccgtgctcaggttgagctggcgctgaaattaggtgctgatgctttatgccacggctgtaccggtaaaggtaatgatcaggtgcgttttgaaggtgcgtttgccgctttagcgccgcagttaaaagtgatagcgccatggcgtgaatggcaatttaactcacgtcagtcactgctgaattacctggctgagaaaaatgtaccaaccacagcttctgccaccaaaatttatagccgtgacgctaacctatggcatatctcgcacgaaggtggcgagattgaaaacccatggaatgagccgtcccgatcaatctggatg

SEQ ID NO: 316673 - DNA, 570 bp, Unknown
  Bacterial polypeptide expressing nucleotide sequence isolated from the Sargasso Sea
aatgaaatcaaaaaagaaaattgtattagcctattcaggtggtctagatacatcaataattttaaaatggcttcaagaaaactttaatgcagaagttatcacttacacagctgacattggtcaagaaatagatagaaaaaaaatatataaaaatgcaaaaagactaggtgtaaaaaaaatagtaattaaagatttaaaagatacttttgttaaagattatgtttaccctatgataagaggtcacgctatttatgagggtgtttatttattaggaacttcaattgcaaggccattaatagcaaaagatcaaataaaagttgccaaaaaatataaagcatatgctgtttctcatggatctacaggaaaaggtaatgatcaagtaagatttgaacttggctatcattattttggaccaaaaataaaagttattgctccttggagaatttggaaacttaaatcaagaacagacctgattaattatgcaaaaaaatataaaatagtaataccaaaagataaaaagggtgctccaccattttctgtggacgataatttatttcatacatcaactga

SEQ ID NO: 316674 - DNA, 409 bp, Unknown
  Bacterial polypeptide expressing nucleotide sequence isolated from the Sargasso Sea
aaatcgttttgtaggaatgaagtccagaggaatttatgaaactccaggtgggataattcttgctaaagcacatagggctattgaaagtattacattagatagaggtgaagcacatcttaaagatgagttaatgccaaaatatgctgaaacaatatacaacggactttggttttcttctgaaagagctgcacttcaaaatttaattaatagcactcagttaaacgtaagcggagatgtaaaattaaaattgtataaaggaaatgtaattgtcactggaagaagatctccaaacagcagatatgacctatcaatggtgtcctttgatgaaaagggtgattatgatcaaagagatgcagaaggctttataaaaattaattcattaagattaaaaaattttaacaaaaaataa

SEQ ID NO: 316675 - DNA, 872 bp, Unknown
  Bacterial polypeptide expressing nucleotide sequence isolated from the Sargasso Sea
tagaatatgcaaacaagattggggctgatgctgttgctcatggctcgactggtaaaggaaacgatcaagtaaggtttgagattggatatcatgcaacaaatccaaatattgaaattatagcgccttggagaatatgggattttaaatcaagagaagatttaataaattttgctaaaaaatatcaaattagtgttccaaaagacaaaataggagagcctccttttagtgtagatgaaaatatattacacacatctgcagaaggaaaagttttggaagatccctggacttcgcctcctgattatgttttttcaagaacaaaaagtatagaagatgcttcttttacatccgatgaaataattatatcttttgattatggggatcctgtaaaaattaataatgaaaattatagtccttatgaaattttaaaaaaattaaatgaactagggaataaacacggtattggaagggtggatattgtggaaaatagattcattggaatgaaatcaaggggagtttatgaaactccaggaggcactatattatttcatgcgcatagagcaattgagagcattacattagatgccgaaacaacgcacaaaaaagatagtataatatcagagtatgctgagttaatttataatgggttttggtttagcaaaaaaagaaaagaattgcaggaaattgtagatataaatagaaaaaatataagtggagaagttagattaaaattatttaagggcaatgttattgttttgggacgtaaatcaaaaaacagcttatacgatatatcaaaagtttcttttgaaaataatgagttaaaggatcaaaaatttgctgatcaatttatacagtccccagttcttaaaaattaa

SEQ ID NO: 316676 - DNA, 490 bp, Unknown
  Bacterial polypeptide expressing nucleotide sequence isolated from the Sargasso Sea
tgtaaataataaaaaattatctccagcaaaactacttcaaaaattaaatttaattgctggtaagaatggaattggaagagttgatttagttgaaaatagatttataggaataaagtcaagaggagtatacgaaactccaggaggaactcttttgatggtagcacatagagctatagagtctgtaactttagataaaaaaactatgcattataaagatgaaattatgccgagatatgccgagctgatttataatggtttttggttttcaaaatctagaattaaattacagaaaaaaattgactttaaaagaaatcaagtgaatggaaatataaaacttaagttgtacaagggtaatattacaattttatcaagacaaagtaatagtaaagcttattctattgataaagtctcttttgaggaaaataaaagtttcaaaaagtcaaaagttgagagatttatatcaggtgcggcaagaaagcttagggcttag

SEQ ID NO: 316677 - DNA, 515 bp, Unknown
  Bacterial polypeptide expressing nucleotide sequence isolated from the Sargasso Sea
aaaaggagatctcgtttctgtaaatgggcaaagaaaaaggcctcatgaactgctccatttcttgaacctgttaggaaataaacacggagttggacgattagatttagttgaaaaccgatttgttggattgaaatctcgtggctgttacgagacccccggaggcacaattcttttaaaagcccatagagcattagaatctataactctagatagggagctatctcatttaaaggatgaactgatgcccaaatatgccaaaatgatttataacggattttggtggtctcctgaaaggttagcattacaagagctgattaattattctcaaaaagcagtaagtggagatattaccttaaaactttttaaaggtaatataatactcgtgagtagaacgtctaaaaaatctttatatgacaagaatgtgtcgacctttgaagatgatagtggtgtttttaaccaaaaagactctgagggttttataaagttaaatgcacttagacttaaaaatagatgaa

SEQ ID NO: 316678 - DNA, 750 bp, Unknown
  Bacterial polypeptide expressing nucleotide sequence isolated from the Sargasso Sea
catgagcaaaaatgacatcaaaaaagtcgtcctcgcctattcaggcggccttgatacctccgttattctacgttggttgcaagaccattaccgcgccgaagtgattacctttaccgctgatattggtcagggtgaggatattgaaccagcgcgcgccaaagccgaaatgcttggcattaaaaatatctacattgaagatttgcgggaagaatttgtgcgcgattacgtgttcccaatgcttcgggcaaacccgctgtatgaaggcgcttatcttcttggcacatcaattgcccggccattgattgccaaacgccagatcgaaattgcccgtgatgttggcgccgaggccgtatcacatggagcaaccggcaaaggcaatgatcaagtaaggttcgagctggcttattatgcccagcagcctgaaattcaagtgatcgcgccatggcgtgaatgggatctcggcagccgcacaaaactgattgcttatgccgaggctaaccaaatacctattccaaaggacaagcgcggcgaagcccctttcagcgttgatgcgaacctgttgcatatatccgctgaaggcaaagttttggaagatccatgggtggcgcctgaagaatatgtattctcacgcagcgtgtcgcctgaacaggcgcccgacaagccaaccgaaattgaaatcatattcaaatcaggtgatcctgttgctatcgatggcaaggcattatcgcctgccaacctgctgactgaata

SEQ ID NO: 316679 - DNA, 520 bp, Unknown
  Bacterial polypeptide expressing nucleotide sequence isolated from the Sargasso Sea
aatgaaaaaaattgttttagcctactcaggcggtttggatacatctataattttaagatggttgcaagaaaattataaagccgagataatagcttacacctctgatattggacaagttttgaataaaaaaaaaattattaaaaatgctaaaagattaggcgttaaaaaaataattatcgaaaatctaaaaaatatttttgttaaagattatgtttttcctatgataagagctcatgcagtttatgagggagtatatttgctaggcacatctattgccaggccattaattgcaaaaagacaggttgagattgcaaaaaaattcaaggcttttgcagtttctcatggcgcaacaggaaaaggcaacgatcaagtaagatttgagcttggttatgcatattttggtaataataagattaaaactatagcaccgtggagagaatggaaattacaatcaagagcagatttaattaaatacgctaaaaaaaataatataccattccaaaagataaaaaaggtgccc

SEQ ID NO: 316680 - DNA, 718 bp, Unknown
  Bacterial polypeptide expressing nucleotide sequence isolated from the Sargasso Sea
atgaaatcacataaacgaattgttctcgcttattcgggcgggctagatacttcgattattttaaaatggcttcaagaaaattataaagcagagattattgcttatacggcagatattggtcaagaaattaataaaaaaaaaataattaaaaatgcaaaaaaacttggtgtaaaaaaaataataataaaagatttaaaaaataattttgttaaagattatgtttttccaatgattagagggcatgcaatttatgaaggtgtttatttattaggcacttcaattgcaagaccattaattgcaaaagaccaaattagagttgcaaaaaaatttaaagcttatgctgtttctcatggatctactggtaaaggaaatgatcaagtaaggtttgaattaggttatcattattttggaccaaaaattaaaattatagctccttggagaatttggaaacttaaatctagaactgatttaattaattatgcaaaaaagcatggaataacaatcccaaaagacaagaaaggtgcttcaccattttcagtagatgataacttatttcatacatcaactgagggaaaaattttagaaaatccaaaaaattcagcacctgaatttatttttcaaagaacaacctctccagaaaaagcacctaataaagcttcttttgtaactgtaggatttaaaaatggagatgcagtaactgttaatggtaaaaaattaa

SEQ ID NO: 316681 - DNA, 574 bp, Unknown
  Bacterial polypeptide expressing nucleotide sequence isolated from the Sargasso Sea
atgccgtgcgcgcgtcccaccgcctccgccgtgcgcgtcccgtcgctcgcgcgggcccgcgcggtggcgccgtcggcgcgctcgaacgcgtcgtccaagtctcgcgcgagcgcgcgcgcgcgcgccggtccgtccggggacgtgaagaaggttgtcttggcgtactcgggcgggttggacacgtccatcatcctgaagtggttgcaagacacgtacgggtgcgaggtggtgacgtttacggcggatttgggccaaggcgaggagctcgaaccggcgcgcgccaaggctgcgcaattcggggtcaaggagatattcgtggacgatttgcgagaggagttcgttcgggattacgtgttcccgatgttccgcgcgaacgcggtgtacgaggggacgtatttgttggggacgtccatcgcgcgaccgctcatcgccaagcgacaaatcgaaatcgcaaagcaagtgggcgcggacgccgtgtgccacggagcgacgggtaagggtaacgatcaggtgcgatttgaactcgggtattacggattgaagccggacgtcaaggtgatcgcgcccgtggaga

SEQ ID NO: 316682 - DNA, 521 bp, Unknown
  Bacterial polypeptide expressing nucleotide sequence isolated from the Sargasso Sea
atttaaaaaaggggatgcctgcgcactaaacggaaaggctttaacaccatttgaaatattaaaatctcttaatgagcttggtggaaaacatggaattggacgagttgatcttgttgagaatagatacattggaatgaaatccagaggaatttatgaaactcctgggggaaccattctatatcacgcacacagagccattgagagtattacactcgataaagaagctacacatatgaaagatgagttggctcctaaatatgctgaacttatctataacggttattggttctctcctgaaagagagatgatgcaatcaatgattgataaatcacaagaaaaagtagagggcaaagtaagaattaaactctttaaaggtaatacgatgattacagggcgagagtcatcaatgagcctatacaatcctaatcttgcaacatttgagtcagatcaagtttattctcaaaaagatgctgaaggttttataaaattaaacgctttaagattaagagagaaaaaataag

SEQ ID NO: 316683 - DNA, 709 bp, Unknown
  Bacterial polypeptide expressing nucleotide sequence isolated from the Sargasso Sea
atgaaatcaaaaaagaaaatagtcctagcttattctggaggtctcgatacttcaataattttaaaatggcttcaagagaattacaatgcggatgtaatttgttacacagcagatgtgggtcaagaaattgatagaaaaaaaattacgagtaatgcaagaaaatttggtgttaaaaatataattattaaggatttaaaagatgtttttgtaaaacaatacgtttatcctatgatcagaggacatgccatctatgagggtgtttatttattaggaacatcgattgcaagacctcttattgcaaaagatcaaataagagtagcaaaaaaatttaaggcttatgcagtttcacatggagcaactggtaaaggtaatgatcaagttagatttgaattaggctattattattttgggccaaaaattaaagttatagctccatggagaatttggaaattaaaatcacgaactgatttgattaattatgcaaaaaaacatggcatagctataccaagagataaaaaaggtgcacctcctttttctgtggatgacaatttatttcatacatcaaccgaaggaaagattttagaaaatccaaaaaactttgcaccagaattaatatataagcgaacagtttctccagaaaaagctcctaataaaccgtcatttgtaaccatcaattttaaaagtggtgatccttttggaattaaggaaa

SEQ ID NO: 316684 - DNA, 810 bp, Unknown
  Bacterial polypeptide expressing nucleotide sequence isolated from the Sargasso Sea
atttgtaagggattatgtttttccaatgtttagagcaaattcaatgtatgaaggaaattacttgttaggcacagctatagcaagaccgctaattgcaaaaagacaaattgaaatagcaaaagaggttggtgctgatgctgttgctcatggagcaactggaaaaggaaatgaccaggtaagatttgaattaggttattatgccaatgattctagcattgaagttattgctccctggcgagattgggagtttgaaagtagaaaagacttaattgattttgcagaaaaaaatcaaatacaagttactaaagataaactgggcgaacctccatttagcactgatgcaaatttattacatacttcttcagaaggaaaaattcttgaagatccatgggttgaggcaccagaatatgtttatactagaactaaaaacttaaatgacacaccaaatgaacctgaaacttttgttatagaatttgagaaaggcgaccctgttgctgtaaatgatgaaaaattaaaatcacatgaaatactaacaaaattaaataaattagcaggagaacacggggttggaagaattgatattgttgagaatagatttgtaggaatgaaatctaggggggtttatgaaacaccgggcggaacaatacttattcatgcacatagagccatagaaagtataactctggatagaggtgagtcgcatttaaaagatgaaattatgccaaaatatgctgaggccatctataatggtttatggttttcatctgaaagattagcaatgcaagagcttatagactcaacacaaaaaaa

SEQ ID NO: 316685 - DNA, 587 bp, Unknown
  Bacterial polypeptide expressing nucleotide sequence isolated from the Sargasso Sea
aaactatctaacgattgctagtgtgccaaagaaaattgttcttgcatattcaggaggattagacacaagcgtaatattaaaatggttacaacttaagtatgattgtcctgtagtaacttttacagctgatataggtcagggtaaagaagttgattctattagagctaaagccgaatctctgggcgttaaagaaatatttattgaagatcttaaagaagaatttgttaaagaatatgcctttccaatgtttagagctaatacattgtatgaaggtgtttatttacttgggacagctatagcaagacctctcattgcaaaaagacaaatagagattgctgaaagggttggtgcagatgctgttgctcatggtgctactggcaaaggtaatgatcaggttagatttgaattgggctattattcaaacaatccctcaatagaagtgatagctccttggagagattgggatcttacgtctaggaaggagctaattgcttttgcagaaaaatatcaaattccagttccaagagataaaagaggagagattccatttagtactgatgcaactttactccatacttcttctgaaa

SEQ ID NO: 316686 - DNA, 828 bp, Unknown
  Bacterial polypeptide expressing nucleotide sequence isolated from the Sargasso Sea
aattgttaaaaatgcaaaaaaacttggtgttaaaaaaataataattaacaatttaaaaaatacgtttgtaaaagaatatgtcttcccaatgattagaggtcatgcaatttacgaaggggtttaccttcttgggacatcaattgcgagaccgttaattgcaaaagatcaaattaaagttgctaaaaagtttaaagcttttgctgtttcacatggatcaaccggaaaaggtaatgaccaagttagatttgaacttggatatcattactttggtccaaaaataaaagtaatagctccttggagaatttggaaattaaaatcaagaactgatttaataaattatgcaaaaaaacataacatcccaattccaaaagataaaaaaggtgcaccgcctttttcagtagacgacaatttatttcatacatccactgaaggtaaagttttagaaaatccaaaaaattcagctcctgaatttatttttcaaagaacaacttcaccggaaaaggcacctaacaaacctacttatgtttctattggtttcaaaaacagtgatccagttagtattaatggaaaaaagttaacaccagaaaaatttttagaaaaattaaatcaaatcggtggaaaaaatggagttggaagagttgatttagttgaaaatagatttatcggaattaaatcaagaggagtttatgaaacaccaggtggaacattacttttgatcgctcatagagcaatggagtctgtgacactagataaaggatacatgcataaaaaagattctattatgccaagatatgcagaattaatttataacggtttatggttctcaaa

SEQ ID NO: 316687 - DNA, 437 bp, Unknown
  Bacterial polypeptide expressing nucleotide sequence isolated from the Sargasso Sea
agagaatcggtttgttggcatgaaatcgcgcggtatatatgaaaccccaggcggtgagattttgttagaggcgcaccgtgggattgaacaaataactcttgatagtggtgcggggcatttaaaggatagcctaatgcccaagtattctgaattgatatataatgggttctggtattcaccagagcgtgagatgcttcaggctgcgatagatctttcacaaaaatttgtgtcgggaacagtaagactaaaccttttcaagggctctgttcgtacgattggaaggtggtcacaaaactctttatattccgaagcgcatgtaacttttgaggatgatgctggagcttatgatcaaaaagacgctgcgggtttcatccagttgaatgctcttcggctgaagttactctcggctcgaaatgcgcgttgcgatgaagggtaaa

SEQ ID NO: 316688 - DNA, 850 bp, Unknown
  Bacterial polypeptide expressing nucleotide sequence isolated from the Sargasso Sea
atggataaaataaataaagttgttcttgcatactcaggcggtttggacacatcagtcattttaaggtggctgaaagaaacgtatcaatgtgaagtagcaacttttacagcaaatctaggtcaggatgaagactatgatttagtcaaagcgaaagctgaaaagcaaggaacgaaagaaatatttatcgaagaccttaaagaagaatttgttagtgattatgtcttcccaatgtttagagctaatccactttatgagggctactacttactcggtacttctatcgcaagacctctcattgcaaaaaaacaaatagaaattgcaaataatatcaatgctgacgctgtatcccatggtgcaacaggtaaaggaaatgatcaaattagatttgagcttggatactattatcataagcctgatataaaaataatcagtccttggagagaatgggatttatcatcaagaacgtcacttgttgaatacgctgataagcacgggattgaaatagcaaaagataaaagaggggaacaaccatttagcattgatgaaaatattttacactcctctgctgaaggaaaggttcttgaagatccatgggctgaagcacctgattacgtttacaccagaagtgtttcacctgaacaagcgccaaataaagcagaagaaataacaattgaatttaagagaggagatgcctgtgcactcaacggaaaggctttaacaccatttgaaatattaaaatctcttaatgaggttggaggaaaacatggaattggacgagttgatcttgttgaaaatagatacattggcatgaaatcaagaggaatttacgaaactcctggtggaactatct

SEQ ID NO: 316689 - DNA, 617 bp, Unknown
  Bacterial polypeptide expressing nucleotide sequence isolated from the Sargasso Sea
atatgtttttcagcgtacagttaatcccgaagatgcaccggatgaacctgagataattgaagtcgaattcgaaaagggcgatcctgtagcaattaatggaaataaaatgtcgccagccactgtcttaagctctttgaatgaatatggacataaacacggaatagggagattggattttgtagagaaccggtttgttggtatgaagtcgcgcggaatttatgagaccccaggcggtgagattttgttagaagcacaccgaggaattgaacaaataactcttgatagtggatctgggcatctaaaggatagccttatgcccaaatattctgaattgatttataatgggttttggtattcgccagagcgtgagatgcttcaggctgcaatagatttctcacaagaatttgtatcgggaacagtacgattaaaactgttcaagggctctgtccgtacaattggaagatggtcacaaaactccttatattccgaggcgcatgtcacttttgaagatgatgctggagcttatgatcaaaaagacgctgcgggtttcatccagttgaatgctcttcggctgaaattactctcggctcggaatgcgcgttgcaataaagggtaaa

SEQ ID NO: 316690 - DNA, 298 bp, Unknown
  Bacterial polypeptide expressing nucleotide sequence isolated from the Sargasso Sea
tatgaaagacataaagaaagttgtacttgcttattctggaggtcttgacacctccataattttgaagtggcttcaagaaacttatgactgtgaggtagtgacatttaccgcagatctcggtcagggagaagaactcgaaccagcgcgtagcaaggctcaaagtatgaacgtgaaagagatttatattgaagatctaagagatgagtttgtttctgagtacgtttttccaatgtttagagccaatgctatttacgaaggagagtatcttctaggaacttctatagcgagaccccttatc

SEQ ID NO: 316691 - DNA, 357 bp, Unknown
  Bacterial polypeptide expressing nucleotide sequence isolated from the Sargasso Sea
gatgctaaataaaaattctaaaatcaaaaaaatagttttagcttattcgggggggcttgacacatctgtaattttaaaatggttgcaagataattatcaatgtgaagtggtaacttttacagctgacattggacaaggtaaagaggttgagtctgccagaaaaaaggcagaattgttaggtgtaaaagaaatttttattgatgatttaaaagaagaatttgttaaagattttgtttttcctatgtttagagcaaatgctttatatgagggtatatatttgctaggtacatctatagcaaggcctcttatagcgaagagacaaattgaaattgctaatataactggatctgatgctgt

SEQ ID NO: 316692 - DNA, 852 bp, Unknown
  Bacterial polypeptide expressing nucleotide sequence isolated from the Sargasso Sea
cttgtcgcagcgatgaaagaggacggcgtcgatatctggggtgatgggtccacctataaaggaaatgacatcgaacggttttaccgatacggactgatggtaaatcccgacctaaggatctataagccctggttggacccgcagtttgtagacgaactcggcgggcgaactggcatgagcgagttcttgatcgcaagagaccttccttatcgggattctgttgagaaggcctactccaccgatgccaatatttggggcgctacgcatgaagcgaaggcgctcgaagagttaaaccgcgggatggaaattgtcgctcccatcatgggggtggctcattgggatagcgatgttgagatagtcgaagaagatgtcgctttaacgttcgagcagggttggcccgtagcaattaacggcgccaccttcccggaccaggtcgcattggtagaggcagctaatgcgatcggcggccgtcacggtctaggtatgagtgaccagatcgaaaacaggattatcgaagctaagtcgcgtggtatttatgaaggaccagcattggctctgctgcatatcggctatgagcgcctcctgaccgccattcacaatgagaacacgattgagaattacagaactatgggcagacggctaggacgtcttttgtatgaaggccgttggttcgatccgcaaagtctgatgctgagagaaccactgttgagatgggttggatcagcggtgtcgggcacggtcactattcgattgaggcgcggcgacgattattcgattatggacacggatggctcaaaccttacgtatgagccggaccgtctgtccatggagcgggttgaggaccaagccttc

SEQ ID NO: 316693 - DNA, 331 bp, Unknown
  Bacterial polypeptide expressing nucleotide sequence isolated from the Sargasso Sea
atgcctaaaaagattgttttagcttattctggtggattagacacaagtgttattctgaaatggcttcaaaacaagtatcaatgtgaagttgtcacatttacagcagatattggtcagggtgatgaattatctcctgttagaaaaaaagcagaatctttaggagtgaaagaaatttttgtcgaagatttaaaagaagaatttgttaaaaattatgtatttccaatgtttagagcaaatgctgtctatgaaggatcttattatttaggaactgcaatagcacgacctttaatagcaaaaagacaaatcgaaattgctaatgaagtaggagcag

SEQ ID NO: 316694 - DNA, 316 bp, Unknown
  Bacterial polypeptide expressing nucleotide sequence isolated from the Sargasso Sea
attagcctcaggtgcgtctgaatgccatatcgtcgatctgaaagaagaattcgttaaagattacatctacccaaccatggcaacgggtgctatttacgaagggacttacctgttaggtacttcaatggcgcgtccaatcatcgcgaaggcgcaggttgaagtggcgcgtaaagtgggggccgatgccctgtgccacggttgtaccggtaagggtaacgaccaagtgcgtttcgaaggttgctttgcggcattagcgcctgatttaaaagtgattgcaccatggcgtgaatggaccatggtgcaatcacgccatggt

SEQ ID NO: 316695 - DNA, 673 bp, Unknown
  Bacterial polypeptide expressing nucleotide sequence isolated from the Sargasso Sea
atgaaaaaaattgttttagcctactcaggcggtttggatacatctataattttgagatggttgcaagaaaattataatgctgaagtaattgcttacacctctgatattggacaagttttagacaaaaaaaaaattattaagaatgctaaaagactaggtgttaaaaaaataattattgaaaatcttaaaaatatctttgtgaaagattatgtttttccaatgataagagctcatgcggcttatgaaggagtgtatttattaggcacatctattgccaggccgttaattgcaaaaagacaagttgaaattgcaaaaagatttaaggcttttgcagtttctcatggcgcaactggaaaaggcaatgatcaagtaagattcgaacttggttactcatattttggtaaaaataagattaaaacaattgcgccttggagagaatggaaattacaatcaagagcagatttaattagatatgcaaaaaaaaacaatataccaattcctaaagataaaaagggagccccaccattttccgtagatgacaatatttttcatacatcaactgaaggcaagattttagaggacccaaaaaactctgctcctgaatttatttatcagagaacagtttcaccacaaaaagatcctaatagacctacaaaagtaaaaattactttta

SEQ ID NO: 316696 - DNA, 845 bp, Unknown
  Bacterial polypeptide expressing nucleotide sequence isolated from the Sargasso Sea
caggagcaagggtacgaagtcattgcgtacgtagcggacgtgggacagcaagaggattttgatgatgtttcggagcgggcaaaggctaccggggcatccaaagtgtttgtggaagatctaaagcaggattttgtgaccgagttcattttcccggcgattgcaggcaatgcggtgtacgagaaccgttacctcttaggcacctcactagctcgcccggtgattgcgaggcgtcaggtcgaaatcgcactttcagagggcgcgggtgcggtgtcgcacggggcgacgggcaaaggaaacgatcaagttcgcttcgaactcgcgttcgcggctctagctcctgatctacaggttatagcgccttggaaagatcccgaattcttgggtcgcttccagggtcggagcgatctgctcgccttcgccaagcgccatgagattccagttgaggcgactgtagaaaagccctactccagtgatgagaacctcatgcatcggtcatatgaggctggtatgctggaagaccccgaagcgattcctccggatgacatgtttaagctgacccgttcactcgaggatacccccgatagaccgtcggatctgataatacgttataagaatgcgatgccggttcaccttgtgtgtgatgacgagggtgtcgacctgagtcatcctgtcgagctattcagctacttgaattacaagggtggggaacacggaatcggtcgcgttgatatggtggaaaatcgatttgttggaatcaaatctcggggtgtctatgaaacccctggtgggacgattcttcaccacgcgattcgtgatctggagggtatcgccatggatcgggaagt

SEQ ID NO: 316697 - DNA, 791 bp, Unknown
  Bacterial polypeptide expressing nucleotide sequence isolated from the Sargasso Sea
agacacaagcgttattcttaaatggcttcaaaacaaatatcaatgtccagttgttacttttactgcagatcttggtcagggtgaagaattatctccagttaggaaaaaagctgaatctttaggagtcaaggaaatttttattgaagatttaagagaagagtttgttaaaaattatgtatttcctatgtttagagcaaatgctatttatgagggtacgtattatttaggaactgctattgcaagacctttgatagctaaaagacaaattgaaatcgctaaagaagtaggtgccgatactgtctcacatggtgcaactggaaaaggaaacgatcaaattagatttgaattaggctattatgcaaataattcgaaaataaatgtaatatccccttggagagattgggatttaaattctagaaaagatttgattgattttgcagaaaagaaccaaatatctatttcaaaagacaaacggggggagtcaccatttagcactgatgctaatttacttcacacatcatctgagggaaaaattttagaggatccttgggaagaagcacctgagtatgtttattcaagaacaaagtcaattgagaattcaaaaagttctgctgatgaaattattctaagctttgaaaagggtgatgcagttgctattaaccaaaaaaaactaaaaccccatgaagtgctaattgaattaaataaatacggttatgaacacggcataggaagagatgacatagttgaaaatcgttttataggaatgaaatcaagaggtatttatgaaactc

SEQ ID NO: 316698 - DNA, 805 bp, Unknown
  Bacterial polypeptide expressing nucleotide sequence isolated from the Sargasso Sea
tctcatggagcaactggaaagggtaacgatcaagttcggtttgaactatcggcgtatgctttagatccaaacatcaaagttatagccccttggcgagaatgggatttggggagtcgaaccaagttgatcgcttttgcagaggaacatcaaataccaatagcaaaagataagaaaggtgaagctcctttttcagttgatgcaaatttgcttcatacatcttctgaaggaaaggttttggaagatcctgctaaaattgctccagaatatgtttttcagcgtacagttaatcctgaagatgcaccggatgaacctgagataattgaaattgaatttgataagggtgatcctgtagcgattaatggaaataaaatgtcgccagctacaattttaagttctttgaatgactatggacacaaacatggaatagggcggttggattttgtagagaaccggtttgttggtatgaaatctcgcggaatttatgagaccccaggcggagagattttgttagaagcacatcgaggaattgaacaaataactcttgatagtggatctgggcatctaaaggatagtcttatgcccaaatattctgaattgatttataatgggttttggtattcgccagagcgtgagatgcttcaggctgcaatagatctctcacaagaatttgtatcgggaacagtacaattaaaactttttaagggctctgtccgtacaattggaagatggtcacaaaactccttatattccgaggcgcatgtcacttttgaagatgatgctggtgcttatgatcaaaaagacgctg

SEQ ID NO: 316699 - DNA, 376 bp, Unknown
  Bacterial polypeptide expressing nucleotide sequence isolated from the Sargasso Sea
gatgggccgcgccaacaaggtggttctcgcctactccggcggggtggataccagcgtctgcattccctacttgaagcaggaatggggtgttgaagaggtcatcaccttcgccgctgatctcggccagggcgatgagctggaaccgattcgtcaaaaggccttggatgccggcgcgagtcagtcgttggtgggggatctgattcagcccttcatcgaagagttcgccttccccgctatccgcgccaacgccctgtatgagggtcgctaccccttatccacagcactggcgcggccgttgatcgctcgccgactggtggaggtggcccgtgaggtgggtgctgatgcagtggcccacggctgcaccggcaagggcaac

SEQ ID NO: 316700 - DNA, 844 bp, Unknown
  Bacterial polypeptide expressing nucleotide sequence isolated from the Sargasso Sea
gttgagaaaaaagcagctcagcaaggcgtcaaagaaatatttattgaagatctcaaagaagaatttgtccgtgattacgtattcccaatgttcagagccaatccactttatgaaggctactatcttttaggtacatctattgcgagacctttgatcgcacaaaaacaaattgaaattgctaacaaagtgggagctgacgccgtatcacatggtgctacaggcaaaggtaacgatcaaataagatttgagttgggttattattatcataaaccagatattaaaattatcagtccatggagagaatgggatcttacatctcgaacatctttagttgagtatgcagatcaacacggcattgagattgccaaagataaaagaggtgaacaacctttcagtattgatgaaaatattttgcactcttcagctgagggcaaagtccttgaagatccctgggaagaagctcctgattatgtatatacaagatctgtatcaccagaaaatgctcctagtactccagaagaaatcactattgagttcaaaaaaggggatgcctgcgctctcaacggtcaaagtatgacaccctttgaattgttgaaagccttgaacgagatgggcggaaaacatggtatcggtagggtagatttggttgaaaacaggtatatcggcatgaaatcgaggggaatatacgagacacctggtggaacaatcctctatcacgctcacagagccatagaaagcatcacactagacaaagaagcagctcacatgaaagatgaactctctcctaagtatgcagagctagtctacaacggctattggttttcaccagaaagagaaatgatgc

SEQ ID NO: 316701 - DNA, 792 bp, Unknown
  Bacterial polypeptide expressing nucleotide sequence isolated from the Sargasso Sea
atagccagacctttaattgcaaaaagacaaattgaaatagcaaatgaggttggcgcagatgcagttgctcatggagccacaggaaagggcaatgatcaagtaagatttgaacttggatactatgctaatgatgctaacataaaagtaattgctccatggagagattgggaatttgaaagtagaaatgatttagtggattttgcattaaaaaaccaaatagaagtcactaaagataaaataggagaacctcctttcagtacagatgctaatttattacatacatcctctgaaggcaaaatacttgaagatccgtgggttgaagcacctgaatatgtttacacgagaacagaaaatttacacgaaactcctaatgaaccagatatcataaatatcggtttcaaaaatggtgacccagtttcattaaatcaaaaagaattaaaaccacacgaaattcttaaaagcttaaatgaagttgctggaaagcatggggttggcagaattgatatagttgaaaacagattcttaggcattaagtctagaggtatctatgaaacaccaggtggaacaattctaataaccgctcatagagcaattgaaagtattaccctagatagaggtgaagcacatcttaaggatgaaataatgcctaaatatgcagaactaatctataatggattatggttttcatcagaaagatatgcattgcaaagattaatagattctactcaaattaaagttaatggagaagtaagaataaaactatttaaaggccaatgtaattgttatgggccg

SEQ ID NO: 316702 - DNA, 727 bp, Unknown
  Bacterial polypeptide expressing nucleotide sequence isolated from the Sargasso Sea
tatgaatacgaagaaaattaacaaaattgtattggcttattcgggtggccttgataccaccgtaatcctacattggttgaaagaaacctatgatgctgaagttgtaacatttacagcggacataggacaaaaccataatcctgatttagtgatacagagggctaatgacataggttcaactaaagttattatcgaagacttaaaagaagaatttgtaagagattatgtatttccaatgtttagggcaaatacattatatgaaggtgagtatcttttaggaacatctattgctaggcctttaataagtaaaagattaatagaaatagctgaagaagagggtgcagatgcaattgcacatggtgcaactggaaagggtaatgatcaaataagatttgaaattggagcttactctttaaatcctacaattacagttatcgcaccttggagaacttgggattttgtatctagagctgatttagtggagtattgtaaaaagaatcaaattaatatggatgttagttctgatgagcctttatattcaacagatgaaaatatcttacatacctcatatgagggagagattttagaagatccttctattcctgcgccagaatcaatttggcaaagaacttcttctcttaatgatgctcctgatattgaagaagaagttacaataaattttgaaaatggagatccaataggcataaatggagagagtttaagcgct

SEQ ID NO: 316703 - DNA, 928 bp, Unknown
  Bacterial polypeptide expressing nucleotide sequence isolated from the Sargasso Sea
tatttttgttaaagattatgtctacccaatgataagaggtcatgctctttatgaaggtgtttatttgttaggtacatcaattgcaagaccactcattgcaaaagatcaaatcagggttgctaaaaaatttaatgcttatgctgtctcacatggttcaacaggaaaaggaaatgatcaagtgagatttgaacttggatatcattactttggtcctaaaattaaaataattgcgccatggagaatatggaaattaaaatcaagaacagatctcattaattatgcaaaaaaacatggaataccaatccctaaggataaaaagggagcaccgccgttctcagtagatgataatttattccatacctcaacagagggtaaagttttagaaaatccaaaaaattctgcacctgaatttatatttcaaagaacaacttctcctgaaaaggctccaaataaaccaagctttattactattaattacaaaaatggtgatccaattggtctgaatggaaaaaatttacctcctgcaaaagttttggataaactcaatcaattagccggcaaaaatggaatagggagagtagatttagttgaaaatagattcattggaataaaatcaagaggagtttacgaaactccaggaggaacattattgcttgtagcacacagagcaatagaatctgttactctagacaaaaatacaatgcataaaaaggatgaggtaatgccaaggtatgcagagcttgtttacaatggttattggtattctaaggaaagatttaaacttcaaaaaatagttgatctaaaaagaaataaagtaaatggatcagtaaaacttaaactttataaaggaaatattacaattcaatcaagacaaacttccagtaatgcttactcaatgaaaaaagtttctttcgaagaaaataaaact

SEQ ID NO: 316704 - DNA, 856 bp, Unknown
  Bacterial polypeptide expressing nucleotide sequence isolated from the Sargasso Sea
cggccattgatcgccaaacggcaaattgaaattgccaacgaagttggcgccgatgcggtgtcgcatggggcgactggcaaaggcaatgatcaggtgcgttttgaactggcctattatgccttgcagccagatatcaaagtaatcgccccgtggcgcgagtgggatctaggatcgcgcaccaaactgatcagctttgctgaacaaaatcaaatccccattccaaaggataagcgcggcgaggcaccctttagcgttgatgccaatttgttgcatatttcggctgaaggcaaagtgcttgaagatccatggatggccccagaagaatatgtattttcgcgcacagtttcaccagaagatgcccctgataagccaactgaaattgccataagatttgaagctggtgacccagttgcgattaacgataaaaccatgtcacccgcgcgtcttcttgaagaattaaaccggcttggtggggccaatggcattggccggttggaccttgtagaaaatcggtttgtcgggatgaaatcacgcggcatttatgaaactccgggcggcaccattttgcttaccgcgcggcgggccatggagtccatcacccttgatcgtggcgcccaacataccaaagacgaaatgatgccgcgctatgccgaactggtctataatggtttttggttttcaccagagcgcgaaatgctgcaagcggccatcgatagttgccgcgatgcggtgaatggcgtggtgcgggtaaagctgtacaagggcaatgtgattgttaccggcaggcaatcaccaaattcactctataacgccgatttggtgaccttgaagaaggtgctgttgactatgatcacag

SEQ ID NO: 316705 - DNA, 442 bp, Unknown
  Bacterial polypeptide expressing nucleotide sequence isolated from the Sargasso Sea
aatggataaaataaataaagtagtccttgcatactcaggtggtttagatacatcggtcattttaaggtggctgaaagaaacgtatcagtgtgaagtggcaacttttacagcaaacctaggtcaagatgaggactataatcttgttaaggcaaaagctgaaaaacaagggaccacagaaatatttattgaagacttaagagacgagtttgtcagtgattacgtttttccaatgtttagggctaatcctctttacgaaggctattatttacttggaacatcgattgctcgaccattgattgcaaagaaacaaatagaaattgcaaacaaaattaatgctgatgcggtatcacatggcgcaacaggaaaaaggaatgatcaaattagatttgagctaggctactattatcataaacctgatattaaaaatattagtccttggaga

SEQ ID NO: 316706 - DNA, 865 bp, Unknown
  Bacterial polypeptide expressing nucleotide sequence isolated from the Sargasso Sea
ttctcatggagctacaggtaaaggtaatgaccaagttaggtttgaattatcggcttatgcactaaacccagatattaaaataattgcaccttggagggagtggaatttaacgagcagaactaaactgttacagtttgcagaaaaaaaccaaattcccataacctcaaacaaagccggtgaggctcctttttctgtagatgcaaatctattgcatacttcttctgagggattaatattggaagatccctcaaaagaagctcctgaatatatttttcaaagaactgaaaatcctgaaaatgcacctgataactcagatgtaattaccttgactttcaaaaatggagatccgattgcgttaaataagaaaaactattcgccaggaaagttatttgagaaacttaatgagattggatcaaaacatggaataggtagactagacttagttgaaaatagatttgtcggtatgaaatctagaggagtctatgaaactccgggaggtactattttattggaagctcacagaggaattgaaagcataacgcttgatagcgggtcttcacatttaaaagatgaaataatgccaaaatatgcagaattaatctataatggtctttggttttcgcccgagagaaagatgcttcaagccttgattgatgagagtcaaatatttgtagagggcgaagttactcttaaattatatagaggtagtgcagttgttatcgctagacaatcctcaaaaagcctttactcggaaagattggtcacttttgaggatgaccatgggctttacaatcaaaaagacgctgaaggctttataaagctaaaagctctaagacttagggaattagcaaaaagggatagttaa

SEQ ID NO: 316707 - DNA, 388 bp, Unknown
  Bacterial polypeptide expressing nucleotide sequence isolated from the Sargasso Sea
tatggcaacggcgaaaaaagttgtgctggcttactctgggggtctcgatacctccgtgatcgtgcgctggttgcaggaaacctatcagtgcgaagtggtgacgttcaccgcagacattgggcagggcgaggaagttgagcccgcccgcgccaaagcgcaggcactgggtgtcgaggagatctacattgaagatctccgggaatcctttgtgcgcgactttgtgtttcccatgtttcgcgccaacaccgtatatgagggtgagtacctgttgggtacctcaatcgccaggccgctgatcgcgcagcgattggtcgagattgccaacaaaaccggtgctgacgccattgcccatggtgcgaccggcaaagggaacgatcaggtgcgattt

SEQ ID NO: 316708 - DNA, 701 bp, Unknown
  Bacterial polypeptide expressing nucleotide sequence isolated from the Sargasso Sea
aatgaaatcaaaaaagaaaattgttcttgccttctcgggaggcttggatacttcaataattttaaaatggttacaagaagaatataattcagaaataatagcttatactgctgatattggccaagaaattgataaaaaaaaaattatttttaatgcaaaaaaacttggtgtcaaaaaaataattattaatgacttgaaggatatttttgttaaaaattatgtttacccaatgatgcgaggtcatgcaatttatgaaggggtatatttattaggtacttcaattgctagacctttgatcgctaaagatcaaattagagttgcaaaaaaatttaatgcatatgctgtttcccacggttctactggaaaaggaaatgatcaggttaggtttgagcttggttaccactattttggacctaaaataaaagttattgctccatggagaatatggaaactcaaatcaaggtctgatttaattaagtatgcgaaaaaacataacatatcaattccaaaagacaaaaaaggctcatctccattttctgttgatgataatctgtttcacacctcgactgaaggaaaaattttagaaaatcctaaaaatccagctccagaatttatttttcaaagaactacttctccagaaaaagcaccaaacaaaccaacatttgtaattataggttttaaaaaaagtgatccaataacta

SEQ ID NO: 316709 - DNA, 673 bp, Unknown
  Bacterial polypeptide expressing nucleotide sequence isolated from the Sargasso Sea
gatgagtaagaaaaacattaacaaagttgtattagcctattcgggaggcctagatacctcggtcattcttgcttggctaaaagatacctacgattgtgagatcgtaacctttactgctgatattggtcagggtgaagaaattgagacagcgcggacaaaagcggagaacatgggtataaaggaaatttatattgaagatcttactgaggaatatgttcaagattttgtatttcctatgtttcgtggaaatactatttatgaaggtagttatttattaggcacttcaattgctagacctttaattgctaaacgcttagttgagattgcaaacaaaacaggtgcagatgcaatttctcatggggcaactggtaagggtaatgaccaagtccggtttgaactaggcgcttatgctttggatccgaatattagggtgatcgcaccatggcgagaatgggatcttaactcacgtgaaaagttattagcatatgctgaaaacaaaaaaataccgatagaaggaaaaaagaaaactggctccccatattcaatggatgcaaatttattacatatttcttatgaaggtggacaactcgaagatccctggtgtgcgcctgatgaagctatgtggctttggacagtcgcacctgaagatgcgcctaactcaggacaatcaatt

SEQ ID NO: 316710 - DNA, 577 bp, Unknown
  Bacterial polypeptide expressing nucleotide sequence isolated from the Sargasso Sea
ttgcttggaacgagtattgcgagaccattaattgcaaaaagacaaattgaaatagctgaaatcgaaggcgctgatgctgttgctcatggagctacaggcaaaggaaacgatcaagtgagatttgaattatcatattattcacaaaaccctaaaattcaagttattgcgccttggagagaatgggatctaacttctagatcaaagctaattgaatacgcagaaaaacatcaaatatctatagcaaaagataaaataggtgaagctccatttagtgttgatgcaaacttgcttcacgtttcagcagaaggaaaggttctagaagacccctgggaagagcctaaagaatatatttatactagaaccgttagcccaattaatgcaccagacaagccgactgagattactattgattttttagaaggagatccaattaggattgacaacgaaaaactaaaaccttccaaaattatgaaaaaattgaactctcttggagggaagaatggaattggaagaattgatatagttgaaaataggtttgtcgggatgaaatcaagaggcgtctatgaaacgccgggcg

SEQ ID NO: 316711 - DNA, 761 bp, Unknown
  Bacterial polypeptide expressing nucleotide sequence isolated from the Sargasso Sea
aatgaaagcgaaaaaaaagatcgttcttgcctactcaggcggactggatacatctataattctaaaatggttgcaagaaaattataatgcagaagtcatctgctataccgctgatattggacaagaaatagatagaaaaaaaatatttaagaacgcaaaaaagtttggtgtaaaaaaaattataattcaaaatcttaaagatactttcgttaaagattatatttatccgatgattagaggacatgcaatttatgaaggtgtctatttattaggtacatcaatagcaaggccattgatagcaaaagaccagataagagttgcaaaaaaatttaatgcttatgcggtttctcatggagcaactggaaaagggaatgatcaagttagatttgaacttggttatcattattttggtcaaaaaataaaaataatagctccttggagaatttggaagcataaatcaagaacagaccttattaattatgcaaaaaaacataacattgctattccaaaagataaaaaaggcgcacctcctttttctgtagatgataatttgtttcatacttcaactgaaggtaaagttttagaaaatccaaaaaatcctgcaccggaatttatttttcaaagaactatttctcctgagaaggcaccaaataaaccaacgtatgtaacaattaattttaaaaatagtgacccaattggaattaatggaaaaaaactatcaccatttaaactattagttaagcttaatcaattagctggaa

SEQ ID NO: 316712 - DNA, 880 bp, Unknown
  Bacterial polypeptide expressing nucleotide sequence isolated from the Sargasso Sea
ttgaccgaaagaaaattatcaaaaacgcaaaaaaactttggtgttaaaaaaataataatcaataatttaaaaaatactttcgtaaaagaatatgtttttccaatgattagaggtcacgcaatttatgaaggagtttacctccttggaacatcaattgctcgtcctttaattgcaaaagatcaaattaaagttgctaaaaaatttaaagcattcgctgtttcgcatgggtcaactggaaagggaaatgatcaggtgagatttgaacttggatatcattactttggtccaaaaataaaagtgatagctccttggagagtttggaaattaaaatcaagaacagatttaattagttatgcaaaaaaacataacattccaattccaaaagataaaaaaggtgccccacctttttcagtagatgacaatttatttcacacatctactgaaggaaaagttttagaaaatccaaaaaattcagcaccagaatttatttttcaaagaacgacttcacctgaaaaggcacctaataaacctacttatgtttccattggtttcaaaaacagcgatccagttagtattaatggaaagaagttaattccagaaaagcttttagaaaaacttaatcaattaggtggaaaaaatggagttggaagagttgatttagttgaaaatagatttatcggaattaaatcaagaggtgtttatgaaacaccaggtggaacattacttttaatcgctcatagagcaatggagtctgtgacattagataaagatactatgcataaaaaagattctattatgccaagatatgcagaattaatttataacggttattggttctcaaaagaaagatttaaattacaaaaaaatagtggatcttaaa

SEQ ID NO: 316713 - DNA, 458 bp, Unknown
  Bacterial polypeptide expressing nucleotide sequence isolated from the Sargasso Sea
caagagattagtggagattgctgccgaaactggtgcagatgcaatcgcacacggcgcaaccggaaaaggcaatgaccaagttagatttgaattatcggcctatgccttggatccaaacataaaagtaattgctccttggcgtgaatgggatttgactagtcgaacaaaattactcgcttttgcagaggaaaaccaaataccaattgcaaaagacaagagaggagaagcacctttttctgttgatgcaaatttacttcatacttcttctgagggcaaagttcttgaagaccctttagaaatggcacctgagtatgttttccaacgtacgattaacccagaagatgcaccggagcaggccgagataattgaggtggaatttgaaaatggtgatcccgtagcaattaatggcaataaaatgtcgcctgccggaattctgacatctttgaacgaatatggaa

SEQ ID NO: 316714 - DNA, 700 bp, Unknown
  Bacterial polypeptide expressing nucleotide sequence isolated from the Sargasso Sea
atgcagcaagtaaaaaaagttgtattagcgtattctggcggggtggatactagtgtttgtattccttatttaaagaatgaatatggaatttcagaagtggttacttttgtagcagatcttggacagggggaagatttggaacttattaggcaaaaagctttaaattctggtgcatctcaatctatcattggtaatttagttaatagttttgttgagagatatgcttttccagctattagagcaaacgcattatatttagataaatatcctttatctacagctcttgcaaggcctttaattgctgaaaatcttgtaaatattgctcgagagattaatgctgatgcagtagctcacgggtgcactggtaaaggcaatgatcaagtgcgatttgatttagcaattaatgctttaggccctgatttgaaaataattactcctgcaagggagtggaatatgagcagggaagaggcaatagtgtatggagaaaaatttggtattcctgcaccagtatcaaaaaaatcaccatactcaatagacgttaacttacttggtaggagtgttgaagcagggattttagaagacccaatgcaagaagcacctgaagatatatttgcgatgacatcatcaattgataattcacctgattctcctcaagatatagaaattgtctttcagaaatggatttccagttgggattaat

SEQ ID NO: 316715 - DNA, 706 bp, Unknown
  Bacterial polypeptide expressing nucleotide sequence isolated from the Sargasso Sea
atgaaatcaaaaaaaaagatagtccttgcctattcaggcggactggatacttcaattatcttaaaatggcttcaagaaaattatcaagcagaagtaattgcctatacagcagatattggtcaagaaattaataaaaaaaaaatagttaaaaatgcaaaaaaacttggtgtaaaaaaaataataataaaagatttaaaagatacgtttgtaaaaaattatgtctacccaatgataaggggacatgcaatttatgaaggtgtttatttgttgggaacttccattgcaagaccattgatagcaaaagatcaaattagaattgcaaaaaaatttaaagcttatgctgtttctcatggagctactggaaaaggcaatgatcaagtaagatttgaacttggttaccattactttgggccaaaaattaaaattatagctccgtggagattatggaagcttaattcaagatccgatctaattaaatacgcaaaaaaacataacatatctgtcccaaaagataaaaaaggtgcaccacctttttcaattgatgacaatttgtttcatacttccacggaggggaaggttttagaaaatcctaaaaattctgctcctgaatttgtttttcaaagaacaacttctcctgaaaaagcacctaacaaagcatcattcgtttcaatagggtttagaaatggagatcccaataactgttaat

SEQ ID NO: 316716 - DNA, 724 bp, Unknown
  Bacterial polypeptide expressing nucleotide sequence isolated from the Sargasso Sea
aatgtataagccgaagaaagtagttttggcctactcgggtggtctggacacatcgattattcttaaatggcttcaaactgaatacgcatgtgaagtagttacgtttacggcggatctagggcaaggtgaagagcttgagcccgcgcgtaaaaaagcagagttgttaggtataaaaccttctaatatttttattgaggacctaagagaagaattcgtaagtgattttgttttccccatgtttagatgtaatgcactttatgagggtctttatttattgggaacttcaattgcgcgtccattaatttccaaacggcttgttgaaatagcccaagaaacgggtgctgatgcaatcgcgcatggcgcaactggcaaaggtaatgatcaggttcgctttgagctgtcagcttatgcgttaaacccagacataaaagttatagccccttggcgcgagtggaatttaacgagtagatcgagattaataaaatttgctgaagataatcaaatacccattgcaaaagataagcgtggtgaggccccattttctgttgatgctaatcttcttcatacttcatctgagggtaaaattttggaggatccgtcaactgctgcccctgagtatgtgtatcagaggactgtaaatccggaagttgctccagagcttccggaatttatcgaagttgagtttagaaacggtgatgcagtagccataaatgattatagaatg

SEQ ID NO: 316717 - DNA, 598 bp, Unknown
  Bacterial polypeptide expressing nucleotide sequence isolated from the Sargasso Sea
gccacctgaatatgtattttcaagaacaagaagcattgaaaattcatcaaatgaatcagaaatactaacaataagtttcaaaaaaggtgatccagttgcaattaacaatgtaaatttaaaaccccatgagattttggaaactttaaattctattgctggaaaacatggagtaggaagaatagatcttgttgaaaatagatttgttggtatgaaatcacgaggaatttatgaaactcccggtggtacgattctattgaatgctagaagagcaatagagagtataacattagacaagggtgaagcacatcttaaggatgagataatgcctaaatacgcagaaatagtttacaacggtttatggttttcttcagaaagatatgcaatgcaaagattgattgattcaactcaagaaaaggtaaatggcgaagttagacttaaaatttacaaaggaaatgttataactttaggtcgtaaatcaagtaacagtctttatgataactcacttgtatcctttgatgaagctggagactataatcaaaaagatgctgaaggttttataaaaataaactcaattagattaaaaaaaaataataaatag

SEQ ID NO: 316718 - DNA, 289 bp, Unknown
  Bacterial polypeptide expressing nucleotide sequence isolated from the Sargasso Sea
aaatatgcttccttaatatataatggtttctggttttctcctgaaagagaaatgttacaatcagcaattgataaatctcagaagaatgtatctggtactgtacgagcaaaactttacaaaggtaacgttataattactggtagaaaatcagcattttctttatataacgagagcttagtaacttttgaagaaggaacagctgattataatcactcagatgcagaaggtttcattaaattgaatgctcttagacttagagttaaaaaaatgattgagaactctaaataaa

SEQ ID NO: 316719 - DNA, 859 bp, Unknown
  Bacterial polypeptide expressing nucleotide sequence isolated from the Sargasso Sea
tggagtagaggaaatttttatagaagatttgagagaagagtttgtaaaagattatgtctttccaatgtttcgagcaaatgctctttatgaaggaatatattttttaggtactgcaatagcaagaccattaattgcaaaaaaacaggttgaaattgcaaatgaggttggcgcaatttctgttgcacatggtgccactggcaagggcaatgatcaagttcgatttgaattaggctattatgcaaataacccaaaaattgaagttatttcaccttggagagaatgggagcttaactcaagaaatgatttaattaattttgctgaaaaatatcaaataaacattccaaaagataaacgtggagaagctccatttagcacagatgcaaatttacttcatacgtcatcagaaggcaaaattcttgaagatccatggactgatgcacccgaatatgtattttcaagaactaagtctattgaagatgctaattccaccccagaagaaataataatatcatttgagaaaggagatccggtttcaataaatcaacaaaaaatgaaagctcacgagttattatctaaactaaatgagtatggtttaaatcatggaattggaagagaagatatcgttgaaaatcgttttgtgggcataaaatctagaggtgtttatgaaacaccaggtggaacaattttagcaaaagctcatagagctattgaaagcattacattagatagaggtgaagcacatttaaaagatgaaataatgccaaaatatgcagagactatttataatggtttgtggttttcttctgaaagaataagcatgcaaagcttgatcgattctactcaaaaaacagtaactgga

SEQ ID NO: 316720 - DNA, 391 bp, Unknown
  Bacterial polypeptide expressing nucleotide sequence isolated from the Sargasso Sea
atgaagtttaaaaaaaagatagtgcttgcctattcaggcggtttagacacgtcaataattttaaaatggttgcaagtaaattttaaagccgaagtaattgcttatactgcagatattggtcaagaaattgataaaaaaaaaatacttaaaaatgcaaaaagacttggtgtaaaaaaaataataataaaaaatttaaaagatacttttgtaaaagattatatttatccaatgataagaggacacgctatttatgaaggtgtttatttattaggaacttctattgcaagaccgttaatagcaaaagaccaaattagaattgccaaaaaatttaaagcatatgctgtttcccatggatctacaggaaaaggaaatgaccaggtaagatttgaac

SEQ ID NO: 316721 - DNA, 625 bp, Unknown
  Bacterial polypeptide expressing nucleotide sequence isolated from the Sargasso Sea
aatggataaaataaataaagttgttcttgcttactcaggcggtttagacacatcagtcattttaaggtggctgaaagaatcatataaatgtgaagtggcaacttttacagcaaatctaggtcaagatgaagactatgatttagtaaaagcaaaggctgaaaagcaaggaacaaaagaaatatttatcgaagaccttaaagaagagtttgtaagtgattatgtcttcccaatgtttagagctaatccactttatgagggctactacttactgggtacttctatcgcaagacctctaattgcaaaaaaacagatagaaattgcaaatcagattaaagccgatgcagtatcccatggtgcaacaggaaaaggaaatgatcaaataagatttgagcttggatactattatcataagcctgatataaaaataataagtccttggagagaatgggatttatcatcaagaacatcacttgtcgaatacgctgataagtacgggattgaaatagcaaaagataaaagaggagaacaaccattcagtattgatgaaaatattttgcactcttcagcagaaggaaaagttcttgaagaaccatgggtcgaagcgcctgattatgtttacaccaga

SEQ ID NO: 316722 - DNA, 430 bp, Unknown
  Bacterial polypeptide expressing nucleotide sequence isolated from the Sargasso Sea
atgaaatcaaaaaagagaattgttctagcttactctggtggtttagatacatcgatcattttaaaatggttgcaagaaaattataaggctgaagtcatttgttatacggcggacataggtcaagaaatcaataaaaaaaaaattatttcaaatgccaaaaaatttggagttaagaaaataattattaatgatttaaaagatatttttgtaaaagattatatttatccaatgatacgtggccatgcaatttatgaaggtgtatatttattgggaacttcaatcgcaagaccactgattgcgaaggatcaaattaaagttgcaaaaaaatataaagcatatgcagtatctcatggagctactggtaaaggaaatgatcaaattagatttgaacttggatatcactactttgggccaaaaataaaaattattg

SEQ ID NO: 316723 - DNA, 871 bp, Unknown
  Bacterial polypeptide expressing nucleotide sequence isolated from the Sargasso Sea
atgctaaatgaaaattctaaaatacaaaaaatagttttagcttattctggaggacttgatacatcagttattctaaaatggttgcaagacaattatcaatgtgaggtggtaactttcacagctgacattggtcaaggtgaagaagtagaacctgcaagaaaaaaagctgaattattaggcgtgaaagaaattttcattgatgatttaaaagaagaatttgttaaagattttgtttttcctatgtttagagcaaatgctttatatgagggtatttatctactaggtacatctatagccagaccactaattgctaaaagacaaattgaaattgctaatttaacaggttctgatgctgtatcacatggagctacaggtaaaggaaatgatcaagtaagatttgaattgggttactatagcttacaaccaaatatcaaagtaatttccccctggagagaatggaatctatccagtaggacaaacttgattaaatacgcagaagaaaatcaaataaaagttcccaaagataaaagaggtgaagcaccttttagtgttgatgcaaacttattacacatatcagctgaaggaaaaattctagaagatccgtgggttgaacccgaagagtttatttattccagaactaagtcaccgtttgacgctccaaataaaccaacagaaatcacattagagtttttgaatggtaatccagtaagtttaaatggaaaagatttatctccagccaaaatgttacatcagttaaatattttaggaggagaaaatggcataggaagagtggatttagttgaaaatagatttgttggaatgaaatccagaggtgtttatgaaacacccggtgggtacaattctctaccat

SEQ ID NO: 316724 - DNA, 898 bp, Unknown
  Bacterial polypeptide expressing nucleotide sequence isolated from the Sargasso Sea
ttaattgcaaaaagacagattgcaattgcgaaaaaatttaaagcatttgcagtttctcatggctctacgggaaaggggaatgaccaagtcagatttgagcttggatattattattttgggccaaaaataaaagttatcgctccatggagaatttggaagttaaaatcaagaacagatttaataaaatatgcaaaaaagcataaaatacctatacctaaagataaaaaaggagctccacctttttctgtggacgataatctttttcacacttctacggaggggaaaattttagaagatccaaaaaaaacggctcctgaatatatttttcaaagaactgtttctcctgaaaaagcaccgaataaaccatcttacgtaactataggatttaaaaaaagcgatcccgtttctgtaaacaataaaaaattgtctcctacaaaacttcttcagaaattaaattttttagcaggtaaaaatggaattggaagagttgatctagttgaaaatagatttatcggaataaaatctagaggagtttatgaaacaccgggtggttctcttttaattgtggcgcatagagcaattgaatccataactttagataaaaaaaccatgcatcaaaaagatgaggttatgccaaaatatgctgagcttatctacaatggtttttggttttctaaagcaagatacaaattacaaaaaattattgatcttaaaaaaaatctcgtaaatggatcggtgaaactcaaattatacaagggtaatgtcacaattgaatctagacaaagcaaaagcaaagcttactcggttaaaaaggtatcttttgaagagaataaatcttttaaaaagtcgaaagttgagagatttatatcgggtgcggcaagaaagctaagagcttaga

SEQ ID NO: 316725 - DNA, 961 bp, Unknown
  Bacterial polypeptide expressing nucleotide sequence isolated from the Sargasso Sea
gaatgaatatggaatttcagaagtagttacttttgtagcagatcttggacaaggcgaggatctagaatttattaggcaaaaagctttaaattctggtgcatctaaatcaattgttggcaatttagttaatagttttgttgagagatacgcttttccagccattagagcaaacgcattatatttagataaatatcctttatctactgctcttgctaggcctttaattgctgaaaatcttgtgaatattgctagagagattaatgccgatgcagtagctcatggatgcactggtaaagggaatgatcaagttcggttcgatttagcaattaacgctttaggccctgatttaaaaattattactcctgcaagggagtggaatatgagtagagaagaggcaatagtgtatggagaaaaatttggtatacctgcgccagtatcaaaaaaatcaccatattcaatagacgttaacttacttggtaggagtattgaagcaggtatattagaagacccaatgcaggaagcacctgaggatatattttctatgacatcatcagttgataattcacctgattctcatcaagatatagaaattgttttcaaaaatgggtttccagttggaattaatgatgaatttttaactccagtagagatcattcaaaaagctaatgatcttgcaggcaaccatggttttggaagaatagatatgattgaggatcgagtagtaggaattaaaagtagagagatttacgaaacacctggccttttacttttaataaaagctcacaaagaattagagagtataacattaaaccccgacgttatcgattttaaaggaatagtggaaaaaaaatggggtcaattagtttatcaaggtttttggtttggacctcttaaagaaagtttagatgcatttatatcatctactcaaacttcagttaatggaagagtaaagattaggctt

SEQ ID NO: 316726 - DNA, 667 bp, Unknown
  Bacterial polypeptide expressing nucleotide sequence isolated from the Sargasso Sea
atgacaaataaaataaagaaagtagtgctagcatattcgggcggtcttgatacctctataatattgaagtggcttcagtctacatacgattgcgaggtggtcacatttactgctgatctgggacaaggtgatgagatagagccagcaagaaaaaaagctgagatgctcggcgtcaaagagatatatattgaggatttaagagaagatttcgtatctaactatatatttccaatgtttagagcaaacactctatatgaaggtcagtatttactaggaacagccatcgcaaggccattaattgctaaaaggcaaatagaaattgcaaatgaaacaggcgctgatgcagtttgtcatggcgccactggtaaaggtaatgatcaggtcaggttcgagctcggctactatgccctcaaaccaaacattaaggtaatttctccctggagagactgggatctaaaatcgagaacaaaattaatagaatttgctgaagaaaatcaaataccaattccaaaagataaaaaaggtgaggcaccattttcaatagatgccaatattttgcatacctcgtcagagggtaagttaattgaaaatcctgaaaacgaacctccggaatatatttatcaacgaacgctatcaattgatgactcaaatgacattacccactgaa

SEQ ID NO: 316727 - DNA, 734 bp, Unknown
  Bacterial polypeptide expressing nucleotide sequence isolated from the Sargasso Sea
tggcgagcgctgcggaatcccggcgccgttgagcaagaagtcgctttactcgatcgatctcaaccttctgggtcgcagcatcgaggcgggaccgctcgaggatctgatggtggcgcctccggaggaggtgttcgccatgacctcaccggtgtcggaaacgcccgatgcagccgaggagatcgagattgccttcgaagccggcaaccccgtcgccatcaatggccaggtcctggatccggtggcgatgatccgcgaagccaaccgtctggcgggcagtcacggcatcggccgtctcgacatgatcgagaaccgggtggtggggattaaatccagggagatctacgaaacaccgggcttgctgctgttgattcaggcccatcaggaactggagagtttgacgttggccgcggatgttctgcgcagcaaacgtcagctggagatgcagtgggctgacctggtgtatcagggcctgtggttcgggccgctgaaggatgcattggacggtttcatggatcggacccagcagcatgtcaacggcgtcgtgcgcctgcgtctgcacaagggcaatgccacggtcatcggccgcggttcaacccagagcagtctgtatgtgcctgcgatggcgtcctacggcagtgaagacgccttcgaccatcgcgccgctgagggattcatctacgtctggggattgccaacccgtctctgggctgcttcccaacggacatcaggctgac

SEQ ID NO: 316728 - DNA, 946 bp, Unknown
  Bacterial polypeptide expressing nucleotide sequence isolated from the Sargasso Sea
agcagaagttattgcttataccagctgaacattggacaagaaattgataaaaaaaaaataattaaaagcgcaaagaacctcggtgtaaaaaaaataataataaaagatttaaaagatgtttttgttaaagattatgtctatccaatgataagagggcacgcaatttatgagggtgtttatttattgggaacttctatcgcaagacctttaattgcaaaagatcaaattagagttgctaaaaaatttaaagcttatgcagtttcacatggatcaacaggtaaaggaaatgatcaagtaagatttgaacttggctaccattactttggaccaaagataaaaataatagcaccctggagaatttggaaactaaaatctagaactgacctaattaattatgcaaaaaaacatggaataacaattccaaaagataaaaaaggtgcaccaccattttcggtggatgacaatttgtttcatacatctactgagggaaaagttctagaaaatccaaaaagaccagccccagaattcatttttcaaagaacagtttctccagaaaaagcaccaaataaagcttcctatgtaacaataggatttaaaaatggtgatcctataactattaatggtaaaaaattatctccttcaaaacttttagaaagacttaaccaattagctggtaaaaatggaattggaagagttgatcttgttgaaaatagatttattggaataaaatcaagaggtgtttacgaaactcccggtggaactttattgatcaatgctcatagagcaattgaatctgttacattagataaagaaactatgcataaaaaagatgaaataatgcctaaatatgcagaactcatttacaacggttattggtattctaaagcgagatttaaacttcaaaaaattgttgatcaaaaagaaacaaatcaatggatctgttaac

SEQ ID NO: 316729 - DNA, 931 bp, Unknown
  Bacterial polypeptide expressing nucleotide sequence isolated from the Sargasso Sea
gcttaaagaaacctatcaatgcgaagtagcaactttttttgcaaacttaggccaagacgaagattatgcaataataaaaacaaaagcagaaaagcaagggacaaaagatatatttattgaggatctaaaagatgagtttgtaagtgattatgtctttccaatgttcagagctaatcctctttatgaaggctactacttacttggaacatctattgctcgaccattaattgcaaaaaagcaaattgaaattgcaaatcagataaatgctgatgcagtatctcatggtgcaactggtaaaggaaatgatcaaattagatttgaacttggatactactatcataagcctgatataaaaataatcagtccatggagagaatgggatttatcatcacggtcatcattagttgattatgctgataaacatggaattgaaatagcaaaagataaaagaggggaacagccatttagcattgatgaaaatattttgcactcttcagctgagggaaaagtacttgaagatccgtgggttgaagcgcctgattatgtttacactagatctgttccacctgaagaagcgccagacaaagcagaagaactagcaattgaattcaaaaaaggtgatgcgtgcgcactgaatggcaaagctatgaaaccttttgaaattttaaaatctctaaatgaactgggtggaaagcatgggattggaagagttgatcttgttgaaaacagatatattggcatgaaatctagaggtatctacgagactcctggcggaaccattctgtatcatgcacatagagcgattgagagcatcactcttgataaagaagctgcacatatgaaggatgatttagcacctaaatatgctgaacttatatataatgggttattggttctctccagaaagagaaatgatgcagtcaatgattga

SEQ ID NO: 316730 - DNA, 775 bp, Unknown
  Bacterial polypeptide expressing nucleotide sequence isolated from the Sargasso Sea
tttagcctactcgggcgggcttgatacttcaataattcttaaatggcttcaagaaaattataaagctgaagttattgcttacacttcagatataggccaagagatgaataaacaaaaaattattagtaatgctaagagattaggcgttaaaaaaatcataattgaagacctaaaaaatatatttgtgaaagactatgtttttccaatgattagagctcatgcagtatacgaaggggtttatctattaggaacatctatagcgagaccattaattgcaaaaagacaaatagctattgcaaaaaaatttaaagccttcgcagtttctcatggtgcaacaggtaaaggaaatgatcaagtaaggtttgaattaggatatgctttttttggagggaaaaaaattaaagttatagctccttggagagagtggaaattacaatctagaactgacttaattaattatgctaaaaaaaacaacatacctattccaaaagataaaaagggagctcctcctttttctgtagacgataacatctttcatacttctaccgagggtaaagttttggaaaatccaaaaaactctgcaccagagtttatatatcaaagaactatttctcctgagaaagcgccaaataaaaaaacaaaacttaaaattacctttaaaaatggtgacccaactgctgttaatggagtaaaattaaaaccggaaaaacttttagaaaagttaaatttattagctggaaaaaatggtatcggaagagttggatttagtagagaa

SEQ ID NO: 316731 - DNA, 977 bp, Unknown
  Bacterial polypeptide expressing nucleotide sequence isolated from the Sargasso Sea
ataatagtaaatgaaatcaaaaaagaaattgtccttgcctactcaggcgggttagatacttcaataattttaaaatggttgcaagaaaaatataattctgaagtaattacttatacagcagatattggtcaaaaaattaataaaaataaaattattaaaaacgcaaaaaaatttggtgttaaaaaaattattataaaaaatttaaaagatacttttgttaaagactatatttatccaatgataagaggtaacgcgatttacgaaggtgtttatttattaggtacctcaatagcaagacctctaattgctaaagaacaaattagagttgcaaaaaaatttaatgcttacgcagtttctcatggttcaactggaaaaggtaatgaccaagtaagatttgagttaggttatcattattttgcacctaaaattaaaattatttcaccttggagaatatggaaactaaaatcaagatcagatctgattaaatatgcaaaaaaaaataatattctaattccaaaagatagaagaggtgcgcctccattttcaattgatgataatttatttcatacttcaacagaaggaaaagttttggaaaatcctaaaaatgcagctccagaatttatttttcagagaaccacttccccagaaaaagctccaaacaaaattacatttgtaactataggatttaaaaatagcaatccaatatctataaatggaaaaaaatactctccatcaaaacttttagaaaaattaaataattttgcaggaaaaaatggaattggaagggttgatttagttgaaaatagatttattggaataaaatcgagaggagtatatgaaacacccggtggaactttattaattactgcccacagagctattgagtctgttactttagataaaaaaacaatgcataaaaaagataatattatgccaagatatgcagaacttatttacaatggttattggtattcaaa

SEQ ID NO: 316732 - DNA, 766 bp, Unknown
  Bacterial polypeptide expressing nucleotide sequence isolated from the Sargasso Sea
gaggtagagcctgcccgagaaaaagctgaggctttaggtgtaagagaaatatttatcgatgatctgcgtgaggaatttgtccgagattttgtatttccaatgtttagagcgaacactatttatgaaggacaatacttacttggaacttctatagcacgcccccttattgctaaaagactaattgatcttgcagaacaaactggtgcagatgctatttcgcatggtgccacaggaaaaggcaatgaccaagtaagatttgagttgggtgcatacgctctcaatcctgatattcgagtaatagcaccatggcgtcagtgggatttagattcgcgagaagccttaatgaaatattgtaagcaacacgatattgtagtggactatgcgcaggtaggggaaaaatctccctactcaatggatgctaatctattgcatatatcatatgagggtggagtcctagaagacccttgggaagctcccgatgaatccatgtggcgttggactgtgagtccgaaatccgctcctgacgttcctacatttgttgagctcgagtacgtgaatggagatatcgtagctttgaatggagataagttatcttgtagtgaactactcactcgattaaacgttttgggaggaaagaacggagtaggacgagatgacatcgtagagaaccgttatgttggtatgaaatcgagaggatgttatgaaacacctggtggaacaatcatgctcaaagctcatcgagcgatagaatctttgactttagata

SEQ ID NO: 316733 - DNA, 592 bp, Unknown
  Bacterial polypeptide expressing nucleotide sequence isolated from the Sargasso Sea
atgtttgagacggttagaccattgagtaaatctttgaataagccttctaaaattatcttatcctttaaagacggaatccctataagatttaatggaaaaagaattgatggagtgaacttatttagacagctaaacaaattagctggcaaacatgggattggagttgtcgatattgttgaaaatagattcgttgggatgaagtctagaggagtttatgaaactccaggtggaacagttttaaacattgctcatagagcagtggagtctttaacaatggatagagaggttatgcatattcgcgattcattagttccaaagatttcccaattaatttacaatggattttggttttctcctgagatgagagtcttattgtccttcataaaagaatcacaaaaaaatgttacaggtgatgttagattgatgttatataaggggaatgtgagagttttaggaagaaagtcaaattattccctctataattctgatttggctactttcgaagaagatgatttatatgaccagtccgatgcaactggattcattaaacttaattcattgaggttgattcttaataaattaaaaaaataaa

SEQ ID NO: 316734 - DNA, 490 bp, Unknown
  Bacterial polypeptide expressing nucleotide sequence isolated from the Sargasso Sea
atgaaaaaaaacaaaaaaattgttttagcctactcaggcggacttgatacatctattattttaaaatggttacaggaaaattacgatagcgaagtaattgcctacactgcagacattggtcaagaaatgaaccgaaagaaaattgttaaaaacgcaaaaaaacttggagttaaaaaaataattattaacaatttaaaaaatacgtttgtaaaagaatatgtcttcccaatgattagaggtcatgcaatttacgaaggggtttaccttcttgggacatcaattgcgagaccattaatcgcaaaagatcaaattaaggtcgcaaaaaaatttaaagctttcgcagtttcgcatggttcaacaggtaaaggaaatgaccaggttagatttgaacttggatatcattattttggtccaaaaataaaagttattgctccttggagaatttggaaattaaaatcaagaacagatttaattaattatgcaaaaaaac

SEQ ID NO: 316735 - DNA, 832 bp, Unknown
  Bacterial polypeptide expressing nucleotide sequence isolated from the Sargasso Sea
attgggacttctattgcaagaccattaatagcaaaagatcaaataagggttgctaaaaaatttaaagcttatgcagtttcacatggttctacaggaaaaggtaatgaccaattaagatttgaacttggttatcattattttgcgccaaaaataaaaattattgctccttggagaatttggaaacttaaatccagaactgacctaattaattatgcaaaaaagcacaaaattcaaattccaaaagataaaaaaggtgctccaccattttctgtagatgataatttatttcatacttcaactgagggaaaagctttagaaaacccaaagaattcagcaccagaatttatttttcaaaggacaaactctccagaaaaagcacctaacaaagcttactttgtaaatataggatttaaaaatggagacccaataacagtgaatggtaaaaaattatctccatcaaaacttttggaaagactcaatgaactagcaggcaaaaatggcattggaagagttgatcttgttgaaaatagatttattggaattaaatccagaggtgtttatgaaactcctggaggaactttattaattaatgctcatagagcaattgaatctgtaacattagataaagaaactatgcataaaaaagatgaaataatgcctaaatatgcagaactgatttaccatggttattggtattcaaaagcaagatttaaacttcaaaaaactgttgatctaaaaagaaataaagttaatggatctgttaaactcaaactatacaaaggtaatattataatttgttctagaaaacaaaaagcaatgcttattctatgaa

SEQ ID NO: 316736 - DNA, 655 bp, Unknown
  Bacterial polypeptide expressing nucleotide sequence isolated from the Sargasso Sea
aatgttaaataaaaattctaaaataaaaaaaatagttttagcctactccggaggacttgatacatcagttattttaaagtggttgcaagataattatcaatgtgaagtggtaacttttacagctgatattggtcaaggtgaagaagtagaacctgcgagaaaaaaagctgagttattaggtgttaaagaaattttcattgaagatttaaaagaagaatttgttaaagatttcgtttttcctatgtttagagctaatgctttatatgagggtatatatttactaggcacatctatagccagacctcttattgcaaaaaggcaaattgaaattgctaatctaacagattctgatgctgtgtctcatggggcaactggcaaagggaatgatcaagtaaggtttgaattaggttattatagcttgcaacctaatataaaagtaatttctccctggagagaatggaatctatctagcaggacaaatctgattaagtatgccgaagataaccaaataaaagtacctaaggataaaagaggtgaagccccttttagtgttgacgcaaacttattacacgtatcagctgaaggaaaaattttagaagatccatgggtggaacccgaagaatttatatttttccagaacaaagtcaccctttga

SEQ ID NO: 316737 - DNA, 452 bp, Unknown
  Bacterial polypeptide expressing nucleotide sequence isolated from the Sargasso Sea
cattggtcgcgccgatatgtcgagaaaccgctacgtggggatgaaatcccgcggttgctacgagacgccagggggcagcatttggctgcgagcgcatcgtgccatcgaatccatcacgctggatagagaagtagcgcatttgaaagacgagctcatgccgcgctatgccaagctgatttataacggctactggtggtctcccgagcgccacgcactgcaggccgccatcgatcagactcaggccgtggtgaacggtgatgtgcggatgtcgctgtacaagggcaacatcactgtcaccggccggcgatccagtgattcgctgtttgacgagagtattgccacgtttgaagaggatggtggcgcctacgatcaagccgatgccgaaggtttcattaaactcaatgcgttacgtttgcgtattgccgccaccaaaggccgccagaatcagtaat

SEQ ID NO: 316738 - DNA, 823 bp, Unknown
  Bacterial polypeptide expressing nucleotide sequence isolated from the Sargasso Sea
aatgaaattaaaaaaaaagatagttctcgcctattcaggcggtctagatacttcaataatacttaaatggttgcaagaaaattataatgcggaagtcatctgttataccgctgatattggccaagaaatagatagaaaaaaaatatttaagaacgcaaaaaagtttggtgtaaaaaaaattataattcaaaatcttaaagatactttcgttaaagattatatttatccaatgattagaggacatgcaatatatgaaggtgtctatttattaggcacatctatagcaagaccattgatagcaaaagaccaaataagagttgcaaaaaaatttaatgcttatgcggtttctcatggagcaactggaaaagggaatgatcaagttagatttgaacttggttatcattattttggtcaaaaaataaaaataatagcaccttggagaatttggaagcataaatcaagaacagaccttattaattatgcaaaaaaacataacatccctattccaaaagataaaaaaggcgcacctcctttttctgtagatgataatttgtttcatacttcaactgaaggtaaagtactagaaaatccaaaaaatcctgcaccagaatttatttttcaaagaactatttctcctgagaaagcaccaaataaaccaacgtatgtaacaattaattttaaaaatagtgacccaattggaattaatggaaaaaaactatcaccatttaaactattagataaacttaatcaattagctggaaaaaatggaatcggaagagttgatttagtagaaaatagatttattggaataaaatctagggga

SEQ ID NO: 316739 - DNA, 680 bp, Unknown
  Bacterial polypeptide expressing nucleotide sequence isolated from the Sargasso Sea
tctttattctaaagatgaaaatattcttcacacttcgtatgaaggtgaagtactagaagatccttcagttagagctccctcaaatatatgggaaagaacgactgatcctttaaaagcacctgatgaagaagaaataattaatatagagtttaaaaatggagaccctgtaaaagtaaatggtaaatcattaaatcccgatcaattactccaagaacttaatctattagcaggaaaaaatggaatagggcgtttagacttagttgaaaatagatttacaggtatgaaatctagaggatgttatgaaacccctggagggacaattctactaaaagctcatagagctatagaatcaataactttagatgcagaacaagcacatctcaaagatgaaataatggctaaatatagtgaactaatttataaaggtttttggtggagtcccgaaagaaaatctatgcaggctctaatagatagcactcaaacccatgtaacaggttcagttactttatctctatacaaggggaatgtatctgtcgtctcaagagattctgattacagtctttatgatccaaaaattgttacttttgaagatgatgaaaatacctttgatcaagctgatgcaactggctttataaaaattaactctattaggttaaaaactaattcaaaaagaaaatagt

SEQ ID NO: 316740 - DNA, 571 bp, Unknown
  Bacterial polypeptide expressing nucleotide sequence isolated from the Sargasso Sea
atgaaaaaaattgttttagcctactcaggcggtttagatacatctataatcttaagatggttacaagaaaattataaagcagaaataatagcttacacctctgacattggacaagttttagataaaaaaaaaattattaaaaacgctaaaagattaggtgttaaaaaaataattattgaaaatttaaaaaatatttttgtgaaagattatgtttttcctattataagagctcatgctgtttatgagggagtatatctattaggaacatctattgctaggccgttaattgcaaaaagacagattgaaattgcaaaaaaattcaaagcttttgcagtctctcatggtgcaaccggaaaaggtaatgaccaggtaagattcgagcttggttatgcatattttggtaaaaataaaattaaaactatagcgccttggagagaatggaaattacaatcaagagcagatttaattaaatatgcaaaaaaaaacaatattccaattcctagaaaaaaaaaaggtgcgccaccattttcagtggatgacaatatttttcacacttcaactgagggcaaag

SEQ ID NO: 316741 - DNA, 894 bp, Unknown
  Bacterial polypeptide expressing nucleotide sequence isolated from the Sargasso Sea
gatgttacggggtaatgcgatttatgagggagtttatttattaggaacttctatagcgagaccgttgattgcaaaagaccaaataagaatagcaaaaaaatttaaagcatttgcagtatcgcacggtgctaccggaaaaggaaatgatcaagtaagatttgagctaggatatcactattttggcccaaagataaaagttgttgctccttggagaatttggaaattaaaatctagaagcgatttaataaattatgcaaaaaaacacgggatacctattccaaaagataaaaaaggtgccccacctttttctgtcgatgataatttatttcatacatcaacagagggtaaaattttagaaaatccaaaaaattcagctccagaatttatttttcaaagaacagtctcacctgaaaaagcacctaataaaccaacttatattttaatcaactttaaaaatggggatcccattggaattaatggaaaaaaattaaaccctgaaaaaattctaactaaattaaattttatagctggaaaaaatggcgtaggaagagttgatttagttgaaaatagatttcttggtattaaatcaagaggagtttatgaaactccaggagggacacttttaattcatgcccaccgagctatcgagtcagtgacattagataaagatacaatgcacaaaaaagattcgatcatgccgagatatgccgaattaatttacaatggttactggtattcaaaagagagatttaaattacaaaaaattattgatcaaaagagaaataaagtaaacggatctgtaaaacttaaactatataaaggaaatatcactatccaatctagaattacaaagagcaatgcatactcagtgaaaaaagtttcttttgaagaaaa

SEQ ID NO: 316742 - DNA, 529 bp, Unknown
  Bacterial polypeptide expressing nucleotide sequence isolated from the Sargasso Sea
acttatgttactattagtttcaaaaacagtgatccagtaagtatcaatggaaaaaaattaaatccagaaaaacttttagaaaaattaaatcagattggtggaaagaatggagttggaagagttgatttagttgaaaatagatttatcggaattaaatcaagaggtgtttatgaaacaccaggcgggacgttacttttaatcgcccatagagctatagagtctgtgacattagataaagatactatgcataaaaaagattctattatgccaagatatgcagaattgatttataacggttattggttttcaaaagaaagatttaaattacaaaaaattgtggatctaaaaaaaagtaaggtaaatggaagtgttaagttaaaactttataaagggaatgttacaattcaatcaagaattacaaaaagcagtgcttactcaatgaaaaaagtttcttttgaggaaaataaaacttttaacaaatcgaatgttgaaagatttataaatttccataaaaaaaaattaaagtaaa

SEQ ID NO: 316743 - DNA, 662 bp, Unknown
  Bacterial polypeptide expressing nucleotide sequence isolated from the Sargasso Sea
tagtacagatgctaatttattacatacttcctcagaaggtaaagtgttagaagatccatggtcagaggcgccagaatacatatataatcgtactacttctctatttgatgcacctgataaacatgaagaaataaatattattttcaagaatggagatcctattgctgtaaataacaaaaagatgaaagctcatgaaattcttgcttccttaaacaatatagcaggcaagcacggggtaggacgaattgatattgttgaaaatagattagtaggtatgaaatctagaggtgtttatgaaactcctggggggacaatacttcttcatgcgcatagggcaatagagagcataactttagatagaggtgaagcacatttaaaagatgaaatcatgcctaaatatgcagaaataatttacaatggactttggttttcttctgagagagaatctatgcaaaaaattattgataaaactcaagtaaatgtttcgggtgaggtgcgtttaaaaatttataaaggaaacgtaatagtaactggtcgtaaatcttctaatagcttatatgatacttctttagtatcttttgatgaagaaggtcaatataaccaaaaagatgctgaaggatttataaaaattttatcacttcgtttaaagaaaagaaaataat

SEQ ID NO: 316744 - DNA, 424 bp, Unknown
  Bacterial polypeptide expressing nucleotide sequence isolated from the Sargasso Sea
atgcagcatattaaaaaagttgtactagcttattctggcggtgttgatacgagcgtttgtattccatatttaaagaatgaatatggaattacagaagtcgttacttatgttgcggatcttggacaaggcgaagatttggaacttattaggcaaaaagctttaaattctggtgcatctcaatcaatcgttggtgatttagttaatagttttgttgagagatacgcttttccagcaattagagcaaatgcattatatttagataaatatcccttgtccacagctcttgcaaggcctttaattgctgaaaatcttgtaaatactgcaagagaaattaatgctgatgcagtagctcatggatgcactggaaaaggaaatgatcaagttcgatttgatctagcaataaatgccttaggacctgattgaa

SEQ ID NO: 316745 - DNA, 856 bp, Unknown
  Bacterial polypeptide expressing nucleotide sequence isolated from the Sargasso Sea
aatgaaaaaaaagagaaagattgtgctcgcctattctggcggcttagatacttcaataattcttaaatggcttcaagaaaattataacgcagaagtaatcgcttatactgctgatattgggcaaaaaataaataaaaaaaaaattattaataatgcaaaaaaattaggtgtaaaaataataattattgaaaatcttaaagatatctttgttaaagattatatattcccaatggttagaggtcatgcagtctatgagggtgtctacctattgggaacttctatagcaagacctttgattgcgaaaaaacaaattattgtagcaaaaaaatttaatgcttttgcagtttctcatggttcaaccggcaaaggaaatgatcaagtaagatttgaacttggttaccatttttttggtccaaaaattaaagtaattgctccatggagaatatggaagttaaaatcaagaacagatttaattaagtatgccaaaaaaaatggaatacccatacccaaagataaaaaaggtgcagcaccattttctgttgatgataatttttttcatacatcgaccgaaggtaaaattttagaaaatcctaaaaatcaagctccagaatttatttttcaaagaacaacctccccagaaaaagcacctgataaagcttcttacataacaataggatttaaaaatggtgacccaatatcggttaatggaaaaaaaacttctccgggaaatcttttgaataaattaaatataattgcaggtaaaaatggtattggcagagttgatttggtagaaaatagattcataggtataaaatcgagaggtatttatgaaactcctggaggaacattattatta

SEQ ID NO: 316746 - DNA, 436 bp, Unknown
  Bacterial polypeptide expressing nucleotide sequence isolated from the Sargasso Sea
gatgaaaaaaattgttttagcttattctggcggattagatacttcaattattctaagatggttacaagaaaattataatgcagaagtcattgcctatacttcagatatcggccaagagatagatagaaaaaaaatattaagaaacgcaaagcttcttggtgtaaaaaaaataattattgaagatctgaaaaacatctttgttaaagattatgtttttccaatgattagagcgcatgcagtttatgagggcatttacttgcttggtacttcaattgccagacctttaattgccaaaagacaaatagcgatagctaaaaaatttaaggcgtatgccgtatcacatggagcgactggaaaaggtaacgatcaagtaagatttgaactaggctatgcattttttggtagaggtaaaattaaaacgatcgcgccttggaga

SEQ ID NO: 316747 - DNA, 517 bp, Unknown
  Bacterial polypeptide expressing nucleotide sequence isolated from the Sargasso Sea
atgaaatcaaaaaaaagaattgtattagcttattcaggtgggctagatacatctgtaatacttaaatggttacaagaaaattataaagctgaagtaatttgttatactgcaaatattggtcaagaaattaatccaaagaaaattatatcaaacgctaaaaagtttggcgttaaaaatattatcatcaaagatttaaaagatatttttgtgaaagattatgtttttccaatgatcagaggtcatgcactttatgaaggtgtctatttgttaggaacttctatcgcaagacctttaattgctaaagatcaaatcagaattgcaaaaaaatataaagcttttgcagtgtctcatggggctacaggaaaaggtaatgatcaagttagatttgaactcggctatcattactttgggccaaagataaaaataattgcaccttggagaatatggaaactaaaatctagaaaagatcttattaactatgctagaaaatacaaaatacttattccaaaaagataaa

SEQ ID NO: 316748 - DNA, 427 bp, Unknown
  Bacterial polypeptide expressing nucleotide sequence isolated from the Sargasso Sea
gatgcagcaggtaaaaaaagttgtactagcttattctggtggcgttgatacgagcgtttgtattccatatttaaagaatgaatatggaatttcagaagtggttacttttgtggcagatcttggccaaagcgaggatttagagcttattaggcaaaaagctttaaattctggtgcatctcaatcaattgttggtaatttagttaatagttttgttgagagatacgcttttccagccattagagcaaacgcactatatttagataaatatcctttatctacagctctcgctaggcctttaattgcagaaaatcttgtaaatattgctcgagagtttagtgctgatgcagtagctcatggatgcactggtaaagggaatgatcaagtccgatttgatttggcgataaatgctttaagtcctgattttaaa

SEQ ID NO: 316749 - DNA, 706 bp, Unknown
  Bacterial polypeptide expressing nucleotide sequence isolated from the Sargasso Sea
aatgaaatcaaaaaaaagaattgtgttagcttattctggtggcttagacacatctattatacttaaatggcttcaggaaaattataatgctgaagtaatttgttacactgcagatattggtcaagaaattgataaaaaaaaaattattttaaatgctaaaaaattaggagttaagagcataattataaaggatcttaaggatatatttataaaagattatgtattcccaatgcttagaggtcatgcgatttatgaaggtgtttacttgttaggaacttcaatagcgagaccactgattgcaaaagatcaaataagggtagcaaaaaaatacaaagcatacgctgtatcccatggatcaactggaaaggggaatgatcaagttcgatttgaacttggctatcattactttgatccaaaaataaaaataattgcaccgtggagaatatggaaattaaaatcaagaacagacttaataaattatgcaaaaaaaaataaaatttctattccaaaagataaaaaaggtgctccacctttttcagttgatgataatttatttcatacttcaactgagggtaaggttttagaaaacccaaaaaactctgcaccagaattgatttttcaaagaactatttcaccagaaaaagctccaaataaaccaacatttgtttcaattaaatttagaaatggagatccaatagaggttaat

SEQ ID NO: 316750 - DNA, 490 bp, Unknown
  Bacterial polypeptide expressing nucleotide sequence isolated from the Sargasso Sea
tcccgctaatttattgtctgaattaaatatgatagctggcgctcatggtattggccgggctgatatagttgagaaccgttatgtgggcatgaagtcacggggttgctatgaaacaccaggaggcacagtcctattaaaagcgcatcgtgcgatcgaatctatcactctcgatcgtgaactctcccatttgaaggatgatcttatgccgagatatgtttcgcttatttataatggttactggtggtcacctgaacgagaggcaatccaggcactaattgatcagtctcaaagattcgtcagtggatgcgttcggttaaaattatacaaagggaatgtaattgtagttagtcgggattcaagtaattccttatttgacgaggaaatagccacttttgaagatgacgctggttcctatgatcagcgagacgctgagggctttatcaagcttaacgcacttagaatgagaattgcagcaaaaaagaatcgttaa

SEQ ID NO: 316751 - DNA, 517 bp, Unknown
  Bacterial polypeptide expressing nucleotide sequence isolated from the Sargasso Sea
gcgctcgacggcgagcggctctccccagcggccatgctcaccgcgctgaacaagctcggcggcgataacggcatcgggcgcctggacatcgtcgagtcgcggttcgtcgggatgaagagccgcggcgtgtacgagacgcccggcgggacggtgctaatccaggcgcggcgggcggtggagagcgtgtgcctcgaccgcggggagtcgcaccagaaggacgagctcatgccgcggtacgcggagctcatctacaacgggttctggttcagccccgagcgcgagatgctccaggcggcgatcgacaagtgctccgcgaacgtcaacggcacggtgcgcgtgaagctgtacaaggggaacgtcatcgtcgtcgggaggaaggcggcgaattcgctgtacaacgcgacgctgtccacgttcgaggacgacggcggggcgtacgaccagaaggacgccgcggggttcatcaagatccaggcgctcaggctcaggacgctcggcacgcagagggggccgccga

SEQ ID NO: 316752 - DNA, 604 bp, Unknown
  Bacterial polypeptide expressing nucleotide sequence isolated from the Sargasso Sea
atccaaaaaatttctgcgccagaatttatttaccaaagaacggtttctcctgaaagagctccaaacaagccttcatttattaccatcaattttaaaaatggagatccttttgcaattaatggaaaaaaaatgtctccttctaaactattagaaaagctgaacaatgttgctggaaaaaatggaataggaagagtcgatttagttgaaaatagatttattggaataaagtctcgaggtgtatacgaaacaccaggtggaactttattaattcacgcacatagagcaatcgaatctgtaacattagataaagaaacaatgcataaaaaagatcagattatgccaagatatgctgaacttatttataatggttattggtattcaaaagaaagatttaaacttcaaaaaattgtagatctaaaaagaaacaaggttaatggctcagtaaaacttaaactttataaaggaaatgtaataatagagtctcgaattacaaatagttctgcctactctgtgaaaaaagtttcctttgaagaaaacaaaacatttaataaatctaatgttgaaagatttattaattttcataagaaaaaactacgttcttaaa

SEQ ID NO: 316753 - DNA, 847 bp, Unknown
  Bacterial polypeptide expressing nucleotide sequence isolated from the Sargasso Sea
aaaaaatgtaattcttgcttattctgggggccttgatacctctatcatgatttcgtggctaaaagagaattatgggtgcaatgttattgcaatgtgtgccaatttagggcaggcagatgagctggatggccttgaagaaaaagctctagcttctggagcatctaaagtttatatcgaagattgtcgtgaagaatttattcgagattatatttttcctacacttcaagcaggtgctatgtatgagcgagaatatttgttaggaacaagttttggacggccgttaattgcaaagaaaatggttgaaattgctcacaaagaaggagcagacgccgtttctcatggagcaacaggtaaggggaatgatcaagttcgttttgaacttactttcatggcgcttgatccaagtttaaaaattattgcaccttggaaggacccgctttggacattgcattcacgtgaagactgcattgcatatgcggagcaaagaggcattgaaattacccaatctaaaaagcggatatattctgaagatcgtaatatctggcatatttctcatgaaggtggagatttagaagatcctatgaatgagccagctgatgatgtattcacacagtctaagcctcttgctgatgctgcagatgaagctgaatatattaccctttcatttaataagggaatcccggtaaaacttaacggacaatcactagatcccattgctttgctcacagagttaaatgcatatggagcacgtcatgcaatagggcagttggacatggttgaaaatcgcttggttggcatgaaatctcgaggagtttatgagacacctggcggctctattttatattaa

SEQ ID NO: 316754 - DNA, 765 bp, Unknown
  Bacterial polypeptide expressing nucleotide sequence isolated from the Sargasso Sea
cctggagagagtggaatctgaactctagatccaagctgattgagtatgcgttagaacaccaaatacctgttcctaaagataaagaaggtgaagcaccatattcaacagatgctaaccttctccatatttcttatgaaggtaaagctcttgaagatccttgggctgaaccccccagcaacatgttcacaaggacctcttctcctgaagatgcaccccagactgcagaggttatagacataggcttcaacaaaggtgatgccacctcaatagatgggaaaaaacttagccctgcgtcacttctcacaaaattgaactcactgggtggtaaacacggcataggacgtatcgatattgttgaaaacagatttgtcggtatgaaaagtagaggagtatatgaaacccctgggggaacaattttgctagcagccaggcgagcgatagaaagtctgactttagataagggtgcttcccatttaaaagacgagttaatgcctcgctatgctgaattggtatataacggattttggttttcacctgaacgtaaaatgcttcaagcagctattgatagttgtcaggaaaatgtaacgggcgatgttcgtatcaagctatataaaggcaatgtaatcatcttgggtcgaaaatcccctaatagcttatatgacctggatactgttacttttgaagaagatgaagtttatgaccaaaaagacgccgagggatttataaaattaaatgcattgagactaagactctcaaaaaattaat

SEQ ID NO: 316755 - DNA, 850 bp, Unknown
  Bacterial polypeptide expressing nucleotide sequence isolated from the Sargasso Sea
acctttgattgctaaaaaacaagttgaatttgcaaaaaaaattggggcaaatgctgttgctcacgggtccactggcaaagggaatgatcaggttagatttgaaattggttattatgcatctgatcctaatataaaaattattgctccatggagaatatgggatttaaaatcaagagatgatttgattaattttgctttgaaataccaaattgatattccaaaagacaaactaggggaacctccgtttagtgttgatgaaaatgttttacatacttctgcagagggaaaagttttagaagatccatggaaaagtcctccagattatgtttattcaagaactaaaaatattgaagaaactcctgattcacctgatgaaataattattacttttgaaaatggtgatccaaaaatgataaatagtgaagttcatagtccttatgaaatgcttaaaaaattgaatatatttggacacaagcatggcgttggaagagtagacattgtcgagaatagatttatcggaatgaaatcaagaggaatttatgaaacaccaggaggaactatcctatttcatgctcatagagcaattgaaagtattacgttagatgcagaaactcaacacagaaaagatagtgtaatttcagaatatgctgaactaatttacaatggattttggttcagtaaaaaaagaaaagaacttcaagaaattgttgatattaatagaaataaagtaaatggagaagtaaaattaaaattatataaaggaaatacaataatattgggaagaagatcaaataacagtttatatagcgtttcagaagtttcttttgaaaataatgaacaaaaagaccaa

SEQ ID NO: 316756 - DNA, 359 bp, Unknown
  Bacterial polypeptide expressing nucleotide sequence isolated from the Sargasso Sea
tatgggtaaagaaataaacaaaattattctcgcttattcaggtggtttagatacctcagttattctacattggcttaaagagcagtactcagctgatgttattgcttttactgcagacattggacaagaacataatcctcaagaagttgcgtcaagagctaaagaaataggggcttcaaaagtttttattgaagatttaaaagatgagttcgtttctgaatacgtttttcctatgtttagagctaatgcagtgtatgaaggggagtatctcttgggtacttctatagcgagaccgcttatcagtaaaaaacttatagaaatagcagaagaagaaaatgctgatgctatagctcatggag

SEQ ID NO: 316757 - DNA, 598 bp, Unknown
  Bacterial polypeptide expressing nucleotide sequence isolated from the Sargasso Sea
tttattacacacatcatcagaaggtaaaattcttgaagacccatggatcgagcctccagattatatttatacaagaacaaataatataagtgaaactccaaataaacctgaaactttaattattggttttgaaaatggtgatcctatatctttaaatgaagaaaaactcaaacctcatgaattattaaaaaaattaaataaaatagctggagaacatggagttggaagaatagatattgttgaaaatagatttgtaggaatgaaatctagaggagtttatgaaactcctggtggtactattttggttaatgctcatagagctatggaaagcattaccttagatagaggtgaagcacatttaaaagatgaaattatgccaaaatatgctgagtcaatttataacggtttgtggttttcgtctgaaagattagcaatgcaaaaactaatagattcaactcaaaaaaaagtaaatggaaaagtaaaattgaaattaattaaaggtaatgtaattatattaggtagaaaatcagaaaacagtctttatgacagtagtttagtgtcatttgatgaaaaaggtgaatataatcaaaaagatgca

SEQ ID NO: 316758 - DNA, 700 bp, Unknown
  Bacterial polypeptide expressing nucleotide sequence isolated from the Sargasso Sea
aaaatccctatcatgaaacataataaaaaagagtctccgtatagtgtggatgcaaatgttcttcatcgatcagcagaaggaaaaatcttggaagacccttggaaaagaccacctgaaaacgtgtttggtatttctaaaagtccacagtcagcaccaaacaaagagacagttattactatccaatttaaaaatggtgaccctattggcatcaacggaaaaaaattgtccccttataatttgttagaaaagttaaatcatctaggagcagcaaatggaattggaagagtggatattgtagaaaataggtacgtgggaatcaaatctcgtggcgtttatgagacaccgggtggtacaattcttctcaaagcacatcgtgctatggaaagtattactttagatagagaagaggtttttactaaagacgagctcatgcccaaatatgcaagactaatttataatggatattggttcgctcctgaaagagtgatgatgcaaaaagcaattgatgcttcacagaaaagagtaaatggccaagtaaagctagcactctataaaggtaatgtgatagtgattggtagacagtcacctaatagcttatatgatgaaaatctagcaacttttgaaagctctaattatgatcaaagagatgcagagggcttcataaaactcaatgcgttaagactaaaaaaaaataaaatta

SEQ ID NO: 316759 - DNA, 905 bp, Unknown
  Bacterial polypeptide expressing nucleotide sequence isolated from the Sargasso Sea
tttaatagccaaaagacaaattgcgatcgcaaaaaaatttaaggcttacgcagtatctcatggagctacaggtaaaggcaatgaccaagttagatttgaacttggttacgctttttttggtggaaaaaaaattaaaacaattgcaccttggagagaatggaaattacaatctagagcagatttaattaaatacgcaaaaaaaaataatattccaattcctaaggacaaaaaaggggcacctcctttttctgtagatgataatatttttcatacttctactgagggaaaagttttagaaaatccaaaaaattctgcaccagaatttatttttcaaagaactgtatctccagaaaaagctccaaataaaaaaacaaaagtaagaattacttttaaaaatagtgatcctgtagcggttaatggaaaaaaatttaaaccagaaaaaattttagagaaactaaatacactcgcaggcaaaaatggaattgggagagttgatcttgttgaaaatcgctttattggcataaaatcaagaggtgtttatgaaacacctggtgggactttgttatacgctgctcacagggcgattgaatctgtaactttagataaaaaaacagcacacgaaaaagaaaggataatgcctgagtatgctgaattagtttacaatgggtattggttctcaaaaaaaagaatcaaacttcaaaagataattgataaaaaaagaaatcaagtttctggtgaaatagttttgagcttatacaaaggaaatattactattctttctaggggaacaaaaaacaaagcttattcaatgaaaaaagtttcttttgaagaaaataaaacctttaataagaaaaaagttgaaaattttataaaatttcattctaaacagttaaataaaagttaaa

SEQ ID NO: 316760 - DNA, 708 bp, Unknown
  Bacterial polypeptide expressing nucleotide sequence isolated from the Sargasso Sea
ttccaatgattagaggacacgctttatatgaaggtgtttatttactaggcacttcaatagctaggccattaattgcaaaagatcaaattaaagttgcaaaacaatataaagcttacgctgtctcacatggatcaactggtaaaggaaatgatcaagttagatttgaattaggttaccattactttggaccaaaaattaaagtgattgcaccttggagagtttggaaattaaaatcacgaactgatttaattaattatgcaaaaaaacatagtataccaattccaaaagataaaaaaggagcgccacctttttctatagatgataacttatttcatacatcaactgaaggtaagtttttagaaaatccaaaaaactctgcgcctgaatttatatttcaaagaactgtctcccctgaaaatgctcctaataaaccaacatttgttacaataaattttaaaaatagtgatccaataggaataaatggaaaaaaactttcaccctcaaaactcttagaaaaattaaatttgttagctgggaaaaatgcaatcggcagagtggacttagttgaaaatagatttattggaataaaatcaagaggagtttatgaaacaccaggtggaacacttttattaaatgctcatcgagcaattgaatctgtaactttagataaagatacaatgcataaaaatagatatgattatggctaaa

SEQ ID NO: 316761 - DNA, 479 bp, Unknown
  Bacterial polypeptide expressing nucleotide sequence isolated from the Sargasso Sea
aatgaaatcaaaaaaaaaaattgttcttgcctattcaggtgggctggacacctctatcatactgaagtggcttcaagagaattataaatcagaaatcattgcatatactgcagatattggtcaagaaatagatagaaaaaaattgatatctaatgcaaaaaaacttggagttaaaaatattattataaaagatttaaaaaatacttttgttaaagattatgtttttccaatgttaagaggtcatgcaatttatgaaggtatttatttgcttggcacttcaattgcaagaccattaattgcaaaagatcaaataagagttgcaaaaaagtttaaagcttatgcggtttcacatggtgcaacaggaaaaggtaatgatcaagtaagatttgaattaggttatcattactttggaccaaaaataaaaataatagctccatggagaatttggaaattaaaatctagaactgatttgattaatt

SEQ ID NO: 316762 - DNA, 485 bp, Unknown
  Bacterial polypeptide expressing nucleotide sequence isolated from the Sargasso Sea
aatgaaatcaaaaaaaaaaattgttcttgcctattcaggtgggttggacacctctatcatactaaagtggcttcaagagaactataattcagaaatcattgcatatacagctgacattggtcaagaaatagatagaaaaaagttaatatctaatgcaaaaaaacttggtgttaaaaatattattattaaagatttaaaaaatacttttgttaaagattatgtttttccaatgataagaggtcatgcaatttatgaaggtgtttatttgcttggtacttcaattgcaagaccattaattgcaaaagatcaaataagagttgcaaaaaagtttaaagcttatgcggtttcacacggatcaacaggaaaaggtaatgatcaagtaagatttgaattaggttatcattactttggaccaaaaataaaaataatagctccatggagaatttggaaattaaaatctagaactgatttaattaattatgcaa

SEQ ID NO: 316763 - DNA, 1186 bp, Unknown
  Bacterial polypeptide expressing nucleotide sequence isolated from the Sargasso Sea
atgaaaagacaaaagaagattgtactcgcctattcaggtggtttggatacgtctataattcttaaatggcttcaggaaaattatgatgcagaagtaatagcctacactgctgatgttgggcaggagatggatagaaaaaaaattataaataatgcaaaaaaattaggtgtaaaaaaaattatcatccaagatctaaaaaatatttttgttaaagattatgtctatccaatgataagaagtcatgctctttatgagggtgtttatttgttgggcacatcaattgcaagaccactcattgcaaaagatcaaattagagttgcaaagaaatttaacgcctatgctgtctcacatggttcaacaggaaaaggaaatgatcaagtaagatttgaattaggatatcattactttggtcctaaaattaaaataatcgctccatggagaatatggaaattaaaatcaagaacagatctcattaattatgcaaaaaaacatggaataccaatccctaaagacaaaaagggagcgccgccattctcagtggatgataatttattccatacatcaacagagggtaaagttttagaaaatccaaagaattctgcccccgaatttatattccaaagaacaatctcccctgaaaaagccccaaataaaccaagttttataatcattaattacaagaacggtgatccagttggtctgaatggaaaaaaattatctcctgcaaaagttttggataaactcaatcaattagccggcaaaaatggaatagggagagtagatttagttgaaaatagattcattggaataaaatcaagaggagtctacgaaactccgggaggaacattattgcttgtggcacacagagcaattgagtctgtaactcttgataaagacataatgcataaaaaagatgaggttatgccaaggtatgcagaacttgtttataatggttattggtattctaaggaaagatttaaacttcaaaaaatagttgatctaaaaagaaataaagtaaatggatctgttaaactaaaactttataaaggtaatattacaattcaatctagacaaacctcaagtaatgcttactcaatgaaaaaagtctctttcgaggaaaataaaactttcaataaatcaaacgttgaagaatttattaattttcataagaaaaaattaagataaa

SEQ ID NO: 316764 - DNA, 1186 bp, Unknown
  Bacterial polypeptide expressing nucleotide sequence isolated from the Sargasso Sea
atgaaaaaacataagaagattgtactcgcctattcaggtggtttggatacgtctatcattcttaaatggcttcaggaaaattatgatgctgaagtaatagcctatactgctgatgttgggcaggaaatggatagaaaaaaaataataaagaatgcaaaaaaattgggagttaaaaaaataataattaaagatctaaaaaacatttttgtgaaggattatgtgtatcctatgataagaggtcatgctatttatgagggtgtttatttgttaggtacatcaattgcaagaccactcattgcaaaagatcaaatcagggttgccaaaaaatttaatgcttatgctgtctcacatggttcaacaggaaaaggaaatgatcaggttagatttgaacttggatatcattactttggtcctaaaattaaaataattgctccatggagaatatggaaattaaaatcaagaacagatctcattaattatgcaaaaaaacatggaataccaatccctaaggataaaaagggagcaccaccgttctcagttgatgataatttatttcatacttcaacagagggaaaagttttagaaaatcctaaaaattctgcacctgaatttatttttcaaagaacaacttctcctgaaaaggctccaaataaaccaagctttattactattaattacaaaaatggtgaccctgttggtttaaatggaaaaaaattatctccagcaaaagtcttggataaacttaatcaattagcaggcaaaaatggaatagggagagtagatttagttgaaaatagattcattggaataaaatcacgaggagtttacgaaactccaggaggaacattattgctcgtggcacacagagcgatagagtctgttactctagataaagatacaatgcataaaaaagatgagattatgccaagatatgcagaacttgtttacaatggttattggtattctaaagaaagatttaaactacaaaaaatagtcgatctaaaaagaaataaagtaaatggatctgttaaactaaaactttataaaggtaatattacaattcaatctagacaaacctcaagtaatgcttactcaatgaaaaaagtctctttcgaggaaaataaaactttcaataaatcaaatgttgaaagatttattaattttcacaaaaaaaagttgagataaa

SEQ ID NO: 316765 - DNA, 974 bp, Unknown
  Bacterial polypeptide expressing nucleotide sequence isolated from the Sargasso Sea
aatgacacaaaagagaagaattgtactagcttattctggaggactagatacctccataatactcaaatggcttcaagaaaattacaatgccgaagtaatatgttacacggctgatattggtcaagagatagataaaaaaaagataatcaaaaatgcaaaaaaatttggggtaaaaaatattataattaaagacttaaaaaatatttttgttaaagattatgtttttccaatgatcagaggtcacgcgatttatgagggcgtatatttattgggtacctcaattgcaagacctttaatagcaaaagatcaaataagaattgcaaaaaaatataaagcttatgcagtatctcatggagccactggtaaaggaaatgatcaagtcagatttgagcttggctatcatttttttggtccaaagattaagataatagcaccctggcgaatttggaatttaagatctagaacagatcttattaaatatgcaaaaaaatacaaaataccgatacctaaagataaagcaggttccacacctttttctgttgatgataacttgtttcatacctctaccgagggaaaagttttagaaaatcctaaaaattctgctccagaaattatttttcaaagaacggtttctgcagagaaagctcctaataaacctacatttatatccataaattttaaaaatggagacccagttggtattaatggaaaaaaatataatcctgagaaaattttaacaaaacttaatttaatagctggtaaaaacggtattggaagagttgatttagttgaaaatagatttcttggtataaaatctagaggagtttatgaaacacctggcggtacactacttattcatgcacatagagctatagagtctgtaacattagacaaaaacacaatgcataaaaaagattccataatgtctagatatgcagaattaatttacaatggatattggtttctaaagagag

SEQ ID NO: 316766 - DNA, 1129 bp, Unknown
  Bacterial polypeptide expressing nucleotide sequence isolated from the Sargasso Sea
tctcaatggttgcaggaagaaaaaaatcttgatgtagtgacttatacagcagatatgggtcagggagacatacctgatgatttagaagagaaagccaagagttttggagcttctaaagttattattgatgatttatcagaagaattcgtatcagactatgtatatccaatgtttcgatgcaacactctttatgaaggtgaatatttgcttggaactgcgatcgctagaccactcatagcaaaaaaattggtaagaattgctgaatccgaaaacacaaatataatttctcacggagccacgggtaaaggcaatgatcaaataaggtttgaaattggcgcacatgctttgaactctgacattcaagttatagctccctggcgcgaatggaatatgtcctctcgaacagatttgatgaattattgtaaggaacatcaaatccccatgcctgccagcaaagctgaggagccacctttttcgatggacgaaaatctattgcacatttcctatgaaggaggagttctggaagatttatcaactccacctcctgaagatatgtggttaaaagttaaatccattgaagacgcaaaagatgaagctgaagaaataaaaattacttttgaaaatggcgatcctatagctgtcgatgatgaaagtctaagtgcagctgaaatattaaaaaaattgaatttgattggcggaaatcatggcataggtagaattgatattgtggaatctcgagcaactggaatgaaatctagaggttgttatgaaacgcctggcggaactatcttattaaaggctcgaagagccatggaatctttatgtctttccagagacgaaatagttaaaaaggatagtctgatgccatcttatgcaaaacttatttatgatgggctttggtggagcaatgatagggttagtttgcaaaaacagatcgataattttgcaacaaaggtatcgggctcggtagtgattaaactcctaaaagggaatgtaatttctttgggtaaagaaagtaagaattctctttacgatgaaaataaagctagttttgaagaaagcggaggattctcaaatcaagacatggaagactatataaaagagaatattctaaaatttgatagataaa

SEQ ID NO: 316767 - DNA, 1054 bp, Unknown
  Bacterial polypeptide expressing nucleotide sequence isolated from the Sargasso Sea
ataagagaaaaagcagaatcacttggagtaaaagaaatattcatagaaaatcttcaagaagagtttgtaaaaaactatgtctttccaatgttcagagcgaatactttatatgaaggaacatatttgttgggaacggctatagccagacctttaatagcaaaaagacaaattgaaatagcaaaggaaataggggcagattcagtggctcacggggcaaccggaaaaggaaatgatcaagtacgttttgaattaggttactatgcaaacaactcttcaataattgttatagcgccctggagagaatgggatttaagttctagaaaagaattagttaattttgctttacaacatcaaataccaattcctaaagataaaaaaggcgaaccaccttttagtacagatgctaatttattacacacctcttcagaaggtaaagtgttagaagatccatggttagaggcacctgaatatgtatataatcgtaccacatctctattagatgcgcctgataaacctgaagaaataaatattatttttgagaatggagacccagttgctataaataataaaaagatgaaagctcatgaaattctaacttcgttaaacaatattgcgggcaaacatggtgtaggacgaattgatattgttgaaaatagattagtaggaatgaaatctagaggagtttatgaaactccaggaggcaccatactccttcatgcacatcgagcaattgaaagtataactttagatagaggagaagcgcatttaaaagatgaaatcatgcctaaatatgcagaaataatttataatggactttggttttcttcagagagagaatctatgcaaaaaattattgataaaactcaagtaaatgtttccggagaagttcgtctaaaaatttataaaggaaatgtaatagtatgtggccgaaaatctacaaacagcctatacaatacatctctagtatcttttgatgaagaaggtcaatttaatcaaaaagatgctgaaggttttattaaaattttgtcactacgtttaaaaaaaagaaaataat

SEQ ID NO: 316768 - DNA, 565 bp, Unknown
  Bacterial polypeptide expressing nucleotide sequence isolated from the Sargasso Sea
gctgcaaaaaaaagctgtacataaaataatgaaagcgaaaaaaaagatcgttcttgcctactcaggcggattagatacatctataattcttaaatggttacaagaaaattataatgcagaagtcatatgctatacagctgatattggtcaagaaatagatagaaaaaaagtatttaagaatgcaaaaaaatttggtgtaaaaaaaattataattcaaaatcttaaagatactttcgtaaaagattatatttatccgatggttagagggcatgcaatttatgaaggtgtctatttattaggtacatcaattgcaagaccattgattgcaaaagaccaaattagagttgcaaaaaaatttaaggcttatgcagtttcacatggttctactggcaaaggaaacgaccaagtgagatttgaacttggatatcattattttggtccaaaaattaaaataatagcaccttggagaatatggaaacttaaatctagaactgacttaattaattatgcaaaaaagcatgggattcctataccaaaagataaaaaaggttcgccacctttttct

SEQ ID NO: 316769 - DNA, 1198 bp, Unknown
  Bacterial polypeptide expressing nucleotide sequence isolated from the Sargasso Sea
tatgaaaaagaaatctatagttcttgcttattccggtggcttagacacctcgattattcttcattggcttaaagaaaactataatgccgatataattgcttacattgcagatttaggacaaggggaaaatcttaaatcgattgctaaaagagcaaaaaaagttggtgctaaaaaagtttatgtggaaaatcttagaaatgaatttgttaaagattatatctttcctatgattcaagcaagttctgtttacgaaggcaattatttacttggaacctccattgcaagacccttaattgctaaaagacagattgaaattgcaaaaaaagaaaaatcattcgcagtttcacatggttccactggaaagggaaatgatcaaattagatttgaactttctttcaaagccctgaatccaggtattgagatcattgcaccgtggagaatatggaatcttaaatcaagagaagattgtataaaatatgcaagaaaaaataaaatatcagtacctgtaactaaatcaaagccatatagttgtgatagaaatatatatcatattagctacgaaggcggcgttttagaagatccttggacagagcctcctaaagatatgtatgagtctgttaggctaattgaaaatactcctgataaagctacaaatattacacttacatttaaggatggcgttccgatttccataaacaataaaaagttctcaccagtagcacttttggaaaaacttaatactctaggtggtaaaaatggtgttggagtcgtagatattgtagaaaataggtttgttggtatgaaatctagaggagtttatgaaactcctggaggcactatattaaatattgcccacagagctattgaatctttgactatggatagggaagtaatgcatatacgtgactcattgattccaaagatttctcaattaatttataatggtttttggttttcgccagaaatgtctaccattatggcttttataaaacagtctcaaaagaatatttcaggtgatgtaagattgaagatttttaaaggaaatgtagtagtctcgggaagaaaatctaaattttcattatataactcaaatcttgcaacttttgaagaagataatttatatgatcaaaaagacgcaactggttttataagactgaattccttaaggcttatattagataaaattaaaaataaatga

SEQ ID NO: 316770 - DNA, 1183 bp, Unknown
  Bacterial polypeptide expressing nucleotide sequence isolated from the Sargasso Sea
aatgaaaaaaattgttttagcttattcagggggtttagatacctcgataattcttaaatggttgcaaataaattataaagctgaagtcatcgcttatacttcaaatattggtcaaaatttgaataagaagaaaataattcaaaatgcaaaaagactaggtgttaagaaaattataattgaaaatttaaaaaatatttttgttaaagattatgtttttccgatgataagagctcatgctgtttatgaaggtgtttatttgcttgggacctctatagcaagacccttaatagcgaaaagacaaattgaaattgcaaaaaaatttaaagcttttgcagtttcacacggtgcaactggaaaaggaaacgatcaagttagatttgaacttggatattctttttttggtaaaaaaattaaagtgatagcaccttggagagagtggaagctacagtctagatcggatttaattaaatatgcaaaaaaatataaaattccaattccaaaagacaaaaagggggctcccccgttttctgttgatgataatttatttcatgtttcaactgaaggcaaagtgctagaaaatccaaggaacgcccctccagaatttatttttcaaaaaactatttcgccagaaaaagcaaaaaataaaacggttaaaataaaaataggttttaaaaatagcgatcctgtctctattaatggaaaaaaatataaaccagaatttttattagaaaaattaaataaaattggtggagcaaatggcattggtagagtcgatcttgtggaaaatagatttattggtataaaatccagaggagtttatgaaacgcctggcggaactatattgtattttgcacatagggcaattgagtctgtaactttagataaagctacaatgcatgctaaagaaagaataatgccattgtatgctgaactagtttataatggctattggttttcaaaaaaaagactgaatctccaaaaaataattgataaaaaaagaaatcaagtaaatggtgaggtaatccttaaaatttacaagggcaatattatcattgtatcaagaaaatcaaaaaacaatgcttattcattaaaaaaagtttcttttgaagaaaacaaaacattcaaaaagtctaagattgagaaattcataaaatttcattcaaaacaattacataaacaataa

SEQ ID NO: 316771 - DNA, 631 bp, Unknown
  Bacterial polypeptide expressing nucleotide sequence isolated from the Sargasso Sea
atgaagttaaagaagaaagtagttctagcctattcaggcggacttgatacatctgttattctaaaatggcttcaagaaaattataatgccgaagtaattgcgtatactgcagatataggtcaaaaacttgataaaaaaaaaatatttagaaatgcaaaaaaacttggtgttaaaaatattattataaaaaatttaaaagatgtttttgtaaaagattatatttatccaatgattagaggacacgctttatatgaaggtgtttatttattaggtacatcaatcgcaagaccattaattgctaaagatcagattagaattgctaaaaagttcaaagcttatgctgtttctcatggttctactggcaaaggtaatgaccaagtaagatttgagcttggctatcattactttggaccaaaaataaaaataatagctccttggagaatttggaaacttaagtctaggactgatttgattaattatgcaaaaaaaaataaaataattattccaaaagataaaaagggagctccaccattttcagtggacgataatttattccatacatcaactgaaggaaaagttttagaaaatcctataaatccagctcccgaattattttcaaagaacaattctc

SEQ ID NO: 316772 - DNA, 1066 bp, Unknown
  Bacterial polypeptide expressing nucleotide sequence isolated from the Sargasso Sea
atgaaatcaaaaaagaaaattgttctagcttattctggagggctcgacacctctataattttaaaatggcttcaagaaaattataatgcagatgtgatttgttatacagcagatgtgggccaagaaattgacagaaaaaaaattataactaatgcaaaaaaatttggtgttaaaaatataattattaaagatttaaaagatatttttgttaaagactacgtttaccctatgatcagaggacatgcgatctatgagggtgtttatttattagggacttcgatagcaagacctcttattgcaaaagatcaaataagggtagctaaaaaatttaaggcttatgcagtttcacatggagcaactggtaaaggcaatgaccaagttagatttgaattaggctatcattattttggtcctaaaattaaaattatagctccgtggagaatttggaaactaaaatctagaacagacttgattaattatgcaaaaaaacatggcataactataccgaaagataaaaaaggtgcacctcctttttcagtggatgataatttatttcatacatcaactgaaggtaaagttttagaaagtccaaaaaattctgcaccagaatttatatttcagcgaacagtttctccagaaaaggcacctaacaaaccatcttttgttactatcaattttaaaaatggagatccatttggaattaatggaaaaaaattatcaccagctaaattattaacaaagctaaatggcgtagcaggaaaaaatggaattggaagagtcgatttagtagaaaatagatttttaggaataaaatctagaggggtatacgaaacacctggtggaactctgttgatcaatgcccatagagcaattgaatccgttactttagataaagaaacaatgcataaaaaagatcaaataatgtctagatatgctgagttaatttacaatggttattggtattcaaaagaaagatttaaacttcaaaaaattgttgatttaaaaagaagtaaagttaatggctctgttaaacaaaaattatataaaggtaatatctcaattcaat

SEQ ID NO: 316773 - DNA, 808 bp, Unknown
  Bacterial polypeptide expressing nucleotide sequence isolated from the Sargasso Sea
aatgaaaaaaattgttttagcctattcaggcggacttgatacttcaataattctaaaatggcttcaagaaaattataaagctgaagttattgcttacacttcagatataggccaagagatgaataaacaaaaaattattaggaatgctaagagattaggcgttaaaaaaatcataattgaagacctaaaaaatatatttgtgaaagactatgtttttccaatgattagagctcatgcagtctatgaaggagtatatttattaggaacatctatagcgagaccattaattgcaaaaagacaaatagctattgcaaaaaaatttaaagccttcgcagtttctcatggtgcaacaggtaaaggaaatgatcaagtaaggtttgaattaggatatgctttttttggagggaaaaaaattaaagttatagctccttggagagaatggaaattacaatctagaactgacttaattaattatgctaaaaaaaacaaaatacctattccaaaagataaaaagggagctcctcctttttctgtagacgataacatctttcatacttctactgagggtaaagttttggaaaatccaaaaaactctgcaccggagtttatatatcaaagaactatttctcctgagagagcgccaaataaaaaaacaaaagttaaaattacttttaaaaatggtgacccgactgctgttaatggaataaaattaaaaccggaaaaactttttgaaaagttaaatttaatagctggaaaaaatggtatcggaagagttgatttagtagagaaccagatttattggaattaa

SEQ ID NO: 316774 - DNA, 1183 bp, Unknown
  Bacterial polypeptide expressing nucleotide sequence isolated from the Sargasso Sea
atgaaatttaaaaaaagaattattctcgcttactcgggaggtttagacacatctataattttaaagtggctgcaagaaaaatataatgctgaggtaatttgctataccgcagatattggtcagaaaattgataaaataaaaatatataaaaatgcaaaaaaattaggtgttaaaaaaattattatcgaagatcttaaaaatatttttgtcaaagattatgtttttccaatgttaagaggtcatgctatgtacgaaggtgtttatttgctcggaacttcaatagctagacctttgattgctaaaagacaaatagcaattgcaaaaaaatttaaagcttatgctgtttcgcatggatctacaggtaaaggaaatgaccaagtgaggtttgagttaggctattattattttggacctaaaattaaaatcattgctccttggcgagaatgggatttaagttctagaagtgatttaattaagtatgcaaaaaaaaaaaatattacttttccaaaagataagaaaggatcaccaccattttcaatagatgataatatttttcatacatcaactgagggaaaagttttagaaaacccaaaaaacccagcccctgagtatatttttcaaagaactaactctcttgaaaaatctcctaataagcaaacaatcgtgagtgttggtttcaaaaatggagaccctatttctgtaaatggaaaaaaattgtcaccaggaaaacttttagaaaaactaaataatcttgcaggaaaaaatggaattggtagagttgatttggtcgaaaataggtttattgggataaaatctagaggtgtatatgaaactcctggcggaactatactaatggtagcgcacagagcaattgagtctgttaccttagacaaaaaaacaatgcataagaaagatcaagttatgccgcgttatgctgagttaatttacaatggatactggtattcaaaagaaagatataaaattcaaaaaattgtagatttaaaaaaaaacaaagtaaatggtttggtaaaactaaagttatacaaaggaaatataacaattatttcaagacaaacaaaaagctctgcttattcaatgaagaaggtttcatttgaggaaaataaaacttttaataagtcaaatgtcgaaagatttattaattttcataaaaaaaaactataaa

SEQ ID NO: 316775 - DNA, 751 bp, Unknown
  Bacterial polypeptide expressing nucleotide sequence isolated from the Sargasso Sea
gaggcgatagtgtatggagaaaaatttggtatacctgcaccagtatcaaaaaaatcaccatattcaatagatgttaatttacttggtaggagtatcgaagcaggtatattagaagacccaatgcaagaagcacctgaggatatatttttgatgacatcatcagttgataattcacctgattcccatcaagatatagaaattgttttcaaaaatgggtttccagttggaattaatgatgaatttttaactccagtagagatcattcaaaaagctaatgatcttgcaggtaaccacggttttggaagaatagatatgattgaggatcgagtggtaggaattaaaagtagagagatttacgaaacacctggcctcttacttttaatcaaagctcacaaagaactagagagcataacattaaatcctgatgttgtcgattttaaaggaatagtggaaaaaaaatggggtcaattagtttatcaaggtttttggtttggacctcttaaagaaagtttagatgcatttatatcatcgactcaaacttcagttaatggaagagtaaagattagactttataagggaaacgcaatagtcattgggagaatgtcggaaaaaaattcactttacagggaggatttagcaacttatagcaaagatgatgtatttaatcattctttagcagagggttttatttatatgtggggtatgtctaataaaatatgggctgagttaaatgcaaaaacaaaagattaac

SEQ ID NO: 316776 - DNA, 814 bp, Unknown
  Bacterial polypeptide expressing nucleotide sequence isolated from the Sargasso Sea
aatgaaatcaaaaaagaaaattgttctagcttattctggaggactcgatacctctataattttaaaatggcttcaagaaaattatgatgcagatgtaatttgttatacagcggatgtaggccaagaaattgatagaaaaaaaataatagctaatgcaaaaaaatttggtgttaaaaatataattattaaagatttaaaagatatttttgtaaaggactacgtttatcctatgattagaggacatgcgatctatgagggtgtttatttactagggacatcgatagcaagacctcttattgcaaaagatcaaataagagtagctaaaaaatttaaagcctatgctgtttcgcatggcgcaactggtaaaggcaatgaccaagttagatttgaattaggctatcattattttggtcccaaaattaaaatcatagccccgtggagaatttggaaattaaaatcaagaacagacttaattaattatgcaaaaaaacatggcatagctattcctaaagataaaaaaggtgcacctcctttttcagtggatgataatttatttcatacatcaactgaaggtaaggttttagaaaatccaaaaaattctgctccagaatttatttttcaacgaacagtttctcctgaaaaagcacctaacaaaccatctttagttactattaattttaaaaatggtgatccttttggaattaatggaaaaaaattatctccaactaaattattaacaaagttaaatgacctagcaggcaaaaatggaattggaagagttgacttagtagagaatagatttttaggtattaaa

SEQ ID NO: 316777 - DNA, 510 bp, Unknown
  Bacterial polypeptide expressing nucleotide sequence isolated from the Sargasso Sea
aatgaaaaaaatagttttagcttactccggcggtttagatacatctataattcttaaatggttacaagaaaactataaagcagaagtgattgcttatacagctgatattggccaaaagatcgataaaaaaaaaatttttagaaacgcaaaaaaattaggtgtaaaaaaaataattattaaaaatcttaaaaatatttttgtaaaagattatgtatttccaatgattagaggtcatgccatttatgaaggaacttatttgctaggtacatctattgccagaccattaattgcaagagatcaaattcaaattgcaaagaaatttaaagcatttgctgtttcacatggtgcaactggaaaaggtaatgatcaagtaagatttgaattaggatatcattactttggtccaaaaataaaagttatagccccatggagaatatggaaattaaaatcaagaacagatttaattaattacgcaaaaaaacatagcattcaaatcccaaaagataaaaa

SEQ ID NO: 316778 - DNA, 1003 bp, Unknown
  Bacterial polypeptide expressing nucleotide sequence isolated from the Sargasso Sea
atgaagggaaaaaaaaaaattgtactagcctattctggtgggttagatacttctataatcttaaaatggttgcaagaaaaatataaagctgaagtaatagcttatacagctgatattggtcaacaaatagataaaaaaaaaataattagaaatgcaaaaaagcttggagttaaaaaaataattataaaagatttaaaaaatatttttgttagagactatatttatccaatgataagaggacatgcgatttatgaaggtaaatatttacttggtacatcaattgctagaccattaattgcaaaagaccaaataagagtagcaaaaaaatatagagctcatgctgtatctcatggttctactggaaaaggtaatgaccagataagatttgagttaggttatcattattttggaccaaaaattaaaattatagccccttggagaatatggaaattaaattctagatcagatttaataaaatatgcaaaaaaaaataaaattaatatacctaaagataaaaaaggagctaccccattttcagttgacgataatttatttcatacctcaactgaaggaaaatttttagagaatccaagaaattctgcaccagaatttatttttcaaagaacattatcaccagaaaaatctcctaataaagcaacatttattacaataggttttaaaaatagtatcccaatatctattaatggaaaaaaattatctccgtcgaaattattatacaaattaaatcatgttgctggaagaaatgggataggaagaatagatttagtagaaaatagatttcttggcataaaatctagaggtgtctatgaaactcctggtggaactttattaattgatgctcatagagctattgagtctgtaactttagataaagaaataatgcataaaaaagataatataatgaatagatatgctgaacttatatataacggatactggtattctagagaaagatttaaattacaaaaaataatagattgaa

SEQ ID NO: 316779 - DNA, 1210 bp, Unknown
  Bacterial polypeptide expressing nucleotide sequence isolated from the Sargasso Sea
atgaatattcataatccttccaaaattgtattagcctattccggaggcttagatacttcagtaatattaaaatggttacaagaaaagtatcagtgtgaagttattactttcactgctgatattggacaaggtgaagaggttgaaccagcaagaaaaaaagctcaaaaccttggcgtaaaaaaaatatatatagaaaacttagaaaatacatttgtcaaagactacgtatttccaatgtttagatgtaatacaacttatgagggaatgtatttattaggaacaagtatagcaagaccattaattgcaaaacggcaaattgaaatagctaaatctgagggagctgatgcagtagcacatggtgctacaggaaaaggaaatgatcaagtgagatttgagctatcttacctttctcaagaccctaacataaaaattatagctccttggagagaatgggagctttcttcaagaacaaagttgattgaatatgcagaaaagcatcaaatcgcaatcgcaaaagataaaaggggcgaggccccttttagcgttgatgcaaatctacttcatgtttcggcagaaggtaaaattcttgaggatccatggatagaaccagaagaatatatatattcaagaacagtcaatccaatggaggctccagataaacctactgagataacaattgagttcagtaaaggtgaccccatagcattaaataagaaaaaattagaaccagcacaaattttaaaaaaattgaatgaatttggtgggaaaaacggtattggaagaattgatattgttgaaaatagatttgttggcatgaaatcacgtggtgtttatgaaactccaggtggaactattttactttacgctcgcagagctattgaatccattactcttgatagagaagaagcccacttaaaagatgaaatcatgcctaagtatgcaaaattaatttataatggattttggttttcacctgaacgtgaaatgatgcaagctttaattgataaggcttccatgagtgttaatggtgttgttagactcaaactttataaaggtaatatcattataacaggtagaaaatcggaaaattccttatatgatgaatctttggtaacttttgaagacagcaccagcaattatgatcaaactgatgcaaaaggatttattaaattaaacgctcttcgattaataaaaaacaaaaaaatttaat

SEQ ID NO: 316780 - DNA, 908 bp, Unknown
  Bacterial polypeptide expressing nucleotide sequence isolated from the Sargasso Sea
aatgaaaaataaaattgttttagcctactcaggtggattggacacaagtgtcatactaaaatggctgcaaactgaatataatgcagatgtcattgcctatgcagcggatcttggtcaaggctcagaattaactgaagcaaaaattaaagcaaaaaaacttggcgcaaagaaaatatatatagaaaatttaaaagaagaatttgttcgagattatgtttttcccatgtttcgttgcaatacaatttatgagggtgagtatcttctaggtacatcaattgctcgaccattaattgccaagagacaaattgaaattgcaaaaaaagaaaatgctaatgctgtatctcatggtgcaacaggtaaaggaaatgatcaggtaagattcgaattttcatactatgccttagatcctaaaataaaagtgattgcaccttggagagagtgggatttatcatctagaacaaaactgttggaatttgctgctaaaaataaaatccctatcatgaaacataataaaaaagagtctccttacagtgtagatgcaaatgttctgcatcgatctgcagagggaaaaattttggaagacccttggaaaagaccacctgaaaatgtatttggtatttcaaaaagtcctcagtcagcccctaacaaagagacattgataactattcaatttaaaaatggtgaccctattgctattaacggaaaaaagctctcaccatttaacctattagaaaagttaaacaaactaggatcaacaaacggaattggaagagtggatattgtagaaaatagatatgtaggaattaaatctcgcggtgtctatgaaacaccaggaggtacaattcttcttaaagcacatcgtgcaatggaaagtattactcttgatagagaagaaggtttttacgaaa

SEQ ID NO: 316781 - DNA, 517 bp, Unknown
  Bacterial polypeptide expressing nucleotide sequence isolated from the Sargasso Sea
atgaaatctagaaaaagaattgttctcgcatactcgggaggactagatacatctataatattaaaatggcttcaagaaaattataacgctgaagtcatctcttatactgcagatattggtcaaaaaattgatagaaaaaaaatttataaaaatgcaaaaaaattaggcgttaaaaaaattattattgaaaaccttaaagatacttttgttaaagattatgtttatccaatgttaagaggtcacccattgtatgagggagtttatttgcttggaacttcaatcgcaagacctttgattgccaaaagacaaatagcaattgctaaaaaatataaagcgtatgcggtttcacatggatctactgggaagggaaatgatcaagttagatttgaattaggatatcattattttggtccaaaaataaaaattattgcaccttggagagaatggaaactaagttctagaactgatttaattaaatatgctaaaaaaaataatattactatacccaaagataaaa

SEQ ID NO: 316782 - DNA, 997 bp, Unknown
  Bacterial polypeptide expressing nucleotide sequence isolated from the Sargasso Sea
aatgaaaaaacaaaagaagattgtactcgcctattcaggtggtttggatacgtctatcattcttaaatggcttcagaaaaattatgatgctgaagtaattgcttacactgctgatgttgggcaggaaatggacagaaaaaaaataataaagaatgcaaaaaaattgggagttaaaaaaatcataattcaagatctaaaaaacgtttttgttaaagattatgtgtatcctatgataagaggtcatgctatttatgagggtgtttatttattaggtacatctattgcaagaccactgattgcaaaagatcaaattagagtagctaaaaaatttaatgcttatgctgtctcacatggttcgacaggaaaaggaaatgatcaagtaagatttgaattgggatatcattactttggtcctaaaattgaaataattgctccttggaggatttggaaattaaaatcaagaacagatctaattaattatgcaaaaaaacatggaatacccattccaaaagataaaaaaggtgcaccacctttctcagttgatgataatttatttcatacttcaacagagggaaaagttttagaaaatcctaaaaattctgcacctgaatttatttttcaaagaacaacttctcctgaaaaggctccaaataaaccaagctttataactattaattacaaaaatggtgaccctataggtttaaatggaaaaaaattatctcctgcaaatgttttggataagcttaatcaattagcggggaaaaatggagtaggaagagtggatttagtcgagaatagatttattggaataaaatcaagaggagtttacgaaactccaggaggaacattattactagttgcacatagagcaattgagtctgtaactctagataaagatacaatgcataaaaaagatgaggttatgccgaggtatgcagagcttgtttataatggttattggtattcaaaggaaagatttaaactacaaaagattatt

SEQ ID NO: 316783 - DNA, 1036 bp, Unknown
  Bacterial polypeptide expressing nucleotide sequence isolated from the Sargasso Sea
atgagtaaaaaaaaaattgttctcgcttattcaggcggtttagacacttccataatacttaaatggctccaagaaaactataatgctgaagtaattgcttataccgcagatattggccaagaactcaataaaaagaaaataattaaaaatgcaaaaaaactaggtgtaaaaaaaatagtcatcaataaccttaaaaatatttttgtaaaagattacgtatttccaatgattagaggtcacgccatttatgaaggtgtttatctattaggtacatcaattgctagacctttaattgcaaaagaccaaattcaagttgcaaaaaaaaataaagcttttgctgtttcccatggatcaacaggcaaaggaaatgatcaagtaagatttgaattgggttatcattattttggtccaaaaataaaagttattgctccttggagaatttggaaattaaaatcaagaacagacttaataaattatgcaagaaagaataatatttcaattccaaaagacaaaaaaggggcgccacccttttcagttgatgataatttatttcatacatcgactgagggtaaagttttagaaaatccaaaaaattcagctccagagtttatttttcaaaggacaatttcacctgagaaagcacctaataaacctacttatttatcaattggatttaaaaatggtgatccaacaaatgtaaatggaaagaaattaactccagagaaaattttagaaaaattaaatcagctaggtggaaaaaatggaattgggagagttgatttagttgaaaatagattcattggaataaaatccagaggagtttatgaaacacccggagggacattgcttttaattgctcatagagcaatagagtctgtaacactagatagagatactatgcataaaaaagactccattatgccaagatatgctgaattaatttacaatggttattggttttctaaagaaagattaaaattacaaaaaattgtggatcaaaaaagaaagaaggttaatggaactgtaaaacttaagc

SEQ ID NO: 316784 - DNA, 1081 bp, Unknown
  Bacterial polypeptide expressing nucleotide sequence isolated from the Sargasso Sea
cttaggtcaagatgaagattatgattttgttgagaaaaaagcaaatcagcaaggtgttaaagaaatattcattgaagatctcaaagaagaatttgtccgtgattatgtattcccaatgtttagagctaatccactttatgaaggctactatcttttaggcacatctattgcgagacctttgattgcaaaaaaacaaattgaaattgcaaataaagtaggtgccgatgctgtttcacatggtgcaacagggaagggtaatgatcaaattagatttgagctgggatattattatcataaacctgacattaaaattatcagtccatggagagaatgggatctttcatctcgaacatctttggttgagtatgctgatcaacacggcattgagattgccaaagataaaagaggtgaacagcctttcagtattgatgaaaatattttgcactcttctgctgagggtaaagtccttgaagatccttgggaagaagctcccgattatgtatacacaagatctgtgtcaccagaaaatgctcctgatactccagaagaaattactattgagttcaaaaatggtgatgcctacgctttgaacggacagagcatgtcgccttttgaattgttgaaagccttgaacgagatgggcgggaaacacggtattggtagggtcgatttggttgaaaacaggtatatcggcatgaaatcaaggggcatatacgagacacctggtgggacaatcctttatcacgcgcacagagccatagaaagcatcacattggacaaagaagcggctcacatgaaagatgaactgtctcctaagtatgcagaattagtctacaacggctactggttttcaccagaaagagaaatgatgcaatccatgattgataaatctcaagcgaaagtagaaggtaaagtgagactaaaactatacaaaggcaataccatgattacaggtcgtgagtcctcaatgagtttatacaatcctaatctagcaacttttgagtcagataatatttattctcaaaaagatgctgaaggcttcatcaagctgaatgctttaagattaagagagaaaaaataa

SEQ ID NO: 316785 - DNA, 1225 bp, Unknown
  Bacterial polypeptide expressing nucleotide sequence isolated from the Sargasso Sea
gatgtctatcgagaacaaaaacactggcgtgaaaaaagtcgttttagcctattcgggtggtctagatacttcggccattattccttggttaaaagaaacctacgacaactgtgaaatcatcgccttttgcgctgacgtaggtcagggtgaagaagagttagtaggtctgactgaaaaggcattagcttctggcgcatctgaatgccatatcgtcgatctgaaagaagaattcgttaaagattacatctatccaaccatggcaacgggtgctatctacgaagggacttacctattaggtacttcaatggcgcgtccaatcattgctaaggcgcaggttgacgtggcacgtaaagtgggtgccgatgccctgtgtcacggttgtactggtaagggtaacgaccaagtgcgtttcgaaggttgctttgcggcattagctcctgatttaaaagtgattgcaccatggcgtgaatggaccatgcagagccgtgaagatctgctggcttacttagccgagcgtaatatcaagacgtcggcttctgccactaagatctacagccgtgatgctaacgcattccacatttcccacgaaggtggcgagctggaagatccatggaacgagccaagcaaaggtgtgtggacgctgactgccgatccagaagatgcgccaaaccaagcagaatacgtgtcactggaagttgaacatggccgtgtgactaaagtaaacggtgaagcattaacaccttacgctgcactgatgaagctgaacgcgatcgctgcaccacatggcgtgggtcgtatcgatatcaccgaaaaccgtttagtgggcatgaagtctcgtggttgctacgaaactccaggcggtactgtgatgtttgccgcgttgcgcgcgattgaagagttagtgctggataaaaccagccgtacttggcgtgagcaagtgggcgcccaaatggcacacttagtctacgacggtcgttggtttacacctctgtgtaagtcgctgctggcggcatctgagtcattagccgagtctgttaacggcgaagttgtggttaaactctacaaaggccacgcgattgccgttaagaagcgttcgccaaacagcttatactctgaagcctttgccaccttcggtgaagaccaagtgtacgaccaaaaacatgctgaaggctttatccgtctgtactcgttagcgagccgcatccgcgcgctcaacgctaagtaa

SEQ ID NO: 316786 - DNA, 1207 bp, Unknown
  Bacterial polypeptide expressing nucleotide sequence isolated from the Sargasso Sea
aatgaaaaaaatagttttagcttactctggtggtttagatacatctattattcttaaatggttgcaagaaaattataaagctgaagtgattgcttatacagctgatattggccaggaaatggataaaaaaaagattattagaaatgcaaaaaaattaggtgttaaaaaaataataattaaaaatcttaaaaatatttttgtaagagattacgtatttccaatgataagaggtcatgcgatttatgagggagtttatttgctaggtacatctattgccagaccattaattgcaaaagatcaaattcaagttgcaaagaaattcaaagcgtttgctgtttcgcatggtgcgacggggaaaggaaatgatcaagtaagatttgaattaggatatcattattttggtcccaaaataaaagttatagctccatggagaatttggaagttaaaatcaagaactgatttaatgaaatatgcaaagaaacatcaaatttcaattccaaaggacaaaaaaggagcaccacctttttcagtagatgacaatctatttcatacatcaactgaaggtaaagttttagaaaatccaaaaaattcagctcctgaatttatatttcaaagaacaacttcgcctgaaaaagcacctaataaaccttcatacgttacaattggatttaaaaacggtgatccaactactattaatgggaagaagttaactccagaaaaactattagaaaaattaaaccagctcggtggaaaaaatggagttggaagagttgatctagttgaaaatagatttatcgggattaaatcaagaggggtttatgaaactcctggaggaacattgcttttaattgctcatagagcaatggagtctgtaacactagataaagaaactatgcataaaaaagattcaataatgccaagatatgcagaattaatttacaatggttattggttttcaaaagaaagattcaaattacaaaaaattgtggatctaaaaagaaacaaggtaaatggaagtgttaaacttaaactttacaaagggaatattacaattcaatcgagaattactaaaagtagtgcttactcaatgagaaaagtttcttttgaagaaataaaacttttaataaacccaatgttgaaagatttattagtttccacaaaaaaaaattataataaagaaatatggattttgaagcctcaagagcaa

SEQ ID NO: 316787 - DNA, 1195 bp, Unknown
  Bacterial polypeptide expressing nucleotide sequence isolated from the Sargasso Sea
aatggataaaataaataaagtagttcttgcatactcaggtggtttagatacatcagtcattttgaggtggctaaaagaaacctatcaatgtgaagtagcgacttttacagcaaatctaggtcaagacgaagactatgatctagttaaagtaaaagcagaaaaacaaggaaccacagaaatatttattgaagatctaaaagatgagtttgtgagtgactatgtttttccaatgtttagggccaatcctctctacgaaggctattatttgcttgggacagcgattgctcgaccgttgattgcaaaaaaacaaatagaaattgcaaatcagattaatgctgatgcagtatcgcatggtgcaactggaaagggaaatgatcaaataagatttgagctaggctactattatcataagcctgatataaaaataatcagtccttggagagaatgggatttatcatcaagaacgtcacttgttgaatacgctgataagcatggaattgaaatagcaaaggataaaagaggggaacaaccatttagcattgatgaaaatattttacactcctctgctgaaggaaaggttcttgaagatccatgggttgaagcgcctgattatgtttataccagaagtgtttcacctgaagaggcacctgataaatcagaagaaattataattgaatttaagaaaggtgacgcctgtgcgcttaacggaaaagctttaacaccatttgaaatattaaaatgtctaaatgagcttggtggaaaacatggaattggacgagttgatcttgttgaaaatagatatattggaatgaaatctagaggaatttatgaaactcctggtggaaccattctatatcacgcacacagagccattgagagtatcacgctcgataaagaagctgcacatatgaaagacgagttagcacctaaatatgccgaacttatctataacggctattggttctctcctgaaagagagatgatgcaatcaatgattgataaatcacaagaaaaagtagagggtaaagtaagacttaaactctttaagggtaatacaatgattacaggaagagagtcatctttgagcctgtacaatccaaatcttgcaacatttgagtcagatcaagtttattctcaaaaagatgctgaaggctttataaaattaaacgctcttagattaagagaaaaaaaataa

SEQ ID NO: 316788 - DNA, 448 bp, Unknown
  Bacterial polypeptide expressing nucleotide sequence isolated from the Sargasso Sea
tgttggacgtatcgacattgttgaaaaccgccttgttggtatgaagtcacgtggctgttatgaaacgccaggaggcaccgtactgcttaaagcgtataaagccctagaaactatggtgctagataaggctgcgcttaaataccgtgagcaaattggccttgagttctctcacgtgatgtacgacggccgttggttcaccgcccttaacgatgcgctacttgctggtgctgcttcttttgcgaagaaagtaacaggcgatatcgtggttaagctatacaaaggccaagctacggtaacacagcgtcgttcacctaatagtctttactctgaagactttgccacctttggtgctgatgatgtttacgaccagaagcacgctgaaggcttcatccgcctgttcagtctttcaagtcgtattgaagcactgaaaaaacaaggtgaacaataa

SEQ ID NO: 316789 - DNA, 1225 bp, Unknown
  Bacterial polypeptide expressing nucleotide sequence isolated from the Sargasso Sea
tatgactgataagaaaattaataaaattgttttagcatattcaggtggattagatactactgtcatactgcactggttaaaagatacctatgatgcagaggttatagcttttacagctgacatcggacaggatcatgaccctgaacaagttgaggaaagagcaagtgctattggtgcctcaaagatactaatagaagatttgaaagaagaatttacaaagaattatatttttccaatgttcaaggcaaacactttgtacgaaggtgagtatcttttaggaacatcaattgcaaggccattaattagcaaaaggttgatagaaattgcagaagaagagggtgcagacgcaatagctcatggtgcaactggcaaaggaaatgatcagattagatttgaaattggatcttactcattaaatcctgatattcaagtcatagctccctggagaacctgggaatattcttcaagagctgacttggttgattattgcaaaaaacatcagatagaaattgatgcaagtcctgatgatcctttatattcaactgatgagaatttactccatacgtcttatgaaggagagatattagaagacccatcagtaaaagcaccagaggaaatttggcaaagaacgtcttcattaaaaaatgctccagatgaggaagagataatctcaattgagtttaaatctggtgagcctatatcaatcaataatgttcataattcttcatctgaaatactgtcaaaattaaatcaattagctggtaaacatggtattggcagactagatcttgttgaaaatagatatacgggcatgaaatcaagaggatgttatgaaactccaggaggaactattcttctgagagctcatcgtgcaatagaatctataacactagatgctgaagctggacacttaaaggatggattaatgccaaagtatgcccaacttatctatgatggttattggtggagtccagaaagagaagctcttcaagctttgattgataagactcaagaattcgtttcaggtagtgtcaaaatgtcattgtataaaggcaatataaccattttaggtagatcttccgatctcagcctttatgattcaaaaattgtaacttttgaagacgatgaaaatacttacaatcaagaagatgcaactgggttcatcaagatcaattctctacgattgaaacaggtagcaagaagaaagaagaaagaagaaagttaa

SEQ ID NO: 316790 - DNA, 1165 bp, Unknown
  Bacterial polypeptide expressing nucleotide sequence isolated from the Sargasso Sea
gtctgcattccctatctcaaacaggagtggggcgtggaggaggtgatcacctttgctgctgacttgggtcaaggtgatgagcttgagccgattcgcctgaaggccctggatgccggcgctagccagtcgctggtgggtgatctgatcgaaccgttcattacggagttcgcgtttccggctatccgtgccaacgctctctatgaggggcgttatcccctcagtaccgccttggcacggcccttgattgcccggcgcttggtggagattgcccgtgaggtgggtgctgatgccgtggcccatggctgcaccggtaagggcaatgaccaggtgcgttttgatgtggccattggtgctttggcacctgatctcaaagtgctgacgccagcccgtgagtggggcatgagccgtgaggagacgattgcctatggcgagcggtatggcttgccatcaccggtgagtaagcgctccccgtactcgatcgatctcaaccttttgggccgttcgattgaggctggtcccctggaagatccagatgttgagccgcctgaagaggtctttgccatgacctgttcaatcgaggcggcaccggctcagccggaggtggtgaccatcggttttgaggcaggcctgccggtgagcatcaacggtcagcggcttgatccggtcagcttgatccgtgaagccaatcgccttgccggtagccatggctttggccgcctcgacatgattgaaaaccgtgtggtgggcatcaagagccgcgagatttacgaaactcctgggctgttgctgctgatccaggctcaccaggaattggaaagcctgaccctggctgccgatgtgctgcgcaccaagcgtcagctggaaatgcagtgggctgatctcgtttatcagggcctgtggtttggaccgttgaaggatgcgctcgatggtttcatcgagcgcactcagactactgttaatggcaacgtgaggatcaagttgcaccgcggctcagccaccgttgtggggcgttccagcagtgacagcctttacgagccagatatggcgacttacggagcggaagatcaatttgatcaccgtgccgcttcaggcttcatttacgtctggggtcttcccacgcggctgtgggccgcggccaagcgtcggcgcggccaccacggatgag

SEQ ID NO: 316791 - DNA, 1186 bp, Unknown
  Bacterial polypeptide expressing nucleotide sequence isolated from the Sargasso Sea
gatgaaatcaaataaaagaattgttttagcttattcgggcggcttagatacatctataattcttaaatggctccaagaaaattataatgcagaggtaatttgttataccgctgatattggtcaaaaaattgacagaaaaaaaataattcaaaatgcaaaaaaacttggtgtcaaaaaaattgtaattaaagatttaaaagacatatttgtaaaagaatatgtttatccaatgattagaggtcatgctatttatgagggtgtatatttattaggtacatcaattgctagacctttgatagcaaaagaccagatcagagttgctaaaaaatttaaagcttatgctgtatctcatggatcaactggtaaaggaaatgatcaggtaagatttgaacttgggtatcattactttggtccaaaaataaaaattatagcaccttggagaatttggaaattaaaatctagaactgacttaataagatatgcaaataaacatgggataccaattccaaaagataaaaaaggtgcacctcctttttcagttgatgataatttgtttcatacttcaactgaaggtaaattattagaaaatccaaaaaactctgcgccagaatttatttttcaaagaacaacttcacctgaaagagcacccaacaagcctacatttataagaatcaattacaggaacggggatccaattggtttaaatggaaaaaaattatctccagcaaaacttttgaataaactaaatcaattagctggaaaaaatggaattggcagagtggatttagttgaaaatagatttattggaataaaatctagaggagtttatgaaacacctggtggaactttattattaacagctcacagagcaattgagtctgtaactctagataaagatacgatgcataaaaaagatgatgttatgccaagatatgcagaacttatttacaatggttattggtattctaaggaaagatttaaacttcaaaaaatagtcgatctaagaagaaataaagtaaatggatcagttaaacttaaactctataagggaaatattacgattcaatcaagacaaacatccagtaatgcctattctatgaaaaaagtatctttcgaggaaaataaaactttcaataagtcaaatgttgaaagatttattaattttcataagaaaaaattaagataa

SEQ ID NO: 316792 - DNA, 1177 bp, Unknown
  Bacterial polypeptide expressing nucleotide sequence isolated from the Sargasso Sea
atgaaacaaaaatctatccttgcattttcaggtggacttgatacatcagtagttgtaaagtatatgcaagatatgcatgacatggatgtagtcacagtaacagtcgacgtaggtcaaggagatgataataataaaattgcaagaaaagcaaaaaagcttggcgtaaaaaaacactacaacattgatgcaaaaaaggagtttgttacagattacatttttccagcaatcaaagctaatgcactatatcaaaagaaatattgtcttgctacagcacttgcaaggccattaattgcacataaagtactagagattgcaaaaaaggaaaaggtttcatcattagcacatggttgttcaggaaaaggaaatgatcaagttcgctttgataatacattaagggcaggttcagatttaccaatcattgcaccaattcgtgatatgaatttggatcgtgaaacagaattaaaatttgcaaataaacatggaattgagattgatactgttgcaaaaaaatttagtattgatcagaatttgtggggaagagcaattgaaggaggcgttttagagaatccatttaatgagccaccagacgacgcatttatttggataaagacaaaaaatttacctgaaaaacctgcctatttgaaaattaagtttactaaaggagttccaactgaagttgatggtaaaaaattaccaccggtaaaattaatcgagtatatcaataagaaagcaggttcccacggagtaggaatagttgatcatatagaagaccgagtagttggtataaagtcacgtgaagtgtacgaaaccccagctgcattatgtttgattgaagcacactcagatcttgaaaagatggtgcacacaaaacacgaaactaaattcaagactttggtagatgatgaatgggcatggatggtatattctggattatgggacgacccattaagagaagaattagatcaattcattgaacaagcccagaaacgtgtaacaggtactgttaagctaaaactttacaaaggaaatgtcagagtagttggaagagaatcaaaatattcactgtacagtcatgacattgccacatatggcaaagattcgacgtttgatcagaaattggcaaagggatttgtagaattatggggaatgcagtcaacagaagctaataaattctaga

SEQ ID NO: 316793 - DNA, 1183 bp, Unknown
  Bacterial polypeptide expressing nucleotide sequence isolated from the Sargasso Sea
atgaaatcaaaaaagaaaatagtgttagcctattctggggggctagatacctctataattttaaaatggcttcaagaaaattatgatgcggaagttatttgttataccgcagatgttggccaagaaattaacagaaaaaaaattatcaaaaatgcaaaaaaatttggtgttaaaaatattattattaaagatttaaaagatatatttgtaaaagattatgtttatccaatgattagaggccacgcaatttatgaaggtgtttatttacttggaacatcaattgcaagaccactaatcgcaaaagaccaaataaaagttgcaaaaaaatataaagcttatgctgttgcacatggagcaactggaaaaggtaatgaccaagttagatttgagttaggttatcattattttggaccaaaaataaaaattattgcgccttggagaatttggaaattaaaatcaagaacagacctaattaattatgcgaaaaaacatgggatagctatccctaaagataaaaaaggagctcctccattttcagttgatgacaatctgtttcacacatcgactgagggaaaagttttagaaaacccaaaaaattctgcgcctgaatttatatttcaaagaactacttcaccagaaaaagcacctaatagaccaagctatgtaactatcaattttaaaaatggtgacccactcggaataaatgggaaaaaattatctgcatcaaaactattagaaaaacttaatcagcttgcaggtaaaaatggaattggaagagttgatttagttgagaatagatttattggaattaagtctagaggtgtatatgaaacacctggaggaacattattaattcatgcacatagagcaattgaatctgtaactcttgataaagatacgatgcataaaaaagatcaagtaatgccaagatatgcagaacttatctataatggtttttggtactctaaagaaagatttaaacttcaaaaaattgtagatcttaataaaaataaagttaatgggtcagttaaactgaaactttataaaggaaatattatcattgagtcgagacaaactaaaagttcggcttactcaatgaaaaaagtgtcttttgaagaaaacaaaacatttaacaaatcaaatgttgaaagattcataaattttcacaagaaaaaactgtaat

SEQ ID NO: 316794 - DNA, 1052 bp, Unknown
  Bacterial polypeptide expressing nucleotide sequence isolated from the Sargasso Sea
aatgaaatcaaaaaagaaaattgttctagcttattctggagggctcgatacttctataattttaaaatggcttcaagaaaattatgatgcagatgtaatttgttatacagcagatgttggacaagaaattgatagaaaaaaaattattactaatgcaaaaaaatttggtgttaaaaatataattattaaagatttaaaagatatttttgttaaggattatgtttatcccatgatcagaggacacgcgatctatgagggtgtttatttattagggacatcaatagcaagacctcttattgcaaaagatcaaataagagtagctaaaaaatttaaagcctatgcagtttcacatggagcaactggtaaaggcaatgaccaagttagatttgaattaggctatcattattttggtcctaaaattaaaattatagctccgtggagaatttggaaactaaaatctagaacagacttaattaattatgcaaaaaaacatagcatagctattcctaaagataaaaaaggtgcacctcctttttcagtggatgataatttatttcatacatcaactgaaggtaaggttttagaaaatccaaaaaattctgctccagaatttatttttcaacgaacagtttctcctgaaaaagcacctaacaaaccatcttttgttactattaattttaaaaatggtgatccttttggaattaatggaaaaaaattatctccagctaaattattaacaaagttaaatgatctagcaggcaaaaatggaattggaagagttgacttagtagagaatagatttttaggtattaaatctagaggagtgtatgaaacacctggtgggactcttttaataaatgctcatagagcaattgagtctgttaccttagacaaagaaactatgcataaaaaagatcagataatgtctagatatgcagagttaatttacaatggttattggtattcaaaagaaagatttaaacttcaaaaaattgtagatttaaaaagaagcaaagttaatggctcagttaaacttaaattgtataaaggaa

SEQ ID NO: 316795 - DNA, 676 bp, Unknown
  Bacterial polypeptide expressing nucleotide sequence isolated from the Sargasso Sea
gatgccaaagaaaattgttttagcttattcaggaggtctagatacaagtgttatccttaaatggcttcaagttaaatacaaatgtcctgtagttacatttactgctgacttaggacagggcgaggaacttgagccagttaaaggtaaagcacaaaaattaggggtggaagaaacttttatagaagatttaagggaagagtttgtaaaagattatgtttttccaatgtttcgtgcaaatgccctctatgaaggaacatattttttaggaaccgcaatagcaagaccactaatagctaaaaaacaaattgaaattgcaaaagaggttggggcagatacagttgcacatggtgctactggcaagggcaatgatcaagttcgatttgaattggggtattatgcaaagaattcaaaaattaaagtaatttcaccttggagagaatgggaacttaattcacgaaatgacctaatcaattttgcagaaaaatatcaaataaatatacctaaagataaacgtggagaagctccgttcagcactgatgcgaatttacttcatacttcttcagaaggtaaaattcttgaagatccctggatagatgctccagattttatatattcaaggactaaatctattaacgacgcaaacccaacaccagatgaaataatcatatcattgagc

SEQ ID NO: 316796 - DNA, 838 bp, Unknown
  Bacterial polypeptide expressing nucleotide sequence isolated from the Sargasso Sea
catggatcatacaggaaaaggaaatgaccaagtaagatttgagcttggttaccattactttggaccaaaaattaaaattatagccccttggagaatttggaaactcaaatctagaactgatctaattaactatgcaaaaaaacatggaataacaattccaaaagacaaaaaaggtgccccaccattttcggtggatgataatttatttcatacatcaactgagggaaaaattttagaaaatccaaaaaaatcagcaccagaatttatttttcaaagaacatgttctcccgaaaaagcgcctaacagtgcatcttttgtaactataggatttaaaaaaggagatccagtagctataaatggtaaaatattaactccctcaaaacttttagaaaaattaaattatattgctggtaaaaatgggattggcagagttgaccttgttgaaaatagatttattggaataaaatcgagaggtgtttatgaaacacctggtggaactttattaatcaatgcacatagagctattgagtctgtaacattagacaaagaaacaatgcataaaaaagatgagattatgcctaagtacgcggagcttatatataatggttattggtattctaaaacaagatttaaacttcaaaaaattgttgatcgaaaaagaaataaagtaaatggatctgttaaacttaaactatataaaggcaatattacaattgtatcaagacagactaaaagtattgcttattcgatgaaaaaagtatcttttgaagaaaacaaaacatttaacaaatcaaacgttgaaagatttattaattttcataaaaaaaaattacaatag

SEQ ID NO: 316797 - DNA, 1177 bp, Unknown
  Bacterial polypeptide expressing nucleotide sequence isolated from the Sargasso Sea
atgaaacaaaaatcaatacttgcattttctggtggacttgatacatcagtagttgtcaaatacatgcaagacatgcacgatatggatgtaattacggtaacagttgacgtaggtcagggagatgataataacaaaattgcaaaaaaagcaaaaaaacttggagtaaaaaaacattacaacattgatgcaaagaaagaatttgttacagattatatttttccagcaatcaaagctaacgcactttatcaaaagaaatattgtcttgcaacagcacttgcaagaccattaattgcacacaaagtacttgagattgcaaaaaaagaaaaagtttcatctttggcacatggttgttctgggaaaggtaatgaccaagtccgttttgataatacattaaggtctggttcaaacctgccaataatagcacctattcgagatatgaatttagatcgtgaaacagaattaaaatttgcaaataaacatggaatagagattgatacagttgcaaaaaaattcagtattgatcaaaatttatggggaagggcaattgaaggaggagtattagaaaatccatttaatgaacctccagacgatgcattcatttggattaagacaaaaaatttgcccgaaaaaccttcctatttgaaaattaaatttgttaaaggagtgccaacagaagttgatggtaaaaaactacctcctgtaaaattaattgaatatatcaataaaaaagcaggaaataatggtgttggaattgttgatcatattgaagatagggtggttggaataaaatcacgagaagtgtatgagactccagctgcaatttgtctgatagaagcacattccgatcttgaaaaaatggtacatacaaaacatgaaacaaagttcaaaacattagttgatgacgaatgggcatggatggtttattcgggtttgtgggatgacccattaagaaaagaattagatcaatttatcgaacaagctcaaaaacgtgttactggtactgtaaagctaaaacttcacaaaggaaatgtcagggtagtcggaagagaatcaaaatattcactttatagtcacgacatagccacttatggaaaagattccacgtttgatcagaaattagccaaaggtttcgttgaattgtggggaatgcagtcaacagaagctaataaattctaga

SEQ ID NO: 316798 - DNA, 1213 bp, Unknown
  Bacterial polypeptide expressing nucleotide sequence isolated from the Sargasso Sea
gatgcaaaacgttaaaaaaatcgtgctggcctattcaggcgggcttgatacatcagccatcattccatggcttaaagaaaactatggctgtgaagttgtcgcgtttgcagcagatgtgggtcaaggtgatgaagaactagaagggcttcatgaaaaagctatcgcatctggcgcaagcgagtgccacattgttgatttgaaagaagagttcgtaagcgaatatatcttcccaactattactacaggtgcggtttacgaaggtgaatacctgttgggtacgtcaatggcacgcccggtcatcgccaaagcgcaagtagagattgcgcgtaaagtaggagccgacgcactatgccatggctgtacaggtaaaggtaacgaccaggtacgctttgaaagtacctttgctgccctagccccagaccttacggtaatcgcgccatggcgtgaatgggacatggtaagccgtgaagatctattggcttatctagctgagcgcaatattccaaccacggcgtcagcaaccaaaatttacagccgcgatgcaaacgcatggcacatttcacacgaaggtggcgagcttgaagatccatggcaagagcctaccaagcaagtgtggaccatgaccgttgatcctgaagatgcaccagacacacctgagcgcgtaaccctgtcttttgacgaaggtaaactgactcatgttgatggtgaggcactctcgccatatcaagcgctagttaaacttaatactgttgctgcggcgcatggtgttggacgtatcgacattgttgagaaccgccttgtaggtatgaagtcacgcggctgttatgaaacaccaggaggcaccgtactgcttaaagcttataaagccctagaaactatggtgctagataaagctgcgcttaaataccgtgagcagattggtcttgagttctcacacgtgatgtacgacggccgttggttcactgcccttaacgatgcactgcttgctggcgctgcgtcttttgctaagaaagtaacaggcgatatcgtggttaagctttacaaaggccaagctacggtaacccagcgtcaatcgccaaatagcctttactctgaagactttgctacctttggtgcagacgatgtttacgaccagaagcacgctgaaggctttatccgcctgttcagcctttcaagtcgtatcgaagcattgaaaaaacaaggtgaacaataa

SEQ ID NO: 316799 - DNA, 706 bp, Unknown
  Bacterial polypeptide expressing nucleotide sequence isolated from the Sargasso Sea
tatgaaatcaaaaaagaaaattgttctagcttattctggagggctcgatacctctataattttaaaatggcttcaagaaaattatgatgcagatgtaatttgttatacagcagatgtgggccaaaaaattgatagaaaaaaaattataactaatgcaaaaaaatttggtgttaaaaatataattattaaagatttaaaagatatttttgttaaagactacgtttaccctatgatcaggggacacgcgatctatgagggtgtttatttattagggacttcgatagcaaggcctcttattgcaaaagatcaaataagagtagctaaaaaatttaaggcctatgcagtttcgcatggagcaactggtaagggtaatgatcaagttagatttgaattaggctatcattattttgaccctaaaattgcaatcatagctccgtggagaatttggaaactaaaatctagaacagatttaataaattatgcaaaaaaacatggcatagcgatacctaaagataaaaaaggtgcacctcctttttcagtggatgacaatttattccatacatcaactgaaggtaaggttttagaaaatccaaaaaattctgcacccgaatttatttttcagagaacagtttctccagaaaaggcaccaaacaaaccctcgtttgttactatcaattttaaaaatggtgaatccttttggaattaa

SEQ ID NO: 316800 - DNA, 838 bp, Unknown
  Bacterial polypeptide expressing nucleotide sequence isolated from the Sargasso Sea
aatgccaacaaaaattgtattagcttattcaggtggattagacacaagtgtaattctcaagtggcttcaaaatagatatgaatgcccggtagttactttcacagctgatataggtcaaggagatgagctttcaccaattgaagctaaagcaaaaaatctaggcgtagaagaaatattcattgaagatttacaagaagaattcgtcagggattatgtttttcccatgtttagagctaacacactctatgaaggaacttatttactaggcactgctattgcaagaccgttaatagctaaaagacaaattgaaattgctaaaattgttggagcagatgctgtagctcatggtgctacggggaaaggtaatgatcaagtcagatttgaacttggatattatgcaaataatcctaaaattgaagttatagccccttggcgagattgggaatttgaaagcagaaatgacttaattgattatgcagaaaaaaatcaaatcacagttcctaaagataaaatgggcgaacccccttttagtactgacgccaatcttttacatacatcttctgagggtaagttattagaaaatccttgggttgagccacccgaatatgtattttctcgaactaaatcaatagaagatgcacttgatcaaccagaaatgataacaattgaatttaaaaatggtgatcctgtttcaattaatgaagacaatctgaaacctcatgagattttagcaaagttaaattctgtagcaggtaaccatggtgttggaagaatagatattgttgaaaatagatttgttggaatgaaatctagggggatttatgaaacgccaggcgga

SEQ ID NO: 316801 - DNA, 1027 bp, Unknown
  Bacterial polypeptide expressing nucleotide sequence isolated from the Sargasso Sea
atgaaatcaaataaaaggattgttcttgcttattcaggagggctagatacttcaattattttaaaatggcttcaagaaaactataaagcagaagttattgcttacacggctgatattggtcaagaaattgataaaaaaaaaataattaaaaatgcaaaaagacttggagtaaaaaaaataataataaaaaatttaaaagatacttttgtaaaagattatgtttatccaatgataagaggacatgcaatttatgaaggtgtttatttattaggaacttctattgcaagaccattaattgctaaagatcaaattagaattgcaaaaaaatttaaagcttacgcagtttctcacggttcaacaggtaaaggaaacgatcaggtaagatttgaacttggctaccattactttggaccaaaaataaaaataatagctccttggagaatttggaaacttaaatctagagctgatctaattaattatgcgaaaaaacatagaatagtaattccaaaagataaaaaaggtgcgccaccattttcagtggatgacaatttatttcacacatctactgagggtaaagttttagaaaatccaaaaaattcagccccagaatttattttccaaagaacaatttcgcctgaagaggcaccaaaaaaaccttcttttgtaactataggatttaaaaatagtgatcctataactattaatggtaaaaaattatccccttcaaaacttttagaaatattaaattctattgcaggcaaaaatggaatcggcagagttgatcttgttgaaaatagatttattggaataaaatcaagaggagtttatgaaactcctgggggaactttattaattaatgctcatagagcaattgaatctgtaacgttagataaagaaactatgcataaaaaagatgaaataatgcctaaatatgcagaactcatttacaatggttattggtattcaaaagcaagatttaagcttcaaaaaatcgttgataaaaaaagaaataaagtaaatggatctg

SEQ ID NO: 316802 - DNA, 805 bp, Unknown
  Bacterial polypeptide expressing nucleotide sequence isolated from the Sargasso Sea
atgagtgacaagaaaataaaaaaaatagttttagcttattccggtggtttagatactactgtgatacttcactggttgaaaaatacttatgatgcagaagtgattgcttttacagctgacattggacaggaccatgatccggagttagttaaaagtagagcaaattctataggtgcatccaagatcataattgaggatctaaaagaagactttaccaaagactatatttttcaaatgctgaaggcaaatacactttatgaaggtgaatatttactcggaacatctatagcacgacctttaataagtaaacgacttgttgaaatagctgaggaagaaggtgcagatgcaattgcacacggtgcaactggtaaaggaaatgaccagataagattcgaaattggttcttatagtttaaaccccgaaatagaagttatcgctccctggaggacttgggattattcatctagggcagatttagtcgaatattgtaagcaacatcaaatagagatcgagtctagtcctgacgagccactttattctacagatgaaaacttgcttcacacttcatatgagggagaaattttagaagatccatctgttgaagctcctgaagagatatggcaaagaacatcatctttggaagatgcacctgacaaagcggagagaatatctatctcttttgaacagggtctcgctatttccatcaacaaggaaaaactaagctcttctgaaattctttctcgtttaaatgaattggctggtctacacggaatagggagactggatttagttgaaataggttcac

SEQ ID NO: 316803 - DNA, 1174 bp, Unknown
  Bacterial polypeptide expressing nucleotide sequence isolated from the Sargasso Sea
atgaaaaaaatagttctagcttattctggaggtttggacacctctataatactaaagtggttgcaagaaaattatcaagcagaagttattgcttacacatccgatattggccaagaattagataagaaaaaaatcattcgaaacgctaaaaaacttggagtaaaaaaaataattatcaatgatttaaaaaatacatttgtaaaagattatatttttccaatgattagagggcatgcaatatatgaaggtgtttatttattaggtacatctattgcaagaccattaattgctaaagatcaaattaaagttgcaaaaaaatataaagcatacgctgtatcacatggatcaacaggaaaggggaatgatcaagttcgatttgaattaggttatcattactttggaccaaaaataaaagttattgcaccttggagaatttggaaattaaaatcaagaactgatttaattaattatgcaaaaaaacatggaataccaattccaaaagacaagaaaggagcgccacctttttcagtagatgataatttattccatacttcaactgaaggtaaagttttagaaaatccaaaaaactctgctcctgaatttatatttcaaagaaccaactctcctgaagaagctccgaataaaccaacatatgtaacaataaattttaaaaatagtgatccaattggattaaatggaaaaaaactaaaacctgcaaaacttctagaaaaattaaatcaattggctggaaaaaatggaattggaagagtggatttagttgaaaatagatttattggaataaaatcaagaggagtttatgaaacaccgggtggaactgttttattaaatgctcatcgagcgattgaatctgtaactttagataaagaaactatgcataaaaaagatatggtaatgcctagatatgcagagttaatttataatggatattggtattctaaagaaagaaataaacttcaaaaaattgttgacctaaaaagaaataaagtaaatgggtcagttaaaattaaactttataaaggtaatattactattcaatctcgagttacaaaaagtggggcttattcaatgaaaaaggtttcatttgaggaaaataaaacttttaataaatctaatgttgaaagatttattaactttcacaaaaataagctatgat

SEQ ID NO: 316804 - DNA, 727 bp, Unknown
  Bacterial polypeptide expressing nucleotide sequence isolated from the Sargasso Sea
agggcttgatttaagagaagtaggtgataacaatagagtctattcaatagatagaaatttatggggattggcaatgaagggtgaagatttagaagatacatgggtggaacctcctgaagatgcattttcttggacctcaaatgcagaagatgctccagacactcctgaggttattgaaataggttttgataaaggcataccaatctctttgaatggagaaaaaactgatggagttactcttatagaaaaactaaatatcacggcaggaaagcatggtatagggagggttgatcatcttgaaaatagattagtaggaatcaagagtagagaagtttatgaaactcctgctgcaattattttgtataatgcaatatcagcattagagacagctacactatcaagagagcaacaaaggataaagtctaatttatcgaaaatatattcagatcttgtgtatgatggaagatggtttactttgctaagggaaaatatagaatcatttatgaatagtgctcaaaaattttcttctggagaagtaaaactaaaattatacaaagggaatgtaactgttataggaagaaaatctaaatattctctttatgattatgatatgtcaacgtattcaacaactgatagttttaatcatcaatctgcagaaggatttattgatatctattcattaccatcaagaattcaagcaaaaaaacaaaaatttaatgacttataa

SEQ ID NO: 316805 - DNA, 442 bp, Unknown
  Bacterial polypeptide expressing nucleotide sequence isolated from the Sargasso Sea
tgacatagtagaaaatcgtttcgtcggcatgaagtcaaggggttgttacgagacccctggagggacaattcttcttaaagctcatagagcgatggaatctctaactttggatcgagaagttgggcacctaaaggacgaattaatgcctaggtacgcgaaaatgatttataacgggtattggtggtcgcccgaacgaaaagtacttcaggcgttgatcgatgaatctcagaagaatgttactggtacagttaatttgaagctctataagggacaggttcaaatcgtcggaagaagttctgaaaaggacagtctgtatgacgccgaagtggttacttttgaagacgaccgcggggcctatgatcagaaagattcggagggctttatccgtttaaatggtcttaggttgaggataggagctaacaaaggtcgcgactattcttga

SEQ ID NO: 316806 - DNA, 847 bp, Unknown
  Bacterial polypeptide expressing nucleotide sequence isolated from the Sargasso Sea
gatgcagcaggtaaaaaaaattgtactagcttattctggtggggtagatactagcgtttgtattccatatttaaagaatgaatatggaatttcagaagtggttacttttgtagcagatcttggacaaggcgaggatttagaacttataaggcaaaaagccttaaattctggtgcatctaaatcaatcgttggtaatttagtcaatagttttgttgagagatacgcttttccagccattagagcaaacgcattatatttagataaatatcctttatctactgctcttgctaggcctttaattgctgaaaatcttgtgaatattgccagagagattaatgcagatgcagtagctcatggatgtactggtaaagggaatgatcaagttaggtttgatttagcaataaatgctttaggccctgatttaaaaataattactcctgcaagggagtggaatatgagtagagaagaggccatagtatatggagaaaaatttggcattcctgcaccagtatcaaaaaaatcaccatattcaatagacgttaacttacttggtaggagtattgaagcaggcatattagaagacccaatgcaagaagcacctgaagatatattttcgatgacttcatcaattgataattcacctgattcctatcaagatatagaaattgtttttaaaaatgggtttccagttggaattaatgatgaatttttaactccagtagagattattcaaaaaactaatgatcttgcaggtaatcatggttttggaagaatagatatgattgaagatcgagtagtaggaattaaaagtagagagatttacgaaacacctggcctcttactttta

SEQ ID NO: 316807 - DNA, 1006 bp, Unknown
  Bacterial polypeptide expressing nucleotide sequence isolated from the Sargasso Sea
catgaaaaaggaaaaattagttttagcttattcaggcggtcttgatacctcggtgatcttacattggctgaataatcaaggatatgaagtaattgctctttgtcttaatttaggacaaaaagtagaagatttggataaaatccttgaaaaaggcgaaaaagctggtgctacaaaagttatagtagaaaatgtggaagacgagtttgttgaggattatgtgcttaaagctattaactggaatgcattatatgaaggaacttatctgcttggaacttcccttgctcgtccactgattgctaaaaaacagattgaaattgcagaaaaggaaggtgcttctttggtatcccatggtgctacaggcaaaggaaatgaccaggttaggtttgagttaagttattatgcacttaaacctgatattcgagtgattgctccttggaaaattaccgagttttaccaaaaatatcctggacgtactgaattactgaaatatgcaaaaaaatttggtatccctgttaaggctaccaaagaaagtccatggagttcggatgaaaaccttatgcatatcagttttgaatcgggaatgctggaagatccctggcaagctccgctacaagaaatgtttgaattatcaaattctccacaacaagcaccttctgatcctcaagaaattctaattgaatttaaaaatgggaacccaactgcgattgacggtaaaaataattccccagcaaagttgctgagacagctcaatgaagtaggtggaaaacatggtataggtagagtagatatggttgaatcacgatttgtaggcatgaaaaatcgtggagtttatgaaactcctggcggaacgatattgcatatcgcacatagggcaattgaatcaattacattaaaccgtggagtgatcaatttaaaagattctctaatgccacgattcgcacaattaacatacgacggtttctggttttcacctgaaatggaaattttactcgaatatggtgaaaaa

SEQ ID NO: 316808 - DNA, 729 bp, Unknown
  Bacterial polypeptide expressing nucleotide sequence isolated from the Sargasso Sea
cactagttgaatacgctgataagcacggtattgaaatatcaaaagataaaagaggggaacaaccatttagcattgatgaaaatatattgcactcttctgctgaaggaaaagttcttgaagatccgtgggttgaagcacctgattatgtttacaccagaactgtttcgcccgaagatgcgcctgatgatgcagaagaaataacaattgaatttaagaaaggtgacgcctgtgcgcttaacggaaaagctttaacaccttttgtaatattaaaatctctaaataagctcggtggaaaacatggaattggacgagttgatcttgttgaaaatagatacattggaatgaaatctagaggaatttacgaaactcccggtggaacaattctatatcacgcacacagagccattgagagcataacgctcgataaagaagctgcgcatatgaaggacgagttagcgcctaaatatgccgagctagtttataacggttattggttctcacctgaaagagagatgatgcaatcaatgattgataaatctcaagaaaaagtggagggcaaagtaaggcttaaactctataaaggtaatgcaatgattacaggaagagaatcgtctttaagcctatacaatccaaatcttgcaacatttgaatcagatcaagtttattctcaaaaagatgctgaaggatttataaaattaaacgctttaagattaagggaaaaaaagtaat

SEQ ID NO: 316809 - DNA, 610 bp, Unknown
  Bacterial polypeptide expressing nucleotide sequence isolated from the Sargasso Sea
agatccatgggttgaagcacctgattatgtttacaccagaagtgtttcacctgaagaggcacctgataatgcagaagaaataactattgaatttaagaaaggtgatgcctgtggacttaacggaaaggctttaacgccatttgaaatattaaaatctcttaatgagctcggtggaaaacatggaattggacgagttgatcttgttgagaatagatacattggaatgaaatctagaggaatttatgaaacacctggtggaaccattctctatcacgcacacagagcaatagagagtattacgcttgataaagaggctgcgcatatgaaagacgagttagcacctaaatatgccgagcttatctacaacggctattggttctcacctgaaagagagatgatgcaatcaatgattgataaatcacaagaaaaagtggagggtaaagtaagacttaaactctttaaaggtaatacaatgattacaggaagggagtcgtctctaagcctgtacaatccaaatcttgcaacatttgagacggataacatttactctcaaaaagatgctgaaggctttataaaattaaacgctcttagattaagagaaaaaaaataa

SEQ ID NO: 316810 - DNA, 282 bp, Unknown
  Bacterial polypeptide expressing nucleotide sequence isolated from the Sargasso Sea
aatgtccaaaccgaaaaaagttgttttagcctattccggcggtctagatacatctattattctgaaatggctccaaagtgagtatgcctgtgaggttgtaactttcacagctgatcttggtcagggtgaagagctagaaccagctagaaaaaaagctgaattgcttggtatcgagcctaaaaatatttttattgaggacgttcgtgaagagtttgtacaagattttgtttttccaatgtttcgagctaatgcagtttatgaaggaccaatatcttttaggaa

SEQ ID NO: 316811 - DNA, 1117 bp, Unknown
  Bacterial polypeptide expressing nucleotide sequence isolated from the Sargasso Sea
aattataaagctgaagtaattgcttacacctctgatattgggcaagttttagataaaaaaaaaattataaaaaatgctaaaagattaggcgttaaaaaaataattatcgaaaatttaaaaaatatctttgtgaaagattatatttttccaatgataagggctcatgcagtttatgaaggagtatatttattaggcacatctattgccaggccgttaattgcaaagagacaagttgaaattgcaaaaaaatttaaggcttttgcagtttcgcatggtgcgactggaaaaggtaacgatcaagtaagatttgagttgggttactcatattttggtaaaaataagattaaaacaatagcgccttggagagaatgggaattacaatcaagagcagatttaattaaatacgctaaaaaaaatagtataccaattcctaaagataaaaaaggtgcgccgccattttctgtagatgataatatttttcatacatcaactgaaggcaaggttttagaagacccaaaaaactctgctcctgaatttatttatcaaagaacagtttcaccacaaaaagctcctaacaaacctacaaaagtaaaaattacttttaaaaatagtgatccaattgcagtaaatggaaaaaaattgagtcctgaaaagcttttaagtaaattaaatattctggctggaaaaaatggaataggtagagttgatctagttgaaaatagatttattggaattaaatccagaggtgtttacgaaactccaggtggtactgtgttatatactgcacatagagctatagagtctgtaactcttgataaagaaaccgctcataaaaaagagagaataatgccagaatatgctgagctagtatataacggctattggttttcaaaaaaaagacttaaattacaaaaactaattgataaaaaaagaaacaaagtatctggtgatattgttttaagtttatgcaaaggtaacgtaactattttatcaagaaggacaaaaaataaagcttattcaatgaaaaaagtttcttttgaggagaataaatcctttaataaaagaaaagttgaaaatttcataaaatttcactctaaacagttaaataaagcctaaa

SEQ ID NO: 316812 - DNA, 1182 bp, Unknown
  Bacterial polypeptide expressing nucleotide sequence isolated from the Sargasso Sea
attctggtggtctagatactactgtgatccttcactggttaaaagaaacctacaacgcagaagttattacttttactgctgatataggtcaagatcataaccctgatttagttaagaaaagagctaatgaaattggagcaagtaaagtaatcctggaagatttaaaagaagaatttgttaaagaatatgtctttccaatgtttagagccaatacgctttatgaaggtgagtacttgctcggcacatcaattgctagacctttaataagtaagcgaatgatagaaattgctgaagaagaaggcgctgatgctattgctcatggagcaactggaaagggaaacgatcaaattagatttgagattggagcttattcattaaacccttcaatagcagtgatagcgccgtggagaacgtgggattttgtttctagagctgatttgattgattactgtaaaaaaaatcaaataaatatagatgcagacccagatgaacctatgtactcaactgatgagaatattttgcatacatcgtatgaaggagagattttagaagatccatctataccggcacctgaatctatttggcagagaacttcttcattaaaggaagctcaagattcagaagaagaaattaccataaattttaaaaatggggaccctgttggcctggatggcaaagacttagattcttctcaacttttagaaactttaaatattattgcaggaaaacatggaatcgggagactagatctcgtagaaaatagatttacaggcatgaaatcgagagggtgttatgagacacctggagggacacttttacttaaagctcatagggctatagagtctcttgcattggatgcacaaacaggtcatttaaaagatgaactaatgcctaaatatgctcaactaatttatgatgggttttggtggagtcctgagagggaagctttacaagcgttcatcgacaaaacacaagaactagtaacgggttcggtaaaacttggcttatataaaggaaatataattattaaagaaagaacatctccaaatagtctttacgatccaaaaatcgtaacttttgaggatgatgaaaatacttacaatcagtcagacgcaacaggttttataaagattaattctttaaggttgaaagctaacgctaagagaaaaaaagaggattaat

SEQ ID NO: 316813 - DNA, 451 bp, Unknown
  Bacterial polypeptide expressing nucleotide sequence isolated from the Sargasso Sea
catggtcgacgatcgaacggacattaaaaaagtcgtacttgcctattcgggcggcctcgatacctcagtcatactgcgctggctgcaggacacctacgattgtgaagtggtcaccttcactgctgatctagggcagggtgaggagcttgagcccgctcggcagaaggctgagctcatgggcgtaaaagagatctacgtcgaggacctccgagaagaattcgtacgtgatttcgtcttccccatgttccgtgccaatgccacttatgaaggtgtctatttgcttggaacgtcgatcgcccgtcctctaattgctaaacgccagatcgaaattgcaaacaagactggcgccgacgcggtttcgcatggtgcgactggcaagggcaacgaccaagtacgtttcgagcttgggtactacggccttaatccagacattaaggtgatcgcgccgtgg

SEQ ID NO: 316814 - DNA, 1210 bp, Unknown
  Bacterial polypeptide expressing nucleotide sequence isolated from the Sargasso Sea
atgggaaagaaagaaaacataaataaagtggttttagcctactctggtggacttgatacatccgtaatattgaaatggcttgaagaagcttacgattgtgaagttgttacatttagtgctgatcttggtcagggcgcggaacttgatgaagctaagaaaaaagctgaagatttaggcgttaaagaaatctttgtagaagatcttaaaaatgaatttgttaaggattatgtatttccaatgtttagagctaatacactttatgaaggctcgtatttattaggaaccgctatagcaagacctttaattgccaagaagcaaatagagattgctaaagaggttggtgcagatgctgtttgtcatggagcaactggtaagggaaacgatcaaataagatttgagctagcttattatggtcttaatccagatataaaggtaattgccccttggagagagtgggatcttaattcaagaaaaaaattaattgaatttgccgaaaagaatcagattgttattacaaaagataatcttggtgaagacccatattcagtggatgcaaatttacttcacacctcttcagaaggaaaattacttgaagatccttcaaaagaatgtcccgaagatgtttaccaaagaactgtttcaccagaagatgctccagataaagcaacttatatagaagttgagtttgaacaaggagaccctatctcaattaatggcaaaaaattatcgccagaaaaactactaactgaactcaatgagttaggtggtaaaaacggtataggaagactagacatggtcgaaaacagaagtattggaatgaaatcaagaggaatttatgagactccaggtggcacgatacttttatcggctcatagaggaattgaacaaattacattagacagagaggcttgtcatcttaaggatgaaataatgcctagatatgcaaaattaatttataatggcttctggttttctccagaaagaaaaatgttacaagccttaatcgatgaaagtcagaaaaatgtaacaggaatggtaagattaaaactttataaaggtaatgctactgttgttgggagatcatctgatttatcactttactcagaagaacatgttacatttgaagaagatgatgtatacgatcaatatgatgctgaaggatttatcaaactcaacgcattaagattaaagctcttaaaaaaagattaaa

SEQ ID NO: 316815 - DNA, 651 bp, Unknown
  Bacterial polypeptide expressing nucleotide sequence isolated from the Sargasso Sea
aatgcctaaaaaaattgttttggcctattcaggtggattggatacaagtgtaattttaaaatggttgcaaaataagtatgaatgcccagtagttacttttactgctgatataggacaaggtgaagaactttcatctgttgaaagcaaagcaaaaagtttaggagtaaaagaattttttattgagaatcttcaagaggtctttgtaaaagattatgtttttccaatgtttagagcaaacgctatttatgagggtaactatctattaggaactgcaattgctcgtccattaattgcaaaaagacaaatagaaattgctaaacttgtaggagctgatgcagtcgctcatggtgctacaggtaagggcaatgatcaagttaggtttgaactgggttatatagcaaatgatcctaaaataaaaattattgctccatggagagattgggagtttaattctagaaaagatctagttgattttgctgagaaaaatcaaattcctgtttcaaaagataaactaggagagcctccatttagcacagatgctaatctattgcatacatcgtcagagggtaaaatccttgaggatccctggcttgcacctccagaacatgtttattctagaacaacaaacttagataaaactcctaatgaacc

SEQ ID NO: 316816 - DNA, 595 bp, Unknown
  Bacterial polypeptide expressing nucleotide sequence isolated from the Sargasso Sea
atggataaaataaataaagttgttcttgcttactcaggtgggctcgatacatccgttatactaagatggcttaaagaaacatactcgtgcgaggtcgttacgtttactgcaaacttaggccaagatgaagattatgatttggttaataaaaaagcaacacagcaaggtgtcaaagaaatattcattgaagatctcaaagaagaattcgtccgtgattacgtttttccaatgttcagagctaatccactttatgaaggatactatcttttaggcacatctattgcgagacctttaattgcacgaaaacaaattgaaattgcaaacaaagtgggtgccgatactgtatcgcacggtgcaacaggcaaaggtaacgatcaaattagatttgagttaggttattattatcataaaccagatattaaaatcatcagtccatggagagagtgggatctgacatccagaacatccttggttgagtatgctgatcaacacggtatcgaaatagctaaagataaaagaggtgaacaacctttcagtattgatgaaaatattttacactcctctgctgagggtaaagttcttgaagatccctggg

SEQ ID NO: 316817 - DNA, 1033 bp, Unknown
  Bacterial polypeptide expressing nucleotide sequence isolated from the Sargasso Sea
atgaaaaaacaaaagaggatcgtgctcgcctattcaggtggtttggatacgtctatcattcttaaatggcttcaggaaaattatgatgctgaggtaatagcctacactgctgatgtcggacaggaaatggatagaaaaaaaattataaagaatgcaaaaaaattaggtgtaaaaaaaattgtcatcaaagatctaaaaaatatttttgttaaggattatgtttacccaatgataagaggtcatgctctttatgagggtgtttatttattgggtacatcaattgcaagaccacttattgcaaaagaccaaattagagttgcaaaaaaatttaaagcttatgctgtctcacatggttcaacaggaaaaggaaatgatcaagtgagatttgaacttggatatcattactttggtcctaaaattaaaataatagctccatggagaatatggaaattgaaatcaagaacagatctcattaattatgcaaaaaaacatggaataccaatccctaaagacaaaaagggagcgccgccattctcagtagatgataatttatttcatacttcaacagagggaaaagttttagaaaatcctaaaaattctgcacctgaatttatttttcaaagaacaatttctcctgaaaaggctccaaataaaccaagctttattactattaattacaaaaatggtgaccctattggcctaaatggaaaaaaattatctccagcaaaagttttggataaactcaatcaattagctggcaaaaatggaatagggagagtagatttagttgaaaatagattcattggaataaaatcaagaggagtttacgaaactccaggaggaacattattgcttgtggctcacagagccattgagtctgtaactttggataaggacacaatgcataaaaaagatgaggttatgccaaggtatgcagaacttgtttacaatggctattggtattcaaaggaaagatttaaattacaaaaaatagtcgatctaaaaagaaataaagtaaatggatcagttaaac

SEQ ID NO: 316818 - DNA, 1189 bp, Unknown
  Bacterial polypeptide expressing nucleotide sequence isolated from the Sargasso Sea
aatgaaatcaaaaaaaagaattgtattagcttattctggtggcttagatacatccataatccttaaatggcttcaagaaaattataaggcagaggtaatttgttatactgcagatattggtcaagaaattgataagaaaaaaattatttcaaatgctaaaaaacttggagttaaaaatataattataaaggatttaaaaaatatatttataaaagattatgttttcccgatgttgagaggtcatgcggtatatgaaggagtttacctgttgggaacttcaatagcgagaccccttattgcaaaagatcaaataaaagttgcaaaaaaatacaaagcatatgctgtatctcacggatcaactggaaaagggaatgatcaagttagatttgaacttggctatcattactttggtccaaaaataaaaataattgctccgtggagaatatggaaattaaaatcaagaacagacttaataaattatgcaaaaaaaaataaaatttctattccaaaagataaaaagggtgctccacctttttcagttgatgataatttatttcatacttcaactgaaggtaaggttttagaaaacccaaaaaactctgcaccagaattgatttttcaaagaactgtttccccagaaaaagcgccgaataaaccaacgtttgtttcaattaattttagaaacggagatccaatgggggttaatggaaaaaaactaactccagcaaagttgcttgaaaaacttaatcaattagctggaaaaaatggggtaggtagagttgaccttgttgaaaatagatttttaggaattaagtcaagaggagtttatgaaactcctggaggaactttgttaatttatgctcatagagcaatcgagtctgttactttagataaagaaacaatgcataaaaaagaaaatataatggcaagatatgctgagcttatttataatggttattggtattcaaaagaaagatttaaacttcaaaaaattgttgatttaaaaaaaaataaagttaatggaactgttaaacttaaactttataaaggaaatgttactataatttctagacaaactaaaagttctgcttactcattaaaaaaagtttcttttgaagaaaataaaacatttaataaatccaatgttgagaaatttattaattttcataagaaaaaactacgttcttaa

SEQ ID NO: 316819 - DNA, 745 bp, Unknown
  Bacterial polypeptide expressing nucleotide sequence isolated from the Sargasso Sea
atgacatcaaaaaagaaaattgttctagcttattctggaggactcgatacctctataattttaaaatggctccaagaaaattatgacgcagatgtaatttgttatacagcagatgtaggccaagaaattgatagaaaaaaaattataactaatgcaaaaaaatttggtgttaaaaatataattatcaaagatttaaaagatatttttgttaaagactacgtttaccctatgatcagaggacatgcaatctatgagggtgtttatttattagggacttcgatagcaagacctcttattgcaaaagatcaaataagggtagctaaaaaatttaaggcttatgcagtttcgcatggagcaactggtaaaggcaatgaccaagttagatttgaattaggctatcattattttggtcctaaaattaaaattatagctccatggagaatttggaaactaaaatctagaacagacttaattaattatgcaaaaaaacatggcatagttattccaaaagataacaaaggtgcacctcctttttcagtggatgataatttatttcatacatcaactgaaggtaaggttttagaaaatccaaaaaattctgctccagaatttatttttcaacgaacagtttctcctgaaaaagcacctaacaaaccatcttttgttactattaattttaaaaatggtgatccttttggaatcaatggaaaaaaattatctccagctaaattattaacaaagttaa

SEQ ID NO: 316820 - DNA, 965 bp, Unknown
  Bacterial polypeptide expressing nucleotide sequence isolated from the Sargasso Sea
atccatgattagaggacatgcaatttacgaaggtgtctatttgttgggaacatcaattgctagacctcttattgcaaaagatcagattagagttgctaaaaaatttaaagcttatgcagtatctcatggagcaactggtaaaggtaatgatcaagtcagatttgaattaagctatcattattttggacctaaaattaaaattatagccccttggagaatttggaaattaaaatctagaacggatttaattaattatgcaaaaaaacatgggatagttattcctaaagataaaaaaggtgcgcctcctttctctgttgatgacaatttgtttcatacatcaactgaaggtaaaattttagaaaatccaaaaaattctgcaccagaatttatttttcagcgaacagtttcaccagaaaaagctcctaacaagccttcatttgttactattaatttcaaaaatggtgatcctgttggaattaatggaaaaaaaatgtcacctgcaaaattattaataaaattgaattatttagctggtaaaaatgggattggaagagttgacttagtagaaaatagatttttaggaatcaaatctagaggggtatatgaaacacctggtggaactctattaatcaatgctcatagagccgttgagtctgttactttggataaagaaaccatgcataagaaagatcgaataatgtctagatattctgagttgatttataatggttattggtactcaaaagaaagatttaaacttcagaaaattgttgatttaaaaagaagtaaagttaacggctcagttaagcttaaattatataaaggtaatattacaattcaatcaagagttactagtagtagtgcctattcaatgaagaaggtctcatttgaggaaaatagatcatttgataaatcaaatgtggaaaaatttattaaatttcacaaaaaaaaacttcgttcataga

SEQ ID NO: 316821 - DNA, 1189 bp, Unknown
  Bacterial polypeptide expressing nucleotide sequence isolated from the Sargasso Sea
aatgaaaccaaaaaagaaaattgttctagcttattctggagggctcgatacctctataattttaaaatggcttcaagaaaactatgatgcagatgtaatttgttatacagcagatgtaggccaagaaattgatagaaaaaaaattataactaacgcaaaaaaatttggtgttaaaaatataattattaaagatttgaaaaatatttttgttaagaattatgtttatcccatgatcaggggacatgcaatctatgaaggtgtttatttactagggacatcaatagcaaggcctcttattgcaaaagatcaaataagagtagctaaaaaatttaaggcctatgcagtttcgcatggagcaactggtaaaggcaatgaccaagttagatttgaattaggctatcattattttggtcctaaaattaaaatcatagctccgtggagaatttggaaactaaaatctagaacagacttaattaattatgcaaaaaaacatggcatagctattcctaaagataaaaaaggtgcacctcctttttcagtggatgataatttatttcatacatcaactgaaggtaaggttttagaaaatccaaaaaattctgctccagaatttatttttcaacgaacagtttctcctgaaaaagcacctaacaaaccatcttttgttactattaattttaaaaatggtgatccttttggaattaatggaaaaaaattatctccagctaaattattaacaaagttaaatgatctagcaggcaaaaatggaattggaagagttgacttagtagagaatagatttttaggtatcaaatctagaggagtgtatgaaacacctggtgggactcttttaataaatgctcatagagcaattgagtctgttaccttagacaaagaaactatgcataaaaaagatcagataatgtctagatatgcagagttaatttacaatggttattggtattcaaaagaaagatttaaacttcaaaaaattgtagatttaaaaagaagcaaagttaatggctcagttaaacttaaattgtataaaggaaatattacaattcaatctagagttactaatagcagcgcttactcgatgaaaaaagtctcatttgaagaaaataagtcatttaataaatctaacgttgaaagatttatcaattttcacaaaaaaaagcttcgttcttag

SEQ ID NO: 316822 - DNA, 1186 bp, Unknown
  Bacterial polypeptide expressing nucleotide sequence isolated from the Sargasso Sea
atgaaagcgaaaaaaaagatcgttcttgcctactcaggcggattagatacatctataattcttaaatggttgcaagaaaattataatgcagaagtcatatgctatacagctgatattggtcaagaaatagatagaaaaaaaatatttaagaatgcaaaaaagtttggtgtaaaaaaaattataattcaaaatcttaaagatactttcgtcaaagattatgtttatccgatgattagagggcatgcaatttatgaaggtgtctatttgttaggtacatcaattgcaagaccgttgattgcaaaagaccagattagagttgcaaaaaaatttaaggcttatgcagtttcacatggttctactggcaaaggaaacgaccaagtaagatttgaacttggatatcattattttggtccaaaaataaaaataatagcaccttggagaatatggaaacttaaatctagaactgacttaattaattatgcaaaaaagcatgggattcctataccaaaagataaaaaaggttcgtcacctttttctgtggatgataatttatttcatacatccaccgaaggtaaagttttagaaaatccaaaaaattctgcgcctgaatttattttccaaagaactgcttctcctgaaaaagcacctaatagaccaatatttgtgacaattaattttaaaaatagtgatccaattggaattaatggaagaagactgtccccatctaaacttttagaaaaacttaatctattagctggaaaaaatggaataggcagagttgatttagtagaaaatagatttattggcataaaatctagaggtgtttatgaaactcctggtggaacgttgttactaaatgctcatagagcaatagagtcggttacgctagataaagaaacaatgcataaaaaagattctataatgtcaagatacgcagaattaatttataacggttattggtactctaaagaaagatttaaacttcaaaaaattattgactttaaaagaggtaaagtaaacggatcagttaaacttaagctttataaaggcaatattactattcagtctagaataactaaaagcaatgcttattcgatgaaaaaagtttcatttgaagaaaataaaacttttaataaatcaaatgttgaaagatttattaactttcacaaaaaaaaacttagataaa

SEQ ID NO: 316823 - DNA, 1216 bp, Unknown
  Bacterial polypeptide expressing nucleotide sequence isolated from the Sargasso Sea
gatgcagcaggtaaaaaaagttgtactagcttattctggtggagtagatacaagtgtttgtattccatacttaaagaatgaatatggaatttcagaagtggttacttttgtggcagatcttggacaaggtgaagatttagaactcattaggcaaaaagctttaaattctggtgcatctcaatccatagttggcaatttagtgaatagttttgttgagaaatatgcttttccagcaattagagcaaatgcactatatttggataaatatcctttgtctacagctcttgcaaggcctttaattgctgaaaatcttgtaaatattgctcgagaaattaatgctgatgcagtagcgcatggatgcaccggtaaagggaatgatcaagttcgatttgatttagcaattaatgctttaggtcctgatttgaaaataattactcctgcaagggaatggaatatgagtagagaagaagcaatagtttatggagaaaaatttggtattcctgcaccagtatcaaaaaaatcaccatattcaatagacgttaacttactgggtaggagtattgaagcagggattttagaagacccaatgcaagaagcacctgaagatatatttgcgatgacatcatcaattgataattcacctgattctcctcaagatatagaaattgtttttaaaaatgggtttccagttggaattaatgatgaatttttaactccagtagaaattattcaaaaagcaaatgatctttcaggtgcgcatggttttggaagaatagatatgattgaagatcgagtagtagggattaaaagtagagagatttacgaaacacctggccttttacttttaatcaaagctcacaaagaattagagagcattacattaaacccagatgttgtcgactttaaaggaatagtggaaaaaaaatggggtcaattagtctatcaaggtttttggtttggacctcttaaagaaagtttagatgcatttatttcatcgactcaaacttcagttaatggaagagtaaagattagacttcataaggggaacgcaatagtgattgggagaatgtcggaaaataattcactttacagggaagatttggcaacttatagcaaagaagatgtttttaatcattctttagcagagggttttatttatatgtggggtatgtctaataaaatatgggctgagttaaattcaaaaacaaaagattaa

SEQ ID NO: 316824 - DNA, 1045 bp, Unknown
  Bacterial polypeptide expressing nucleotide sequence isolated from the Sargasso Sea
aatgcagcaggttaaaaaagttgtactagcgtattcaggtggcgttgataccagcgtttgtattccatatttaaagaatgaatatggaatttcagatgtggttgcttttgttgcagatcttgggcaaggagaggatttagaggctattaggcaaaaagctttaaattctggtgcttcgaaatcaattattggtaatttagtaaatagttttgttgagagatacgcttttccagctataagagcaaatgcattatatttagataaataccctttatctacagctcttgccaggcctttaattgctgagaatcttgtaaatattgccagagagattaatgctgatgcagtagctcatggatgtactggtaagggtaatgatcaagttcgatttgatttagcaattaatgctttaggccctgatttaaaaataattactcctgcaagggaatggaatatgagtagggaagaagcaatattgtatggagaacaatttggcatccctgcccctgtatcaaaaaaatcaccatattctattgatgttaacttgcttggtaggagcattgaagccggcatattagaaaacccaatgcaagaagcacctgaagatatttttgcaatgacatcatcaattgttgatacacctgattcccctcaagatgtagaaattctgtttaagaatggctttcctgttggacttaataatgaatttttaactccagtggaggttatcaaaaattgtaatgatcttgctggtaagcatggttttggaagaatagatatgattgaagatcgagtagtaggaatcaaaagtagagagatttatgaaacgcctggtcttttacttttaatcaaagctcacaaggaattagagagtataacattaaacccagatgttattgactttaaaggaattgttgaaaaaaaatggggtcaattagtttatcaaggtttttggtttggtcctctcaaggatagtttagatgcttttatttcatcgactcaaacctctgttaatggaagggtaaagatcagactgcataagggc

SEQ ID NO: 316825 - DNA, 1195 bp, Unknown
  Bacterial polypeptide expressing nucleotide sequence isolated from the Sargasso Sea
catggataaagtaaataaagttgttcttgcttactcaggtgggctcgatacatccgttatattaagatggcttaaagaaacctactcgtgcgaggtagtcacgtttaccgcaaacttaggccaagatgaagattatgatttggttgagaaaaaagcaactcagcaaggtgtcaaagaaatattcattgaagatctcaaggaagaatttgtccgagattatgtttttcctatgtttagagctaatccactttatgaaggctactatcttttaggtacatctattgcgagacctttgatcgcacaaaaacaaattgaaattgcaaataaagtaggagctgacgccgtatcgcatggtgcaacagggaaaggcaatgatcaaattagatttgagctgggttattattatcataaacctgacattaaaattatcagtccatggagagaatgggatcttacatctcgaacatctttggttgagtatgctgatcaacacggtattgaaattgccaaagataaaagaggtgaacaacctttcagtattgatgaaaatgttttgcactcttctgctgagggtaaagtccttgaagatcctagggaagaagcccccgattatgtatacacaagatctgtatcaccagaaaatgctcccgatactccagaagagatcaccattgagtttaaacaaggcgatgcctgcgctttaaatggacaaagcatgacaccctttgaattgttgaaagccttgaacgagatgggcggaaaacatggtattggtagggtcgatttggtggaaaataggtatgtcggcatgaaatcgaggggcatatacgaaacacctggtggaacaatcctctatcacgctcacagagccatagaaagtatcacattggataaagaagcagctcacatgaaggatgaactgtctcccaagtatgcagagctagtctacaacggctattggttttcaccagagagagaaatgatgcaatccatgattgataaatctcaagcgaaagtagagggtaaagtcagactaaaactctacaaaggaaacacgatgatcacaggacgtgagtcctcaatgagtttgtataatcctaatctggcaacttttgagtcagataatatttattctcaaaaagatgccgaaggcttcatcaagctgagtgctttaagattaagagaaaaaaaataa

SEQ ID NO: 316826 - DNA, 399 bp, Unknown
  Bacterial polypeptide expressing nucleotide sequence isolated from the Sargasso Sea
aatgaaaaataaaattgttttagcctactcaggcggattagacacaagtgttatattaaaatggttacaaacagagtataacgccgacgtcattgcctacgcagctgacctgggtcaaggagaagagttaacagaagcaaaagccaaagcaaaaaaacttggtgcaaaaaaaatatacatagaaaatttaaaagaagaatttgttcgcgattatgtctttcctatgtttcgttgtaatacaatctacgagggggaatatcttttaggaacgtctatcgctcgacccctgattgcgaaaagacaaattgaaattgcaaaaaaagaaaaagccaacgccgtctcgcacggcgccactggaaaaggaaatgaccaggttcgctttgagttttcatattatgc

SEQ ID NO: 316827 - DNA, 1186 bp, Unknown
  Bacterial polypeptide expressing nucleotide sequence isolated from the Sargasso Sea
atgaaaaaaaacaaaaaaattgttttagcctactcaggcggacttgatacatctataattctaaagtggttgcaggaaaattatgatagcgaagtaattgcctacaccgcagacattggtcaagaaatggaccaaaagaaaattattaaaaatgcaagaaaacttggtgttaaaaaaataataatcaataatttaaaaaatacgtttgtaaaagaatatgtcttcccaatgattagaggtcatgcaatttatgaaggggtttatcttcttggaacatcaattgcgagaccgttaattgcaaaagatcaaattaaagttgctaaaaaatttaaagcattcgctgtttcgcatggctcaaccggaaaaggaaatgatcaggtaagatttgaacttgggtatcattattttggtccaaaaataaaagtgatagctccttggagaatttggaaattaaaatcaagaactgatctaattaattatgccaaaaaaaataacatacctattccaaaagataaaaaaggtgcaccacctttttcagtagacgacaatttatttcacacgtctactgaaggtaaagttttagaaaatccaaaaaattcagcccctgaatttgtttttcaaagaacaacttctcctgaaaaagcgcctaataaacctacttatgtttctattggtttcaaaaacagtgatccagtgagtattaatggaaaaaaattaaatccagaaaaacttttaaaaaaattaaatcagattggtggaaagaatggggttggaagagttgatttagttgaaaatagatttatcggaattaaatcaagaggtgtttatgaaacaccaggcgggacgttacttttaatcgcccatagagcaatagagtctgtgacattagataaagatactatgcataaaaaagattctatcatgccaagatatgcagaattaatttataatggttattggtactcaaaagaaagatttaaattacaaaaaattgtggatctaaaaaaaagtaaggtaaatggaagtgttaagttaaaactttataaagggaatgttgcaattcaatcaagaattacaaaaagcagcgcttactcaatgaaaaaagtttcttttgaagaaaataaaacatttaacaaatcgaatgttgaaagatttataaatttccataaaaaaaaattaaagtaaa

SEQ ID NO: 316828 - DNA, 1189 bp, Unknown
  Bacterial polypeptide expressing nucleotide sequence isolated from the Sargasso Sea
aatgaaatcaaaaaaaagaattgtattagcttactcaggcggtttggacacatccattattcttaaatggcttcaagaaaattatgatgcagaagtaatttgttacaccgcagatatcggacaagaaataaatagaaaaaaaattttttacaatgcaagaaaatttggtgtcacaaagataattataaatgatttaaaagatgtttttgttaaagactatgtatttccaatgatccgtggtcatgcaatttatgagggtgtttatctattaggaacctcaatcgccagacctctgatagcaaaggatcaaataaaggttgcaaaaaaattcaaagcatatgcagtatctcatggggctactggaaaaggaaacgaccaaataagatttgagcttggttatcattactttggtcccaaaataaaaattattgcaccatggagaatatggaatttaaaatctcgatcagatttaattaattatgcgaagaaacacaatattcctatcccaaaagacaaaaaaggtgcatctcctttttcggtagatgataatttatttcatacatcaaccgaaggtaagttgctagaaaatccaaaaaattccgcaccagaatttatttttcaaagaactatttctccagaaaaagctcctaacaaagctactcatgtaacaattaattttaaaaatggtgaccccattggttttaatggaaaaaaatttggaccagcaaaattattattaaaacttaatcaattggcgggaaaaaacggaataggaagagttgatcttgttgaaaatagatttttaggcatcaagtctagaggagtttatgaaactccaggaggtacattgttaatccatgcacatagagcgattgagtcagttacgcttgataaagaaacaatgcacaaaaaagatgcaataatgtcaaggtacgcagaattgatctataatggatattggttttcaaaagaaaggtttaaacttcaaaaaattgtggatttgaaaaaaaacaaaataaatggatctgttaaacttaaactttataaaggcaatgttacaattcaatcaagaatgacaaaaagcaatgcttactcaatgaaaaaagtttcgtttgaggaaaataaatcatttattaaatctaatgttgagaaatttataaattttcacaaaaaaaagttaagaaactag

SEQ ID NO: 316829 - DNA, 913 bp, Unknown
  Bacterial polypeptide expressing nucleotide sequence isolated from the Sargasso Sea
atgaaaaaaaagattgtattagcttattctgggggtttggatacatctattattcttaaatggcttcaagaaaattataatgccgaagtaatagcttacactgcagatattggtcagaacctagatagaaaaaaaatagcaaataatgcaaaaaaattaggtgttaaaaaagtaataataaaggatttaaaaaatacttttgttaaaaattatgtctatccaatgattagaggacatgctttatatgaaggatcatatttgttaggaacatctattgctagaccattgattgcaaaagatcaaataagagttgcaaaaaaatttaatgcatatgctgtctcgcatggatcaactgggaagggaaatgatcaagtaagatttgaacttgcataccattattttggacctaaaattaaaataattgctccttggagagtttggaaattaaaatcaagaacagatctaattaattatgcaagaaaacataatattctaattccgaaagacaaaaaaggtcaatcacctttttcggtagacgataatttattccacacttctactgaaggaaaagttttagaaaacccaataaattctgccccagattttatttttcaaagaacaacttccccagaaaaagcacctcgaaaaccaagttttgttactatcaattttaaaaatagtaaccctattggattaaatggaaaaaaactttctccagctaaacttttagaaaaattaaaccaattagctggcaaaaatggaattggaagggtagatttagttgaaaatagatttattggaataaagtctagaggtatatatgaaactcctggcggttccttactgcttgttgcacacagagcaatcgagtcggttacattagacaaagaaactatgcacaagaaagataaga

SEQ ID NO: 316830 - DNA, 1225 bp, Unknown
  Bacterial polypeptide expressing nucleotide sequence isolated from the Sargasso Sea
gatgtctatcgagaacaaaaatactggcgtgaaaaaagtcgttttagcctattcgggtggtctagatacttcggccattattccttggttaaaagaaacctacgacaactgtgaaatcatcgccttttgcgctgacgttggtcagggtgaagaagagttagtgggtctgactgaaaaggcattagcctcaggtgcgtctgaatgccatatcgtcgatctgaaagaagaattcgttaaagattacatctacccaaccatggcaacgggtgctatttacgaagggacttacctgttaggtacttcaatggcgcgtccaatcatcgcgaaggcgcaggttgaagtggcgcgtaaagtgggggccgatgccctgtgccacggttgtaccggtaagggtaacgaccaagtgcgtttcgaaggttgctttgcggcattagcgcctgatttaaaagtgattgcaccatggcgtgaatggaccatgcagagccgtgaagatctgctggcttacttagctgagcgtaatattaagacttcagcttctgccactaagatctacagccgtgatgccaacgcattccacatttcccacgaaggtggcgagttggaagatccatggaacgagccaagcaaaggtgtgtggacgctgactgccgatccggaagatgcgccaaacgaagcagaatatgtgtcacttgaagtcgaaaatggtcgtgtgactaaagtaaacggtgaagcattaacgccttacgctgcactgatgaagctgaacaccatcgctgcaccacatggcgtgggtcgtatcgacatcactgaaaaccgtttagtgggcatgaagtcccgtggttgctacgaaaccccaggcggcactgtgatgtttgccgcgctacgcgcgattgaagagttagtgctggataaaaccagccgtacttggcgcgagcaagtgggtgcccaaatggcacacttagtgtacgacggtcgttggtttacacctctgtgtaagtcgctgttggcggcatctgagtccttagccgagtctgttaacggtgaagttgtggtgaaactctacaaaggtcacgcgattgccgttaagaaacgttcgccaaacagcttgtactctgaagcgtttgcgaccttcggtgaagaccaagtgtatgaccaaaaacacgctgaaggctttatccgtctgtactcgttagcgagccgcatccgcgcgctcaacgctaagtaa

SEQ ID NO: 316831 - DNA, 1213 bp, Unknown
  Bacterial polypeptide expressing nucleotide sequence isolated from the Sargasso Sea
atgaatgcaaagaaaattaataaaattattttagcctattcaggtggtttagatactactgtaattcttcactggcttaaagaaacatataacgctgaagtcataactttcactgccgatataggtcaagatcatgactctgaattagttaaagagagagctaatgcaataggagcaagtaaagtaattgttgaagatttaaaagaggaatttgtaagtaattatgtttttcctatgtttcgagcaaatactgtatatgaaggagagtatttattaggcacatctattgccagacctttaataagtaaaaggatgatagagattgctgaagaggaaggtgctgatactatttcccatggagcaacgggtaaaggaaacgatcaaattcgatttgagttaggttcttatgccctcaatccttcaatcaatgtagtagcgccatggagaacttggaattttgtttctagatctgatctagtaaattactgtaaaaagaatcaaatcaaaattgatgctagtccagatgaacccttatattctactgatgaaaatatattgcatacttcatacgaaggtgaaattttagaagatccgtcaaagcccgcccccgaatccatttggaaaagaaccaccgctctaaaagatgctcctgatgaagaaaaagaaattactattgattttaagcaaggagatcctataagtattaatggtaaagatttaaatgctgcggaaattcttaatactctcaatgatgtagcaggtagaaatggaattggaaggttagatttagtagaaaatagatttactggtatgaaatcaaggggttgctacgaaactccaggtggtactattttattaaaagctcatagagccatagagtctttaaccttagatgcacaaatgagtcatttgaaagatgaactaatgcctaaatatgctcaacttatttatgatggtttctggtggagtcctgaaagggaagcgttacaacaattcattaataaaactcaagaatttgtaaatggatcagtgaaactaagcttatataaaggaaatataaccattaaagaaagatcctcaccaaacagtctttatgactcaaagatagttacctttgaagatgatgacaatgctttcaatcaagctgatgcttcaggatttattaaaattaattccttaaggttaaaagcaaatgcaaaaagaaaaaagtaac

SEQ ID NO: 316832 - DNA, 509 bp, Unknown
  Bacterial polypeptide expressing nucleotide sequence isolated from the Sargasso Sea
tatgccaaaaaaaattgtgttagcatattctggaggacttgacacaagcgttatcctaaaatggctgcaagtaaaataccagtgtcctgttgttacctttactgctgatttaggacagggcgaggaactcagtcccgttaaagggaaagcacaatcccttggagttgaagaaatttttatagaggatttaagagaagagtttgtaagagattatgtgtatccaatatttagagctaatgcaatttatgagggaacatattttttaggtactgcaattgcaagaccactaattgcaaaaagacaaattgaaattgcaaatatagtgggagctgatgctgttgcccacggtgccacaggaaaaggaaatgaccaagtaagatttgaacttgggtattatgctaacaaacatgatattaaagtcatatccccgtggagagaatgggaattaaattcaagaaatgatttaattaattttgctgaaaaatatcaaataccaattgcaaaagata

SEQ ID NO: 316833 - DNA, 572 bp, Unknown
  Bacterial polypeptide expressing nucleotide sequence isolated from the Sargasso Sea
aatgagaataaaaaaaagaattgttttagctttctcgggaggattagatacatcaataattctaaaatggcttcaagaaaattataatgcagaagtaatagcttatactgctgatattggtcaaaaaattgataaaaaaaaaataatcaaaaatgcaaaaaaacttggtgttaaaaaagtcgtaataaataatttaaaagatacttttgttaaagaatatatttttccaatgatcagaggacacgcaatttatgagggtgcttatttattaggtacttcgattgcaagaccattgatcgcaaaagatcaaataaaagttgctaaaaaatttaaagcgtatgctgtttcacatggctctactggtaaaggtaatgatcaagtgcgatttgaattaggctattatttcttcaacccaaaaataaaagtaatagcaccttggaggatatggaaactaaaatctagaaaagacttaattaattatgcaaaaaaatataaaataccaattccaagagacaagaaaggagctccacctttcttcattgatgataatttatttcatacctcaactgagg

SEQ ID NO: 316834 - DNA, 1075 bp, Unknown
  Bacterial polypeptide expressing nucleotide sequence isolated from the Sargasso Sea
atgaaattcaataaagttatacttgcatattctggcgggcttgatacatctgtaatagcaaaatggttaatggaaaaatataaatgtgaagtcataacttttacagcagacattggacaaggttcggaaactagagatgccagagctaaagcaaagaaattaggcataaagaaaatttatattgaagacttaaaagaagtttttgttaaagattatgtttatccaatgttcagatctaatgctatttatgaaggtgaatatctgttagggacatctattgctagacctcttattagtaagagattgattgaaattgcaaaaaaagaaaaagcagatgccatatgccatggagcaactggtaaaggtaatgatcaagtcagattcgagttatctgcttatgcacttaacccaaaaattaaaattattgccccttggagagagtgggcatttaaatccagaaaagatttagttagatatgctagattgcataaaatcgctattgattttgattctggcaaaaaaagcccatactctatggatgcaaacatactacatacttcttatgaaggtggtattttagaggatccttggaaaagcccagatgagtcaatgtggttaagaacagcctcaattgaaaaatcatcaaataagcccgatattatagagctagaatttaaaaatggcgatgtaaaaaagattaacaagaaaatgcatagtcctgcgaaagctcttgcatatcttaatcgtttagctggtaagcatggtataggcagaatagatatagtagaaaatcgttacgttggtatgaagtcaagagggtgctatgaaacacctggaggaactatttatcataaagctcataaagctattgaatctatcacaatggatagagaactgcttcacttgaaggaagacttgaccaatagatataccaagttgatttataatggctattggtttagcccagagagggaaagtctgcaaagtctaattgatcagtcacagaaaaaagtttctggcgtcgttaaattaaaactctataaaggaaatataattgtaatgggaagaaaatctc

SEQ ID NO: 316835 - DNA, 949 bp, Unknown
  Bacterial polypeptide expressing nucleotide sequence isolated from the Sargasso Sea
caatgcgttgtatgaaggtatgtattttttaggaactgccatagcaagacccttaatagctaaaagacaagttgaaattgcaaaagaggttggggcagattctgttgcacacggtgcgactggcaaggggaatgatcaagtacgatttgaattaggatattatgcaaatagcccaaaaattaaagttatttcaccttggagagaatgggagcttgaatcaagaaatgatttaattaattttgctgaaaagtatcaaataaaaattccaaaagataagcggggagaagcgccatttagtattgatgcaaacttacttcacacttcatcagagggtaagattcttgaagacccatgggttgatgcaccggaatatttgtattcaagaacaaagtcaattgaagatgcaaattctaaaccagatgaaataataatatcatttgagaaaggagatcctgtttcaataaatcaacaaaaacttaaatctcatgaactattatctaaactaaatgagtacggttttaatcatggaattggaagagaagatattgtagaaaatcgttttgtaggtatgaaatccaggggcgtctatgaaacaccaggtgggacaattctagctaaagcacacagagctattgaaagcattacattagacaaaggtgaagcacatttaaaagatgaaataatgccaaaatatgcagagactatttataatggtttatggttttcttcagaaagattaagtatgcaaagcttgatagattccacacaagaaaaagttacaggcgaagtccgattacagttatttaaaggtaatgtaattataaagggtagaagatctccttatagtaaatataattcatctcttgtgtcatttgatgaagttggtgattataatcaaagagatgcagaaggattcataaaaataaactcattaagattaaaaaactga

SEQ ID NO: 316836 - DNA, 1189 bp, Unknown
  Bacterial polypeptide expressing nucleotide sequence isolated from the Sargasso Sea
aatgaaatcaaaaagtaaaattgtccttgcctactccggtggactagatacttcaataattttaaaatggcttcaagaaaattatgatgcagatgtaatttgttatacagcagatgtaggacaagaaattgatagaaaaaaaatcataaacaatgctaaaaaatttggtgttaaaaatattattattcaagatttaaaagatacttttgtaaaagattatgtctatccaatgattagaggacatgcaatttatgaaggtgtctatttgttaggaacatcaattgctagacctctcattgcaaaagatcaaattagagttgctaaaaaatataaagcttatgcagtttcgcatggcgcaactggtaaaggaaatgatcaagttagatttgaattaggctatcattattttggacccaaaattaaaatcatagctccgtggagaatttggaaactaaaatcaagaacagatttaattaattatgcaaaaaaacatggtatagctattcctaaagataaaaaaggtgcacctcctttttcagtggatgataatttatttcatacatcaactgaaggtaaggttttagaaaatccaaaaaattctgcaccagaatttatttttcagcgaacagtttctccagaaaaagctcccaacaagccttcatttgttactattaattttaaaaatggtgatcctattggaattaatggaaaaaaaatgtcacctgcgaaattattaattaaattgaattatttagctggtaaaaatggaattggaagagttgacttagtagaaaatagatttttaggtatcaaatctagaggagtatacgaaactcctggtggaactcttttaatcaatgcccacagagccattgagtctgttactttagataaagaaactatgcataagaaagatcaggtaatgtctagatatgctgaattaatttataacggttactggtattcaaaggaaagatttaaacttcaaaaaattgttgatctgaaaagaagtaaagtaaatggttcggttaagcttaaattatataaaggcaatattacaattcaatcaagggttactaatagtagtgcttattcaatgaaaaaggtttcttttgaagaaaataaatcatttaataaatcaaatgtagagagatttattaattttcataaaaaaaaacttcgttcatag

SEQ ID NO: 316837 - DNA, 637 bp, Unknown
  Bacterial polypeptide expressing nucleotide sequence isolated from the Sargasso Sea
atggaattaaataaaaacattaataaagttgtacttgcttattcaggtggtttagatacatctgtaattttgaaatggctacaagaaaattataatagcgaagtggtaacttttacagctgacattggtcaaggacaagaaatagaacctgttagaaataaagctgaaagtcttggtgtaaaaaaaatttttattgaagacttaaaagaagaatttgttgaaaaatatgtttttccaatgtttagagcaaacgcgctctatgaaggggtttacttgttgggaacctctattgctcgtccacttattgcgaaaaggcaaattgaaattgcaaaagaagtaggagctcaagctgtgtcccatggagcgacaggtaagggaaatgatcaagtcagatttgaattaggctattatagtttgaacccaaaaataaaagtaatagccccatggagagaatggaatttaaatagtcgaaaaaaattgattgaatatgctcaaaaaaatcaaatcacaatccaaaaagatcgaaagggtgatgatccttttagtgttgatgcaaatcttttacatatatcagcagaaggaaaaattcttgaagacccttggattgagcctaatgaattagttttttctagaacta

SEQ ID NO: 316838 - DNA, 373 bp, Unknown
  Bacterial polypeptide expressing nucleotide sequence isolated from the Sargasso Sea
atgtctaatgcagtgaaaaaaaccggtgttaaaaaagtggtactcgcgtactcaggtggtttagatacttcggcaattatcccgtggttaaaagaaacctacgataactgtgaaattgtcgcattctgtgccgatgtcggtcagggtgaagaagaacttgttggcttaactgaaaaagcattagcatcaggtgcttcagagtgtcatatcgttgaccttaaagaagaatttgtagccgattacatctacccaactatcgcgacaggcgcaatttatgaagggacttacctattaggtacctctatggcgcgcccaattattgctaaagcgcaagttgaagtggcccgtaaagtcggtgccgacgcggtatgtc

SEQ ID NO: 316839 - DNA, 853 bp, Unknown
  Bacterial polypeptide expressing nucleotide sequence isolated from the Sargasso Sea
atgaaaaaacaaaagaagattgtactcgcctattcaggtggtttggatacgtctatcattcttaaatggcttcaggaaaattatgatgcagaagtaatagcctacacagctgatgttgggcaagagatggatagaaaaaaaattattaagaatgcaaaaaaattaggtgtaaaaaaaattatcatccaagatcttaaaaatatttttgtcaaagattatgtctacccaatgataagaggtcatgcactttatgagggtgtttatttgttaggtacatcaattgcaagaccactcattgcaaaagatcaaattagagttgccaaaaaatttaatgcttatgctgtctcacatggttcaacaggaaaaggaaatgatcaagtgagatttgaacttggatatcattactttggtcccaaaattaaaataattgctccatggagaatatggaaattaaaatcaagaacagatctcattaattatgcaaaaaaatatggaataccaatccctaaagataaaaaaggtgcgccacctttttcagtagatgataatttattccatacctcaacggagggtaaagttttagaaaatccaaaaaattctgcacctgaatttatatttcaaagaacaacttcccctgaaaaagcaccaaaaaaacctagctttataatcattaactataaaaatggtgatcctgttggactcaatggaaaaaaattatctccagcaaaagttttagataaactcaatcaattagctggaaaaaatggaataggaagagtggatttagtcgagaataaatttattggaataaaatcaagaggagtttacgaaaccccaggaggaacattattac

SEQ ID NO: 316840 - DNA, 1339 bp, Unknown
  Bacterial polypeptide expressing nucleotide sequence isolated from the Sargasso Sea
atggcaaccatcctccagaacctccccctcggccagaaggtcggcatcgcgttttccggcggcctggacaccagcgccgcgctgcgctggatgaagaacaagggcgccctgccctacgcctacacggccaacctgggccagcccgacgagcccgactacgacgcgattcctcgcaaggccatggaatacggcgccgagaaggcccgcctgatcgactgccgcacgcagctcgcccacgaaggcatcgccgcgctgcaggccggcgctttccacgtgcgcaccgctggtgccacctacttcaacaccacgcccctgggccgcgccgtgaccggcaccatgctggtggccgcgatgaaggaagacgacgtcaacatctggggcgacggctcgaccttcaagggcaacgacatcgagcgcttctaccgctacggcctgctgaccaacccgtccctcaagatctacaagccttggctggaccagctgttcatcgacgaactgggcggccgcgccgaaatgtcggccttcatgacgaaggaaggcttcggctacaagatgagcgccgaaaaggcctacagcaccgacagcaacatgctgggcgccacgcacgaggcgaaagacctggagttcctcaacagcggcatccgcatcgtgaaccccatcatgggcgtcgccttctggaaggatgacgtggtcgtcaaggccgaggaagtctcggtgcgcttcgaagaaggccagcccgtggccctgaatggcgtcgagttcaacgacccggtagagctgttcctggaggccaaccgcattggcggcagccatggtctgggcatgtgcgaccagattgagaaccgcatcatcgaagccaagagccgcggcatctacgaggcccccggcctggcgctgctgcacattgcctacgagcggctggtgagtggtatccacaacgaagacaccatcgagcagtaccgcgtgaacggcctcaagctcggccgtctgctgtaccagggccgctggttcgacccccaggcgatcatgctgcgcgaaaccgcacagcgctgggtggcgcgcgccgtgaccggcaccgtgacgctggagctgcgccgcggcaacgactattccatcctcaacaccgagtcgcccaacctgacctacgcgcccgaacgtctgtcgatggaaaaggtggaagacgcgcccttcagcccactggaccgcatcggccagctgaccatgcgcaacctggacatcgtggacacgcgcgacaagctgggcgtgtactcgcgcgctggcctgctgtcgctgggaggcaatgccgccctggcccagctggaaaacgaccgcaagtaag

SEQ ID NO: 316841 - DNA, 1186 bp, Unknown
  Bacterial polypeptide expressing nucleotide sequence isolated from the Sargasso Sea
aatgaaaaaaattgttttagcctactcaggcggtttggatacatctataattttgagatggttgcaagaaaattataatgctgaagtaattgcttacacctctgatattggacaagttttagataaaaaaaaaattattaagaatgctaaaagactaggcgttaaaaaaataattattgaaaatcttaaaaatatctttgtgaaagattatgtttttccaatgataagagctcatgcagtttatgaaggagtatatttattaggcacatctattgccaggccattaattgcaaaaaggcaagttgaaattgcaaaaaaatttaaagcttttgcagtttcgcatggcgcgactggaaaaggcaatgatcaagtaagattcgaacttggttactcatattttggtaaaaataagattaaaacaattgcgccttggagagagtggaaattacaatcaagagcagatttaattagatatgcaaaaaaaaacaatattccaattcctaaagataaaagaggtgctccaccattttctgtagacgacaatatttttcatacctcaacagagggtaaagttttagaggacccaaaaaactcagctcctgaatttatttatcaaagaacagtttcaccacaaaaagctcctaacaaacctacaaaagtaaaaattacttttaaaaacagtgacccaattgcagtaaatggaaaaaaattaagtcctgaaaagcttttaagtaaattgaatattctggctgggaaaaatggaattggaagagttgatctagttgaaaataggtttattggaattaaatctagaggtgtttatgaaactccaggtggaactttgttgtatactgcacatagagctatagaatctgttactcttgataaagagaccgctcataaaaaagagagaataatgccagagtatgctgagctggtatataacggttactggttttctaaaaaaagattaaaattacaaaaacttattgataaaaaaagaaacaaagtgtctggtgatattgttttaagtttatacaagggaaacgtaactattttatcaagaaggacaaaaaataaagcttattcaatgaaaaaagtttcttttgaggagaataaaacctttaataaaagaaaagttgaaaatttcataaaatttcactctaaacagttaaataaagcctaa

SEQ ID NO: 316842 - DNA, 1078 bp, Unknown
  Bacterial polypeptide expressing nucleotide sequence isolated from the Sargasso Sea
gctggaaccgattcgtcaaaaggccctggatgccggtgcgagtcagtccttggtgggagatctgattcagcccttcatcgaggagttcgccttccctgccatccgcgccaacgcgctgtacgagggtcgctatcccctctccacggcactggcccggccgttgatcgcccgtcgactggtggaggtggcccgtgaggtgggtgcagacgctgtggcccatggctgcaccggcaaaggaaatgatcaggtgcgcttcgatgtggcgattgccgcgctcgctcccgatctgaaggtgctgacacctgccagggagtgggggatgagtcgcgaagagaccattgcctacggcgagcgctgcggaattccggcaccggtcagcaagaaatcgccctattcgatcgacctcaaccttctgggtcgcagcatcgaggctggcccgcttgaggatccgatggtggcgcctccggaggaggtgttcgccatgacgtcaccggtgtcggagacgccggatgcggctgaggagattgagatcgcttttgaagccggtaaccccgtcgccatcaatggccagagcctggatccggtggcgatgatcagggaagccaaccgtctggccggcagccatggcatcggtcggctcgacatgatcgagaaccgggtggtggggatcaaatcccgcgagatctacgaaacgccaggcttgctgctgttgatccaggcccatcaggaactggagagtttgacgttggccgcggatgtgctgcgcagcaaacgtcagctggagatgcagtgggctgatctggtgtatcagggcctgtggttcgggccgctgaaggatgctctggacggtttcatggaccgcacgcagcagcacgtcaatggcgtcgtgcgcctgcgtctgcacaagggcagcgccacggtcatcggtcgcggctcaacccagagcagcctatatgtgcctgagatggcgtcctatggcagcgaagacaagtttgaccaccgcgccgccgaaggcttcatctacgtctggggattgcccacccgtctctgggctgcatcgcaacggacatcaggctga

SEQ ID NO: 316843 - DNA, 1012 bp, Unknown
  Bacterial polypeptide expressing nucleotide sequence isolated from the Sargasso Sea
gatgcagcaggtaaaaaaagttgtactagcttattctggtggggtagatacgagtgtttgcattccatatttaaagaatgaatatggaatttcagaagtggttacttttgtagcagatcttggacaaggcgaggatctagaacttattaggcaaaaagctttaaattctggtgcatctaagtcaatcgttggcaatttagttaatagttttgttgagagatacgcttttccagctattagagcaaatgcattatatttagataaataccctttatctacggctcttgctaggcctttaattgctgaaaatcttgtgaatattgctagagagagtaatgccgatgcagtagctcatggatgcactggtaaagggaatgatcaagttcggtttgatttagcaataaatgctttaggccctgatttaaaaatcattactcctgcaagggagtggaatatgagtagagaagaggcaatagtgtatggagaaaaatttggtattcctgcaccagtatcaaaaaaatcaccatattcaatagatgttaatttgcttggtaggagtattgaagcaggtatattagaagacccaatgcaagaagcacctgaagatatattttcgatgacatcatcaattgataattctcctgattcttatcaagatatagaaattgtttttaaaaatgggtttccagttggaattaatgatgaatttttaaatcctgtagagattattcaaaaaactaatcatcttgcaggtaatcacggttttggaagaatagatatgattgaagatcgagtagtaggaattaaaagcagagagatttacgaaacacctggcctcttacttttaatcaaggctcacaaagaactagagagcataacattaagtcccgatgtagtcgattttaaaggaatagtggagaaaaaatggtgtcaactagtctatcaaggtttttggtttggacctcttaaagaaagtttagatgcatttatatcatcgactcaaacttcagtt

SEQ ID NO: 316844 - DNA, 1192 bp, Unknown
  Bacterial polypeptide expressing nucleotide sequence isolated from the Sargasso Sea
aatgaaatctaataaacgaatagttttagcttattcaggaggattagatacatctataattctaaaatggcttcaagaaaattataacgctgaagtcatttgctacacggctgatataggccaagagattaatcgaaaaaaaataatcaataatgctaaaaaatttggtgttaaaaagattataattaaagatttaaaaaatctttttgtaaaagattatgtttttcctatgatacgaggtaatgcgatttatgagggagtttatttattaggaacttccatagcgagaccattaatcgcaaaagaccaaataagaatagcaaaaaaatttaaagcatacgcagtatctcatggagcgactggaaaaggtaatgatcaagtcagatttgagttaggttatcactattttggcccaaagataaaagttatagcaccttggagaatttggaaattaaaatctagaagcgatttaataaattatgcaaaaaaacataagatacccatcccaaaagataaaaaaggtgcgccccctttttctgttgacgataatttatttcatacctcaactgagggtaaaattttagagaacccaaaaaattcagctccagaatttattttccaaagaacaacctctcctgaaaaagcaccaaataaaccaacttttatttcaattaattttaaaaatggtgaccctgttggaataaatggaaaaaaattaaatcctgaaaacattcttactaaattaaattttattgctggaaaaaatggcataggaagagttgacctagttgaaaatagatttcttggaattaaatcaagaggagtttatgaaacaccgggcggaacacttttaattcatgcccatagagctattgagtcagtgacattggataaagaaacaatgcacaaaaaagactcgattatgccaagatatgccgaactgatttataatggttattggtactcaaaagagagatttaaattacaaaaaattattgatcaaaaaagaaataaggtgaatgggtcagtaaaacttaaactatacaaagggaatattactattcaatctagaattacaaaaagtaatgcatactcaatgaaaaaagtttcttttgaagaaaataaaacatttaataaatctaatgttgaaagatttattaattatcacaagaaaaaactgagatatttataa

SEQ ID NO: 316845 - DNA, 1113 bp, Unknown
  Bacterial polypeptide expressing nucleotide sequence isolated from the Sargasso Sea
catgagcgatatcaagaaagtcgtgctcgcctattcgggcggcctcgacacctccgtcatcctgaagtggttgcaggacaactacgacgccgaagtcgtcacgtttacggccgacatcggccagggcgaagagctggaacctgcgcgcaaaaaggccctgcaactcggcatcaagccggacaacattttcattgaagacctgcgtgaagagttcgtgcgcgactacgtgttcccgatgttccgcgccaacacgatctatgaaggcgaatacctgctgggcacgtcgatcgcgcgtccgctgatcgccaagcgtcagatcgaaatcgcccgcgccaccggcgcgcaagcggtgtcgcacggcgcaaccggcaagggcaacgaccaggttcgtttcgaactcggttactacgcactggaaccgggcatcaaggtgatcgcgccgtggcgtgaatgggatctgctgtcgcgcgaaaagctgctcgcgtacgccgaaaaggccggcattccgatcgaaatgaagcacaagcaaggcggcgcgccgtattcgatggacgcgaacctgctgcacatctcgttcgaaggccgtcacctggaagacccgaaggccgaagccgaagccgacatgtggcgttggacggtgtcgccggaacaggcgccggatcaggctgagtatctcgacatcgagtatgagcacggcgacccggtcgcgatcaacggcaagcgtttgtcgccggccgagatgctgaccgagcttaaccgcctgggcggcaagcacggcatcggccgtctggatctggttgaaaaccgttacgtcggcatgaagtcgcgcggctgctatgaaacgccgggcggcaccatcatgctgaaggcgcaccgcggtatcgagtcgatcacgctcgaccgtgaagtcgctcacctgaaagacgatctgatggcccgttacgcgtcgctgatttataacggctactggtggagcccggagcgccgcgccatccaggtgctgatcgaccatacgcaagagaaggtcaacggctgggtgcgtgtaaagctgtacaagggcagcgtctcggttgtcgcgcgcgattcgaaagaaacgctgttcgacaagaccat

SEQ ID NO: 316846 - DNA, 331 bp, Unknown
  Bacterial polypeptide expressing nucleotide sequence isolated from the Sargasso Sea
cagagcaattgaaagtataacactagacagaggagaagctcatttaaaagatgaaataatgccaaaatatgcagagattatatataacggtttatggttctcttcagaaagatacgcaatacaaaaactaattgactcaacacaaaaaaaagtaagtggggatgtaaaaattaaaatttttaaaggaaatgtaatagtacttggtagaaaatctcaaaacagtttatataataatagtttagtttcttttgatgagaagggtgattatgatcaaaaagatgcagaaggctttattaaaattaattctattcgtctaaaaaacttaaaataa

SEQ ID NO: 316847 - DNA, 664 bp, Unknown
  Bacterial polypeptide expressing nucleotide sequence isolated from the Sargasso Sea
aatgaaaaataaaattgttttagcctactcaggcggattggacacaagcgtaatactgaaatggctgcaaactgaatataacgcagatgtcattgcttatgcagcggatcttggtcaaggtgctgagttaactgaagcgaaaatcaaagcaaaaaaacttggtgcaaagaaaatatacattgaaaatctaaaagaagaatttgttcgagattatgtttttccaatgtttcgttgtaatacaatctatgagggtgagtaccttctaggtacatcaatcgctcgaccattaattgctaagagacaaattgaaatagcaaaaaaagaaaaagcttatgctgtctcccatggagcaacgggtaaaggaaatgaccaagtacgatttgaattttcttattatgccttagaacctaaaatacaagtgattgcaccttggagagagtgggatttattatcaagaacaaaactattgaaattcgcagccaaaaacaaaatccctatcatgaaacataataaaaaagagtccccttatagtgtggatgcaaatattcttcatcgttcagcggaaggaaaaatacttgaagacccttggaaaagaccacctgaaaatgtttttggtatttctaaaagccctcagttagccccgaacaaagagacagtgataacc

SEQ ID NO: 316848 - DNA, 1252 bp, Unknown
  Bacterial polypeptide expressing nucleotide sequence isolated from the Sargasso Sea
aatgaaaaaggaaaaggttgttctcgcttacagtggtgggctagatacatcaataatattaaaatggttagttaataaaagatttgaggttatttgttttatcggtgatgtcggtcaaagtgatgattttgatttagtaaaagaaaaagctattaagcttggtgcatctaaagttcatataaaggatctacaagaagaattcattgtagactatatttttcctgcactacaaggaaacgccttgtatgaagggagatatcttttaggaacttctttagcaaggccagttcttgctaaagctcaaattgatttagctaatgaagaaggagctaccattgtttctcatggatctactggtaaaggcaatgatcaagtaagattcgaattatcatattatgcacttgcgccggatattaaagttcttgcgccatggaaaaataatgaatttctgaatcaatttaaggggcgagatgatttattagattatgcaaaaaaatggtctattccggtgactgcttccaaaaatagtccttatagtgaagatgaaaatattatgcatattagtcatgaagcaggtgaattagaaaatccagatactagaccagaagaaagcgtatttagtctaacaaatagtatcgctaattctgatgagaatgaatcactaatagaaattcattttaaaaatggtatgcccacaaaagttaaaaacatggatgatgggaaaaacatatcgggagcattaaatttatttagatatcttaatgaactaggtaatcgccatggaattggaagagtagatatggttgaaaatagatttattggtattaaatctagaggtatatatgaaacgccaggggccacaattttatgggaagcacatagagatcttgaaggcattgcaatggataaagaagtgatgcatataagagatatgttaataccaaagttctcagaattaatttataatggtttttggttttcacctgaaatggattttttacttacagcaataaataaaagtcaggaagctgttgacgggaaagtcaaacttgcattaattaaagggaatgtaattacaattggtcgagaatctccatcttcattatatgataaagatctatcaagcatgaatgtagagggtggttttgatgctactgattcaacaggattcataaatattaatgcaattcgattaaaagcacacaatcttattatgaaaaagataaacccatataaatggaggaaggattaa

SEQ ID NO: 316849 - DNA, 1186 bp, Unknown
  Bacterial polypeptide expressing nucleotide sequence isolated from the Sargasso Sea
aatgaaaaaacaaaagaagattgtactcgcctattcaggtggtttggatacgtctatcattcttaaatggcttcaagaaaattatgatgctgaagttatagcatacactgctgatgttgggcaggaaatggatagaaaaaaaataattaagaatgcaaaaaaattgggagttaaaaaaatcataattcaagatctaaaaaacatttttgtgaaggattatgtgtatcctatgataagaggtcatgctctttatgagggcgtttatttattaggtacatctattgcaagaccactgattgcaaaagatcaaataagggttgctaaaaaatttaatgcttatgctgtctcacatggttcaacaggaaaaggaaatgatcaagtgagatttgaacttggatatcattactttggtcctaaaattaaaataattgcgccatggagaatttggaaattaaaatcaagaacagatctaattaattatgcaaaaaaacatggaatacctattcctaaagataaaaaaggagcgccacctttctcagtagatgataatttattccatacctcaacagagggtaaagttttagaaaatccaaaaaattctgcacctgaatttatatttcaaagaacaacttcccctgaaaaagccccaaacaaggcaagttttataacaattaattataaaaacggcgatccagttggtctgaatggaaaaaaattatctccagcgaaagttttggataaactcaatcaattagccggcaaaaatggaattgggagagtagatttagttgaaaatagattcattggaataaaatcgagaggagtttatgaaactccaggaggaacattattgcttatggcacacagagctatggagtctgtaactctagataaagacacaatgcataaaaaagatgaggttatgccaagatatgcagagcttatttataatggctattggtattcaaaggaaagatttaaactgcaaaaaatagtcgatttaaatagaaataaagtaaatggatcagtaaaacttaaactttataaaggaaatattacaattcaatcaagacaaacttccagtaatgcttactcgatgaaaaaagtctctttcgaggaaaataaaactttcaataaatcaaacgttgaaagatttatcaacttccataagaaaaaattaagataa

SEQ ID NO: 316850 - DNA, 1216 bp, Unknown
  Bacterial polypeptide expressing nucleotide sequence isolated from the Sargasso Sea
gatgcagcatgtaaaaaaagttgtactagcttattctggtggcgtagatacgagcgtttgtattccatatttaaagaatgaatatggagtttcagaagtggttacttttgtcgcagatctaggtcaaggcgaggatttagaacttattagacaaaaagctttaaattctggtgcatctcaagcaattgttggcaatttagttaatagttttgttgagagatacgcttttccagccattagagcaaacgcattatatttagataaatatcctctatctacagctcttgctaggcctttaattgcagaaaatcttgtaaatattgctcgagagtttagtgctgatgcagtggctcatggatgcactggtaaagggaatgatcaagttcgatttgatttagcaataaatgctttaggtcctgatttaaaaataattactcctgcaagggaatggaatatgagtagggaagaggcaatagtgtacggagaaaagtttggtattcctgcaccagtatcaaaaaaatcaccatattcaatagatgttaatttacttggaaggagtattgaggcaggcatactagaagacccaatgaaagaagcacctgaagatattttcgcaatgacatcatctattgagaattcacctgattctcctcaagaaatagaaattattttcaaaaatggggttcctgttggaattaatgatgaatctctaacccctgtagagattattaaaaaagctaatgttctcgcaggtgagcatggttttggaagaattgatatgattgaagatcgagtagtaggaattaaaagtagagagatttatgaaacacctggcctattacttttaatcaaagctcacaaggaattagaaagcattacattaaatccagatgttgtcgattttaaaggaatagttgaaaaaaaatggggtcaacttgtctatcaaggtttctggtttggtcctcttaaagatagtctagattcatttatttcgtcgactcaaacttcagttaatggaagagtaaagattagacttcataaggggaacgcaatagttatcgggagaatgtcggaaaataattcactttatagggaagatttggcaacttatagcaaagacgatgtttttaatcattctttagcagagggttttatttacatgtggggtatgtctaataagatatgggctgagttaaattcaaaaacaaaagattaa

SEQ ID NO: 316851 - DNA, 1114 bp, Unknown
  Bacterial polypeptide expressing nucleotide sequence isolated from the Sargasso Sea
agttataacttttactgcagatatagggcaagatcataatccacaagaagttaacgaaagggcaaatttaattggcgctaataaagtaatcatagaggatttaaaagaagattttgttaaggactatgtatttccaatgttcagagccaacactttgtatgaaggtgaatatttgttaggaacctctatagcgagacctttaataagcaaacgtatgattgaaattgctgaagaagagggcgcagatgcaatttctcatggtgctacgggcaagggaaatgatcaaataaggtttgaaattggagcatactctttaaatccagccatagaagtcatagcaccttggagaacgtgggagtatggatctagagctgatttagtagattattgtaaaaaaaatcaaattaatattgatgctgatccagatgaaccgctttattcaacggatgaaaacattttacatacttcttatgagggtgagattttagaagatccttctttacctgctccagaatcaatctggcaaagaacttcagccttaagggatacacccgatgaagaggaagaaattaccataaattttgaaaacggagatcctgtaggtttagatggcaataacttaaatgcttctgagattctaggtaagttaaatagtattgcaggagatcatggtatcggaagacttgatctggtagagaatagattcacaggtatgaagtctagaggttgctatgaaacaccaggcggaactattttactcaaagctcatagagctattgaatcattgacactcgatgcgaatacaggtcacttaaaagatgagctaatgccaaaatatgcgcaactgatttatgatggattctggtggagtcctgaaagagaagcattacaagctcttattaacaatacccaagaactagtaacgggttcggtaaaattgggtctttataaaggcaatataataataaaagaaaggaaatctccttatagtctttacgattcgaaaatagtaacctttgaagatgacaaaaatgcttacaaccaagctgatgcaactggttttattaagatcaattcattaagattaaaagcgaacgcaaaaagaaagaaatag

SEQ ID NO: 316852 - DNA, 1189 bp, Unknown
  Bacterial polypeptide expressing nucleotide sequence isolated from the Sargasso Sea
atgaaatcaaaaaaaagaattgtactcgcttattctggtgggttagatacgtcaattattcttaaatggcttcaagaaaattacaaagctgaaataatttgttatacagctgatataggtcaagaaattgataaaaaaaaaataattaataatgcaagaaaactaggagtaagaaaagtaataataaaagatcttaaggatacatttgttaaagattatgttttcccaatgctaagaggtcacgcagtttatgaaggagtttatttgttaggcacctctattgcaagaccattgattgcaaaagatcagattagaattgcaaaaaaatataaagcttatgcagtttctcatggatcaactggaaaaggtaatgatcaagtaagatttgaacttggttatcatttctttgggccaaagataaaaataattgcaccatggagaatttggaaattaagttccagaacagacttaattaaatatgcaaaaaaacataagataacaattcctaaagataaaaaaggtgctccccctttttcagttgatgaaaacctttttcatacatcaactgagggcaaggttttagaaaatcctaaaaattctgcaccagaaattatttatcaaagaacagtttcgccagaaaaggcacctcgtaaagcatcttttgtaacaataaattttaaaaatggagacccctttagattgaatggaaaaaaatttagtcctgcaaaattacttgagaaattaaatcaacttgctggtaaaaatggaattggaagagttgacttagtagaaaatagatttttaggaattaagtctagaggagtatatgaaactccaggaggaacattactaattaaagcccatagagcaattgaatctgtcactctagacaaagagactatgcacaaaaaagataacattatgtctagatatgcagaactaatttataatggttattggtattcaaaagaaagatttaaactccaaaaaattgtagatcttaaaagaaataaagttaatggaagtgttaaactaaaactttataaaggtaacataactataatatcgagaatgactagcggcaaagcttattcaatgaaaaaagtttcattcgaagagaacaaatcatttaataaaaaaaatgttgagaaatttataaattttcataagaaaaaactacgttcttaat

SEQ ID NO: 316853 - DNA, 1204 bp, Unknown
  Bacterial polypeptide expressing nucleotide sequence isolated from the Sargasso Sea
actgaagattgttagcgtggtaaaaaaaatagtactagcatattcaggtggattggacacaagtgttatattaaaatggttacaactaaaatataattgccctgtagcaacatttacagctgacttaggacaaggggatgagcttgagccagtaagggaaaaagcagaatcacttggagtaaaagaaatatttatagaaaacctccaagaagaatttgtaaaaaactatgtctttccaatgttcagagcgaacaccttatatgaaggaacatatttattaggaacagctattgcaagacctttaatagcaaaaagacaaattgaaatagcaaaggaagtaggagcagattcagtggctcatggggcaactggaaaagggaatgatcaagtacgttttgaattaggctactatgcaaacgacccttcaataattgttatagctccctggagagagtgggatttaagctctagaaaagaattagttaattttgcgcaaaaatatcaaataccaattcctaaagataaaaaaggtgaacctccttttagtactgatgctaatttattacatacttcctcagaaggtaaggttttagaagatccatggttagaggcacctgaatatgtatataatcgtaccacatctctattagatgcgcctgataaacctgaagaaataaatattatttttgagaatggagacccagttgctataaataataaaaagatgaaagctcatgaaattctaacttcattaaacaatattgcgggcaaacatggcgtaggacgaattgatattgttgaaaatagattagtaggcatgaaatctagaggggtttatgaaactccaggaggcaccatactccttcatgcacatagagcaattgagagtataactttagatagaggagaagcgcatttaaaagatgaaatcatgcctaaatatgcagaaataatttacaatggactttggttttcttcagagagagaatctatgcaaaaaattattgataaaactcaagtaaatgtttccggagaagttcgtctaaaaatttataaagggaatgtaatagtatgtggtcgcaaatctgcaaacagcctatacgatacatctctagtatcttttgatgaagaaggacaatttaatcaaaaagatgccgaaggttttataaaaattttatcactacgtttaaaaaaaagaaaataa

SEQ ID NO: 316854 - DNA, 1018 bp, Unknown
  Bacterial polypeptide expressing nucleotide sequence isolated from the Sargasso Sea
gttaaaaaaataataatcaataatttaaaaaatacgtttgtaaaagaatatgtcttcccaatgattagaggtcacgcagtttacgaaggggtttaccttcttgggacatcgattgcgagaccgttaattgcaaaagatcaaattaaagttgctagaaagtttaaagcctttgctgtatcacatggatcaaccggaaaaggtaatgaccaagttagatttgaacttggatatcattactttggtccaaaaataaaagtgatagctccttggagaatttggaaattaaaatcaagaactgatttaattaattatgcaaaaaaacataacattccaattccaaaagataaaaaaggtgccccacctttttcagtagatgacaatttatttcatacatctactgaaggaaaagttttagaaaatccaaaaaattcagcgccagaatttatttttcaaagaacaacttcacctgaaaaagcacctaataaacctagttatatttccataggtttcaaaaacagtgatccgattagtattaatggaaaaaaattaaccccagaaaaacttttagaaaaattaaatcagatcggtggaaaaaatggtgttggaagagttgatttagttgaaaacagatttattggaattaaatcaagaggtgtttatgaaacaccaggtgggacattacttttaatcgctcatagagcaatggaatctgtgacattagataaagatactatgcataaaaaagattctattatgccaagatatgcagaattaatttataacggttattggttttcaaaagaaagatttaaattacaaaaaatagtggatctaaaaaaaaataaggtaaatggaagtgttaagctaaaactttacaaaggtaatgttacaattcaatcgagaatgacaaaaagcagtgcctactccatgaaaaaagtttcttttgaagagaataaaacttttaacaaaactaatgttgaaagatttataaatttccataaaaaaaaattgaagtaaa

SEQ ID NO: 316855 - DNA, 859 bp, Unknown
  Bacterial polypeptide expressing nucleotide sequence isolated from the Sargasso Sea
actggaaaagggtaatgatcaagtaagatttgaaattggttactacagtttgcgaccagatataaaagttatttcaccatggcgtgaatggaacctttcaagcagaactaatttaataaattatgcagaaaaaaatcaaatacaagtccctaaagacaaaagaggagaagcaccatttagtattgatgcaaatttattacatatttcagcagaaggaaaaattttagaagatccatgggtggaaccagaagaatttatatattctagaactgtgtctccattggaagctccagataaaccaactgaaataatattagaattcttgaatggtgatccagtcgaattaaatggtaaaagcttgtctccagctaaaatgcttcatcaattaaatatttttggtggaagaaatggaattggaagaattgatttagttgaaaatagatttgtaggaatgaaatctaggggcgtatacgaaactcctggtggtactattctatttcatatgagaagagctattgaatcaattaccttagacagaggtgcagcacatttgaaggatgaattaatgcctaaatatgcagaattgatttataatggattttggttttctccagaaagagaaatgttacaagcctcaatagacgtgagtcaaaaaaatgtttcaggaacagtaagagcgaaattgtataaaggtaatgtcatcataacaggaagaaaatcacccttttctttatatagtgaaagcttagtaacttttgaagaaggtacagcagattataatcattctgatgctgaaggatttataaaattaaacgcacttagattgagagttaaaaaaataattgaaagcgcttcttaa

SEQ ID NO: 316856 - DNA, 385 bp, Unknown
  Bacterial polypeptide expressing nucleotide sequence isolated from the Sargasso Sea
aatgcttaaaggaaaatctaaaataaaaaaaatagttttagcttactctggaggcttggatacatcagttattttaaaatggctccaagataattatcaatgtgatgttgtaacttttactgcagatattggccaaggtgaagaagttcagcctgcgagaaataaagcaaaatcattaggtgtcaaagagatttttattgatgatttaaaagaagagtttgtaaaagatttcgtttttcctatgtttagagcaaatgccttatatgaaggggtatatttacttggcacctctattgctagacctctaattgccaagagacagattgagattgcagaattaactggttctgacgctgtgtcacacggcgcaactggaaaagggtaa

SEQ ID NO: 316857 - DNA, 1192 bp, Unknown
  Bacterial polypeptide expressing nucleotide sequence isolated from the Sargasso Sea
atgagtcagaaagtcaataaagtcgttttagcatattcagggggccttgatacctctgttattttaaaatggttaaaagaaacatatcaatgtgaggttgcaacattcactgctgatcttggtcaagatgaagattttgaagcagttaaaaagaaagctgcccaacaaggaacagctgaaatatttgttgaagacttaaaagaagagtttgtaaaagattatgtcttcccaatgtttagagcaaatccattgtatgaaggatattatttactaggtacatcaatcgcacgtcctcttattgcaaagaaacaaattgaaatcgcaaatcaaattaatgcagatgctgtatctcatggtgcaactgggaaaggcaatgatcagatccgatttgaattaggatactattttcataatcctgatattcatatcatcagcccttggagagaatgggatatgaattcaagagaatctcttgttcagtacgcagaccaaaatggaattgaaatacaaaaagataaaagaggagagcaaccatttagtattgatgagaatattttacactcttcagcagaaggaaaagttttggaagatccaagccaagaagcgcctgaatacgtttattcaagatcagtttcaccatatgatgctcctgatacaccagaagaaatatcaatagactttaagtctggtgatgcatgtgccattaacaatactcctatgagcccatttgaaatattaaaaaaacttaatgaacttggtggaaaacatggcattggtagaattgatttagttgaaaatagatatatcggaatgaagtctagagggatttatgaaactcctggtggtacgatttattatcatgcccatcgtgctattgagagcctcacgcttgataaagaagctgctcatatgaaagatggaattagtccgaaatatgctgagcttgtttataatggatattggttctctcctgaaagagatatgcttcagtcgatgatcaatcagagccaagttaatgtagaaggaaaggttaaccttaaactttataaaggaaatgttataatcaacggaagacaatctgcgaagagcttatacaaccctgacctagccacctttgagtcagataatatctacagccagaaagatgctgaaggatttatcaagctaaatgctctgagactcagacaaaaaa

SEQ ID NO: 316858 - DNA, 793 bp, Unknown
  Bacterial polypeptide expressing nucleotide sequence isolated from the Sargasso Sea
aatgaaaaaaattgttttagcctactcaggcggtttggatacatctataattttaagatggttacaagaaaattataaagctgaagtaattgcttacacctctgatattgggcaagttttagataaaaaaaaaattataaaaaatgctaaaagattaggcgttaaaaaaataattatcgaaaatttaaaaaatatctttgtgaaagattatatttttccaatgataagagctcatgcagtttatgaaggagtatatttattaggcacatctattgccaggccgttaattgcaaaaagacaagttgaaattgcaaaaaaatttaaggcttttgcagtttcacatggtgcgactggaaaaggtaacgatcaagtaagattcgagttaggttactcatattttggtaaaaataagattaaaacaatagcgccttggagagaatggaaattacaatcaagagcagatttaattaaatacgctaaaaaaaatagtataccaattcctaaagataaaaaaggagcaccgccattttctgttgatgacaatatttttcatacatcaactgaaggcaaggttttagaagaccctaaaaactctgctcctgaatttatttatcaaagaacagtttcaccacaaaaagctcctaacaaacctacaaaagtaagaattacttttaaaaacagtgatccaattgcagtaaatggaaaaaaattaaatcctgaaaagcttttaagtaaattaaatattctggctggaaaaaatggaataggtagagttgatctagtgaaaatagat

SEQ ID NO: 316859 - DNA, 1210 bp, Unknown
  Bacterial polypeptide expressing nucleotide sequence isolated from the Sargasso Sea
aatgggaaagaaagaaaatataaataaagtggttttagcctactctggtggactcgatacatcagtaattttgaaatggcttcaagagacttatgattgtgaggtcgttacatttagtgctgatcttggtcaaggtgctgagcttgaagaagctaagaaaaaggctgaggatttgggtgtaaaggaaatctttattgaagatctaaaaaatgaatttgttaaggattatgtttttccaatgttcagagcgaatacaatttatgaaggctcttatttgttaggaacggcaatagctagacctttgatagccaaaaaacaaattgaaattgctaaagaggttggtgctgatgctgtttgtcatggagctacgggaaaaggaaatgatcaaattaggtttgaattagcctattatggtcttaatccaaatataaaagttattgctccatggagagaatgggatcttaactcaagaaaaaaattaattgagtttgcagaaaaaaatcaaattgttattacaaaagataatttaggtgaagacccatattccgttgatgctaatttactacatacatcatctgagggtaaattacttgaggacccatcaaaagaatgtccggaagatgtttatcaaagaactgtttcgccagaagacgcgccagataaagcaacatatattgaaatcgaattcgaaaaaggcgaccctgtatctattgatggaaaaaaattatcaccagaagaattattaactaagcttaatactttaggcggtgaaaatggcattggaagacttgatatggttgaaaatagaagcattggaatgaaatcaagaggaatctatgaaactccaggaggtactattttattatcggcccacagaggaattgagcaaattacattagacagagaagcttgtcatcttaaggatgagataatgcctagatatgcaaaattgatttataatggcttttggttttctccagagagaaaaatgttacaagccttaatcgatgaaagccaagaaaatgtaacaggaatggtaaggttaaagctttataaaggtaatgctacggttgttggtagatcatctgatttgtcactctactcagaggaacatgttacatttgaagaagatgatgtatatgatcaatttgatgctgaaggatttatcaaacttaacgcattaagactaaaactcttaaaaaaagattaa

SEQ ID NO: 316860 - DNA, 1189 bp, Unknown
  Bacterial polypeptide expressing nucleotide sequence isolated from the Sargasso Sea
aatgaaatcaaaaaaaaaaattgtcctagcatactctggagggcttgatacctctattattttaaagtggctccaagaaaattatgatgcagaagtaatttgttacactgcagatgtagggcaagagattaatagaaaaaaaataatctctaatgcaaagaaatttggtgtaacaaaaataattattaaagacttaaaagatgtctttgtaaaagattatgtttatccaatgatcagaggtcatgctatttatgaaggtatctacttgttaggtacgtctatcgcaagaccacttatagctaaagatcaaatcagagttgctaagaaatttaaagcatacgcagtctctcatggagcaactggtaaaggaaacgaccaagtaagatttgaactagggtatcattactttggaccaaaaataaaaatcatagcaccgtggagaatatggaatttaaaatctagaactgatctaattaattatgcaaaaaaacacaacatagctattccaaaggataaaaaaggtgctccacctttttcagttgatgataatttatttcacacctctactgaaggtaagcttttagaaaatccaaaaaactctgctccagaatttatttttcaaagatcagtttcacctgaaaaggcaccaaataaagcttcttttgttactatcaattttaaaaacggagatccatttgctgttaatggaaaaaaactttctccagcaaaattattagaaaaattaaacaaactcgcaggtaaaaatggaattgggagagttgatttagtggaaaatagattcattggtataaagtcgcgaggggtttacgaaactcctggaggtactctattgcttcatgcacatagagccatagagtctgtaaccttagataaagacaccatgcataaaaaagatcaaatcatgcctagatatgccgaacttatttataatggttactggttttccaaagaaagatttaaactacaaaaaattgtagatctaaaaaaaaataaggtaaacggttctgtgaaactaaaactttataaaggaaatgttacaattaattctagacaaactaagagcacagcttactcaatgaaaaaagtttcgttcgaggaaaataaaacgtttaacaagtcaaatgttgaaaaatttattaattatcacaagaaaaaactgcgttcttaa

SEQ ID NO: 316861 - DNA, 1186 bp, Unknown
  Bacterial polypeptide expressing nucleotide sequence isolated from the Sargasso Sea
atgaaatcaaagaaaaagatagttcttgcctattctggaggtttggacacatcaatcatattaaaatggttacaggaaaattatgatgcagaagtaatttgttatactgcagacattggtcaagaaatagatagaaataaaattttcagaaacgcaaaaaaacttggcgtaaaaaatattattattcaagatctaaaagatatttttgtaaaagattatgtttatccaatgattaggggccatgcaatatatgaaggtgtttatttgcttggaacctcaattgctagacctttaatagccaaagatcaaattagaattgctaaaaaatttaatgcctatgctgtgtctcatggatcaacaggaaaaggaaatgatcaagtaagatttgagttaggttatcattattttggtcctaaaataaaagttattgcgccttggagaatttggaagctgaaatctagatcagatctaattaattatgcaaaaaaaaataaaattgaaatacctaaagacaagaaaggagcgccacctttttcagtagacgataatatttttcatacatcaacagaaggaaagttgttagaaaatccaaaaaactctgcacctgactttatctttcaaagaacggtatctccagaaaaagcacctaataaatcttcaattgtaaaaatagactttaaaagtggagatccgattgcagtgaatgggaaaaaattatctccatctaaattgcttggaaaattaaacgacatagctggaaaaaatgctgttggaagagttgatctagtagaaaatagatttatcggtataaaatcaagaggtgtatacgaaacaccaggcggaactttattaatgcacgctcatagggctatagagtctgttacacttgataaagatacaatgcataagaaagaaaaaattatgcctagatatgcggaactgatttacaatggatattggttttctaaagagagatttaaattacaaagaattgtagatcttaagagaagtaaagttaatggatcagttaaattgaggttatataaagggaatgttattattcattcaagaataactaaaagttcagcttattctatgaaaaaagtttcatttgaggaaaataaaacttttaataaatcaaatgttgaaagatttattaattttcacaagaaaaaattaaaataaa

SEQ ID NO: 316862 - DNA, 1135 bp, Unknown
  Bacterial polypeptide expressing nucleotide sequence isolated from the Sargasso Sea
atgaaaaaacaaaagaagattgtgctcgcctattcaggtggtttggatacgtctataattcttaaatggcttcaggaaaattatgatgctgaagtaatagcctacacagctgatgttgggcaagagatggataaaaaaaaaatcattaagaatgcaaaaaaattaggtgtaaaaaaaattatcatccaagatctgaagaatatttttgttaaagattatgtctacccaatgataaggggtcatgctctttatgaaggtgtttatttgttaggtacatcgattgcaagaccacttattgcaaaagatcaaattagagttgcaaagaaatttaaagcttatgccgtctcacatggttcaactggaaaaggaaatgatcaagtaagatttgaacttggatatcattactttggtccaaaaattaaaataattgctccatggagaatatggaaattaaaatcaagaacagatctcattaattatgcaaaaaaacatggaataccgatccctaaggataaaaaaggggcacctcctttttcagtagatgataatttattccatacctcaacagagggtaaagttttagaaaatccaaaaaattctgcacctgaatttatatttcaaagaacaacttcccctgaaaaagcaccaaataaagcaagttttataacaattaattataagaacggcgatccagttagtctgaatggaaaaaaattatctccagcgaaagttttgaataaacttaatcaattagccggcaaaaatggaattgggagagtagattcagttgaaaatagattcattggaataaaatctagaggagtttatgaaactccaggaggaacattattgattgtggcacacagagcaattgagtctgtaactctagataaagacacaatgcataaaaaagatgaggttatgccaagatatgcagagcttatttataatggttattggtattctaaggaaagatttaaactacaaaaaatagtcgatctaaaaagaaataaagtaaatggatcagttaaactaaaactttacaaaggtaatattacaattcaatcgagacaaacctcaagtaatgcttactcaatgaaaaaagtctctttcgaggaaaataaaactttcaata

SEQ ID NO: 316863 - DNA, 1189 bp, Unknown
  Bacterial polypeptide expressing nucleotide sequence isolated from the Sargasso Sea
aatgcctaagaaaattgttttagcttactcaggcggactagatacaagtgtaattctcaagtggcttcaaaataaatataaatgccccgtagttactttcacagcagatattggtcaaggagaagaactttcaccggttgaaacaaaagcaaaaagcttaggcgttgaagaaatatttattgaaaatttacaagaagaatttgttaaagattatgtttttccaatgtttagatctaacgctctttacgagggagcttacttgttaggtacagctatagctagacccttaattgcaaagaggcaaattgaaattgctaaaattgtaggagcagatgctgtggcgcatggagctactggaaagggtaatgatcaagttagatttgaacttggatactatgcaaataatccaaaaatcgaagttatagcaccgtggcgagattgggaatttgaatcaagaaatgatttattagattacgcagaaaaaaatcaaataacagtacctaaagataaaatgggcgagcctccatttagtacagatgcaaatcttcttcatacttcttctgaaggtaaacttcttgaagatccttggcttgaaccacccgaacatattttttctagaacaaaatctattgaagatactccaaataaagcagaggttataacaattggatttgaaaacggcgatccagtttctataaatgaagagaaactaaaacctcacgaaattcttacaagattaaattctatagccggtaatcacggagtaggaagaatagatattgtagaaaatagatttgttggaatgaaatccagaggagtttatgaaacaccaggtggaactatattattagatgcaagaagagcaatagagagtattactttggataaaggcgaagctcatcttaaagatgaattgatgccaaaatatgctgaaacaatttataatggtttttggttttcttctgagagagtatcaatgcagaaattgatagattcaatgtcacacaaagttagtggtgatgtcaaaattaaagtatttaaaggtaacgtaattatattaggtagaagatcaagtaactctctttatgacactacattagtttcttttgatgaagttggtgaatataatcaaaaagatgccgaaggttttattaaaataaattcaattagacttcgtaaaaataattaa

SEQ ID NO: 316864 - DNA, 1237 bp, Unknown
  Bacterial polypeptide expressing nucleotide sequence isolated from the Sargasso Sea
aatgagcggaatcaacaagatcgtactggcttactcgggcggactggatacctcggccatcattccctggctgaaggaaaactatgatgcggagatcatcgccttcgtcgccgacgtcggtcaggagcgtgacgatctggaagggatcgagcaaaaagccatcgcctccggtgccaccaagtgcatcgtcaaggatctgcgggaagagttcgtcaaagagtacgtctacccgaccctgaagaccggcgccgtctatgagggcacctatctgctggggacctccatggcccgtccggtgatcgccaaggccatggtcgaggccgcgctggcggaaggggccgatgccatctcccacggttgcaccggcaagggcaacgatcaggtgcgtttcgaaggtgcggtcgccgcgctggcgccccagctgaaagtgatcgccccctggcgtctgtgggacatgcgctcccgggaggatctgctggcctacctggagacccgcaacatcccctgcaaggcgaccctgaagaagatctacagccgcgatgccaacgcctggcacatctccaccgagggtggcgagctggagagcacctggaacgagccgtccgaagcggtctggcagtggaccgtgcccgccgagcaggcaccggatcagccggagtacgtcaagctgaccgtggcccagggtgaagtggtggccgttgacgaccaaccgctcagcccgcaccagatcctgatgaccctgaacgagcgtgccggcaagcacggcgtgggccgcatcgacatcaccgaaaaccggatggtgggcatgaagtcccgcggctgctacgagaccccgggaggtaccgtgatggtcgccgcactgcgcgccgtggaagagctggtactggatcgcccgacccgcgcctggcgggaaaagctgggggccgagttctcccacctggtctatgacggtcgctggttcaccccgctgtgcaaagccattgtcgcctctgccaacgccatcgctgaagatctcgacggtgaagtggtgctgaaaatgtacaagggtcaggtcaccgcggtgcagaagaagtcgccgaacagcctctactccgaagacttcgccaccttcggcgccgacgaagtgtacgaccagagccatgccgaaggtttcatccgtctctataccctggccagccggatccgcgccatgaaggagcagcatcaagccatcggtggtgatcacacccacggctaa

SEQ ID NO: 316865 - DNA, 1234 bp, Unknown
  Bacterial polypeptide expressing nucleotide sequence isolated from the Sargasso Sea
atggggacgatagataaaaaaaatattaacaaggtggttttagcctattctggcgggctggatacgtctgtcatacttcgctggttacaggaagaatatgactgtgaggtggtgaccttcacggcagatctcggtcaaggtgaagaagtcgagccggcgcgggctaaagctgaagctgccggagtcaaagaaatttatattgaagatttacgtgaggaatttgtccgtgaatttgtgttcccaatgtttcgcgctaatgcggtttatgagggtgtttatttgctaggcacctccattgcgagacctttaatcgccaagcgccagattgagattgcagcaaagactggagcggatgccgttagccacggcgcgacgggtaaagggaatgatcaggtgcgatttgagcttggctattatgcccttaatccagaaattcatgtaattgcgccatggcgtgaatgggatctcgacggccgccagcgattgcttgaatatgctcggaaacaccagatcgatgtcccgcgagataaagaggacgagccgccttattcaacggatgctaatttgcttcatatctcctatgagggccgcgcactggaagacccttggattgagccaaacgataagatgtttacgcggagtgtctccccggaagtagcccccgatacgccgacctatatagagttagaatttaaaggcggtgacccgattgcaattaatggagacaaactgtcgccagcggtgatgctcaccaagctaaatgagcttggaggagcaaacggtatcggccgacttgatctagtcgagaaccgttatgtcggcatgaagtcgcggggggtttatgaaacacctggtggtacaatattaatgaccgctcgtcgcggaatggaaagcatcacactcgatcggggggcagcgcatctaaaagacgagttgatgccgcgttatgccgagctggtctataatgggttttggttttcacctgagcgggaaatgattcaaacggccgtcgatgaaagccaaaaatttgtcgctggcacagttcggttgaagctctacaagggtttagtttctgttgttggtcgaaaatcattgaacagtctctattcggaatcccatgtcacattcgaagctgatacggtctataaccaacgtgatgcggagggttttattaagcttaacgcattaaggctgaaactgttgcaagcggcacaaaaacgtttcactagttgac

SEQ ID NO: 316866 - DNA, 859 bp, Unknown
  Bacterial polypeptide expressing nucleotide sequence isolated from the Sargasso Sea
aatgaaaaaaattgttttagcttattctgggggtttagatacctcgataattcttaaatggttacaaataaattataaagctgaggtcatcgcttatacttcaaatattggtcaagatttaaataagaagaaaataatacagaatgcaaaaagacttggtgttaaaaaaattataattgaagatttaaaaaatatttttgttaaagactatgtgtttccaatgataagagctcatgctgtttatgaaggtgtttatttgcttggaacctctatagcaagacccttaatagcgaaaagacaaattgaaattgcaaaaaaatacaaagcttttgctgtttcacacggtgccactggaaaaggtaacgatcaagttagattcgaacttggatattatttttttggtaaaaaaataaaagtgatagcgccttggagagagtggaagctacagtctagatcagatttaattagatatgcaaaaaaatataaaattccaattccaaaagataaaaaaggggctcccccgttttctgttgatgataatttatttcatgtttcaactgaaggcaaagtactagaaaatccaaggaacgcgcctccagaatttatttttcaaaaaactatttcgccagaaaaagcaaaaaataaagcagttaaaataaaaataggttttaaaaatagcgatcctgtctcaattaatggaaagaagtataaaccagaatttttattagaaaaattaaatacaattggtggagcaaatggcatcggtagagtcgatcttgtggaaaatagattcattggcataaaatccagaggagtttatgaaacacccggcggaactatattgtattttgcacaatag

SEQ ID NO: 316867 - DNA, 949 bp, Unknown
  Bacterial polypeptide expressing nucleotide sequence isolated from the Sargasso Sea
aatgaaaaataaaattgttttagcctactcaggcgggttggatacaagtgtcatattaaaatggctgcaaacagaatataacgcagatgtaatagcttatgcagcagaccttggtcagggtgcagaattaactgaagcaaaaattaaagcaaaaaaacttggtgcaaagaaaatttacattgaaaatttaaaagaggaatttgtcagagattatgttttcccaatgtttcgttgtaatacaatttatgagggggaatatcttttaggtacatcaattgctcgacctctgattgcaaaaagacaaattgaaattgcaaaaaaagaaaaagctaatgccgtctctcatggagcaacaggtaaaggaaatgaccaagtacgttttgaattttcttactatgccttagagcccaaaataaaagttattgcaccttggagagagtgggatttgtcatcaagaactaaactgttggaatttgctgctaaaaacaaaatccctatcatgaaacataataaaaaagagtccccttatagtgtggatgcaaatgttcttcatcgatcagcagaaggaaaaattttggaagacccttggaaaagaccacctgaaaacgtttttggaatttcaaaaagccctcagtcagctccaaacaaagagacaattataactattcaatttaaaaatggcgatccaattggtattaacggaaaaaaactctcaccatttaatttattagaaaagttaaataaactcggagcagtaaacggcatcggaagagtggatatagtagaaaatagatacgtaggaattaagtcacgtggtgtctatgaaacacctggcggtacaattctacttaaagcccaccgtgcaatggaaagcattaccttggatagagaggaagtttttacaaaagacgagctcatgcctaaatatgcaagattaatttacaatggt

SEQ ID NO: 316868 - DNA, 1195 bp, Unknown
  Bacterial polypeptide expressing nucleotide sequence isolated from the Sargasso Sea
aatgaagtctaaaagaaaagtagttcttgcctactctggcggtctcgatacgtcagtcatagcgaaatggttaatggaaaaatataactgcgaagtaataacatttacagcagatataggtcaaggggaagaaaccaaaagtgcaagaataaaagctaaaaagcttggaattaaaaaaatatatattgaagaccttagggaagattttgtaaaaaattacgtctatccaatgtttagagctaatgcaatatacgaaggagaatattttttagggacatcgatagcaagacctctaataagcaaacggttaattgaaatagctaaaaaagaaaaggctgacgcaatatgtcatggggctactgggaaaggaaatgaccaagtaaggtttgagttatcagcatattctctcaatccaaaaatacaagtgattgctccttggagagaatggacattcaagtcacgaaaggatttaatgagatattcaaaacttcataaaatagacatagattttgataaaggtaaaaaaagcccttactctatggatgcaaatatgctccatatttcctatgaaggtggaatacttgaggacccatgggcagcacctgaagagtctatgtggttaagaacaaattctatagaaaaagcaccaaataaggcagaactcattactcttgagtttaaaaaaggtgatgtgatcaaaataaataataaaactctttcacccgggagaattctagataaattgaatcaacttgcggaaaagcacggtataggtagagcagatatagtagaaaacagatatgtaggtattaaatctcgtggttgttatgaaactcccggtggaaccatatactataaagctcataaagcaattgaatcaattacccttgatagggaagtacttcatctcaaagaagatattataaataagtactcaaggctaatttataatggatattggtttagtcctgagagagtaactttgcaaaaacttattgatgacactcaaaatgtagtaaatggtaaagtaaggattaaattattaaaaggtaatgtagtcattgaaggaagaacttcgcctaatagtttatatgatgagaatttatctacttttgaggatgatgatggatcatatgaccaaagagatgcagaagggtttataaaaattaactcattaagattgagaaagaaataa

SEQ ID NO: 316869 - DNA, 859 bp, Unknown
  Bacterial polypeptide expressing nucleotide sequence isolated from the Sargasso Sea
atgaaaattgtactcgcatattccggtgggctggatacttcggtgttgctcacgtggttaaaggaaaaatacaacgctgaaatgatcgccttctgtgcggacgtggggcaggaggaggaattgcgagggctggataaaaaagccaaacgcaccggagcctccaaaatgtttattgatgatcttcaggaggagtttgccgcagattttatttatcccatgatgcaggccggggcgatctacgaagatcaatattatctcggtacgagcattgcgcgacccttgattgccaagcgcatggtggagattgcccgcaaagaaaaagcccatgccattgctcacggggcgacaggcaagggaaatgatcaggtgcgttttgagcttacggctgcatcactggcacctgaaattgatattattgccccgtggcggatggcggtatttcgcgagcaattccccgggcgtaaagagatgattgattactgtcggaaacacaaggtggacgtcgaggcgagcgccagtaagccgtattcaatggatcgcaatcttctgcacatttcatatgaggcggggattctggaggacacgtggtttgatgcctttgcaccaaagaacaaggagatgttcaagttgtcggtggcgcccgaggatgcgccggataagccggagtatgtgaatctcgagtttgataagggaaactgtatcgctgtgaacggcaaggctctgaatccacttggggtgatgcggaagctcaataagttgggcggcaagcacggcattggccgtgtggacatcgtggaaaaccggtttgtgggcatgaagagtcgcggagtatacgaaacaccgggtggtaccattttgc

SEQ ID NO: 316870 - DNA, 995 bp, Unknown
  Bacterial polypeptide expressing nucleotide sequence isolated from the Sargasso Sea
aaaaaatctttttgtaaaagattatgtttacccgatgataagaggacatgcgttatatgagggtgtctatttgctgggaacttctatagcaagacctttaattgcaaaaagacaaattgctgttgcaaaaaaattcaaagcatttgcagtttctcatggatcgacaggtaagggtaatgatcaagttagatttgaacttggatattattattttggacctagtattaaagttattgctccttggagattatggaagttaaaatcaagaacagacttaattagatacgcaaaaaaaaataaaataccaattccaaaagataaaaaaggtgcgccaccattttctgtggatgacaatctttaccatacttctacggagggtaaaattttggaagatccaaaaaaatcagctccagagtatatttttcaaagaacagttgcccccgaaaaagctcctaacaaagcatcttttgttactataggatttaagaaaggtgacccagtatcagttaataataaaaaactatctccagcaaagcttttacaaaaattaaatttagtcgctggtagaaatggaattggaagagtagatctagttgaaaatagatttataggaattaaatcaagaggagtttacgaaacacctggtggaacacttttagtagtagctcacagagctatggagtcggtaactttagataaaaaaactatgcataaaaaagatgaaatcatgccaaaatatgcagagctaatttataatggtttttggttttcaaaagcgagatttaaattgcaaaaaattgttgatcttaaaagaaatcaagtaaatggctcaattaaactaagattatacaaaggaaatattacaattgtttccagaattagtaagaataaggcgtactcaatcaaaaaagtctcttttgaagaaaataaatctttcaaaaagtcaaaagttgagaaatttatattaggtgcggcaagaaagcttaggtcttaaa

SEQ ID NO: 316871 - DNA, 803 bp, Unknown
  Bacterial polypeptide expressing nucleotide sequence isolated from the Sargasso Sea
aatgaaatcaaaaaagaaaattgttcttgcctattcaggtgggttggatacttcaataattttaaaatggttacaagaaaagtataattccgaagtaattacatatacagcagatataggccaaaaaataaataaaaaaaaaatcatcagtaatgcaaagaaacttggggttaaaaaaattatcataaaaaatttaaaagatatttttgttaaaaattatgtttatccaatgataagaggacatgctttgtatgaaggtgtgtatttattgggtacttcaatagcacgacctttaattgcaaaagatcaaattagagttgcaaaaaaatataatgcttatgcagtttctcatggttctacaggtaaaggaaatgatcaagtgagatttgaattaggttatcattattttggacctaaaattaaaattttatctccatggagaatatggaaacttaaatcaagatcagatctaattaaatatgcaaaaaaaaataatatttcaattccaaaagataaaaaaggtgcacctccattttctattgacgataatttattccacacttcaactgaaggaaaaattttggaaaatcctatgaatgcagcgccagaatttatttttcaaagaacaaaatctccagaaaaggcacctaataaaagttcatttgtgacaatcgaatttaaaaatagtgacccagtatctgtaaatggaaaaaaatattcaccatcaaaacttttaggaaaacttaacaatcttgctggaaaaaatggaattggaagagtggatttggttgagaatagattta

SEQ ID NO: 316872 - DNA, 1204 bp, Unknown
  Bacterial polypeptide expressing nucleotide sequence isolated from the Sargasso Sea
aatgtcaaaagttaaaaaagtagttttagcatattctggaggtcttgatacctcagtgattttaaaatggttacaagaagtttatgattgtgaagttgtaacatttactgcagatatagggcaaggtgaagaaatagagcctgctagattaagagctcaagaaatgggcatcaaagaaatttttattgaagatttaagagaagaatttgttcaggattatgtctttcctatgttgaaagctagtactatctatgaagggacttatttattaggaactgcgatagctcgcccattaattgcaaaaagacaaatagaaattgctaaagagacgggcgcagactcagtttcacacggtgcaactggaaaaggtaatgatcaagttcgttttgaattaggttatcttgggctaaatcctgatattaatattattgctccttggagggagtgggacttagattctagaactaaattgatagaatgggcagaaaaaaggaatatatctgttccaaaagataaacgaggtgaacctccttattcaactgacgctaatttattacacatttcatatgagggaaaagctcttgaagacccatgggtctcagcaacagaagagatgtttacaagaacagtttcccctaataaagcaccagatgaagaagaagaagttattatagaatttaaagagggaactccggtttcagtaaatggtaagcaactaagtcctgcagatttacttgaagatttaaatggaaaagccggcaagcatggagttggaagagtagatatagtagaaaatagatttgttggcatgaaatcaagaggtgtttatgaaacaccaggaggatctatacttcatgtagcacatagagggatagaacaattaatattagatggtcctactatgttgcttagggatgaactcatgccaaaatatgcttctttagtatataatggattatggttttctcctgaaagagaaatgttacaatctttgatagatgaaagtcagaaaaatgtaactggagaggtaaaggttaaattatttaaaggaaattgtagtctagttggacgtcgttcaccgaaaagtatttataatgaaggtatagttacttttgaaactggtaataattatgaccaaaaagatgctgatggttttataaaattgaatgcactgagattacagcagagaaaacgagtaaaatag

SEQ ID NO: 316873 - DNA, 1189 bp, Unknown
  Bacterial polypeptide expressing nucleotide sequence isolated from the Sargasso Sea
atgaaatcaaaaaaaagaattgtcttagcttattcaggtggcttagatacatctataattctaaaatggcttcaagaaaattataatgcagaagtcatttgttacactgctgatatagggcaagagattaatcgaaaaaaaataatcaataatgctaaaaaatttggtgttaaaaagatcataattaaagatttaaaaaatcttttcgtaaaagattatgtttttccaatgatacgaggtaatgcgatttatgagggagtttatttattaggaacttccatagcaagaccattaatcgcaaaagaccaaataagaattgcaaaaaaatttaaagcatacgcagtatctcatggagcgactggaaaaggaaatgatcaggtcagatttgagttaggttatcactattttggcccaaagataaaagttgttgcaccctggagaatttggaaattaaaatctagaagcgatttaattaattatgcaaaaaaacataagatacctatccccaaagataaaaaaggtgcaccccctttttctgttgacgataatttatttcatacctcaactgagggtaaaattttagagaacccaaaaaattcagctccagaatttattttccaaagaacaacttcccctgaaaaagcaccgaataaaccaacttttatttcaattaattttaaaaatggtgaccctgttggcataaatggaaaaaaattaaatcctgaaaacattcttaccaaattaaattttgttgctggaaaaaatggcataggaagagttgacctcgttgaaaatagatttctcggaattaaatcaagaggagtttatgaaacaccgggcggaacacttttgattcatgcccatagagctattgagtcagtgacattggataaagaaacgatgcacaaaaaggattcaatcatgccaagatatgcagaattaatttacaatggttattggtactcaaaagaaagatttaagttacaaaaaattattgatcaaaaaaaaaataaggtaaatgggtctgtgaaacttaagctatacaaagggaatattacaattcaatctagaattacaaagagtaatgcatactcaatgaaaaaagtttcttttgaagaaaataaaacatttaataaatctaatgttgaaagatttattaattatcacaagaaaaaactgagatattaat

SEQ ID NO: 316874 - DNA, 993 bp, Unknown
  Bacterial polypeptide expressing nucleotide sequence isolated from the Sargasso Sea
taaaaaatatttttgttaaggattatgtttacccaatgataagaggtcatgctctttatgagggtgtttatttattgggtacatcaattgcaagaccacttattgcaaaagaccaaattagagttgcaaaaaaatttaaagcttatgctgtctcacatggttcaacaggaaaaggaaatgatcaagtgagatttgaacttggatatcattactttggtcctaaaattaaaataatagctccatggagaatatggaaattgaaatcaagaacagatctcattaattatgcaaaaaaacatggaataccaatccctaaagacaaaaagggagcgccgccattctcagtagatgataatttatttcatacttcaacagagggaaaagttttagaaaatcctaaaaattctgcacctgaatttatttttcaaagaacaatttctcctgaaaaggctccaaataaaccaagctttattactattaattacaaaaatggtgaccctattggcctaaatggaaaaaaattatctccagcaaaagttttggataaactcaatcaattagccggcaaaaatggaatagggagagtagatttagttgaaaatagattcattggaataaaatcaagaggagtttacgaaactccaggaggaacattattgcttgttgctcacagagcaattgagtctgtaactctagataaaaatacaatgcataaaaaagatcaaattatgcctagatatgcagaacttgtttataatggttattggtattctaaggaaagatttaaactacaaaaaatagtcgatcttaaaagaaataaagtaaatggatcagtcaaactaaaactttataaaggtaatattacaattcaatctagacaaacttcaagtaatgcttactcaatgaaaaaagtctctttcgaggagaataaaactttcaacaaatcaaacgttgaaagatttattaactttcataagaaaaaattaagataat

SEQ ID NO: 316875 - DNA, 794 bp, Unknown
  Bacterial polypeptide expressing nucleotide sequence isolated from the Sargasso Sea
ttatcattattttggtcccaaaataaaaattattgcaccatggagaatatggaatttaaaatctcgatcagatttaattagttacgcgaagaaacgcaatattcctatcccaaaagacaaaaaaggtgcatctcctttttcagtagatgataatttatttcatacatcaactgaaggtaagttgctagaaaatccaaaaaattctgcaccagaatttatttttcaaagaactgtttctccagaaaaagctcctaacaaagctactcatgtaacaattaattttaaaaatggtgaccccattggtcttaatggaaaaaaatttggaccagcaaaattattatttaaacttaatcaattggcaggaaaaaatggaataggaagagttgatcttgttgaaaatagatttttaggcatcaagtctagaggagtttatgaaactccaggtggtacattgttaatccatgcacatagagcgattgagtcagttacgcttgataaagaaacaatgcacaaaaaagatgcaataatgtcaaggtacgcagaattgatctataatggatattggttttcaaaagaaaggtttaaacttcaaaaaattgttgatttgaaaaaaaacaaaataaatggatctgttaaacttaaactttataaaggcaatgttacaattcaatcaagaatgacaaaaagcaatgcttactcaatgaaaaaagtttcgtttgaggaaaataaatcatttattaaatctaatgttgagaaatttataaattttcacaaaaaaaagttaagaaactagc

SEQ ID NO: 316876 - DNA, 949 bp, Unknown
  Bacterial polypeptide expressing nucleotide sequence isolated from the Sargasso Sea
aacaaggcagaaagcttaggtgttgaagaaatttttattgaagatcttcaagaagaattcgtaagggattatgtttttcctatgtttcgagcaaatgcactttacgaaggagagtatttacttggaactgctatagcaagacctttaatagcaaagagacaagtagaaatcgcgagaatagttggcgctgacgctgtagcacacggagctactggaaaaggtaatgatcaagtgcgttttgagttaggttattatagtaaccatccagacataaatataatagctccatggagagattgggaatttcagtctagagaggaattaattaattttgcagaaaaaaatcagattattgtgccaaaagacaaattaggagaaacaccttttagtacagacgcaaatcttttacatacttcttcagaaggaaagttattggaagacccatgggtggaaccaccagaatatgttttttctagaactgcatctttagaagatgcatccgatactcctgaaacaatcataattacatataaaaatggtgatccaataaagttaaataataaatcacttaaacctcacacattattaaaagaattgaatcatatagcgagtaaacatggtgttggaagggtagatattgttgaaaatagattcattggaatgaaatcaagaggagtatatgaaacacctggaggaacaatcttaattaaagcccatagagcaatagaaagtattacactagacaggggtgaagctcatttaaaagatcagattatgagcaattatgctgaaattatatataatggcctttggttttcttctgaaagaagggctcttcaaaaacttattgactcaactcagatgaatgtttcgggagatgtaagacttgaaatttttaaaggtaatgtaattataaagggaagaaggtcaaataattccataatatgat

SEQ ID NO: 316877 - DNA, 892 bp, Unknown
  Bacterial polypeptide expressing nucleotide sequence isolated from the Sargasso Sea
tcgagagtttagtgctgatgcagtggctcatggatgcactggtaaagggaatgatcaagttcgatttgatttagcaataaatgctttaggtcctgatttaaaaataattactcccgcaaggaaatggaatatgagtagggaagaggcaatagtgtacggagaaaagtttggtattcctgcaccagtatcaaaaaaatcaccatattcaatagatgttaatttacttggtaggagtattgaagcaggtatattagaagacccaatgcaagaagcacctgaggatatattttcgatgacatcatctattgaggattcacctgattctcctcaagaagtagaaattgttttcaaaaatgggtttcctgttggaattaatgatgaatctctatctcccgtagagattattaaaaaagctaatgttctcgcaggtgagcatggttttggaagaattgatatgattgaagaccgagtagtaggaattaaaagtagagagatttacgaaacgccaggcctcttgcttttaatcaaagctcacaaagaattagaaagcattacattaaatccagacgttgtcgactttaaaggaatagttgaaaaaaaatggggtcaattagtttatcaaggtttttggtttggacctcttaaagaaagtttagatgcatttatatcatctactcaaactgcagttaatggaagagtaaagattagacttcataaggggaacgcaatagtaatcggtagaatgtcggaaaataattcactttacagggaagatttggtaacttacggcaaacatgatgtatttaatcattctttagcagagggttttatttatatgtggggtatgtctaataaaatttgggctgagttaaattcaaaaacaaaagattaa

SEQ ID NO: 316878 - DNA, 925 bp, Unknown
  Bacterial polypeptide expressing nucleotide sequence isolated from the Sargasso Sea
tgctagacctttaataagtaagcgtatgatagaaatagctgaagaagagggtgctgacgcaatagctcatggagcaactggaaaaggaaacgatcaaattagatttgagattggggcttattcattaaacccttcaatagaagttattgctccatggagaacatggaattttgtttctagagctgatttgattgattactgtaaaaaaaaccaaatcaatatagatgctgatcctgatgaacctatgtactcaactgatgagaatattctacacacttcgtatgaaggagaaattctagaagacccatctcaacctgcgcctgaatcaatttggcagagaacctcatcactaaaggaagctcctgacgaagaacaagaaattactataaattttgaaaacggagaccctgttggtctggatggtaaagatttaagttcatcccaggtcctaggtattttaaatgatattgcaggaaacaatggcataggaagactagatctcgtagaaaatagatttacgggtatgaagtcaagagggtgttacgagactcctggaggaactatcctaatcaaagcgcatagagctattgaatctttatgcttagatgcacaaactggccacttaaaagatgaattaatgcctaaatacgctcaattaatttatgacgggttttggtggagtcctgaaagagaagcactacaagcttttattgataaaactcaacaatatataactggctctgtgaaattaggactgtacaaaggtaatataatcgtaaaagaaagaacttccccttacagtctttacgactcaaaaatagttacttttgaggatgatcagaatacttacaatcaagctgatgctacaggctttattaagattaattctttaagattaaaagcaaacgctaaaagaaagaaataa

SEQ ID NO: 316879 - DNA, 606 bp, Unknown
  Bacterial polypeptide expressing nucleotide sequence isolated from the Sargasso Sea
ctacagttgatgagctcatcgcaatgtgcgacggttttttgtttaccggcggaagacctaacgtacatcctagtaattatggtgtcgaagcaacggcggctcatggcgatttcgatcgtgatcgtgatgccttaacactccctctgataaaaagggctgtttcgatcggtcttcctatttttggtatatgcagaggatttcaggaagttgcggtggcaatgggtgcaacactacatccggaaattcgcgagttagatgggagaatgaaccatcgaatgccaccagatggaacgcttgcagaaaaatttgccattaggcatgaagtcacatttagaagcgatggcattttcagcaaaattttaggttctgatcgaatagagacaaatacgctacatggacaggggatagcagatgccggtgataggttgataattgatggttgggcaagtgatggaaccccagaggcgctttatgtaaaagatgcaccgggttacacatactctgtccagtggcacccggaatggaatgctgaaaatgatccaatttctaaacgtttgtttacggcttttggcgacgcggtgcgtgattatggaaatgcccagtaga

SEQ ID NO: 316880 - DNA, 482 bp, Unknown
  Bacterial polypeptide expressing nucleotide sequence isolated from the Sargasso Sea
catgattttgatgatcgacaactacgactccttcacttggaatgtcgtccaatgtctctgggagttgggcgctgaggttgaggtgcatcgtaataacgagatcagcctgactgacatcgaagcgcgggcacccaagggtatttgcatctcccccggcccttgctcgcccggggaggcgggcatttccatgtcggtgatcgagcacttcgctggcaaagtgccgatatttggcatctgtttaggacaacagagcattggtgccgtctttggtggtcaaattgtgcgcgcgcaaaaagtgatgcacggcaaaacgagccccatccatcacacgggtgacggggtgttcaaagatttgcccagcccattcaccgccacccgatatcacagcctcgtggtagaggtgggctcgctgccagactgcctcgaggtcactgcctggacagaggatgagatcggggcccaagaggcgatcatggggctgc

SEQ ID NO: 316881 - DNA, 592 bp, Unknown
  Bacterial polypeptide expressing nucleotide sequence isolated from the Sargasso Sea
ggtgtttacctgaccggtgccggcagcaacatcgacccggcgctctatggtcaggagaacgaaacgccgaacaagggccaggatcgcgatcgcgacctgttcgatctgccgctgattcgtgccgccatcgctcgcggtctgccgatcttcggcatctgccgtggcatgcaggaaatcaacgtggcgctgggcggtgacatctaccagaaggtctacgccgagcctggtttcaacgaccatcgcgaaaaccccgatgatccggtcgaggtgcagtacgcagccagccacagcgtgcgtccggtggctggcagctggttcgccgagttgatgggcaaggacgagattcaggtcaactccctgcacggccaggcgattcgcaacctgggcaaggggctggaagtgctggccaccgccgaggatggactgatcgaggcgatccacgcaccgagcctgtcccccttcctgttcgcggtgcagtggcacccggaatggcaggcggcgaagaacccggattcggtgaagatcttccaggccttcggtgatgcctgtcaccgccgagtagcttcgcgtaacagccgtcaggctgcctgat

SEQ ID NO: 316882 - DNA, 607 bp, Unknown
  Bacterial polypeptide expressing nucleotide sequence isolated from the Sargasso Sea
atgaaaaaaactaaagttgttgttgccttatctggaggcgttgactcaagtgtcgctgcatatttgcttaaaaatcaaggatatgatctaattgggttatttatgaaaaattggcatgatgaaactgttacaatatctgatgaatgcccatggcttgatgatagtaatgatgcaatgttagttgctgataaattaaatattccatttcaggtcgttgatttaagtaaagattataaagagaaaataatcgattatatgtttaatgaatactctaaaggaaatacaccaaatccggatattttatgtaacagagaaataaaatttgatgttttcatggatgttgcactttctcttggtgctgattacgttgcaactgggcattactctagaattaaaaaaaaccattgtaatgaaaatagtattaaatatgagttacactcaggattagacaatacgaaagatcaatcatattttttatgtcaattaaatcaaaatcaattaagtaagatattatttccaataggtgatctaacaaaagctgaaagtagaaaaattgcaaaaaaaaataatttagtaacagctgaaaaaaagatttctcagggtttat

SEQ ID NO: 316883 - DNA, 282 bp, Unknown
  Bacterial polypeptide expressing nucleotide sequence isolated from the Sargasso Sea
ataagcctgccaaactttatcaaatctttaaaagacaataatctatatgataaagtttggcaggcttatgccgctttacttcccgtcaagactgttggtgtaatgggtgacaatagaacttatgaatatctttgtttgttaagggcaattacctcagaagatggcatgacggcagatttttttcagtttaaaaaatccttcatgcagtcaatatctaatcaaattgtaaataatattagaggtattaatagagttgtttatgatattacttcaaagccacca

SEQ ID NO: 316884 - DNA, 157 bp, Unknown
  Bacterial polypeptide expressing nucleotide sequence isolated from the Sargasso Sea
aatgcaaaagatccttgtagttgattttggttcacaatacacacagctcattgctcgaaggcttcgagaacttaatgtttattctgaagtttacccatgggatgaaatgcctaacttagaatctgttgatggttttgttttatcaggtggtccctga

SEQ ID NO: 316885 - DNA, 358 bp, Unknown
  Bacterial polypeptide expressing nucleotide sequence isolated from the Sargasso Sea
cttgcaattagaattcctggtgatgtagacgaaaataaaattaatattttaaaagaggcagataatatttttattaaaagtttgtataaatataatctttatcataaaatttggcaggcttatgcagctcttttaccagtaaaaactgttggagtgatgggagataacagaacttatgaatatatttgtttacttagagcaattacatccgaggatggtatgacagcggatttttttaattttaaaaaagattttatgcaagatgtatctaataaaattgtaaatagcataaaaggtattaatagagtagtttatgatgtaacatccaaaccacctagcactatcgaattagagtaga

SEQ ID NO: 316886 - DNA, 202 bp, Unknown
  Bacterial polypeptide expressing nucleotide sequence isolated from the Sargasso Sea
aatgggtgacaatagaacttatgaatatatatgcttgctaagggcaatcacatcagatgatggaatgactgctgatttttttaattttaataaaaagttcacgcaaatggtatcaaataaaataattaataatataaggggcataaatagagtagtttacgatgttacatcaaaaccgcctagcaccattgaactagaatga

SEQ ID NO: 316887 - DNA, 419 bp, Unknown
  Bacterial polypeptide expressing nucleotide sequence isolated from the Sargasso Sea
aatgaaaacaaataaagtagttatagccttgtctggaggagtagactcaagtgttgcagcctttttattaaaaaagaaaggctacgatttgataggtttatttatgaagaattggcatgatgaaaatgtaactatttctgacgaatgtccttggttagaagacagcaatgatgcaatgcttgttgcagaaaaattaaatataccattccaaacagttgatttaagtaaagagtacaaagaaagaataattgactatatgtttgatgagtattcaaaagggaatacaccaaatcctgacattttatgcaatagagaaataaagtttgatgtattcatgaatattgctatttcacttggtgcggattatgttgcaactggtcactattgtagagtaattgaggataataatgatgaaagat

SEQ ID NO: 316888 - DNA, 871 bp, Unknown
  Bacterial polypeptide expressing nucleotide sequence isolated from the Sargasso Sea
atagaggctttccgtgggtataaaggtatcatcatctctggaagcccaagcctagcttctcacggtgaagatgctgattacaacaaggacatctatgacttagatatccctattttgggattttgctttggacatcaggaaatagcccaacactacggagggaaagtcatccatggtggaagagaatggggttattcagaactacaaacccaacaaagccaccctttattttctggtttatcctcccgtgaaaccgtttggatgagtcacttcgattctgttgcagaaataggtcctgactttcaggaaataggtgtgactcttaccccagatggcgaggctgaacaccgatatgctgccatagcatctgatactttgcagcgatatggcttccaattccatccggaagtggatagcacagaaaatggtcataaaatgatagccaattttctttatgaaatatgtggctgcacttcctcttggtcgatggacggtttcatagaacaaaaggaagctgacattcgtaaacaagtcgcaggaaagtctgtattcttacttgcctcaggcggggtggactcgactgtagcggcagttttgatcggtagggctattggccctgatcggcttcatctccttcacgtcgataatggtttaatgcgaaaacaggaaagtagcaacgtacttaaactttttgaaaaattgggcctgggaaccaatcttcattttgtcgatgccagtgagagattcctttcagcattgagcggtatcgttgaccctgaggccaagcgtcgcatcataggcgatactttcatcgaggtgaaagaagatcaagcagaaaaaatcggtatgaagaacattactcgggcaggga

SEQ ID NO: 316889 - DNA, 796 bp, Unknown
  Bacterial polypeptide expressing nucleotide sequence isolated from the Sargasso Sea
tatgaattcttcaattgaaaacatcgttcaaagtaatgttgatgcatctaaaaatcttgttatcgctttaagtggcggtgtagatagttcagtcttagctcatattctttgtaaaatatcaaaaaatataaggcttgtgtttgttcagcacaaccaagtgcactctaaagatttagaagcctcagcaaaaaaaatagcaaaatcattaaatttagatttggaagtaattcagacttctttgaaacctaattcatctgaaactgaaatgagagaagaaagatataagcatcttttatcaaatttaaaaaaagatgaattcttgctcacaggccataatttatcggacaaggcagagacattattaataaatctttttcgaggtacaagacttgaaggacttaaatcaatcaattcagaaaattctttatcaagtaagccaatgattaatatttcaaaaaaagaaatttatgaatacgccaacaaaaatgagataccttattccgaagaccccacaaataaagataacaatattgttagaaattggattagaaattttttaattcctgagataaataataaatttccaggctcatttgaatcaaaagcagatcaattatcaaatgaggtggcatttagaacaaattatgacaatgataatttgaagtatataaaaaaatctgagggatatgttgagataccagctttatttatagacaatatgagttcagaaaaacaatattatttaaatcgggttggtaaatatatcggcatgaattccatagaaaaaaaagatatt

SEQ ID NO: 316890 - DNA, 931 bp, Unknown
  Bacterial polypeptide expressing nucleotide sequence isolated from the Sargasso Sea
aaaacaaataaagtagttatagccttgtctggaggagtagactcaagtgttgcagcctttttattaaaaaagaaaggctacgatttgataggtttatttatgaagaattggcatgatgaaaatgtaactatttctgacgaatgtccttggttagaagacagcaatgatgcaatgcttgttgcagaaaaattaaatataccattccaaacagttgatttaagtaaagagtacaaagaaagaataattgactatatgtttgatgagtattcaaaagggaatacaccaaatcctgacattttatgcaatagagaaataaagtttgatgtattcatggatattgctatttcacttggtgcggattatgttgcaactggtcactattgtagagtaattgaggataataatgatgaagatgttacttaccaactacatgctggtattgacaatcttaaagatcaatcatattttttatgtcaacttaatcaaagccaattaaaaaaaataatttttccaataggcgatctaagtaaaacagaagtaaggaatattgctagagaaaataatttaattacagctgagaaaaaagactctcagggactttgttttgttgggaaggtaagtcttcctgattttttacaacagaaattaatgaaaagatcaggtaatgttatcgaaatatcctcggagtcagatttatataaaaatgatgtcaatcagcttgacaaatatgaaaaactagagtttctctcaactagaatttcctacaaaaaaaatgatggaagaataattggtcaacaccatggagctcatttttttacaattgggcagagaaaaggtttatcaataggcggttacaaagatccattgtttgttatctctacaaatacatcttcaaatgaaatttatgttggagagggaaaaagtcaccctg

SEQ ID NO: 316891 - DNA, 277 bp, Unknown
  Bacterial polypeptide expressing nucleotide sequence isolated from the Sargasso Sea
attaaaaaaagaaaatttatatgataaaatttggcaagcctacgctgctttattgccagtcaaaacagtaggagttatgggtgacaatagaacttatgaatatatttgtcttttaagagcaataacgtcatctgatgggatgacagctgattattttgattttacaaaaaagttcatgcaaaatgtatcaaataaaattataaataatatccaaggtataaatagagtagtttatgacgtaacctcaaagcctccgagtactattgagttagagtaa

SEQ ID NO: 316892 - DNA, 184 bp, Unknown
  Bacterial polypeptide expressing nucleotide sequence isolated from the Sargasso Sea
atgaaaaataaaaatattgaagactttattttaattattgattttggaagtcaagttactcagctaattgcaagaaggttaagagaattaaatgtttattgtgaaatacagccttttcaaaaaatagactttaatttttttaaaaaattcactccatctgggataattttatcccggaggtcct

SEQ ID NO: 316893 - DNA, 556 bp, Unknown
  Bacterial polypeptide expressing nucleotide sequence isolated from the Sargasso Sea
tatgaatctaaatattccatgggaatggtatcgaaccttcctggcggtgatgaaagaaggttccctctcgggggcagcacgcatgcttgccatcacccagcccactgcggggcgacacatagcagcgctggaatccgcccttggcctggttttgtttacacgttcgcaaacgggcctgcagcctacggatgcggcagtcgcgctgcaaggccatgcgcaagcgatggaaaacacggccagtatgattgagcgttcggctgccagcttcagtgcccactccgccgggttacatggcgtggttcgcgtatcggcgagtgaaatcatcggcactgaggtgctgccacctctgtttgcacgaattaaagaagattatccgcagcttaccctggaactggtgatctctaaccgaatgcaggatttattgaaccgggaagcggatattgcggtacgcatgagcacaccggtgcaggaacaactgattgcgcgtcggttgggcagtattgaaattggtttgcatgcctcgccgtcttatctggcacgccacggtacgccggag

SEQ ID NO: 316894 - DNA, 159 bp, Unknown
  Bacterial polypeptide expressing nucleotide sequence isolated from the Sargasso Sea
aatgaagagtagattagaaactattttaattgtagattatggatcacaatatacacaattaattgcaagaagaattagagaattagaagtcttctgtcttgtctatccatttaataaaatcacaaaaaaaattttaaatgaaatcaaaccatgtgcatt

SEQ ID NO: 316895 - DNA, 439 bp, Unknown
  Bacterial polypeptide expressing nucleotide sequence isolated from the Sargasso Sea
aatgaaaaaaaataaagtagttatagccttgtctggaggagtagactcaagtgttgcagcctttttattaaaaaagaaaggttacgatttgataggtttatttatgaagaattggcatgatgaaaatgtaactatttctgatgaatgtccttggttagaagacagtaatgatgcaatgcttgtagcagaaaaattaaatataccattccaaacagttgatttaagtagagagtataaagaaagaataattgactatatgtttgatgagtattcaaaaggaaatactccaaatcctgacattttatgtaatagagaaataaagtttgatgtatttatggatattgctatttctcttggtgcggattatgttgcaactggtcactattgtagagtaattgaggacaataacaatgaagatgttacttaccaacttcatgcc

SEQ ID NO: 316896 - DNA, 307 bp, Unknown
  Bacterial polypeptide expressing nucleotide sequence isolated from the Sargasso Sea
atggaaaaaataattgttttagatttcggttctcagtatagtcatttaatctgtagaagaataagagaattttcagtatatgccgaattagttccgtatgatatatctcctgaagaattaaagaagatgaatccaaaagggattattttttcaggaggtccatctagtgtctataatgatgatgcaccaacaccagatgaagaattattcaactttgacttgccactattaggaatttgttatggacatcaattaattgtaaacaagtttggaggcaaagtaaaaagagcaaacaaagaatacggct

SEQ ID NO: 316897 - DNA, 778 bp, Unknown
  Bacterial polypeptide expressing nucleotide sequence isolated from the Sargasso Sea
catgaaagtagtagtaggattatccggaggtgtggattccagtgttacagcgtatctgctgcaacagcaaggtcatgaagtcgtggctttgtttatgagaaactggaacgatgcttcggtaacgctggaagatgaatgtccgtggatcgaggacagcaatgatgccttaatggtggctcaaaaacttggaattccgtttcaggtgattgatatgagtgatctttacaaggaaagaatcgtagattatatgttcgacgaatatcagaaaggaagaactccgaatcctgatgttttatgcaacagagaagtaaagttcgatgtttttatgaagacggcaatgtctctgggtgcagataaagtggcaaccggacattacgcaagagtagattcaacgatcgatgaaaacggaaatgaaattttccatcttcttgccggaaaagataacaataaagatcagtcctactttttatgtcagttaagtcaggatcagttgtccaaagcattatttccgattggggaacttacaaagcctcaggttcgggaaatcgctaaagaaattggcttggtaacagcagataaaaaagattctcaaggattatgttttatcggaaaagtaagtttaccacagtttttacaacaacaattgattccaaaagaaggtgaaattgtagaaattttcaaagattctcccctttttgctgaagaaatgcccgaattttcatcaaaacaggaagaattggaatacctcagccgaaagatcaattataaaaaaacagac

SEQ ID NO: 316898 - DNA, 313 bp, Unknown
  Bacterial polypeptide expressing nucleotide sequence isolated from the Sargasso Sea
aattttgaaagaggcagattattttttcatacaagcattaaaagatcacggcctttatcataaaatttggcaagcgtacgctgctctgctacctgtcaaaactgtaggggtaatgggagacaaccgtacttatgaatatctctgtctcttaagagcaattacatcggaggatggtatgacagcagatttttttgaatttagaaagtcctttatgcaaactatttctaataaaatagttaatagcataagaggcataaatagagttgtttatgacgttacctcaaaacctccaagcactattgaattagagtag

SEQ ID NO: 316899 - DNA, 257 bp, Unknown
  Bacterial polypeptide expressing nucleotide sequence isolated from the Sargasso Sea
aatgagtaagaaaaaggtattagtaggattatcaggtggagtagattcatctgtttctgctctgctacttaaagaacaaggacatgaagtccatgctttattcatgaaaaattgggatgatgatggctccccttattgcagcgcaaaagaagattttatggatgcagtatttatctctgaacagctaaatattcctttggagcaagtaagcttctccaaagagtacaaagataatgttttctcatattttcttaagg

SEQ ID NO: 316900 - DNA, 351 bp, Unknown
  Bacterial polypeptide expressing nucleotide sequence isolated from the Sargasso Sea
tttgaataaaaaaaaagtaattatcgcattatctggaggagttgactcaagtgtatcagcttacctattgaaagaacaaggatttgatgtaataggagtttttatgaagatatggcatgaaactaactccaaaaaaaacgaaccttgcccttggattgaagatagctcatacgcattagaaattgcggagcaattaaacataccttttcaagtgatagacctaagtgaagaatataaaaaaagaattatagactatatgtttcatgagtactccaaaggcagaacacctaatccagatattttatgtaataaagaaataaaatttgatgtttttttgaaccacgctctaaa

SEQ ID NO: 316901 - DNA, 310 bp, Unknown
  Bacterial polypeptide expressing nucleotide sequence isolated from the Sargasso Sea
tgtagaaaagcaagtaaaattgttgaagaggaactatgggacgcaggagtttatgataaggtatggcaagcttatgcagctgtaggagatgataaggcagtgggagttgtgggagatgaacgtaagtatggtagaattgttacagtcagagttgtagactcgattgatgcaatgactgcagactggactagacttccaaatggtgttttagaaaaaatcagtaatagaattactaatgaaattgatgaagttacatgggtttcttatgtaatttcaagcaaaccacctgctactattgaacctcaataaa

SEQ ID NO: 316902 - DNA, 319 bp, Unknown
  Bacterial polypeptide expressing nucleotide sequence isolated from the Sargasso Sea
aatgagtcttgatcaaaatctagataaaatcttaataatagattttggttctcaattcacacaattaatagcaagacgagtaagagaattaggtgtgttctcagaaatagttagtcacaaaaaaatcaaaataaaagacataaataatagcattagaggaatagtattgtctggtggtccattaaatgtttatcaaataaataagtattcattcgataaaaaaattttaaaacttgatattccagttcttggaatatgttttgggcatcaaattttatcaaaacttaatggtggaagtgtaaaacaatcaaaacataga

SEQ ID NO: 316903 - DNA, 739 bp, Unknown
  Bacterial polypeptide expressing nucleotide sequence isolated from the Sargasso Sea
tatgaaaagtaaaagagttgtaattgcactatctggtggtgtagattcaagtgtagcagcatatttattaaaagaacagggatatgatctaattggactttttatgaaaaactggcatgatgagaattcaacaatttcagatgaatgtccatggcttgaggatagtaatgatgcaatgttaattgcagataaattaaagataccttttaagactgttgatcttagcaaagaatataaagagagaattattgattatatgtttaaggaatattcaaatggcaggacaccaaaccctgatatactttgtaataaggagattaaatttgatgtattcatgaaattagcactcacactagatgctgactatgttgcaacggggcattacagtcaaatagaatcaactaataattcagaatataggcttttacaaggaattgataagactaaggaccagtcttactttttatgccaattaaatcaaaaacagcttagcaaaatattatttccaataggacatctaaaaaagtctgaggtaagggatatcgctaagaaaaagagtctaataacagctgataaaaaagattcccaggggctttgtttcgttggtaagattaggcttccagaatttctgcaacaaaaattaacaaaaaagaaaggcaatataattgaaatccccagtaactataagggtttctctttaaaaagtaaagagaatcaatccaggttaaatgaattatca

SEQ ID NO: 316904 - DNA, 795 bp, Unknown
  Bacterial polypeptide expressing nucleotide sequence isolated from the Sargasso Sea
aatgaaaaaaactaaagttgttgttgccttatccggaggtgttgactcaagtgttgcagcttttttactaaaggaacaggggtatgacttaattggactatttatgaagaattggcatgatgaaagtgttactatatctgacgaatgtccatggttagaagatagtaatgatgcaatgttagtagcagagaaacttaatattccatttcaagtagttgatttaagtaaagactataaagaaaaaataattgattatatgtttgaagaatattcaaaaggaaacactccaaatcctgatgttttatgtaacaaagagataaaatttgatgttttcatggatattgcaatttctttaggtgctgattatgttgcaaccggtcactactctagaattaaaataaacaatataagaggtaataaaactaaatacgagttgcactcaggaagagaccaaaccaaagatcaatcatactttttatgtcaattaaatcaagaacaactaaataagattctatttccaataggtaatttaatgaaaactgaagtaagagaaattgcaaaaaaaaataatttggtaactgcagaaaaaaaagactctcaaggattatgctttgttggaaaggtaagtttgccagattttcttcaacaaaaacttaagaaaaagacaggtaatgtaattgagattccatccgattctaaactttatgataaaacatcaaatttcacaaaagatagtgaaagacttaagagcttaagtgatgaaatagtatactctttatcagatggaaaaatcat

SEQ ID NO: 316905 - DNA, 283 bp, Unknown
  Bacterial polypeptide expressing nucleotide sequence isolated from the Sargasso Sea
agcattaaggggattcatggactttatcacaaaatatggcaagcttatgcagctctattacctgtcaaaacagtaggtgttatgggagataatagaacttatgaatatttatgtttgttaagagcaattacttctgaggatggaatgacagctgatttttatgaatttaaaaaatcatttatgcaaattatctcaaataaaattgttaatagcattagaggtattaatagagtggtttatgacgttacttctaagccacctagcactattgaattagaataat

SEQ ID NO: 316906 - DNA, 141 bp, Unknown
  Bacterial polypeptide expressing nucleotide sequence isolated from the Sargasso Sea
aatgaatcttaacaataatttaaaaaaaattttaattattgattatggttcacaatttacacaacttatcgcaagaagaattagagaacttggtgtttactcaataatcgttagtcataaaaaaattaaatttaatgatat

SEQ ID NO: 316907 - DNA, 276 bp, Unknown
  Bacterial polypeptide expressing nucleotide sequence isolated from the Sargasso Sea
taaaagaccatggtctttatcataaaatttggcaagcgtatgctgctctgctacctgtcaaaaccgtaggggtgatgggagacaatcgtacttatgaatatttatgtcttttaagagcaattacatctgaagatggaatgacagccgatttctttgaatttagaaaatctttcatgcaaactatttctaataaaatagttaatagcataagaggcataaatagagttgtttatgacgttacctcaaaacctccaagtactattgaattagagtagt

SEQ ID NO: 316908 - DNA, 307 bp, Unknown
  Bacterial polypeptide expressing nucleotide sequence isolated from the Sargasso Sea
aaagaggctgaccattattttattcaagcacttagaaaaaatgatctttatcatagaatttggcaagcttatgcagcattacttcctgttaaaactgttggagtaatgggagacaatagaacctatgagtacctatgtttgttacgagcaattacatctgaagatggtatgactgcagatttttatgaatttaaaaaatcatttattcaagatatttcaaacaaaattgtcaatagtattaaaggaattaatagagtagtttacgatgtaacatcgaaaccacctagcactattgagttagagtaaa

SEQ ID NO: 316909 - DNA, 247 bp, Unknown
  Bacterial polypeptide expressing nucleotide sequence isolated from the Sargasso Sea
atggcaggcattttgtgtataattcctatcaaaactgttggggtgatgggagacgaaagaacgtatgaaaatactatagctgtgagagctgttaacagcactgacgggatgacagctagctggtctagaattccatatgatattttagatctaatatcttcagaaattattaattcagtcaaaggtataaataaagttgtttttgatatctctaataaaccaccaagcactattgagtgggaataaa

SEQ ID NO: 316910 - DNA, 441 bp, Unknown
  Bacterial polypeptide expressing nucleotide sequence isolated from the Sargasso Sea
ttaaagatgaagtaagagttttaggaaaagaacttggcttaatcgataatattagaaatcgtcatccttttcctggtccaggtttagccattagggttttgggcgaagtaacaaaaaatagattagaaattttaagacaagctgacaaaatatatattgatttattaaaaaaagaaaaattgtacgataaaatctggcaagctttttgtgttcttctacctgtgaagaccgtaggtgttatgggtgattcaagaacttatgaatatgtctgcgctgtaagagctgtaacttctgttgatggtatgacagccgattattatccttttgatcaaagttttttaaagaaagtttctagtagtatcattaatgaagttaaaggtatcaatagagttgtttatgatacaacaagcaagcctccgggcactatcgagtgggaatagc

SEQ ID NO: 316911 - DNA, 124 bp, Unknown
  Bacterial polypeptide expressing nucleotide sequence isolated from the Sargasso Sea
gtcaaaattccttttcagatttttggagagaattgcaaatagaattgttaatgaagtaattttagttaatagggttgtttttgatattacaagtaaaccccctggaactattgagtgggaataa

SEQ ID NO: 316912 - DNA, 136 bp, Unknown
  Bacterial polypeptide expressing nucleotide sequence isolated from the Sargasso Sea
gactgcagattggaccagacttccaaatggagtcttagagaaaataagtaacagaattactaatgaaattgaagaagtgacgtgggtttcttatgtaatctcaagtaagccgcctgctacaatcgaaccacaataa

SEQ ID NO: 316913 - DNA, 351 bp, Unknown
  Bacterial polypeptide expressing nucleotide sequence isolated from the Sargasso Sea
ttcgaatgcctggaatagttacaaatgaaaaaataaaaattttaaaagaggctgattattattttattcaggccttaagagaccacgatctttatgacaaaatttggcaagcttatgcagctttgcttcctgtaaaaacagtcggtgtaatgggtgataatcgtacctatgaatatttgtgtttattaagagcaattacatccgaagatgggatgactgcagatttttatgaatttaaaaagtcctttatgcaaagaatatcaaataaaattgtaaataatattaggggcataaatagggttgtatatgatgttacatcaaaacctcctagtactattgaattagaatagt

SEQ ID NO: 316914 - DNA, 287 bp, Unknown
  Bacterial polypeptide expressing nucleotide sequence isolated from the Sargasso Sea
tattcaagctttaagagatcacaatttatataataagatttggcaagcctatgcagcattacttccagtcaagacagttggtgtcatgggtgataatcgaacttatgaatatttgtgtttattaagagcaattacatccgaggacggaatgacagctgatttttatgattttaaaaaatcatttattcagataatttcaaataaaattgtaaatagcataagaggaataaatagagtagtttacgatgttacatcaaagccacctagtacaatagaattagaataat

SEQ ID NO: 316915 - DNA, 178 bp, Unknown
  Bacterial polypeptide expressing nucleotide sequence isolated from the Sargasso Sea
atggcttcaatgatttcagaggaaacacgtaatccagcgatcgtaattctcgattttggttctcaatactcagaattaatagctcgaaggattagagagacagaggtcttctcattagttatgagttacacaacatctgctgaccaattacgctcgcttaaacctaaaggaattattt

SEQ ID NO: 316916 - DNA, 329 bp, Unknown
  Bacterial polypeptide expressing nucleotide sequence isolated from the Sargasso Sea
tatggaaaaaataattgttttagattttggctctcaatacagtcatttgatttgtagaaggattagggaattttcagtttatgcagaattagtaccatatgacatttcacctgaagaattgaaaaaaatgaatccaaaaggaataattttttctggagggccatcaagcgtgtacaatgatgatgcccctaaaccagatgaagaattatttgattttgatttacccttgttaggaatttgttatggacatcagttaattgtaaataaatttggaggtaaagtaaaacgtgcaaacaaagaatatggttcgtctcttctttcaatggata

SEQ ID NO: 316917 - DNA, 402 bp, Unknown
  Bacterial polypeptide expressing nucleotide sequence isolated from the Sargasso Sea
tatgaaacgagtagttattggtttatctgggggagttgactcaagtgtggctgcatatctgcttaaagaacaaggatatgaagtaatcgctatgtttatgcgtaactggcatgatgaatcggttactatttcaaatgagtgcccatggatagatgactcaaatgatgcacttttggtggctcaagatttaggcataccctttcaagtgattgatcttagtgaggcttataaaaatagaattgttgactatatgttcaatgaatacgaacgtggacgaacacccaacccagatgttttatgtaacagagaaattaaatttgatctttttttaaaagctgctcttgaacttggagcggactatgttgctacaggacattattgcagaaaaaaaacaaatgaaaa

SEQ ID NO: 316918 - DNA, 170 bp, Unknown
  Bacterial polypeptide expressing nucleotide sequence isolated from the Sargasso Sea
tttattaagagcaataacatctgaagatggcatgaccgcagatttttttaaatttgaaaaatcttttttacagaacatttctaaccaaatagtaaataatattagaggaatcaatagggtagtatatgacgtcacttcaaaaccacccagcaccattgaattagaataat

SEQ ID NO: 316919 - DNA, 217 bp, Unknown
  Bacterial polypeptide expressing nucleotide sequence isolated from the Sargasso Sea
aaactggttggtgttattgggtgaccatagatcatatgaacaagtttgtggattaagagctgttacgtctgttgatggaatgacggcggatttttatcctttcaaaggtgaatttttgagcaaagtttcaacaagaataattaatgaggtcaagggtataaatagagttgtatatgatacaacatctaagccaccaggaactattgagtgggaataa

SEQ ID NO: 316920 - DNA, 509 bp, Unknown
  Bacterial polypeptide expressing nucleotide sequence isolated from the Sargasso Sea
tatgaattcttcaattgaaaatatcgttcaaagcaatattgatgtgtctaaaaatcttgttatcgctttgagtgggggtgtggatagctcagttttagctcatattagttctaaaatgtcaaaaaatataaggcttgtgtttgttcagcacaatcaagtacactctaaagatttagaagtctcagcaaaaaaagtggcaaaatcattaaatttagatttggaaataattcagacttctttgaaatctaattcatctgaaactgaaatgagagatgaaagatataagcatcttttttcaaatttaaaaaaagatgaagtcttgctcacaggtcataatttatcagataaggctgagacattattaataaatttatttcgaggtacaaggcttgaaggacttaaatcaatcaattcagaaaattctttatcaagcaagccaatgattaatatttcaaaaaaagagatttatgaatacgctaacaaaaatgacataccttattccgaagacc

SEQ ID NO: 316921 - DNA, 374 bp, Unknown
  Bacterial polypeptide expressing nucleotide sequence isolated from the Sargasso Sea
ttttccaggtcccggtttagcaatacgaattcctgggaaaataaattatcataaaataaaattactccaagacgttgatgaagtctttatatcttatctgaaggaaaaaaatatttataataaaatttggcaagcatttgcagttctcttacctgttaagtctgttggcgtaatgggtgatcaaagaacatataaatattgtgtttctataagagcagtaacatctgtagatggtatgacggctgatttttatatgtttaataaaaaagatttaaatgaaatatctagcagaattatcaataatattgatggcattaatagggtattatatgactttacatcaaagccacctggtactattgagtgggagtaat

SEQ ID NO: 316922 - DNA, 751 bp, Unknown
  Bacterial polypeptide expressing nucleotide sequence isolated from the Sargasso Sea
tatgaagaataaaaaagttgtaattgcactctctggcggtgtggattcaagcgtagcagcatatttattaaaaaaacaaggctatagtttaattgcgctctttatgaaaaactggcatgatgaaaatttaaccatttcagatgaatgtccatggcttgaagatagtaatgatgcaatgctgattgcagataaattaaaaatacctttcaagactgttgatcttagtaaagaatataaaaagagaattattgattatatgtttaaggaatattcaaatggtaggacaccaaatcctgatatactttgtaataaggagataaaatttgatgtatttatgaaattggcactctcattagatgcagactatgttgcaaccgggcattatagtcaaataaaatcaacaaataactcaaaatatatgcttttacaaggaattgataaaactaaagatcagtcttactttttatgtcaattaaatcaaaagcagctaagcaagatattatttcctataggacatcttaaaaagtctgatgtgagggatattgctaagaaaaatagcttaataacagctgataaaaaagattcacagggactatgttttgtaggtaagattaggctgccagaatttttgcaacaacaattaacaagaaagaaaggagatataattgagatccctagtaattcaaaggttttttctttaaaaaacaaaggtaatcagtctagactaaatgaattatcaaaaaaatataaa

SEQ ID NO: 316923 - DNA, 283 bp, Unknown
  Bacterial polypeptide expressing nucleotide sequence isolated from the Sargasso Sea
atgtccaaaacagataaggaacgcctcttggtggccctctcggggggggtcgacagttccgtttcggccgccttgctcaaggatcaggggcatgagatcgaaggcgtttacgtcagaacttgggagcatgaggaagatttgctcggagactgccctggggccaaggacttggctgatgcggaagcggtcgcggaggctttgggcattcccttccgcgtcgttaacttcgttgacttctatcatcgtgaagtcgttttgccccatggtgagtgggtacgagcaa

SEQ ID NO: 316924 - DNA, 475 bp, Unknown
  Bacterial polypeptide expressing nucleotide sequence isolated from the Sargasso Sea
gaatcttaaacttttagagccattgagaaatttatttaaagatgaggtgcgagttttaggaaaagagttagagattcctgatacttttattgggagacatccttttcctggtcctggacttgggataaggattttaggagaaatcacaaagaaaaaagtaaaaatacttcaagaagctgattacatatttataaataaactaaaaaaagcaaagttatatcataaaatttggcaagctttttgtgttctactaccagttaaaaccgtgggtgtcatgggagataatagaacttatgaatatgtttgcgtaattagagcagtttcctcaatggatggtatgacagcagagtcatataactttaatccaaattttataactgattgtgcaaatgaaattgttaataatgttcctgggattaatcgggtttgttatgattatacatctaaacctccaggaacaattgagtgggagtga

SEQ ID NO: 316925 - DNA, 190 bp, Unknown
  Bacterial polypeptide expressing nucleotide sequence isolated from the Sargasso Sea
gagacagtatggatacgtcgtatcaattcgagccgtaaatacgactgattttatgactgcatctgtatcatcgataccccacaagatattaaacagtatatccactcggattattaatgaagttgacggtgttgctagagttgtatatgacattacatctaagccgcctggtactatagaatgggagtaa

SEQ ID NO: 316926 - DNA, 342 bp, Unknown
  Bacterial polypeptide expressing nucleotide sequence isolated from the Sargasso Sea
caggcataataactaatgaaaaaattaaaattctaaaagaggctgattattactttattcaagctttaaaagatcatggtctttatcataagatttggcaagcttatgcagcattacttccagtaaaaacagttggtgttatgggagacaatcgaacttatgaatatttatgtttattaagggcgattacatctgaagatggaatgactgcagattattatcaatttaaaaagtcttttatgcaaactatatcaaataacattgttaacagtataagagggataaatagggtagtgtatgatgttacatcaaagccaccaagcactattgaattagagtaat

SEQ ID NO: 316927 - DNA, 142 bp, Unknown
  Bacterial polypeptide expressing nucleotide sequence isolated from the Sargasso Sea
atgaaaaataataaagtagttattgccttatctggaggagtagactcaagtgttgctgcctttatattaaaaaataaaggctatgacctgataggtttatttatgaagaattggcatgatgaaaatgtgactatttctgata

SEQ ID NO: 316928 - DNA, 238 bp, Unknown
  Bacterial polypeptide expressing nucleotide sequence isolated from the Sargasso Sea
tttgctgttttaactgatacgcatacggttggagtatcaggtgattttaggacttatggatatttaattgctataagggcagttactagcgcagatgctatgactgctgattgggctcgattaccttatgatgttttatctaaaatatcaaatcgaattgctaatgaagtaaaagatgttaacagggttgtttacgatattactagtaaacctccaggaactattgaatgggaatgaa

SEQ ID NO: 316929 - DNA, 163 bp, Unknown
  Bacterial polypeptide expressing nucleotide sequence isolated from the Sargasso Sea
aagagcagttgaaactgttgattttatgacagcaaattgggcacatttatcctatgattttattggaaaggtatccaaccgcattgttaatgaaattccacaaataagcagagtggtttatgattgtactggaaaacctcctgcaactattgagtgggaataa

SEQ ID NO: 316930 - DNA, 109 bp, Unknown
  Bacterial polypeptide expressing nucleotide sequence isolated from the Sargasso Sea
gtctttcatgcaactatatctaataaaatagtcaatagtattagaggtataaatagagttgtgtatgatgttacctcaaaacctccaagtactattgaattagagtagt

SEQ ID NO: 316931 - DNA, 214 bp, Unknown
  Bacterial polypeptide expressing nucleotide sequence isolated from the Sargasso Sea
ggcggttggagttgtaggggatgaacgaaagtatggaagaattgttacagtcagagttgtagactcgattgatgcaatgactgctgactggactagacttccaaatggcgttttagaaaaaatcagtaatagaattactaatgaaattgacgaagttacatgggtttcttatgtaatttcaagtaaaccacctgctaccattgaacctcaataa

SEQ ID NO: 316932 - DNA, 293 bp, Unknown
  Bacterial polypeptide expressing nucleotide sequence isolated from the Sargasso Sea
caatttatgtgaatatttaaaagaaaagaatttatatgacatcatatggcaagctttttgtgttttgattcctataaaaactgtaggtgtcatgggtgatgaaaggacatatgaaaatacaatagctataagggctgttaacagcacagatggtatgactgcaagttggtccagaatcccttatgatgttttagatcttatttcttcagaaattattaattcggtaaaaggaattaataaagttgtttttgatatatccaataagccgcctagtacaattgaatgggagtgat

SEQ ID NO: 316933 - DNA, 133 bp, Unknown
  Bacterial polypeptide expressing nucleotide sequence isolated from the Sargasso Sea
gatgccgaacaaagtattaattcttgattttggatcacaatacactcaattgattgctaggagggtaagagagttaaatattttttgtgaaatttatccgtacaatagttccaaattcatattaaacgattat

SEQ ID NO: 316934 - DNA, 236 bp, Unknown
  Bacterial polypeptide expressing nucleotide sequence isolated from the Sargasso Sea
gatgattaatatttatgatagaggtgttgtcattctcgactttggttcccaatatactcaacttattgcaagaagagcaagagagttaaatgtatattcacttatactgcctcctgaaacaagtgtagacaaaattttaagtctaaacccaggggccttaatattatctggtggtcccagcagcatatatgatcaagacgcaccagcctttgatcagaaaattcttgatgttgatt

SEQ ID NO: 316935 - DNA, 189 bp, Unknown
  Bacterial polypeptide expressing nucleotide sequence isolated from the Sargasso Sea
aatggaaaaagataatttagaaaagataattatcgtagattatggatctcaagttacacagcttatagcaaggaaagttagggaaattggagtttattcagaaataataaattttaatcaagctaaatcgttaaaaaaaaataaatatatcaaaggaataattctatctggtggccctttaactataac

SEQ ID NO: 316936 - DNA, 212 bp, Unknown
  Bacterial polypeptide expressing nucleotide sequence isolated from the Sargasso Sea
agtgggagtagtaggagatgagagaaagtacggaagaattgtaactgttcgagttgttgattctattgatgcaatgacggcagattggactagacttccaaatggtgtgttggagaaaattagtaatagaattaccaatgaaattgaggaagttacttgggtttcatacgtaatatctagtaaaccaccagctacaattgaacctcaataat

SEQ ID NO: 316937 - DNA, 178 bp, Unknown
  Bacterial polypeptide expressing nucleotide sequence isolated from the Sargasso Sea
gcacgtcgtcgcgcttcgcgccatcacgtcgagcgatggcatgacggcggactggtacccgttcacagtcgatttcttgaagacggtgagcacgagaatcacgaacaccgtcaaggaggtgaaccgcgtgtgctacgacgtgacgtccaagccgccggcgaccgtggagtgggagtga

SEQ ID NO: 316938 - DNA, 108 bp, Unknown
  Bacterial polypeptide expressing nucleotide sequence isolated from the Sargasso Sea
tggcgattcgtccgttgtcgctatgttattgcactgcgctatcggcaaaaacctgacttgtgtattcgtcgataacggtttattacgtttaaacgacggtacgcaagt

SEQ ID NO: 316939 - DNA, 392 bp, Unknown
  Bacterial polypeptide expressing nucleotide sequence isolated from the Sargasso Sea
aatgactgaaattaaaaataaaattactaatctacttaatccaaatcaaaattatgttgttgccttaagtgggggtgttgatagctcagtgttgcttcattcagttcgttctcatacttcaaatgtaagaagtgtttttgttaatcacaaccaaaaagattctaataaacttcgaaaatcagcggagaatattgctaaagatctagacattgatcactcaaacatagatactgaattagattctggttcgtcagaaacaaaaatgagagaggcacggtataaagctttatttgataatttgaaacatgatgaagttcttttgcttgcacatcacaacgatgatagagtagagacttttttaatcaacctgtttagagggacaaggctaaaag

SEQ ID NO: 316940 - DNA, 250 bp, Unknown
  Bacterial polypeptide expressing nucleotide sequence isolated from the Sargasso Sea
atgaagagtgaaacagaaactattttaattgtggattatggatcacaatatacgcaattaattgcaagaagaatcagagagttagaagttttttgtcttgtctatccttttaataaaattacgaaaaaaattttaaatgaactcaaaccatcggcatttatattatctggaggacctagatcagtactagacaaaaatgctcctaaattaaatcaagaaattttaaaaatgaaaaaaccagttttagcaa

SEQ ID NO: 316941 - DNA, 490 bp, Unknown
  Bacterial polypeptide expressing nucleotide sequence isolated from the Sargasso Sea
atgaattcttcaattgaaaacatcgttcaaagtaatgttgatgcatctaaaaatcttgttatcgctttaagtggcggtgtagatagttcagtcttagctcatattctttgtaaaatatcaaaaaatataaggcttgtgtttgttcagcacaaccaagtgcactctaaagatttagaagcctcagcaaaaaaaatagcaaaatcattaaatttagatttggaagtaattcagacttctttgaaacctaattcatctgaaactgaaatgagagatgaaagatataagcatcttttatcaaatttaaaaaaagatgaagtcttgctcacaggccataatttatcggacaaggcagagacattattaataaatttatttcgaggtacaagacttgaagggcttaaatcaatcaattcagaaaattctttatcaagtaagccaatgattaatatttcaaaaaaagaaatttatgaatacgccaacaataaatgac

SEQ ID NO: 316942 - DNA, 166 bp, Unknown
  Bacterial polypeptide expressing nucleotide sequence isolated from the Sargasso Sea
atgaatagtttatacaaaaatggggttataattttagattttggttctcaatacactcagctcattgcgagaagagtaagagaacaaaatgtttattcagagattatgtctccagaaatacctctttctgatattttgaaacgatcaccttctgcaattattctct

SEQ ID NO: 316943 - DNA, 247 bp, Unknown
  Bacterial polypeptide expressing nucleotide sequence isolated from the Sargasso Sea
atgaataaagagaaatttttagaaaaaattgttataattgattatggatctcaattcacacaacttattgcacgaaaaatcagagagtgtggtgtttattctgaaattattagttttaataaaataaaaaaaataactaatgatcaaaaaattaaaggaataattttgtccggtggtccattaactattactaaaaaaaaatctgaagcattaaatagtaatattataaatttaaatgtaccaatac

SEQ ID NO: 316944 - DNA, 844 bp, Unknown
  Bacterial polypeptide expressing nucleotide sequence isolated from the Sargasso Sea
aatggttaaaaaacgcgtacttctaggactttcaggtggagttgattcatcagtttctggatatttgctgaaagaacaaggtttttcagtagatgctgcttttatgagaaattgggaagatgacgatggatctccttactgtagtgtcaaggaagatttcatggatgctgcttttgtagcagatcaattaggaattaagctcttagaagtaaatttttctgaagcttataaaaaaagggttttttcatatttcttaagtgagttagaagcaggtagaactccaaatcctgatattttatgtaataaagagattaaatttgataagttttataaatacgctatagaaaataattacgatttcatagcaacaggtcattactgccaagtaagaaacattaaagatcaagtatgcctagctaaaggaaaagataataataaagaccaaagctattttttacactccattagcaataaatctttagcaaaaactttattccctgtaggaaacttaaccaaagatcatgtaagaaagattgcgtcagaacaagatctagttacaagtacaaaaaaggatagcactggaatctgttttattggggaaaggcctttccctgaatttatccaaaattatgtacagaaaaaaccagggccaatactgactgatcaaggagatgaaattggaactcatattggtctaagcttctatactttaggccaaagacaaggtttaggtattggaggagtgagaaattatccagatttaccatggtatgttttaaaaaaagataatgaaagtaatgctttaatagttggtcaaggaaatgataacagtctcttattttct

SEQ ID NO: 316945 - DNA, 189 bp, Unknown
  Bacterial polypeptide expressing nucleotide sequence isolated from the Sargasso Sea
gtacttatgagtatttatgtttactaagagcaattacgtctgaagatggaatgacagcagattattttgaatttaaaaagtcttttatacagactgtatcaaatagaatagtcaacagtataaggggtataaatagggtagtatatgatgttacatccaaaccacctagcactattgaattagaatagt

SEQ ID NO: 316946 - DNA, 719 bp, Unknown
  Bacterial polypeptide expressing nucleotide sequence isolated from the Sargasso Sea
aatgagtaaaggaaaagtactagttggactatctggaggagtagattcatctgttacagctttattgttaaaagaacaaggctatgaagtacatgctctttttatgaaaaattgggatgatgatgatggttctccatattgcagtgcaaaagaagatttcatggatgcagtgtttgtgtcagatcaattaaaaattccattagaacaaataagtttttcaaaagaatataaagaatcagtcttttcttattttctttctgaattaaaaactggaaatacacctaatccagatatcttatgcaacaaagagattaaatttaaagaattttataattacgcaatgtctaatgattacaactttatagctaccggacattatgcgataactgataatcaaagtttatataaaggtatagataattcgaaagatcaatcttatttcttgcacgcaatagataaagaagttttgcagaaaaccatatttccactgggagaacttaaaaaagagaaagtaagacaaatagcaaaagaaaatagccttataacaagcaataaaaaggatagtacaggtatttgttttatcggtgaaaggcctttccctgaatttgtagggggctatctatcacgcgaggaaggtaacataataaatgagaatgatgatgtgataggaattcatcacgggttagttttttataccctaggtcaaagacaacgtttag

SEQ ID NO: 316947 - DNA, 287 bp, Unknown
  Bacterial polypeptide expressing nucleotide sequence isolated from the Sargasso Sea
tatggaaaaaataattgttttagattttggctctcaatacagtcatttgatttgtaggagaattagagaattttcagtttatgctgaattagtaccatacgacatatcaccagaagaattgaaaaaaatgaacccaaaaggaataattttttccggcggaccatcaagcgtatacaatgaagatgccccaaaaccagatgaagaattatttaattttgatttacccttactagggatttgttatggacatcagttaattgtaaataaatttggaggcaaagtaaaac

SEQ ID NO: 316948 - DNA, 322 bp, Unknown
  Bacterial polypeptide expressing nucleotide sequence isolated from the Sargasso Sea
aaaattaaaattttaaaagaagctgatcattatttcataaatgatttaaaaaaagagaatttatataacaaaatttggcaggcttatgctgcattattaccagtaaaaactgttggtgttatgggtgacaacagaacttatgattatatttgtcttttaagggctataacctcatcggatggaatgacagcagattacttcgatttttcaaaaaaatttatgcaaaatgtatcaaataagattatcaataatattaaaggtataaatagagttgtttacgatgtaacttcaaaacctccaagcacaattgaattagagtaat

SEQ ID NO: 316949 - DNA, 96 bp, Unknown
  Bacterial polypeptide expressing nucleotide sequence isolated from the Sargasso Sea
agatatcaaggaaaattgtaaactcggttagaggtattaatcgtgtggtttatgatattacttcaaaaccaccaggaacaattgagtgggaataaa

SEQ ID NO: 316950 - DNA, 766 bp, Unknown
  Bacterial polypeptide expressing nucleotide sequence isolated from the Sargasso Sea
atgaaaaataaaagagttgtaattgcactatctggtggtgtagattcaagtgtagcagcatatttattaaaagagcaggggtataatctaattggactttttatgaaaaactggcatgatgagaatgcaacaatttcagatgaatgtccatggcttgaggatagtaatgatgcaatgttaattgcagataaattaaaaataccttttaagactgttgatcttagtaaagaatataaagagagaattattgattatatgttcaaggaatattcgaatgggaggacgccaaaccctgatatactatgtaacaaggagatcaaatttgacgtatttatgaaattagcactcacactagatgctgactatgtagcaactggacattacagtcaaatagaatcaactaataattcagaatataaacttttacaaggaattgataagactaaggaccaatcttactttttatgtcaattaaatcaaaaacagctaagcagaatattatttcctataggacatctaaaaaagtctgaggtaagggatatcgctaagaaaaagagtctaataacagctggtaaaaaagattcccagggactttgtttcgtcggtaaaattaggcttccagaatttctgcaacaaaaattaacaaaaaagaaaggtaatataattgaaatccccagcaacttggaggttttctctttagaaagtaaagagaatcaatccaggttaaatgaattatcaaaaaaatataaattctcaaaaaagtgat

SEQ ID NO: 316951 - DNA, 900 bp, Unknown
  Bacterial polypeptide expressing nucleotide sequence isolated from the Sargasso Sea
aatgaaaaaaaagaaagtagtagtagccttatctggaggagtagattcaagtgtagcagcatttttattgaaaaataaagggtatgaattaataggcttatttatgaaaaactggcatgatgaaaatgtaactatttcagatgagtgtccatggttagatgatagtaatgatgctatgcttgtagcagaaaaattaaatatacctttccaaacaattgacttgagcaaagagtataaagaaagaattattgattatatgttcgaggaatattcaaaagggaatacaccaaatccagatattttgtgtaatagagaaattaagtttgatattttcatggatatagctatctctctcggagcagattatgtagcaacaggccactattctagtataattgaggataaaagcaatgaaaatacaatataccaattacatgctgcctcagatcatttaaaagatcaatcatattttctttgtcaacttaaccaatatcaacttaaaagaataatttttccactaggcaatatcagtaaatcagaagtaagagatatcgctagaaagaataatttaattactgcagaaaaaaaagactcacagggactatgttttgttggaaaagttagtctacctgattttttacaacagaagttaaagaaaaaaataggagatgtgattgaaattccctcagactcatatttatatttaaatgacaaggataaattagataaatatgaaaaactagaatttctttcttcaagaatttcatataaaaaaaatgatggaaaattaattggcaagcatgatggtgctcatttttttacaataggtcaaagaaagggtctatcaattggtggttataaagatccattatttgtaatttcaacaaacacatcttcaaa

SEQ ID NO: 316952 - DNA, 1069 bp, Unknown
  Bacterial polypeptide expressing nucleotide sequence isolated from the Sargasso Sea
atgagtaaaggaaaagtactagttggactatctggaggagtagattcatctgttacagctttgttgttaaaagaacaaggctatgaagtacatgctctttttatgaaaaattgggatgatgatgatggttctccatattgcagtgcaaaagaagatttcatggatgcagtgtttgtgtcagatcaattaaaaattccattagaacaaataagtttttcaaaagaatataaagaatcagtcttttcttattttctttctgaattaaaaactggaaatacacctaatccagatatcttatgcaacaaagagattaaatttaaagaattttataattacgcaatgtctaatgattacgactttatagctaccggacattatgcgataactgataatcaaagtttatataaaggtatagataattcgaaagatcaatcttatttcttgcacgcaatagataaagaagttttgcagaaaaccatatttccactgggagaacttaaaaaagagaaagtaagacaaatagcaaaagaaaatagccttataacaagcaataaaaaggatagtacaggtatttgttttatcggtgaaaggcctttccctgaatttgtagggggctatctatcaggcgaggaaggtaacataataaatgagaatgatgatgtgataggaattcatcaggggttagttttttataccctaggtcaaagacaaggtttaggaatcggtggtgttaaaggatctcccgatcttccctggtatgtagctaagaagaatcttaaaactaatgaactcttatgcgtccaaggcaatgatcatcctctattattttctagagaattgtctacaaagaatctctttaaactcgaagattcacttccgacaagcttcgagggaactgccaaggtaagatacagacaggaagatcagggatgtgaaatctatgttgaagataatgctttgaatataaaatttcataaaccacaaagatctgtcactccaggtcaatcggtagtaatttataaaaatgataaatgtttaggcggtggagagatttgcactattaattaac

SEQ ID NO: 316953 - DNA, 1081 bp, Unknown
  Bacterial polypeptide expressing nucleotide sequence isolated from the Sargasso Sea
aatgactgaaccaataattgttggtcttagcggtggcgttgatagttccgtaactgctctattattaaaaaagcaaggatttgacgttgaatgtgtatttatgaaaaactgggaaggggaaagtgatcaatgtacagctgaggaagattataaagatgcgctagctgcatgcaactcaattgatatcccaattcgttctactaatttttctaatgaatattgggatggggtatttaaaaattttattgatgaatattcaaaagggcgcacgccaaacccagatatattatgtaacaaagaagtaaaatttaaagcctttttgaactatgctgcagatattggtggatctaaaatagctactgggcactatgctagaattaaagaagatgatcggtcatttaagctacttaaaggaattgatctaaataaagaccaaagctatttcttgtatctactaaatcaagaaatgctttcaaaaagtctttttccaattggagatataagtaaacaagaagttcgtcaaatcgcaaaagaaaatgggttattaaatcatgcaaaaaaagacagtacgggtatttgttttattggcgaacaaaaattttttaaagattttttgaaaaaatatataccttcaaatccaggtattgtaaaatcagtggatggtgagatttgcggtgagcatgacgggctaatgtattacacaatggggcagagaaaaggtcttggcattggcggtgggtatggcgataataaagctgcatggtttgtttctgataaggactttaataataatatattaattgtttctcaaggcagggaccatccctctctttaccataaaaatcttaatgctgattctcttcactggattagtggcaaagctccaagtagaaaaagacggttaaccgcaaaaattagatacaggcagcaagatcagcattgtaaaattacctctatggatgaaaatacttgtagcgtagaattttcatcgccccaatttgcaattacccctgggcaatctatagttttttatgatggggaagtctgtttgggaggtgcaataattaatggcagatcttaa

SEQ ID NO: 316954 - DNA, 187 bp, Unknown
  Bacterial polypeptide expressing nucleotide sequence isolated from the Sargasso Sea
atggctaaaaaacgtgtacttctaggactttcaggtggagttgattcatcagtttctggatatatgctgaaagaacaaggtttttcagtagatgctgcttttatgagaaattgggaagatgatgatggatctccttattgtagtgtcaaggaagatttcatggatgctgcttttgtagcagatcaat

SEQ ID NO: 316955 - DNA, 1069 bp, Unknown
  Bacterial polypeptide expressing nucleotide sequence isolated from the Sargasso Sea
atgagtaagaaaaaggtattagtaggattatcaggtggagtagattcatctgtttctgctctgctacttaaagaacaaggacatgaagtccatgctttattcatgaaaaattgggatgatgatgatggctccccttattgcagcgcaaaagaagattttatggatgcagtatttatctctgaacagctaaatattcctttggagcaagtaagcttctccaaagagtacaaagataatgttttctcatattttcttaaggaattagaagctggaagaacaccaaatcctgatattttatgtaacagagaaattaaatttaaagaattttataaatatgcaatgtctcaaggttatgactacatagctacgggtcattatgcccaaacagacaatataagtctttataagggggtcgactcttcaaaagatcaatcctatttcctgcatgccatagataaagaggttttagagcgaacattatttccattaggtaaattagaaaaatctaaagttagagagatagcaagaaataacaatttaattacaagtgaaaaaaaagacagtacaggaatttgttttatcggagagaggccgttccctgaatttataagcaattacttagcaggagaagaaggaaacataattaatgaaaaaaatgacatcataggaacacactcaggtctagttttttatactttgggtcaaagacagggtttgggtattgggggcgttaagggagcatctgatttaccttggtatgtggccaaaaagaacttagaaactaatgagttgacttgtgtgcagggcaataatcaccctctccttttttctgaggaactcacaactagtaatcaatttttattggttgattctataccggaaaaatttactggaacggctaaagttcgatacagacaaaaggatcaagactgtgaaattaatattcttaataacagaataaatattaaatttgcttcacctcagagatcggtaactcctggtcagtcggtggtaatctatcaagatgataaatgcctaggtggtggagagattagtagtattaattaaa

SEQ ID NO: 316956 - DNA, 280 bp, Unknown
  Bacterial polypeptide expressing nucleotide sequence isolated from the Sargasso Sea
atgttagaagaagagggcctatatgatgaaatttggcaggcatttgcagttctcatcccagtgcaaacagttggtgtgatgggagaccaaagaacctacgaaaatttattaggattgagagcggttacaagtacagatggtatgacagctgattggtatagaatgcctccagaagttttatctaaaatatcaaataagatcgttaattcagtcaaaggtataaatcgagtaacatatgatattacttcgaaaccaccaggaacaattgaatgggagtaat

SEQ ID NO: 316957 - DNA, 85 bp, Unknown
  Bacterial polypeptide expressing nucleotide sequence isolated from the Sargasso Sea
agaattataaatgaagtaaaaggaattaatcgggtagtttacgatacaacttctaagcctcctggcactattgagtgggaataag

SEQ ID NO: 316958 - DNA, 1276 bp, Unknown
  Bacterial polypeptide expressing nucleotide sequence isolated from the Sargasso Sea
tatgagctcaaacattcaaaaaattattgaaaatattgatttgtctaaaaattatgttcttgcattaagcggcggagtagatagttctgtactagctcatatattggcaaaacaatctgcaaaagtaagacttgtttttgttcaacacaaccaaaaagattctaaaaagttagaaataattgctgaaaaaatttcagattcattaaatttaaaatttaaaatactcccaacttcactaaatccaaaatcttctgaaactaaaatgagagatgaaaggtacaaggttctactctctgatcttaaagaagaggaaatattaataacaggtcacaacctttctgataaagcagaaactttattaataaatctatttagaggaacacgacttgagggtttgaaatcaataaagtcaattaataaaaaaattcaaagaccaatgattaaaatttcaaaaacagaaatttatgattatgcaaacaaacacaatttagtttattttgatgatccatcaaacatggataataagattataagaaactggattagaaacattttaattcctgaaattaatgaaaaatttcctggctcttttgaagaaaaaattgaacttttgacaaatgaagtagaacttcgaacaaattataaaacagactatttaaagtacataaaattttcgagaggctatctagagataccaatatcattattaagccacaacagcaatgaaaggcaactctatttaaatgaaatagcaaactttcttgggatgaaaagcatagaaaaaaacgatatagaaaagatatctacatcactcaaagaaaagaagaaatttgatttttttaaagaatggatttgtttcaactcaggtggctcaatcatttttatagataataaacaatggagaaaagttaccaagaatggagacagttcctttattggatttttcgaatttaaaaaaattaataaaattgatatatttaacaattggaattgtgctcatccagaaaatcaggatattgatattagatttttaaaaaatggtgaaaaaataattagtaatggcatttcgattaaagcctccgaagttcttcgtaattatggagtagataatgcattcagaaaaaattggccaatggtttatgtagacaatgatctttactggattgtcggacttagaaaatcagatctcgcaaaagaaaatgaaaaaaaatcaaaaaaggttcttttacaagcttcacttataaaagataatttatataacttgaataattcttag

SEQ ID NO: 316959 - DNA, 1093 bp, Unknown
  Bacterial polypeptide expressing nucleotide sequence isolated from the Sargasso Sea
atgaattcttcaattgaaaacatcgttcaaagtaatattgatgcatctaaaaatcttgttatcgctttaagtggcggtgtcgatagttcagtcttagctcatattctttgtaaaatatcaaaaaatataaggcttgtgtttgttcagcacaaccaagtacactctaaagatttagaagcctcagcaaaaaaagtagcaaaatcattaaatttagatttggaagtaattcagacttctttgaaatctaattcatctgaaactgaaatgagagatgaaagatacaagcatcttctatcaaatttaaaaaaagatgaagtcttgctcacgggccataatttatcagacaaggcagagacattattaataaatttatttcgaggttcaagacttgaaggacttaaatcaatcaattcagaaaattctttatctagtaagccaatgattaatatttcaaaaaaagaaatttatgaatacgccaacaaaaatgacataccttattccgaagacccaacaaataaagataacaatattgttagaaattggattagaaattttttaattcctgagataaataataaatttccaggctcatttgaatcaaaagcaaatcaattatcaaatgaggtggcatttagatcaaattatgacaatgataatttgaagtatataaaaaaatctgagggatatgttgagataccagctttatttatagacaatatgagtttagaaaaacaatattatttaaatcgggttggtaaatatatcggcatgaattccatagaaaaaaaagatattgaaaaagtagaaaaagttatagataaaaataaaaaaatagattttttcaaggattggatatgttttaaatctggagggtcagttttatttatagataaaaataaatggataataaacgataagtctaattttgaaaattatggattttttaattttaaaaaaatttcagcgattgacatttttaataaatggagcgtttctatacccgaaggatccaatgttacaattaaaactttacaagatggggaaaaaatcatatctggaaataattcgcttaaaggtaacagaaatatttaga

SEQ ID NO: 316960 - DNA, 232 bp, Unknown
  Bacterial polypeptide expressing nucleotide sequence isolated from the Sargasso Sea
gatggatttcaataaaattgctcatactgagaacacactccatgcagcaatttcaaatgatgtaaagaaattatttggcgtacaatttcatcctgaagttatacattcagagtttgggatgacggtaattaaaaattttgtttataaaatttctcgttgtgcggctgattggacaaccgaaacctatatagatgaaactattcccaggataagagagcaagttggtaagtaa

SEQ ID NO: 316961 - DNA, 334 bp, Unknown
  Bacterial polypeptide expressing nucleotide sequence isolated from the Sargasso Sea
ataactcctgaaaaaataaggatattgagagaagcagataacatttttatgaatgaacttaaaaaatataaattgtatcataaaatatggcaagcctatgctgctcttctaccagttaaaacagttggggtaatgggtgacacaagaacatatgagcacacatgtcttcttagggcagtaacatcaaaagatggaatgacagcagatcatttttactttcctaagaattttttagataacatatctaataaaattataaataatgttattggaattaatagagtagtttatgatataacctctaagccacctggtactatagaattagaataaa

SEQ ID NO: 316962 - DNA, 373 bp, Unknown
  Bacterial polypeptide expressing nucleotide sequence isolated from the Sargasso Sea
ttccctggtcctggtcttgctataagaatcccaggagccatagatgaaaataaagttagtattttaaaagaagctgacgatattttcataaaaagtttacatgaatacaaaatctatcacaaaatttggcaagcctatgccgctcttctgccagtcaaaactgtgggtgtcatgggcgataataggacatatgaatatatttgtttgttaagagcaattacatctgaggatggtatgacagcagattattttaactttaaaaaagaatttatgcagaatgtttctaataaaatagtaaatagtatcaagggtataaatcgagttgtttatgatgtaacatcaaaaccgccaagtaccattgaacttgaataaa

SEQ ID NO: 316963 - DNA, 382 bp, Unknown
  Bacterial polypeptide expressing nucleotide sequence isolated from the Sargasso Sea
aatgagtcttgatctaaatcttaataaaatcttaataatagattttggttcacaatttacccaattaattgcaagaagagtaagagaattaggtgtgttttcagaaatagttagtcacaaaaaaataaaattaaaggacataaataacagcattaaaggaatagtattatctggcggtccattaaacgtttatcaaataaacaagtactcatttgataaaaaaattctacaacttggtgtgccagttcttggaatatgttttgggcatcaaattttatcaaaacttaatggtggaagagtaaaacaatctaaacatagagaatttggcctagctaatgtttataaaaaaaataacagtcttttaacaacccaattttttgga

SEQ ID NO: 316964 - DNA, 1159 bp, Unknown
  Bacterial polypeptide expressing nucleotide sequence isolated from the Sargasso Sea
tatgagtaataaaagggttgttattggtctttcaggaggagttgattcaagtgtagcagcatatcttctaaaaaaacaaggttatgatgttataggtttgtttatgaaaaactggcatgatgaaacagttacattatcatcagaatgtccatggcttgaggatagtaatgatgcaatgttggttgctgaaaagattgggataccttttcaaacagtagatttaagcaaagaatataaatcaagaattgttgattatatgtttaaagaatattctattggaagaactcctaatccagatgttttatgtaatagagaaattaaatttgatctttttatgaagattgcattctcattaggagcagatttgatagcaacaggtcattattgtagaaaaagtattttaagtcaaaataaatcaaatacaatttacaaactcttaagcggaaaagatagtagaaaagatcaatcatattttttatgtcaactaaatcaagaacaattgtcaaaagttttattccctataggtgatttaaaaaagagtgaagtaaggaagatagctaaagatttaaaattagttactgctgaaaaaaaagattctcaaggtctatgttttattgggaaggttagcttgccagaatttttaaaacagaggcttaaatcaaaaaaaggagaaattattcagatttcctctaatcatgaagtttttaaaaaatacttttataataaaaactctaaatctttagactcactatcttcaaaattttcttttaagcctgaagatggagaattaattggggttcataatggcgctcataattttacaattggtcagagaaaaggattatcaattggagggaatgttgaaccactttttgttatagacataaatgttaaaactaatagaatatatgttggagaagggaaaaagcatccagggttgttaagatatgctcttaaaatactaaaaagagatgtacattggttaagaaaagatttaaaattagaagaaggagaaagtggagattttcaagttaggattagataccgtcaacccctacaaaatgctactctttatcaaactaaagatagtttgtttatatctttctatgaagctcaatcctctataacatctgggtcaatttgcagcatggtatattaa

SEQ ID NO: 316965 - DNA, 292 bp, Unknown
  Bacterial polypeptide expressing nucleotide sequence isolated from the Sargasso Sea
aatgagtaagaaaaaggtattagtagggttatcaggtggagtagattcatctgtttctgctcttctacttaaagaacaaggatatgaagtccatgctttattcatgaaaaattgggatgatgatgatggctccccttattgcagcgcaaaagaagattttatggatgcagtatttatctctgaacagctaaatattcccttggagcaagtaagtttctccaaagagtacaaagataatgttttctcatattttcttaaggaattagaagctggtagaacaccaaatccctga

SEQ ID NO: 316966 - DNA, 301 bp, Unknown
  Bacterial polypeptide expressing nucleotide sequence isolated from the Sargasso Sea
aatgagtcttgatcaaaatttgaataaaattttaataatagattttggttcacaatttacccaattaatagctagaagagtaagagaattaggtgttttttcagaaatagttagccacaaaaagataaaaccaaaagacataaataacagcattaaaggaatagtattatctggtggccctttaaatgtttatcaaataaataagtattcatttgacaaaaaaattttacaacttgatgtaccagttcttggaatatgttttgggcatcaaattttatcaaaacttaatggtggaaaaagt

SEQ ID NO: 316967 - DNA, 169 bp, Unknown
  Bacterial polypeptide expressing nucleotide sequence isolated from the Sargasso Sea
aatgaccgattctggcaatctctctttagatcaaaaaaatattgatacgattttagtattagacttcggctctcaatatactcaacttattgcaagaagagtaagagattttaatgtatattcggtgattcttccttgggatgtttctctggaaaaaattaaatcttaa

SEQ ID NO: 316968 - DNA, 281 bp, Unknown
  Bacterial polypeptide expressing nucleotide sequence isolated from the Sargasso Sea
aatgaaccaagataatttagacagaataattattgtagattatggttcacaggttacacagctaatagcaagaaaagttagagagattggtgtttattctgaaataataaattttaataaatcaaaaaaaattagggaaaataaatttattaaaggaataattctatctggtgggccattaactataactaaatcgaactctttaaatcttactgataacattttaaaattaaataaaccaatccttggaatttgctacggacatcaaatacggcaaaaaa

SEQ ID NO: 316969 - DNA, 365 bp, Unknown
  Bacterial polypeptide expressing nucleotide sequence isolated from the Sargasso Sea
gccaggtttagcaattagaattattggcaatataacaatagaaaaaattaaaatacttcaggaagcagatttcatttatatgaatgaattattaaaaaataatttatatgataaaatttggcaagcttatgctgctcttctaccaataaaaacagtaggtgttatgggtgactctagaacttatgaatacacttgtttgctaagagcagttacttccgaagatggcatgtctgcagattattttaattttcccaaatctttcttagatagaatttcaaataagattgtaaataatgtaaaaggtatcaacagagttgtttatgatatcagctcaaaaccaccaagtacaattgagctagagtaag

SEQ ID NO: 316970 - DNA, 185 bp, Unknown
  Bacterial polypeptide expressing nucleotide sequence isolated from the Sargasso Sea
atatgaaaatatttgtttacttagagcagttatttctgaagacggtatgacagctgactattttaattttccaaagtttttcttagatagtatatctaataaaattataaataatgttaaagggattaatcgagttgtttatgatattacttctaaaccaccaagtactattgagcttgaataat

SEQ ID NO: 316971 - DNA, 169 bp, Unknown
  Bacterial polypeptide expressing nucleotide sequence isolated from the Sargasso Sea
tgctttaagagctgtgacttcacttgacggtatgacagctgattactacccgtttgagcaagagtttttagctaatgtgagcactcgtatcattaatgaggttaaaggaattaatagagtagtttatgatataacatcaaaaccaccaggtaccatagagtgggaataa

SEQ ID NO: 316972 - DNA, 322 bp, Unknown
  Bacterial polypeptide expressing nucleotide sequence isolated from the Sargasso Sea
gaaaattaaaattttaaaagaagctgattattacttcatacaagcattaaaagatcatgatttatatcataaaatttggcaggcatatgctgctttgctgcctgttaaaactgttggcgtgatgggagataatcggacgtatgagtatttatgtttgttaagagcaattacttctgaagatggaatgacagctgatttttttgaatttagaaagtactttatgcaaactatttcaaacaaaattgttaatagtattagaggaataaatagagttgtttatgacatcacttcaaaacctccaagcaccattgaattagaataa

SEQ ID NO: 316973 - DNA, 282 bp, Unknown
  Bacterial polypeptide expressing nucleotide sequence isolated from the Sargasso Sea
aatgatatttattgttgattttggatctcaagtaacacagttaatagcaagaagagtaagagaagctggagtgtactgtgaaattgtgtcaagcaaatcactttataggcaaatacttaatagagggtgttcaggaatagttttctctgggggtccagcaagtgttcataagtcaaatactccaaaaattgataaaagaataattcaatttaaatattccaatattgggaatttgctatggtatgcaattattatgttacccaacttggtggaaaagtttaa

SEQ ID NO: 316974 - DNA, 553 bp, Unknown
  Bacterial polypeptide expressing nucleotide sequence isolated from the Sargasso Sea
atgaaacaaaaaattttagttatcgattttggatctcaagtaacaaaattgatcgtacgaaggataagagaattaggtgtttattgtgaaatatccactgtcaaagatttaaataaattagatttttttgataacataaatggattaattttgtcaggaggtcctgctactgtaacaaaaaaaaaattccccaaaattccagaaaaaatattttcactcaatatacccattcttggaatttgttatggattgcaacttattacaaaaaaatttgggggcaaaataaaatcgaatacaaaacagagagaatatggcagaacacttataataaacaaaaaaaactcaattctaactaatagcttttttcaaaataataaaaatgaagtatggatgagccaccaggattgtattacaaagctgcctaaaaattttaagacattggcatctagtaagagttcaaaatatgcaataatagagaataaaaaaagaatatatttggtattcagtttcatccagaagttagtcatactaacaaagggtatatcttattaaa

SEQ ID NO: 316975 - DNA, 94 bp, Unknown
  Bacterial polypeptide expressing nucleotide sequence isolated from the Sargasso Sea
tatgatttatatagttgattttggttcacaagtaactcaattgattgcaaggcgtgttcgagaatctggtgtatactgcgaaattgttggtagt

SEQ ID NO: 316976 - DNA, 349 bp, Unknown
  Bacterial polypeptide expressing nucleotide sequence isolated from the Sargasso Sea
atgaatcaacaaaatttacaaaaaattattataatagattatggttcacaggtaacacaacttattgcaagaaaagttagagaaattggtgtgtactcagaaattattaattttaatcaagctaaaaaaattaaaaaaaaccatctaattaaaggaattattttatctggaggaccactgactataacaagtagcaatcctctaaatttgcctaaccatattttaaatttagaaaaacctattcttggaatttgttatggccatcaaatattggcaaaaaagtttggtggtaaagtaaaaatctctaaaacaagagaatttggctttgcgaaaattaaaagtgataaaa

SEQ ID NO: 316977 - DNA, 163 bp, Unknown
  Bacterial polypeptide expressing nucleotide sequence isolated from the Sargasso Sea
cgagcagttacaagcgttgatgggatgacagctgattggtttaaaattcccgataatacccttacaaaagcgtcaaacaaaattgttaacaatgttaaaaatgtgaatagggtagtatatgatattacttcgaaaccgcccggtaccatagaatgggaataac

SEQ ID NO: 316978 - DNA, 331 bp, Unknown
  Bacterial polypeptide expressing nucleotide sequence isolated from the Sargasso Sea
agacaaagtaagttagagatattaagagaagcagatgcaattttcatggaagaattaatcaaacaaaaactttacaataaaataagtcaagcctacgcagcttttctgcctgttaaatcagttggagtggtgggtgatgcaagaaggtatgaatacgtaattgccttaagagcggtagtaacgttagatttcatgacggctaatgtgtttcctttcaaacaagaatttcttaatcatgtttcaacaagaataatgaatgaaatagataaagtttcacgagttgtttatgatatttcgagtaaaccaccggcaactattgagtgggagtaat

SEQ ID NO: 316979 - DNA, 457 bp, Unknown
  Bacterial polypeptide expressing nucleotide sequence isolated from the Sargasso Sea
gcctttaaagagttttttaaagatgaagtgagaaatttaggtaagtcattagagctagaaaacagcataagaaataaacacccattcccaggaccaggattagcgatacgaatgatcggtcaaattactgcaaaaaaaataaaaattctgcaagaagcagattacattttcataaatgaactaatcaataataatttatatgataaaatctggcaagcttatgctggtttattacctattaaaactgttggcgttatgggtgactcaaggacttacgagtatacttgtttgttaagagccgttatctctgaagatggtatgactgcagattatttcaactttccaaagaaatttttggataaaatagctaacaaaattataaatagtgtaccaggaattaatcgagtggtatatgatataacatctaaaccgcctagtactattgaattagaataat

SEQ ID NO: 316980 - DNA, 523 bp, Unknown
  Bacterial polypeptide expressing nucleotide sequence isolated from the Sargasso Sea
aatgcctccaccaaacctgaaggaaaaaataataattgtagattttggatctcaagtaacaaaacttatagcaagaagaataagagacttaggtgtcttttgcgaaattttaacaataaaggatctttttaaagttaaagactataaatttattaaaggaatagttttatcaggcgggccttcaactgtaaccaaaaaaaaatatttgagtatacctaaagaaatattttcaaaaaaaatacctatacttggcatatgttatgggctacagctaatttcaaagttgtttggtggttcgattaagtcattaaaaaaaaagagagaatttggaagagcgagtctttttaaaaaaaaaaaatcattacttattcaaaatttttttaagaaaaaaaatatatctgtctggatgagccatcaagatgctgtgaccaaactacctaaaggctttaagatagttgcatcaactaaagagtcaaaattaaccatcatagaaaatccacaaagtaaaatatatggcgtacaa

SEQ ID NO: 316981 - DNA, 257 bp, Unknown
  Bacterial polypeptide expressing nucleotide sequence isolated from the Sargasso Sea
aatgaaaaaaaacaatagagataagaaaattcttataattgattttggttctcaatacacccaattaattgcaagacgcgtaagagagcttggtgtattttcagaaatatcaaatcacaaacaagttaaaaaagtagatgtagatgaactattcggtattattttatcaggcggccctttaaatgtttatgaagataaaaaaatagattttaataaaaagattttaaacctaaaggttccaattttaggtgtttgct

SEQ ID NO: 316982 - DNA, 700 bp, Unknown
  Bacterial polypeptide expressing nucleotide sequence isolated from the Sargasso Sea
gatgcatcttgaagacactcttaataaaatattaattgttgactttggttctcaatttacacaattaatagcacgtaaaataagagaactaggcatttattgtgaaattatcagccataaatcaatagaaaaacgtaaaaactttaacaaaaatatcaagggtatagtcttatcaggtggacctttaaatgtttacgaaaataaaaaagtaaaatttaatcataatcttttaagacttgaaatacctatattgggtatatgttttgggcaccaaattatttcaaaagtaatgggtggaaaagtaaaaagttctaaatttagagagttcgggctagctgaagtaacagagataaaaaaaagcaaattaacaaaaaattttttttctaatagaaaaaataatgtttggatgagtcatgcagatcaagtaacaaaattaccaaaaaattttagtgtaattgcaaaaagtaataattctaaaatgtgtattattcaaaataataaaaaaaatatttttggaatccaatttcatccagaagtaagtcataccaacaaaggaaaagtaatacttagaaattttatattttctatatgtaaattaactaaaaattggtctgccagtgatcagaaaaaaaaattaattagtgatgtaaaagaagttgtgggaaatcaaaagtcatttgtgcattatctgggcgtgtag

SEQ ID NO: 316983 - DNA, 291 bp, Unknown
  Bacterial polypeptide expressing nucleotide sequence isolated from the Sargasso Sea
tttttataagagagttaatcgataacaacctttacaataaaatttggcaagcttatgctgctttgctaccaacaaaaactgtcggtgttatgggtgactctagaacttatgagtatacctgtttacttagagcagttatttcagaagatggcatgactgcagattactatagttttcctaaagattttttagacaaaatatcaaataaaattattaatggtgtaaaaggcattaatagagtggtatatgatataacttcaaaaccaccaagtactatagagttggaataat

SEQ ID NO: 316984 - DNA, 265 bp, Unknown
  Bacterial polypeptide expressing nucleotide sequence isolated from the Sargasso Sea
aatgagtcttgatcaaaatcttaacaaaatcttaataatagattttggttctcaatttactcaattaattgcaagaagaataagagaattgggtgttttttctgaaataattagtcacaaaaaaataaaactaaaagatataaatcacagtattaaaggaatagtattatctggcggtccattaaatgtttatcaaataaacaagtattcatttgataaaaaaattctacagcttgatctaccagttcttggaatatgttttgga

SEQ ID NO: 316985 - DNA, 322 bp, Unknown
  Bacterial polypeptide expressing nucleotide sequence isolated from the Sargasso Sea
aaaaattaatattttaaaagaagctgatcattattttattcaagctttgagagatcacaatctatatcataaaatttggcaagcttatgcagctttactcccagttaaaacagttggcgtaatgggtgataatagaacttatgaatatttgtgtttgcttagagccataacatctgaagatggtatgacagcagatttttatgaatttaaaaaatcatttatacaagaaatttcaaataaaatagtgaatagtattagagggattaatagagtagtttacgatataacctcgaaaccaccgagtacaattgaattagagtaa

SEQ ID NO: 316986 - DNA, 568 bp, Unknown
  Bacterial polypeptide expressing nucleotide sequence isolated from the Sargasso Sea
ttaaaaaaagtccgagattgcctaaatgattgtaatggcagattccagattctaccagtacgatctgttggagtacaaggagatcaaaggacatatgcttctccagttgcacttataaatgctcctcgagattgggactggctggaaagtcaggctactcgaataacaaatgaagttggaacagttaatagggtagtacttttattaggttcaaatacaaaggactctagtgatcaatttaatttccataaagcattttgcagcaaagatcgacttgatttgcttagagaggctgattacaaagcaacaaaattttttgaaaaacacggcctgatgcccaaaatttttcaacttttggtaattttgctgcctgtttcaaaaaatgaggaacaagaaagtctggtgcttcgtcctgttgtttcagaagatgttatgactgctcaatttgcgcgtatagattggaaattgattgatcatttagtagaatcgttacttgacatttcaggaattgaaaatgttttctacgatattactcacaaacctcctgctacctttggatgggagtgac

SEQ ID NO: 316987 - DNA, 470 bp, Unknown
  Bacterial polypeptide expressing nucleotide sequence isolated from the Sargasso Sea
aaaaattgtggaaccattaagagaattatttaaagatgaggtaagaaatgttggaaagcaattaaaaatagataaacatctactttcaagacatccatttccaggtccaggtttagcaattcgaataccaggaataattgataaaaaaaagatcttaattcttcaggaagcagatcatatttttattcagtacttaaaagagaaaaagctttataataaaatttggcaagcttttgtagtcctgttaccggtaaaatcagtaggcgttatgggagatgaaagaacatacaattactcggtttcacttagagctattacttcagttgatggaatgacagctgatttttatatgtttacaaataatcaactaaaagaaatatcatctcgtataattaataaagtaaaaggcattaatagagtattatatgactttacttcaaaacctcctggaactattgagtgggaataaa

SEQ ID NO: 316988 - DNA, 367 bp, Unknown
  Bacterial polypeptide expressing nucleotide sequence isolated from the Sargasso Sea
tggacctggcttgggtatcagaattataggtgaaattacccatgatagagtcaaaatccttcaagaagcagataatatttatattaacgagttggttaaacatgatctttacaataaaatatggcaagcatacgcagctttattacctataaagacagtgggagtaatgggagatacaagaacttatgagtatatatgcctactaagagccgtcacatcagaggacgggatgactgctgactatttttcttttccagcaaaatttatagatagtatatctaataagattattaataatgttaaaggtattaatagggtagtttatgatattacttctaagccacctagcacgatcgaattagaataa

SEQ ID NO: 316989 - DNA, 909 bp, Unknown
  Bacterial polypeptide expressing nucleotide sequence isolated from the Sargasso Sea
ttgattctctccggaggaccggcttcggtttacgaggcacagaccccggatttcaactcaaaactgctggaactcgagcttccgattcttggtctgtgttatggtcatcaactgacggcactccattttggaggttcgattgaaaacaccggcagcggagaatttggtaaggcgcatctgcagcagacgcacccatcagccctttgggaagggattgattttccaacccaggtctggatgagccaccaggacagcgtcactgatttaccaaaaaatttcgagatcatcgcgcagaccgatggctgcccttccgcggcacttcagcatcggcagaaaccgatttataccctgcagtttcatccagaggtcaaggacacccaatgcggttcgaaaatccttacaaattttgcggagatttgtgggatgcccaagaattggagcatgcagaatttcattaacctggccaaagaacagattcggcaggaagtggcttctcggaaggtcctgatgtttctcagcggcggggtcgattcttccgtcgccttcgccctgctcaatgaggccctgggaacggatcgggtgtttggactctacatggacaacgggttcatgcgccaaggagaatcgaagcagatcatgcagcgttaccaggatctgggttatacgaacgtcgaagcccgggatttcagcaaagaattccttgaggccctggcaggactcaccgatccccaacagaaaaggcatcaggtgggcgcggtattcatccggatgcgcgaaaggtttctcggagaacttcaactgaaccctgaagattggatgctcgggcaggggacgctttatccggacatcatcgaatccgggggaagcgaacacgcgaatgtcatcaaatcccaccacaacccgggtgga

SEQ ID NO: 316990 - DNA, 226 bp, Unknown
  Bacterial polypeptide expressing nucleotide sequence isolated from the Sargasso Sea
atgatatttattgttgattttggatctcaagtaacacagttaatagcaagaagagtaagagaagccggagtctattgtgaaattgtgtcaagcaaatcaatttataagcaaatacttaatagaggatgttcaggaatagttttctctgggggtccagcaagtgttcataagtcaaatactccaaaaattgacaaaagaatatttaatctaaatatcccaatattgg

SEQ ID NO: 316991 - DNA, 211 bp, Unknown
  Bacterial polypeptide expressing nucleotide sequence isolated from the Sargasso Sea
aatggaagaaaagattttaattcttgattttggttcacagtacacccaacttattgctagaagaattagagagcttaatatctattgtgaaatttttccattcaataaaattcccgaaataactccagaatacgttggagtaattttatcaggaagtcctttctctgttcacgataaggattcacctgaaattaattttgaaactttcggt

SEQ ID NO: 316992 - DNA, 333 bp, Unknown
  Bacterial polypeptide expressing nucleotide sequence isolated from the Sargasso Sea
tcaccccggaaaaagtaaaaattcttcaagaggctgatcatatttttataaatgaacttattaatcgcaaactttacaacaaaatatggcaggcttatgctgctctattgcctatgaaaacagttggagtaatgggagattcaagaacttatgagtatacttgtttattgagagctgtagtttcagaagatggtatgaccgcagattattttaattttccaaaggatttttttgataaaatttcaaataaaatcgttaatggcgtaccaggtattaatagagtagtgtatgatataacttctaaaccacctagcactattgagctggaataat

SEQ ID NO: 316993 - DNA, 469 bp, Unknown
  Bacterial polypeptide expressing nucleotide sequence isolated from the Sargasso Sea
aaacttttggaacctctccgcgaattatttaaggacgaagtacgtattctgggtaatgaattaaacataccttccaatcttgttggacggcacccctttcctggtcccggcctagctattcgcattcctggtgctatatccgcagaaaaactctccatacttcgggctgccgacgatatatatcttcaagagattgaaaattttgggatctacaatgaaatctggcaggcgttttgtgtgctattaccagttaaaacggttggggttatgggagactctcggacttacgagtttgtctgtgccttgcgggcggttacatcagaagacggaatgactgctgattattatccctttgggcatgattttctaagtacagttgcaaggcgtattgtaaatgaagtcaaggggatcaaccgcgtaacctatgatataacgagcaaacctccgggcaccgtggagtgggaataga

SEQ ID NO: 316994 - DNA, 406 bp, Unknown
  Bacterial polypeptide expressing nucleotide sequence isolated from the Sargasso Sea
aaaataagcaaagagattatatcaaggcacccttttccaggccctggtctggcaattagaatgcctggaattattactaatgagaaaataaaaattttaaaagaggctgattattattttatacaagcattaaaagatcatggtctttatcataaaatttggcaagcatatgctgctcttttacctgtcaaaaccgtaggtgtgatgggagacaatcgtacttatgaatacctctgcctcttaagagcaattacgtctgaagatggtatgacagctgatttctttgaatttaaaaaatctttcttgcaaactatttctaataaaatagttaatagcataagaggcataaatagagttgtttatgacgttacctcaaaacctccaagtactattgaattagagtagt

SEQ ID NO: 316995 - DNA, 157 bp, Unknown
  Bacterial polypeptide expressing nucleotide sequence isolated from the Sargasso Sea
catgaccgaccgcattctcatcgtcgatttcggcagccaggtgacgcaacttatagcgcgccgtgtgcgagagagtggggtttattgtgaaattcatccctttaacaaggtcactgtggagagtatctgcaacttaggcccaaagggtgtgatcctc

SEQ ID NO: 316996 - DNA, 616 bp, Unknown
  Bacterial polypeptide expressing nucleotide sequence isolated from the Sargasso Sea
catgtcgaatgactgcctcgccgttctggattttggaagccaatacgctcacctgattgcgaaaagacttcgccgacagggattctacacggaaatccaaactcctgccagtcgtgcgtcaaaacttgcccatgcccggggactgattctctccggaggaccggcttcggtttacgaggaacagaccccggatttcaactcaaaactgctggaactcgagcttccgatccttggtttgtgttatggtcatcaactgactgcactccattttggaggttcgattgaaaacaccggcagcggagaattcggtaaggcgcatctgcagcagacgcacccttcggccctttggaaagggattgattttccaacccaggtctggatgagccaccaggacagcgtcactgatttaccacaagatttcgagatcatcgcacagaccgacggctgcccttccgcggcactacagcaccggcagaaaccgatttataccctccagtttcacccagaggtcaaggacaccctctgcggttcagaaatccttgcaaatttttcggagatttgtgggatgccaaagaattggagcatgcagaatttcatcagcctggccaaagaacag

SEQ ID NO: 316997 - DNA, 193 bp, Unknown
  Bacterial polypeptide expressing nucleotide sequence isolated from the Sargasso Sea
tatgcaagaaaaaattttgatacttgattttggttctcagtatacacagctcattgctagaagagtaagagaattaaacgtttactgtgaaattcatccttacaataacatacctattcttgatgacagtataaagggtgttattctttcaggaagtccttcaagtgttagagaacaggatcctccaactcca

SEQ ID NO: 316998 - DNA, 87 bp, Unknown
  Bacterial polypeptide expressing nucleotide sequence isolated from the Sargasso Sea
cacgcatcgttaatgaagttccagaggttaatcgtgtcgtctacgatatcacttccaagccaccaggcactattgagtgggagtaag

SEQ ID NO: 316999 - DNA, 301 bp, Unknown
  Bacterial polypeptide expressing nucleotide sequence isolated from the Sargasso Sea
aattgaaggaaatgtgttatgcggagttagtggaggtatagattcaacagtggcagcattactaatacacaaagcaataggggatagacaaacaggagtttttgtagataatggattattgagattggatgaatccaaagaaattgaagatatgttcaaaaataatttttcattaaatttccacagagtagatgcaagcgagcaatttctttcaaaattaaaaggaataacggatccggaacaaaaaagaagaattgttggggaagaatttattcaagtatttacggaattgcaaaacaaa

SEQ ID NO: 317000 - DNA, 186 bp, Unknown
  Bacterial polypeptide expressing nucleotide sequence isolated from the Sargasso Sea
tttgctagttattgactttggaagtcaagttacacaattaatagctcgtcgtttaagagagttaaatgtttattgtgaaatacatccttttcaaaaaattaaattaaatttattaaaaaaaatatctcctcttgccattatattatctggtggaccaaagagcgttttagataataatagcccgaa

SEQ ID NO: 317001 - DNA, 483 bp, Unknown
  Bacterial polypeptide expressing nucleotide sequence isolated from the Sargasso Sea
aaaaaatgaatttaaaacttgttgaacctctcaattctttatttaaagatgaggtaagaattttaggaaaagaacttggcttatctgatgatattagaaatcgtcatccttttccaggtcccggtttagctattaggattttaggcgaagtaacaaaaaatagattagaaattttaagacaagctgacaaaatatatattgatttactaaaaaaagaaaaattgtacgacaaaatctggcaagccttctgcgttcttctaccagtgaagaccgtaggtgttatgggcgattcaagaacttatgaaaatgtttgtgccattagagccgtaacttctgttgacggtatgactgcagattattatccttttgaccaagtttttttaaagaaagtttctaataatattattaataaagttaaaggtattaacagagttgtttatgatacaacaagtaaaccccccggcactattgagtgggaataat

SEQ ID NO: 317002 - DNA, 609 bp, Unknown
  Bacterial polypeptide expressing nucleotide sequence isolated from the Sargasso Sea
gatgcgtcttgaggacagcttaaacaaaatcctaattgttgattttggatctcaatttacccaacttattgcgagaaaaataagagagcttggtatctattgtgaaattattagtcacaacaaaattgctaaaaaaagaaatttagacaagaatgttaaaggattaatattatctggaggtccacttaatgtttatcaaaataaaaaaacaaaatttaataaacaactacttcacaataatattccagttcttggaatttgttttggacatcaaataatttctaaagaaatgggtggcaaagttaaaaaatctaaatctagagaatttggattagcaaaagttaagcgagtaaaaaatagtattttaacaaaaaatttttttaacaaaggagaaaataatgtatggatgagtcatgctgacgaagttacaaaactaccaaaaaattttaaagttgtagccaaaagttctaactcaaaactatgcatagtagaaaatacaaagaagaatttatatggaattcaatttcatcctgaagtaactcatacaaataaaggcaaaataattctaaaaaattttgtatttgatatatgtaaattaagaaaaaattg

SEQ ID NO: 317003 - DNA, 403 bp, Unknown
  Bacterial polypeptide expressing nucleotide sequence isolated from the Sargasso Sea
atgagtcttgatcaaaatcttaataaaatcttaataatagattttggttcacaatttactcaattaattgcaagaagagtaagagaattaggtgtgtattcagaaatagttagtcacaaaaaaataaaactaaaagacataaataacagcatcaaaggaatagtgttatctggtggtccattaaatgtttatgaaataaataagtactcatttaataaaaaaattttacaatttgatgtgccatttcttggaatatgttttgggcatcaaattttatcaaaacttaatggtggaagagtaaaacaatctaaacacagagaatttggcttagctaatgtttataaaaaaaatgatagtcttttaacatctaatttttttggaaataaaaaatccaaacaagttg

SEQ ID NO: 317004 - DNA, 234 bp, Unknown
  Bacterial polypeptide expressing nucleotide sequence isolated from the Sargasso Sea
aatgcaagacagaatcctcatactcgattttggttcacaatatactcagctgattgcaagacgagttcgtgaggcgggtgtttatagcgagatttatgtcggtgatattggcatagatgcaatcgaatcatttcaaccatctggattaatactctcaggtggtccggaatctgcattcattgatgacgcgccaagaccatctaaagagatttactcaatagggcttccaattct

SEQ ID NO: 317005 - DNA, 226 bp, Unknown
  Bacterial polypeptide expressing nucleotide sequence isolated from the Sargasso Sea
tcttccagtaaaaaccgtaggagtgatgggagataatacaacctatgaatatttgtgcttgttaagagcaataacttctgaagatggaatgacggcagatttttttgaatttaaaaaatcattttctcaaatgatttcaaacaaaattgtgaatagcattaggggaattaatagagtagtttacgatattacttcaaaacctcctagcactatagagttagagtaa

SEQ ID NO: 317006 - DNA, 502 bp, Unknown
  Bacterial polypeptide expressing nucleotide sequence isolated from the Sargasso Sea
aatgtttggaggtttacctaaaaaaatgaaattgaaattggttgagcctcttagacttttattcaaagatgaggtgagaaaactagggttagaacttaaactttcacaacaaattatctctagacatccttttcctggtcctggattagcaattagaatgcctggcactatcacaaaagaaaaaataaaaattttgaaagaggctgataattattttattagcgaattaaaaaaagaaaatttatataataaaatttggcaagcttatgccgctttattgcctgtaaagacagtcggtgttatgggcgataacagaacttatgagtatatttgtcttttaagagcaataacgtcgtcagatggaatgacagcagattattttgatttttcaaaaaaatttatgcaaaatgtttccaataagattattaataatattcaaggtataaatagagtggtatatgatgttacctcaaaaccgcctagtacgattgaattggaataa

SEQ ID NO: 317007 - DNA, 175 bp, Unknown
  Bacterial polypeptide expressing nucleotide sequence isolated from the Sargasso Sea
tatgtgtttattaagagctattacgtctgaagatggcatgacagcagatttctttaacttttcaaaacaatttatgcaacttgtttcaaacaaaataataaataatataaaaggtattaatagagtagtttacgatataacttcgaaaccaccaagtactatagagttagaatga

SEQ ID NO: 317008 - DNA, 187 bp, Unknown
  Bacterial polypeptide expressing nucleotide sequence isolated from the Sargasso Sea
gcgctatgagcatgtgatcgcgcttcgagctgtcgagacgattgattttatgaccgcgagatcggcgagacttccctacgagttcgtggataaagtttcaaacagaataatgaacgagatatctcaggtgtccagggtcgtgtatgacatttcgtctaaaccaccgtcgactattgagtgggaatga

SEQ ID NO: 317009 - DNA, 341 bp, Unknown
  Bacterial polypeptide expressing nucleotide sequence isolated from the Sargasso Sea
aatgctaaaaattaatcttgataaaaatcttgcaaagattttaatcatagattacggatcacaattcacacaacttattgcgagaagaattagagaacttggtgtttattcagaaataattagtcacaaaagagttaaattaagtgacatatcaagcaaacatgtaagtggattgattttatctgggggcccactaaatgtttatcaatcaaataaaataaaatttgataaaagaattttaaatttaggtattcctatattaggaatatgttttggacatcaaatattatctaaagagttaggtggaaaagtaaaaaaatctaaatcaagagagtttggtt

SEQ ID NO: 317010 - DNA, 274 bp, Unknown
  Bacterial polypeptide expressing nucleotide sequence isolated from the Sargasso Sea
atgtattttcaaaacaataaggaaataatattaattattgattttggttcacaagttactaaattaatagcaagacgaattagagatcttggagtttattctgaggtaatcacacctcaagaggtacataagattgagaattttaataatataaaaggaattattctttcaggaggaccatcaactgtaactaaagataaatatcaaacaattccaaaatatttatttgagaaaaaaataccaattttcttggaatatgctatggtctacaatt

SEQ ID NO: 317011 - DNA, 235 bp, Unknown
  Bacterial polypeptide expressing nucleotide sequence isolated from the Sargasso Sea
tgtgttttgctacctgttaaaagtgttggagttatgggtgacgcaaggtcttatgaaaatgcattagttttaagagctattacatcagttgatggaatgacagcggatgtttatccattcgagaataaatttttatctcgcgttgctaccagaatcgttaacgaggttgaaggtattaatagagttgtttatgatattacgtctaaacctcctggaacaatcgagtgggaataaa

SEQ ID NO: 317012 - DNA, 175 bp, Unknown
  Bacterial polypeptide expressing nucleotide sequence isolated from the Sargasso Sea
ttgtattgctattagagctgttgattctaaggatgctatgacagcagattggtctaaaataccatatgaaatcttatctaatatttcatcaagaataattaatgaagttgacggtgtaaatagagttgtttatgacattacatcaaagcctcctagcactatagagtgggaataa

SEQ ID NO: 317013 - DNA, 166 bp, Unknown
  Bacterial polypeptide expressing nucleotide sequence isolated from the Sargasso Sea
attgagagctgttagttccgaagatggtatgacagcagactatttcaatttaccaaagaagttcatagacaatatatctaataaaattataaataatgttaaagggattaatagagttgtatatgatattacttccaagcctcctagcactatagaattagaatga

SEQ ID NO: 317014 - DNA, 468 bp, Unknown
  Bacterial polypeptide expressing nucleotide sequence isolated from the Sargasso Sea
aattaattgagcctttgaaggaattttttaaagatgaggtaagaattttaggcaagtctttaggattggataaaagtatcaatttgaaacatccatttcctggcccagggttaggaattagaattgtaggaaatgtgacatctgagagaataaaaatactacaagaggcagattatatttacattaatgagcttgaaaaaagtggactttacaataaaatttggcaggcttatgcagcattgttaccaatcaaaactgttggtgtaatgggagactccagaacttatgaacatatttgtttattaagagctgtcatttcggaggatggaatgactgcggattattatagttttccaaaaaattttttagataaaatatctaacaagattattaataacgtaaagggtattaacagggttgtctatgatattacatcaaaacctccaagtactattgaattagaataat

SEQ ID NO: 317015 - DNA, 266 bp, Unknown
  Bacterial polypeptide expressing nucleotide sequence isolated from the Sargasso Sea
gatgactaaggctttgactgagcaacaggccgataagggggcgggaacagaaaatcgaatcctagtgattgactttggctctcaagtgactcaactaattgccagacgtcttcgggagtccggcgtctataccgaaatagttccgtattcctcatctgaaaaaaaactaaaaacttttaaaccccgaggaattattctatctggcggcccttcctcagtaacttcagaaagagctccatccgtcccgaacgctatttttgagtcag

SEQ ID NO: 317016 - DNA, 235 bp, Unknown
  Bacterial polypeptide expressing nucleotide sequence isolated from the Sargasso Sea
gcagcttttctgccggttaaatcagttggagtggttggtgatgcaagaaggtatgaatacgtaattgccttaagagcagttgtaacgctagatttcatgacggctaatgtgtttcctttcaaaccagaatttcttaatcatgtttcaacaagaataatgaatgaaatagataaggtttcacgagttgtttatgatatttcgagcaaacctccggcgactattgagtgggagtagt

SEQ ID NO: 317017 - DNA, 367 bp, Unknown
  Bacterial polypeptide expressing nucleotide sequence isolated from the Sargasso Sea
catgaagagtaaattagatactattttaattgtagattatgggtctcaatacacacaattaatagcaagaagaataagagagttagaagtcttttgtcttgtctatccttttaataaaattacaaaaaaaattttaaatgaaatcaaaccatcggcatttatattatctggaggacctagatcagtactagacaaaaatgctccaaaattaaatcaagaaattttaaaaatgaaaaaaccagttttagcaatttgctatggcatgcaattggtaacaaaaaatttaaaaggtgaagtaaaacgttccacccatagagagtatggtcacaccattataaatattaggaaaaaatcacttttatttaaa

SEQ ID NO: 317018 - DNA, 325 bp, Unknown
  Bacterial polypeptide expressing nucleotide sequence isolated from the Sargasso Sea
attggtattagattttggttcccaatacactcaactaatagcgcgaagagtaagggaaagcaatgtatattccgaaatttttccatgggacataaatgaaaaaaaaatattagatttgaacccaaagggagttattctttctggtggaccaaactcagtaactgattcatttacaccaagaatacctcaatgtatttttgaattaaatgttccgattttagggatttgttatggtatgcagactttagctgaacaaatgggaggtcaggtagtgtctgcagataaaaaggaatttggtcatacaaacttagaaattgaaaatgaa

SEQ ID NO: 317019 - DNA, 265 bp, Unknown
  Bacterial polypeptide expressing nucleotide sequence isolated from the Sargasso Sea
ggattatacaatgaaatatggcaagctttttctgtgcttattccagtaaaaacagttggtgtaatgggtgatcaaagaacttatgaaaatcttttgggtataagggcagttactagtacagacggtatgacagcagattggtttcgaatgccaaaagagactttatcaaaaatatcaaatagaattgtcaactccgtacgtggaattaatcgagtggtatatgatatcacatctaagcctcctgggaccatagagtgggagtaga

SEQ ID NO: 317020 - DNA, 185 bp, Unknown
  Bacterial polypeptide expressing nucleotide sequence isolated from the Sargasso Sea
ttatgagcatgtgatcgcgcttcgagctgtcgagacaattgattttatgaccgcgagatcggcgagacttccttacgagttcgtggataaagtttcaaacagaataatgaacgagatatctcaggtgtccagggtcgtttatgacatctcgtctaaaccaccgtcgactattgagtgggaatgaa

SEQ ID NO: 317021 - DNA, 94 bp, Unknown
  Bacterial polypeptide expressing nucleotide sequence isolated from the Sargasso Sea
gtcagtactcggattattaatgaggttaaaggaattaatagagtagtttatgatataacatcaaaaccacccggtaccatagagtgggaataaa

SEQ ID NO: 317022 - DNA, 360 bp, Unknown
  Bacterial polypeptide expressing nucleotide sequence isolated from the Sargasso Sea
gcctagcaataagaatgcccggtgttattacaaaagataaaattaaaatattaaaagaagctgactactattttgtcaaatcgttaaaagaaaataatttatatgataaaatatggcaagcatatgctgctttattacctgttaaaactgtaggagttatgggagataatcgaacatatgaatatttgtgtctcttgagagcaataacctcagaagatggcatgacagcagatttttttgaattcaaaaaatcgtttatgcagtcaatatctaacaaaatagttaataatataagaggaataaatagagttgtttatgatattacatccaaacctccgagcactattgaattagaataat

SEQ ID NO: 317023 - DNA, 399 bp, Unknown
  Bacterial polypeptide expressing nucleotide sequence isolated from the Sargasso Sea
atgatgaaatattaaataggcaccctttccctggtcctggccttgctattagaattccaggagccatagatgaaaataaagttagtattttaaaagaagctgatgatatttttataaaaagtttacatgaatataaaatctatcacaaaatttggcaagcttacgccgcccttctaccagtcaaaaccgtgggtgtcatgggcgataataggacatatgaatatatttgtttgttaagagcaattacgtctgaggatggtatgacagcagattattttaactttaaaaaagaatttatgcagaatgtttcaaataaaatagtaaatagtatcaagggtataaatcgagtggtttatgatgtaacatcaaaaccgccaagtaccattgaacttgaataaa

SEQ ID NO: 317024 - DNA, 208 bp, Unknown
  Bacterial polypeptide expressing nucleotide sequence isolated from the Sargasso Sea
ggagttgttggtgatgagaggagatatgcggatgtgatagcgattagagcagttgagacagtagattttatgaccgccacttgggcaaggcttccatatgatttcttggctcatgtctcaaatcgaattgtgaatgaattagagggagttagcagggtggtttatgatatttctagcaagccaccagccaccattgagtgggaatagg

SEQ ID NO: 317025 - DNA, 430 bp, Unknown
  Bacterial polypeptide expressing nucleotide sequence isolated from the Sargasso Sea
atgcgatttcaaaaagaaaatgaaaaaatattaatcgtagactttggatcacaagtaacaaaattaattgcgagaagagtaagagatttgggtgtttattctgaagtggtaacacctatagagattaaaaatataaaaaattttaattttgtaaaaggcctaatactttcaggcggtccatcttcagtaacaaaaaaaaaatttcaaagtttacctaaaaatattttattaaaaaaaatacctattcttggtatatgttatggattacagcttatttcaaaactttatggagggaagataagatcttctaaaaaaagaagagagtttgggagagcatacatttttaaaaaaaaggaatcagaacttactaaaaatttttttaaagctaaatccgctgtctggatgagccacgaagatgcagtagtaaaat

SEQ ID NO: 317026 - DNA, 187 bp, Unknown
  Bacterial polypeptide expressing nucleotide sequence isolated from the Sargasso Sea
aacttacgaatattttgtttattgagagccataacatcagaagatggtatgacagctgatttctttaattttaaaaaagattttatgcaagatgtatcaaataaaattataaataatatcaaaggtatcaatagagttgtatatgatataacatcaaaaccaccaagtacgattgagcttgagtaat

SEQ ID NO: 317027 - DNA, 254 bp, Unknown
  Bacterial polypeptide expressing nucleotide sequence isolated from the Sargasso Sea
aatgaaaaaaaacaatagagataagaaaattcttataattgattttggttcccaatatactcaattaattgcaagacgtgtaagagagcttggtgtattttcagaaatatcaaatcacaaacaacttaaaaaagtagatgtagaggaactattcgggattattttatcaggcggtcctttaaatgtttatgaagataaaaaaataaattttaataaaaagattttaaacttgaaagttcctattttaggtcttt

SEQ ID NO: 317028 - DNA, 721 bp, Unknown
  Bacterial polypeptide expressing nucleotide sequence isolated from the Sargasso Sea
aagaaaaatggtgtactaatacttgattttggatcacaatacacaaaattaattgcgagaagagtccgagaagaaaatatttattctcaaatagtttcgcatgatatttcattagatggtgtattggataatcagcctgcagcattgattctttcaggtggaccatcaagtgtttttgaaaaaaatgcactgaaaattgatcccaaaatactggagcttgaaatccctattttcggaatatgctacggcttgcaacttttagcgcataactatggaggtatagttgaagaaaaagagaaaggtgaatatggcttttcagaactatctttagattcctcgcataatattttttcaaaagtaccttcaaaaataaatgcctggatgagccatatggatcaagtaactaagttgccttcaaattggaaggttattgctcaatcttcaaataaaattatagcagcaattgcaaacgaagactctactcgagttgctacccaattccatccagaagttgctcatacagagtttggtaaagaaattcttagaaattttttaattaatatcgcacaatgtcctacgaattggactccaagtaattttataaatgatcaagtttcaaagataaaaaatgacgttgggagtgaaaaactaattattggagttagcggcggtgtagactcaacggtggcagctgcattaattcataaagcaatggcgatca

SEQ ID NO: 317029 - DNA, 370 bp, Unknown
  Bacterial polypeptide expressing nucleotide sequence isolated from the Sargasso Sea
cctgggcccggtcttgcaataagaatacctggagatattacagagaataaaatcaatatactaaaagaagcggatgatatttttataaatgcattaaaggaatacaatttgtataaaaaaatttggcaagcctatgccgcactattgccgattaaaactgttggtgtaatgggagataacagaacatatgaatatatgtgtttattaagggcaattacgtctgaagatggtatgacggctgacttttttagtttttcaaaagagtttatgcagcttgtatcaaataaaataattaataatataaatggaataaatagagttgtttacgatataacctctaaaccacctagtacaatagaattagaataat

SEQ ID NO: 317030 - DNA, 394 bp, Unknown
  Bacterial polypeptide expressing nucleotide sequence isolated from the Sargasso Sea
atgaattctgacaaaaagaacgagattgatagaattcgaacttcaggtgacaatgaagttgcagcttaccttgaggttgcgagcacaaaagaagttgatcctgtttatcttgatgtcccaaactctccagaaacaataattgtcattgattacggctctcaatactctatgttaattactagaagaattcgcgagagtaatatttattctgaacttgttccatgggatatagactttgatcaaattagtcatctaaatattaaaggatttatactgtcaggtggtcctgactctgtgtccagtgcaggagcaccaacattacccgattttgtaattaatagcaagttgcccgttttgggcatatgttatggcatgcaactgctagcgcagtcat

SEQ ID NO: 317031 - DNA, 411 bp, Unknown
  Bacterial polypeptide expressing nucleotide sequence isolated from the Sargasso Sea
agcttaacctcagtaaagatattatttctagacatccatttccaggccctggcctagctataagaatgccaggtgtaattacaaaagaaaaaataaatatattaaaagaggctgaccattattttattcaagccttgaaaaaacatggcctttatcataaaatttggcaagcttacgctgccttactaccagttaaaacagttggagttatgggtgataatcgaacttacgaatatttatgtttattaagagctattacatcagaagatggaatgactgctgatttttttgaatttaaaaaatcatttattcaagagatctctaacaaaattgtgaatagtattagaggaattaatagagtagtttatgatataacttcaaaaccccctagcaccattgagttagagtaaa

SEQ ID NO: 317032 - DNA, 219 bp, Unknown
  Bacterial polypeptide expressing nucleotide sequence isolated from the Sargasso Sea
cttgactgagcgcgctatcgatcatcttcaaaatcagtggttgttgatcctggattttggttcccaatacactcagctcatcgcgagaagagtaagagaatgcggagtgtactgcgaaattcaggcgttcgacgttgaagaatcctattttgacgaacgacaacccagaggcgttattttgtctggtggtcctgagacggtcactgcaggcggcacacc

SEQ ID NO: 317033 - DNA, 160 bp, Unknown
  Bacterial polypeptide expressing nucleotide sequence isolated from the Sargasso Sea
atgagtcttgataagaatttggacaaaatcttaataatagattttggttcacaatttactcagttaatagccaggcgaataagagagtcaggagtttattccgaaattattagtcataaaaaggttaaaaataaaaatattgataattcaattaaaggaa

SEQ ID NO: 317034 - DNA, 568 bp, Unknown
  Bacterial polypeptide expressing nucleotide sequence isolated from the Sargasso Sea
atgcaatttcataaagagagagagaaaatattaattattgattttggttctcaagttacaaaattaattggaagaaatattagagagcttggagtttattcagaaattgtaactattaaagattttcaaaaaatcaaagaatttcattttataaaaggaataatcttttcaggaggtccatcctctgtcacgtcgaagaaccatcaaacagtatcaaaaaaaatatttgaaaaaaatataccaattttaggcatttgttatgggttgcaacttatagctaaattatttggaggtaaaataaaaccctcaagaggcacgagagaatttggtagagcttatttaacaaaaaaaaaacattcacagcttacaaaaaatttttttaagagaaaaacaacagtttggatgagccatgaagatgcagttgtaaaattaccaaaatcttttaaaattattgcctcaactaaaaattcaaaactaacaataatagaaaactcccagaaaaagatttatggtgtacagttccatcctgaaataactcatacggaaaatggcaaacaaatatttaaaa

SEQ ID NO: 317035 - DNA, 295 bp, Unknown
  Bacterial polypeptide expressing nucleotide sequence isolated from the Sargasso Sea
tatgaatattaattcttatgattgcctactcattgtagattttggaagccaagttacgcaactgatagcacgcagattacgcgaaattaacgtttattgtgaaatacacccatatcagaacgtaaatgaatccttgctaagtcaactttcaccaaaagcaataattttatccggcggaccagacagcgttacaagagacggaagcccaagagctcactcaactatttttgatatcggggtgcctttgttgggggatttgctatggccagcaagtgatgatgcagcagcttggtgg

SEQ ID NO: 317036 - DNA, 429 bp, Unknown
  Bacterial polypeptide expressing nucleotide sequence isolated from the Sargasso Sea
aagaaatgttggaaagcaatttaaaaatagataaacatttacttttaagacatccatttccaggaccaggtttagcaattcgaataccgggagtaattgataaaaaaaagatcttaattcttcaggaagcagatcatatttttattcagtatttaaaagaaaaaaaactttataataaaatttggcaagcatttgtagtcctcttaccagtaaaatcagtaggcgttatgggagatgaaagaacatacaattactcagtttcacttagagctattacttctgttgatggaatgacagctgatttttatatgtttacaaataatcaactaaaagaaatatcatctcgcataattaataaagtaaaaggcatcaatagagtattatatgactttacttcaaagcctcctggaacaattgagtgggagtagt

SEQ ID NO: 317037 - DNA, 692 bp, Unknown
  Bacterial polypeptide expressing nucleotide sequence isolated from the Sargasso Sea
aatgcaggacttcatcgctgttctggattttggaagtcaatatacgcatctgatttcaaaacgaattcgtcatattggtgcatacaccaaaattttttctccctcgtccaatgaaaattcacttgctgaggctaaggggattgttttgtctggtggaccggcatcggttaattcctcaaatgcaccaaaatttaattcaaaattactagaacttgataagcctattctgggcttgtgttatggtcatcaattgattgcgcaatcatttggaggctcaatttcaaacacaggtaaaggagagtttgggaaagcgatcctagtgcataaatctgactctcctctttgggaaaatattccctttccaaacctggtatggatgagtcatcaggatagtgttacaaaatgccctgaagaatttgaggtaacagcagaaacagaaactgggagtttggctgccttgaaacactgtcagcgtccaatattcacacttcaattccatcctgaagtaacggatacttcccagggcaggattatgctgaaaaattttgttaatgcttgtggcgtacgctcaagatggtccatgaaatcttttatagaggtcactactaaacgtttaagtaatgaagttggaaaccgtaaagtactgatgtttctgagtggaggcgtggattcttcagttgcctttgctttat

SEQ ID NO: 317038 - DNA, 190 bp, Unknown
  Bacterial polypeptide expressing nucleotide sequence isolated from the Sargasso Sea
agacgttacgaatatgtcattgccctaagagcagttgaaactatagattttatgactgcaaagtcagccaaacttccccatactttcttagaaaaggtttctaatagaattattaatgaaattccagaagtgtctagggtaacctacgatgtttctagtaaacccccagctacaatagagtgggagtagt

SEQ ID NO: 317039 - DNA, 298 bp, Unknown
  Bacterial polypeptide expressing nucleotide sequence isolated from the Sargasso Sea
gaccatatctttattggaggaactcaaaaaaaataatttatataataaaataagtcaagctctagcagttttcttacctattaaatctgtaggagtaatgggtgatcagagacagtatagttatgttgttgctctgagagcagtcagaactattgactttatgacagcatcagtaagtgaaattccatataatattctaaatataatttcaacaagaatagtaaatgaggtaaatggtgtatcgagagttgtctatgacataactagtaagccgcctggtactattgagtgggagtaa

SEQ ID NO: 317040 - DNA, 301 bp, Unknown
  Bacterial polypeptide expressing nucleotide sequence isolated from the Sargasso Sea
gcagatgagatttttataaattcacttaaagaagaacaggagtatgataatatctggcaagcgtttgcggttttaattcctgtaaagacagttggtgtaatgggagaccaaaggacatatgaaaaccttatcgctcttcgtgccgtaacaagcttagatggcatgactgcagattggtatcgaatgccgtcagaggtattgtcaaagatttcaaataaaattgtaaatcatgtggttggagttaacagagtggtatatgatattacctcaaagcctcctggcactattgagtgggaatgaa

SEQ ID NO: 317041 - DNA, 427 bp, Unknown
  Bacterial polypeptide expressing nucleotide sequence isolated from the Sargasso Sea
atggaaaagataattgttttagattttggttctcaatatagtcatttaatctgtagaaggataagagaattttcagtttatgcggagttagtaccatatgatatatcacctgaagaattacagaaaatgaatccaaaggggataattttttctggtggaccctcaagtgtctataatgaagatgcaccaaaaccagatgaagaattatttaattttgatttgcctttattaggaatttgttatggacatcaattaattgtaaataaatttggaggcaaagtaaaacgtgcaaacaaagaatacggttcatcacttctttcaatggataaaaattcaggattgctggatggaataggagaatcaattcgtgcatggatgagtcatggagatgaagcagaagaaattccatctaatttgaagttatagg

SEQ ID NO: 317042 - DNA, 117 bp, Unknown
  Bacterial polypeptide expressing nucleotide sequence isolated from the Sargasso Sea
tgtagattttggctctcaatacacgcagctgattgcgcgagcagtaagggctttgggtgtgtattgtgagttgcacccttacgatattgaagagcaatatatccgtgatttttgcac

SEQ ID NO: 317043 - DNA, 848 bp, Unknown
  Bacterial polypeptide expressing nucleotide sequence isolated from the Sargasso Sea
aatgcaccagaatttaattcaaaattactaaaacttgataagcctattttgggattgtgttatggtcatcaattaattgcgcagttgtttggtggttcagtctcaaacacaggcaaaggagagtttgggaaagcgaaactagtgcaaaaatctgaatctcctctttggaaaaatatttcgtttccaaaccagatatggatgagtcatcaggatagtgttacaaaatgtcctaaagaatttgaggtaactgcagaaacagagactgggtgtttagctgccttgaaacaccgacaacttccaatatatacacttcaattccatcctgaagtaagtgacacttcctatggcaagataatgctgaaaaattttgttaatgcttgttgcgtaagctcaagatggtccatggacacttttatagagttcatgactaaacgtttaaataatgaagttggggatagaaaagtactgatgtttttgagtggaggcgtggattcatcagtcgcttttgctttgttaaacaagacacttgggaaggataagttgctaggattgtatattaataatggttttatgcgcaaacatgaaagtgaagaaatacttacaaggtattcacagttgggatataaaaatattcaatccagaaactacagttcattttttttggacgcaatcaaaggccaggttgaaccccagaataaaagacaaattattggagcaacatttataaagatgcgtgacagatttctgagtgaactaaacttaaacccacatgaatggatgcttggtcaggggactctttaccctgatattattgaatccggaggaacagagcattctgaagttataaa

SEQ ID NO: 317044 - DNA, 375 bp, Unknown
  Bacterial polypeptide expressing nucleotide sequence isolated from the Sargasso Sea
cctggcgtctcctccctcgatccgcctcctcccgcgctctgacgtcgtcgccctccccccaccgacctcgctcgccctcgcgcgcgttcccatcacccctccgcagaaacgcatcacggacctcgacccttccgtggtgatcctctccggcggcccgaacagcgtgcacgtggagggcgcgcccaccgtccccgagggcttcttcgatcactgcgccgcgcggagcatcccggtgctgggcatctgctacggcatgcagctcatcgtccagcgcctgggcggtgaggtggagtccgcggagaaggcggagtacggccgcatgcccgtgcacacggtcaacgacagcgtcctctacggcgaggagatggacgcgac

SEQ ID NO: 317045 - DNA, 472 bp, Unknown
  Bacterial polypeptide expressing nucleotide sequence isolated from the Sargasso Sea
atgcaatttcataaagaaagagaaaaaatattagttattgattttggttcccaagttacaaaactaatcggaagaaatatcagagagctcggcgtttactcagaaattgtaaatcttaaagattttaaaaaaattagagaatttcatctaataaaaggaataattttttcaggaggcccatcatctgttacttcgaaaaaataccaaacaatatcaaaaaaaatatttgagaaaaatatacccattttaggtatttgttatgggttacaactaatagctaaattatttggtggtaaaataaaaccttcaagaggagcaagggagtttggtagagctcatctaattgaagtaaaccactcacaactaacaaaaaattttttaaaaaaaaaaacaacagtttggatgagccatgaagatgcagttgtaaaattgcctaaatcttttaaaataattgcttcaactaaaagctcaa

SEQ ID NO: 317046 - DNA, 466 bp, Unknown
  Bacterial polypeptide expressing nucleotide sequence isolated from the Sargasso Sea
atcttagaaccattaagagagttgtataaagatgaagtaagagatgttgctagaattttgggggttccagaaaaattactgaagagacatccatttcctggaccaggattatctgtacgaattatgggagagattactccttcaaagttagcaatctgtagaaaagcaagtaaaattgttgaagaggagctatgggatgcaggagtttatgataaggtatggcaagcatatgcagctgtaggagatgacaaggcagttggagttgttggagatgaacgtaagtatggaagaattgttacagttagagttgtagactcgattgatgcgatgactgcagactggactagacttccaaatggcgttttagaaaaaatcagtaacagaattactaatgaaattgatgaagttacatgggtttcttatgtaatttcaagcaaaccacctgctaccattgagcctcaataaa

SEQ ID NO: 317047 - DNA, 347 bp, Unknown
  Bacterial polypeptide expressing nucleotide sequence isolated from the Sargasso Sea
aatgacacccaataaaagtttgaataaaatattaataattgattttggatctcaatttacgcaattgattgcaagaagagttagagagcttggagtattttctgagataataagtcacaaaaaaataaaatataaaaatatagatatttcagtcaaaggtattattttatcaggtggtccactaaatgtttatgaaattaaaaaatattcatttgataaaaaaatactcaaaaataagataccagtattaggtatttgttttggacatcagatactctcaaagttaaacggtgggagagttaaacaatcaaaacacagagagtttggattagctaatatttataaaa

SEQ ID NO: 317048 - DNA, 355 bp, Unknown
  Bacterial polypeptide expressing nucleotide sequence isolated from the Sargasso Sea
atgagtcttgatcaaaatctgaataaaatactaataatagattttggttctcaatttacacaattaattgcaagaagagtaagagaattaggtgtgttttcagaaatagttagtcacaaaaaaataaaaccaaaagacataaatatcagtataaaaggaataatattatctggtggtccattaaatgtttatcaaataaataaatattcatttgataaaaaaattttactacttgatgtaccagttcttggaatatgttttggacatcaaattttatcaaaacttaacggtggaagggtaaaacaatcaaaacatagagaatttggtttagctgatgtttataaaaaaaacaata

SEQ ID NO: 317049 - DNA, 195 bp, Unknown
  Bacterial polypeptide expressing nucleotide sequence isolated from the Sargasso Sea
gatgaatcttaaagatgatctgtccaaaatcctaattatagattttggatcacaatttactcaacttattgcaagaagagttagggaatttggtatatattctgaaattataagtcataaaaaaattaataaaaaattaaataaaaaaaaaataaatggaataattttatctgggggtcccctaaatgtttatca

SEQ ID NO: 317050 - DNA, 334 bp, Unknown
  Bacterial polypeptide expressing nucleotide sequence isolated from the Sargasso Sea
atcacacaggagaaaattgatattttgaaagaggcagattttatatttattaatgaattaaaaaaatcaaatctttataataaaatttggcaggcttatgttgctttgttaccattaaaaactgttggtgttatgggtgataaaagaacttatgaatatacctgtttactaagagctgttacttctgaagatggtatgactgctgattttttttactttgataaaaattttactcaaaaaatatcaaataaaattattaactctgttaacggaattaatagagttgtttacgatataacttcaaaaccaccaagcacaattgaattggaataat

SEQ ID NO: 317051 - DNA, 156 bp, Unknown
  Bacterial polypeptide expressing nucleotide sequence isolated from the Sargasso Sea
ttacttctgaagatggtatgactgctgattttttttactttgataaaaattttactcaaaaaatatcaaataaaattattaactctgttaacggaattaatagagttgtttacgatataacttcaaaaccaccaagcacaattgaattggaataat

SEQ ID NO: 317052 - DNA, 210 bp, Unknown
  Bacterial polypeptide expressing nucleotide sequence isolated from the Sargasso Sea
ttggtgtaatgggtgatcaaagaacttatgaaaatcttttgggtataagggcagttactagtacagatggtatgacagcagattggtttcgaatgccaaaagagactttatcaaaaatatcaaatagaattgtcaactccgtacgtggaattaatcgagtggtatatgatatcacatctaagcctcctgggaccatagagtgggagtaga

SEQ ID NO: 317053 - DNA, 208 bp, Unknown
  Bacterial polypeptide expressing nucleotide sequence isolated from the Sargasso Sea
tggagttgttggcgatgagaggcgatatgcagaattaattggtttaagggccgttgaaactgtagatttcatgactgctaagtgggcgcatttaccttatgattttcttgaacttgtatcaaatagaatagttaatgagatagaagatgtcagtagagtggtttatgacatatcaagcaaacctcctgcaaccatagaatgggagtga

SEQ ID NO: 317054 - DNA, 469 bp, Unknown
  Bacterial polypeptide expressing nucleotide sequence isolated from the Sargasso Sea
atgccaaacaaagtattaattcttgattttggatcacaatacactcaattaattgctaggagggtaagagagttaaatattttttgtgaaatttttccatataatagttctaacttcatattaaaggattattcagcagtcattctttctggatcaccgtactctgtcagatccaaagatgcgttaaaaattaatcttgataaaattaaaggcaccaccccacttttaggtatatgttatggggcacaataccttgcccataattatggtggtctagttgatttatctaattccagagagtatggtagagctaatttaatctcaatttcctctgaatctaatttgttggatggtattaatcaaggatctcaagtttggatgagtcatgcagatacaattgttaaattacctaaaaattctgttagaattgggagtactttagatgtgaaaatgcggcattcagtttgaa

SEQ ID NO: 317055 - DNA, 162 bp, Unknown
  Bacterial polypeptide expressing nucleotide sequence isolated from the Sargasso Sea
gtcaatgctgaggatattttcttggagaggcttaaaggtattgatgatccagaggacaagagaaaaataattggtcaaacattcatagaggtttttgaggatgaagcttcaaagttagaaaatgtgaaatggttggctcaaggaaccatttacccagatgtt

SEQ ID NO: 317056 - DNA, 517 bp, Unknown
  Bacterial polypeptide expressing nucleotide sequence isolated from the Sargasso Sea
aatgaaagagtctgtcttaattattgatttcggttcacaagttaccaaattaattgctagacggattcgtgaacttggggtttttagtaaaattattccctacgataaggtttcaaaaaaaactattaaccaaaaaaatattaagggtgttatattctctggtggtccaaaatcagtaaatgaaagaaattcacctagaattttaccgtttatttatgactccaatattccaatactgggcatatgttatggtttacaattaatttcaaaaaattttggtggaattatctcaccatcagatgatagagagtttggaaagacaaatttattttcaaaaaaaaactcaccacttattgatggagtagttgatctaaaaaaaaaacatcaagtatggatgagccatgcagacaaagtcgaaagaattccaaatggttttgagacaatagcatcaaccgaaaattgtcagtatgcaataatacaaaatctaaaaaagcaaatatttggagttcaatttcat

SEQ ID NO: 317057 - DNA, 419 bp, Unknown
  Bacterial polypeptide expressing nucleotide sequence isolated from the Sargasso Sea
aggattagaattaaatttgcctaaaaaaataatttttagacatccatttccagggcctggcttagctataagaatgcctggtataataactaaagataaaataaagattcttaaggatgctgatgaaatatttatcaaaagtttaattacaaataatttatatgataaaatctggcaagcttatgctgcattacttcctgttaaaacagttggtgtaatgggtgacaaccgcacttacgaatatatatgcttgttaagagcaattacttctgaggatggtatgactgctgatttttttacatttaaaaaagattttattcagtctgtttcaaataagataataaatagtatcgagggtattaatcgagttgtatatgatgttacatcgaaaccaccaagcactattgagttagaataat

SEQ ID NO: 317058 - DNA, 476 bp, Unknown
  Bacterial polypeptide expressing nucleotide sequence isolated from the Sargasso Sea
gaacctcaaaatcttggaaccattaagagagttgtataaagatgaagtaagagatgttgctagaattttgggcgttcctgaaaaattactgaagagacatccatttcctggaccaggattatcggtacgaattatgggagagattactccttcaaagttagcaatctgtagaaaagcaagtaaaattgttgaagaggaactatgggatgcaggagtttatgataaagtatggcaagcatatgcagctgtaggagatgacaaggcagttggagttgtgggagatgaacgtaagtatggtagaattgttacagtcagagttgtagactcgattgatgcaatgactgcagactggactagacttccaaatggtgttttagaaaaaatcagtaatagaattactaatgaaattgatgaagttacatgggtttcttatgtaatttcaagcaaaccacctgctactattgaacctcaataaa

SEQ ID NO: 317059 - DNA, 760 bp, Unknown
  Bacterial polypeptide expressing nucleotide sequence isolated from the Sargasso Sea
aatccaaaagattggatgctaggtcaggggactctttatcctgatattattgaatcaggaggcaccgaacatgctgaagttataaaatctcaccacaatcgagtgaaggaggttttggatcttataagttcaggaaatgtggttgaacctctaaaagacctttataaagatgaggtcaggaaagtaggaactttgttagggcttcctgaatcgattgtatcgagacatccttttcctgggcctggtttgtcgataaatgttttatgtgcaaacggagatgaatcctttcctaaaatagaaaaaactttaaaagaagtcaaatattgcctgaaagatgatgattgtgattccttgattcttccagttcaatcagttggggtacaaggtgatcaaaggacatatgcctgtcctgttgtacttttaaatacacctagagattgggactggttggaaagtcagtctgctttaataacaaataaagttagggcagttaatcgtgtcgtactatttttaggttcaaatattaattacgcagatgccaaatttaaattacaaaaagcattttgcagcaaagaacgaattgatttactgagagaggctgattatagggcaacaaaaatgctagaaaaacatggcctaatgaatcaaattttccaacttttggtgattttagtccctgtttcaaaaaatggtaaagacgaaagtctagtacttcgtcctgttgtttcagaagatgtgatgagtgctcaatttgcaagga

SEQ ID NO: 317060 - DNA, 120 bp, Unknown
  Bacterial polypeptide expressing nucleotide sequence isolated from the Sargasso Sea
aatgactcttaatcaaaacttagaaaaaatcattattattgattttggatcacaatttacacaattaattgcaagaagaataagagaagccaatgttttttgtgaaatagtaagtcataa

SEQ ID NO: 317061 - DNA, 111 bp, Unknown
  Bacterial polypeptide expressing nucleotide sequence isolated from the Sargasso Sea
cctgattcttgatttcggatcccagtatagtcaactgatcgcccggcgggtccgagaagcaggcgtgtattcggaactgtttccctgggatgtctccccgaaaaaggttgt

SEQ ID NO: 317062 - DNA, 532 bp, Unknown
  Bacterial polypeptide expressing nucleotide sequence isolated from the Sargasso Sea
ttgagtaaatcagttttaataattgattttgggtctcagtacacgcatctaattggaagaaaaattcgcgagttaggtatttatgctgagatttatcctccaaaatatctcaacaatgtcactaatattttaaatcattcagtattaattttatcaggtggcccagactctgtattaaataaaaatgctcctaaaatagatatacctttggatcaaatacctatcccaattcttggtatatgttacggatttcaatatatctctaaagaatttaatggtgtgattgaaaaaagtaatcaaagagaatatggaaagacaatcataaaaatatcaaagagcgacttattcaaagatactaattcagaacaacaagtgtggatgtctcatggagatagtttagcaaaaataccaaaaggatttaaggtattagcaaaaactaaaaataaaattccagcagctatctataaaaaaaatatttatgcaatccaatttcattgtgaggtaacgcactcagaattggaaatcagattta

SEQ ID NO: 317063 - DNA, 139 bp, Unknown
  Bacterial polypeptide expressing nucleotide sequence isolated from the Sargasso Sea
tatgacggcagactggtcaaaaattccttttcagattttagagagaatttctaatagaatcgttaatgaagtagtttcagttaatagagttgtttatgatattacaagtaaacctcctggaactattgagtgggagtga

SEQ ID NO: 317064 - DNA, 266 bp, Unknown
  Bacterial polypeptide expressing nucleotide sequence isolated from the Sargasso Sea
tatgaactctaaatctgaaatccacaatgaagaatctattataattgttgattttggatctcaatttagccaccttatagctagaagactgcgtgaaattaatatctatagcattttgatatccccttctagtgattttgatgccgtgaaacgactaaatccaaaaggaataatactttctggaggcccctacagtgtttatgacactaatgccccacttgcacctgactgggtttatacttcgaatttacccatactaggtatct

SEQ ID NO: 317065 - DNA, 156 bp, Unknown
  Bacterial polypeptide expressing nucleotide sequence isolated from the Sargasso Sea
tcagttctactgatggaatgacagctgattggtgtcatcttccatatgagtttttggcaaaaacatccaatgatattattaacaaagtaaagggaatcaatagagttacctatgacattagctctaaaccacctgctacaatagaatgggaataaa

SEQ ID NO: 317066 - DNA, 394 bp, Unknown
  Bacterial polypeptide expressing nucleotide sequence isolated from the Sargasso Sea
atgaaaaaaaacaatagagataagaaaattcttataattgattttggttctcaatatactcaattaattgcaagacgtgtaagagagcttggtgtattttctgaaatatcaaatcataaacaagttaaaaaagtagatgtagaggaactattcgggattattttatcaggcggtcctttaaatgtttatgaagataaaaaaataaattttaataaaaagattttaaacttgaaagttcctattttaggtctttgcttcggccatcagttaatctcaagacattatggtggcaaagttataacagcaaaaaatagagagttcggtttagcaactattaaaaaaaaactaaactccaagttaaccaaaaacttttttgataaccgcaaacaaagga

SEQ ID NO: 317067 - DNA, 96 bp, Unknown
  Bacterial polypeptide expressing nucleotide sequence isolated from the Sargasso Sea
agatctctaataaaattgttaataatattaggggaattaatagagtagtctatgatataacttcaaaacctcctagtactattgagttagagtaaa

SEQ ID NO: 317068 - DNA, 436 bp, Unknown
  Bacterial polypeptide expressing nucleotide sequence isolated from the Sargasso Sea
gatgaagttaggaaacttgggtttagatttaaatttaagtaaagaagttgtatctagacatccttttcctggtcccggtctggcaattagaatgccgggcataattaccaaaaataaaattaatatgttaaaagaagctgatcattattttattaatgctttaaaagaatacaagttatatgatagaatttggcaagcctatgccgcattgctgcctgttaaaactgtaggagttatgggcgataatcgaacatatgaatatatttgtctattaagagcgataacctcagaagatggcatgacagcagacttttttgaatttaataagtcttttatgcaatttgtatctaatcaaattatcaataatataagaggcattaatagagtagtctatgatattacatctaaacctcctagcacaatagaattagaataa

SEQ ID NO: 317069 - DNA, 236 bp, Unknown
  Bacterial polypeptide expressing nucleotide sequence isolated from the Sargasso Sea
tgcaggtttattacctatgaaaacagttggtgtaatgggagattcaagaacttatgaatatacttgtttgttaagggcggttgtttcggaggatggaatgaccgcagattactttaattttccaaaggattttttggataaaatttcaaataaaatagttaatggagtacctggtataaatagagtagtgtatgatataacttctaaaccacctagcactattgagttggaataat

SEQ ID NO: 317070 - DNA, 180 bp, Unknown
  Bacterial polypeptide expressing nucleotide sequence isolated from the Sargasso Sea
gatgtcaaaagacatcattaaagacagaattctcattctagattttggttctcaatatacccaattaatagctagaagggttcgcgagatgggggtttattgtgagatctatcaccataaaagttctttttctgctattaaaaagtttaatccccaaggagtaatcctctcaggaggtcc

SEQ ID NO: 317071 - DNA, 179 bp, Unknown
  Bacterial polypeptide expressing nucleotide sequence isolated from the Sargasso Sea
aatgttatcagcggagaatcaaaaagaaaaaaaaaaaataattattatagatttcggctctcaattaacaaaacttatagctagaagagttagagaattaggggtttattgtgagatattaaatttaaaggaatttaaaacaataaagaatttcaactcagtaaaaggcattattttat

SEQ ID NO: 317072 - DNA, 109 bp, Unknown
  Bacterial polypeptide expressing nucleotide sequence isolated from the Sargasso Sea
gcaattaacctgtgtatttgttgataatggattgctgagattaaatgaagctgcccaggtcatggagacatttgctaaacacatggggaataaatgttattcgcattga

SEQ ID NO: 317073 - DNA, 421 bp, Unknown
  Bacterial polypeptide expressing nucleotide sequence isolated from the Sargasso Sea
ttaggtaaatcattagggcttgatagtcttatattaaaaaaacacccttttcctggcccaggcctagccatcagaattttaggaaaaataactgaaaacaaaattaaaattttacaaaatgctgacgatatttttatagatagcttaattaaaaataatatttatgataaaatttggcaagcttacgctgctcttttaccaataaaaacagttggagtgatgggagataccaggacgtttgaatacacttgcttactaagagcggtaacttctgaagacgggatgacagcagctaagtacgactttaataacgaatatttaagtcaagtatctaataaaataattaatggtgtttcaggtatcaacagagtagtttatgatataacttcaaaaccaccgagcactattgaactagaataat

SEQ ID NO: 317074 - DNA, 219 bp, Unknown
  Bacterial polypeptide expressing nucleotide sequence isolated from the Sargasso Sea
ttaaatctgttggagttgttggtgatgagaggagatatgaggatgtaatagcaattagagcagttgagacagtagattttatgactgcgacttgggctaaacttccatatgatttcttagcacatgtttcaaatcgtattgtgaatgagttggagggcgttagtagggttgtgtatgatatttcaagcaaaccaccagccaccattgagtgggagtagc

SEQ ID NO: 317075 - DNA, 321 bp, Unknown
  Bacterial polypeptide expressing nucleotide sequence isolated from the Sargasso Sea
gagtaaagatccttcaacattccgataagatttatattgatttattacatgaggataaattgtataatgacatttggcaagcatttgcaattttggtacctgtaaaaactgttggagtaatgggagatcaaagaacttatgaaaacttaatagcgttgcgggcagttactagcgaagacggtatgacagcagattggtttaagatgccaagtaaaactcttcaaaaaatatcaagtaagattataaataatgttaaaggtgttaatcgtgtagtttatgatataacttcaaaaccacctgggacaatagaatgggaatgat

SEQ ID NO: 317076 - DNA, 446 bp, Unknown
  Bacterial polypeptide expressing nucleotide sequence isolated from the Sargasso Sea
tctatttaaagatgaagtaagaaaattaggattagaacttgggctaaacagagaaataatttcaagacacccttttcctggacctggacttgccattaggatgcctggcaaaataaccaaagataaaataagaatcttaaaggaagctgataattattttattcagtctttaaagaataataatttatatgataaaatatggcaggcatatgcagctttattacccgtaaaaacagttggtgtaatgggtgataatagaacttatgaatatttatgccttctaagagctataacatctgaagatggaatgacagctgatttctatcaattcaataagtcttatattcaatcaatttctaataaaattgtgaacaatataaaaggtattaacagggttgtttacgatgttacttctaagccaccaagcactattgaattggaataat

SEQ ID NO: 317077 - DNA, 316 bp, Unknown
  Bacterial polypeptide expressing nucleotide sequence isolated from the Sargasso Sea
aatgaatcaagaaaatttggataaaataattattgtggattatggttcacaagttacacaactaatagcaagaaaggttagagagattggtgtttattctgaaataataaattttaataaatcgaaaaagattaaagaaaataaatatattaaaggaataattctatctggtgggcctttaactataactaaatcgaactctttaaatattcctaacaacattttaaaattaaaaaaacctatacttggaatttgctatgggcatcaaatattggcaaagaagtttggaggcaaagtcaaaatatctaagacaaga

SEQ ID NO: 317078 - DNA, 351 bp, Unknown
  Bacterial polypeptide expressing nucleotide sequence isolated from the Sargasso Sea
ttcggatccctggagaagttgataagcaaaaaatagatatacttcaaagagttgataaaatctatatcaaatatttaaaagataatatgatttatgataaaatatggcaagcttttgctgtgttattacctgtaaaatcagttggggtaatgggagatgaacgaacctataattatactatttctttaagagctgtaacatcagttgatggtatgactgctgatttctatatgtttaataaaacagaattaacaaatatttctaaagaaataattagtcaggtgaaagaggttaatagagtattatttgattttacatcaaaacccccaggtactattgagtgggagtaaa

SEQ ID NO: 317079 - DNA, 370 bp, Unknown
  Bacterial polypeptide expressing nucleotide sequence isolated from the Sargasso Sea
ccaggtcccggtcttggcataagggtgattggtgaagtaaatgaaaaaaggctacaaagattaagagaagcagatcacatttttttaacagagctaaaaaattatgatttatattattctgcgagccaggcatatgctttttatatgccaataaaatctgtaggagtagttggagataacaggatatatgcagatgtaattggattgagatcagtaaataccactgattttatgactgctaaggcaacaaatcttcctcatgagttcgtagagcatgtctctacccgtatagttaatgagattgatggaataagtagagtggtctacgatatcacttcaaaaccaccagccacaatcgagtgggaatgaa

SEQ ID NO: 317080 - DNA, 217 bp, Unknown
  Bacterial polypeptide expressing nucleotide sequence isolated from the Sargasso Sea
atgaagaatgattcaattctaattattgattttggctcgcaggtcacgcagttgatcgcgcggcgtctgcgcgagacgggtgtttatactgagattttaccgtgcacgacgacagccgacaaaatcggcgctgccaagccacgcggcatcattctatctggtgggccagcgtcagtcgcgatggcggatacaccgcgcgccccgcaaatcatttttg

SEQ ID NO: 317081 - DNA, 400 bp, Unknown
  Bacterial polypeptide expressing nucleotide sequence isolated from the Sargasso Sea
atggaagataaagttttaattcttgatttaggatctcaatacactcaattaattgccaggagagtccgtgaattaaatatctattgtgaaatttttccgtttaacaaaccactaattaattttagttcatacaaagctgttattttgtctggatctccacactctgttcttggtaagaattctcccaaaattgatctttcttgtgttaaaggaaagattccattattaggtatttgttacggtgcccaatatttagcacatttttatgatggagaggtaagtccatccaaaacaagagaatatggtagagctactttaaaaatagtcaattctaaatccaattttttcaaaaatatccctaatgatagtcagatttggatgagtcatagtgatacgatta

SEQ ID NO: 317082 - DNA, 114 bp, Unknown
  Bacterial polypeptide expressing nucleotide sequence isolated from the Sargasso Sea
caaagaattttttagataaaatctcaaataaaattataaataatgttaaaggtataaatagggtagtatatgatataacttcgaaaccacctagcaccattgaacttgaataac

SEQ ID NO: 317083 - DNA, 439 bp, Unknown
  Bacterial polypeptide expressing nucleotide sequence isolated from the Sargasso Sea
atggaaagtattttaattgtagattatggttctcaatatactcaattaatcgcaagaaaaattagagaattagaagtattctgccttgtttacccgttcaacaaaattacaaaaaaaattttgaatgaattaaagccaacagcatttgttttatcaggagggcccaagtctgtactagaaaaaaatgcaccaaaattaagtcaagatattttaaatatgcacaagcctattttagctatttgttatggaatgcaattagtagctaaaaattataaaggaaaaataaaaagttcaactaatagagagtatggacatacaattataaatattaaaaaaaaatcattaatttttaaaggtattaataaaaagagattaaaagtatggatgtcacatggagataatatttttcaaataccaaaattattttctactacctcat

SEQ ID NO: 317084 - DNA, 425 bp, Unknown
  Bacterial polypeptide expressing nucleotide sequence isolated from the Sargasso Sea
aatgaaagacttcatagcaattttggattttggaagtcaatatactcacctgatttcaaaaagaattcgtcatattggagcttataccagaattttttctccatcatccaatgatacttcactatctatggctaaggggattattttgtcaggtggaccagcatcggttaattcctctaatttaccaaaatttaattcaaaattactaaaacttgataagcctattctcggattgtgctatggtcatcagttgattgcgcagtcatttggaggcacaatttcaaacacctgcagaggagagtatgggaaagctatgttaaagtataaatctgactctcctctttggaaaaatatttcttttccaaaccaagtatggatgagtcatcaagatagtgttacaaaatgccctatagaatttgaagtta

SEQ ID NO: 317085 - DNA, 478 bp, Unknown
  Bacterial polypeptide expressing nucleotide sequence isolated from the Sargasso Sea
aatgaatcttaaattagttgaacctcttaaatatctatttaaagatgaagtaagaaaattaggattagaacttggactaaacagagaaataatttcaaggcacccttttcctggacctggacttgccattaggatgcctggtaaaataaccaaagaaaaaataaaaattttaaaagaagctgataattattttattcagtctttaaaaaataataatttatatgataaaatatggcaggcatatgcagctttattacctgtaaaaacagttggtgtaatgggtgacaatagaacttatgaatatttatgccttctaagagcaataacatctgaagatggaatgacagctgatttttatcaattcaataagtcttatattcaatcaatttctaataaaattgtgaacaatataaaaggtattaacagggttgtttacgatgttacttctaagccaccaagcactattgaattggaataa

SEQ ID NO: 317086 - DNA, 378 bp, Unknown
  Bacterial polypeptide expressing nucleotide sequence isolated from the Sargasso Sea
gatgtctcaagtgagtcttaagaaaattattataattgattttggttcacaatttacccaattgattgctagaagagttcgtgagctaggtgtttattcagaaattataagtcataaaaaaaaaattattttgcagaaagaagatataataggctttatactctcaggtggtcctttaaatgtatatcagactaaaaaagtaagttttgataaaaaaattttagatcttggaatacctatactaggaatttgttttggacaccaaattatttcaaaagaactgggtggaagggtcaaagagtcaaaacatagagaatttggacttgcacaaataaaagaaattaagagtagtgctttgacaaaaaatttttttagtaa

SEQ ID NO: 317087 - DNA, 166 bp, Unknown
  Bacterial polypeptide expressing nucleotide sequence isolated from the Sargasso Sea
tttgagagcagttgagactgttgattttatgacagcaaattgggcacatctaccatatgattttattggtaaggtatcaaaccgaattgttaatgagattccacttattagcagagttgtctatgattgtactggtaagcctcctgcaactattgagtgggagtag

SEQ ID NO: 317088 - DNA, 106 bp, Unknown
  Bacterial polypeptide expressing nucleotide sequence isolated from the Sargasso Sea
atgcaagacagaattctcatactcgattttggttcacaatatacccagctgattgcaagacgagttcgagaggcgggtgtttatagcgagatttatgttcggtgac

SEQ ID NO: 317089 - DNA, 338 bp, Unknown
  Bacterial polypeptide expressing nucleotide sequence isolated from the Sargasso Sea
tataatcacaaaagaaaagattagtatactaaaagaggcagactattattttattaaagctttaagagattatggactttacgataaaatttggcaggcttatgcggccctccttccagtaaaaactgtaggtgtaatgggagataatagaacttatgaatatttatgtttgctcagagcgatcacttcagaggatggtatgactgcagatttttatgaatttaaaaaatcatttgctcaaatgatttctaataaaattgtaaatagtattagaggaataaatagggtagtttacgatataacatcaaaaccaccgagcacaattgaacttgaataga

SEQ ID NO: 317090 - DNA, 139 bp, Unknown
  Bacterial polypeptide expressing nucleotide sequence isolated from the Sargasso Sea
aatgacagcagatttctttcaatttaaaaaatctttcatgcagtcaatatctaatcaaattgtaaataatataagaggtattaatagagtagtttatgatattacttcaaagccaccaagcactattgaattggagtaa

SEQ ID NO: 317091 - DNA, 244 bp, Unknown
  Bacterial polypeptide expressing nucleotide sequence isolated from the Sargasso Sea
caagcttttgttgtttatttaccaataaagtcagttggtgttgttggtgatgaaagaaggtatgaagatgttttagctttgagagcggttgagactgttgattttatgacagcaaattgggcgcatttaccctatgattttattggtaaggtttctaaccgaattgttaatgagattccacttgttagcagagtggtttatgattgcaccggcaaacctccggcaactattgagtgggaataat

SEQ ID NO: 317092 - DNA, 442 bp, Unknown
  Bacterial polypeptide expressing nucleotide sequence isolated from the Sargasso Sea
atgcgtcttgaggacactctcaataagatacttattgtagactttggttctcaatttacacaattaatcgcaagaaaaataagggaactgggagtttattgtgaaattataagtcacaaaaaaatagaaaagtaccaaaattttgaaaaaaatatcaaaggtattgttttatctgggggcccactgaatgtatatgaaagcaaaaaagtaaagtttaatagtaaaattcttaaattagggaatcctgtattaggtatttgttttggacatcaaattatttcaaaaacaatgggtggaagtgtaagaaattcgaaatatagagaatttggactagcagaggtaaaagaaattaaaaaaagtaagttaacaaaagattttttttctaaaggaaaaaataatgtatggatgagtcatgctgatcaagtaacaaaattaccaaaaa

SEQ ID NO: 317093 - DNA, 346 bp, Unknown
  Bacterial polypeptide expressing nucleotide sequence isolated from the Sargasso Sea
aatgaaaataataaatgaaacaattttaattattgattatggttcacaatacacacaattaattgctagaaaaataagagagcagaatgtttattgtgaagtttatccttataataaaattagttcatcaattttaaataacaaagatttatcaggtataattttatctggcggtcctaattctgtaaaagataaaaaatcacctaaattaaacaaaaaaatattagaattaaaaatcccaatcctaggtatttgctatggtcttcaattactatgcaaaggagtttggtggaaatattggccaatcaagttcaagagagtacggtcattcgttaatactcgaaaa

SEQ ID NO: 317094 - DNA, 418 bp, Unknown
  Bacterial polypeptide expressing nucleotide sequence isolated from the Sargasso Sea
atgaaatttagtaaagttttaattttagattttggctctcaagtaacaaagttaattgccagaaatattagagaattaaatgtttattgtgaaataataccttataagacttcatataaaaaaatattagacgaaaacccggattgcataattttatctggtagccctgcaagtattcatgataaaaaagcacctatttttgataaagaattacttagttctaaaattccaattttaggtatttgttatggagcacagttattatctaaattatttaatagcgatgttaaaaaatcaaaaatcagagaatttggccctgctaaattaaaaaaaattaaaaacgataaaattctaagtaagatcccaaataaaagtatttcttggatgtctcacggagatacaatttttaaattaggtt

SEQ ID NO: 317095 - DNA, 305 bp, Unknown
  Bacterial polypeptide expressing nucleotide sequence isolated from the Sargasso Sea
agaagcggaccaaatttacatcaaagaactaaataagagtaaaatttacgataaaatttggcaagcttacgcagctcttcttccaattaaaactgttggcgttatgggtgactcaagaacatatgaatacacatgtttacttagagctgtaacatccgaggacggcatgacagctgattatttcaattttccaaaaaagtttttagataatatttccaataaaattataaataatgttaaaggaattaatagagtagtatatgatataagctctaaaccaccgagtacaatcgaattagaataaa

SEQ ID NO: 317096 - DNA, 379 bp, Unknown
  Bacterial polypeptide expressing nucleotide sequence isolated from the Sargasso Sea
cacccttttcctggacctggtttagctattagagtcttaggtgaagtaacaaaaaataggttagaaattttaagacaggccgacaaaatatatattgatttattaaaaaaagaaaaattgtacgataaaatttggcaagctttttgtgttctgcttcccgtaaaaacagttggcgttatgggtgactcaagaacttacgaatatgtttgtgcaataagagctgtcacttctattgatggtatgacagctgattattatcctttcgatcaaagttttttaaagaaagtttctagtagcattgttaataaggttaaaggtatcaatagagttgtttatgatacaacaagtaagcctccaggcactattgagtgggaatagt

SEQ ID NO: 317097 - DNA, 502 bp, Unknown
  Bacterial polypeptide expressing nucleotide sequence isolated from the Sargasso Sea
atgaaaagactaactaagcttaaaaaaattctgataattgattttggttcacaatttactcaattaattgcaagaagaataagagaacttggagtattttcagaaattataagtcataagaatttaaaaaatatagatcaaaatgagttatttggactgattctatctggtggtccattaagtgtttaccaaaataagaaaataaaattaaataaaaatatttttacatttgattgtccaatattaggtatttgtttcggtcatcaaatgatttccaaattttatggaggtcacgtaagaagttctaaaacaagagaatttggtttagcaaagattaaaaaagtaaaaaactctattttaacaaagaatttttttgacaaaaaaaatctaaatgatgtttggatgagtcatgctgatcacgtgacaaaaataccaaaaaattttaaaaaaattgcttcaacaaaagactccaaatatacaattatgaaaactctaaattaaa

SEQ ID NO: 317098 - DNA, 338 bp, Unknown
  Bacterial polypeptide expressing nucleotide sequence isolated from the Sargasso Sea
agaggttacaaaagatagattagataaacttagagaagccgatctttttttcctctctgaaatgaagaagcataatctctacaatcaggctagccaagcctatgctttttatctgccaataaaatctgtaggagtagttggtgataatagaatttatgccgatgttataggattaagatcggtagatacgacagattttatgacagcaaacgtctcaaatcttcccaatgatttcattcaacatgtttcaacacgaatagttaatgaagtagaaggcataagtagagtcgtatatgacgtgacttctaagcctcccgcaaccattgagtgggagtgaa

SEQ ID NO: 317099 - DNA, 525 bp, Unknown
  Bacterial polypeptide expressing nucleotide sequence isolated from the Sargasso Sea
cagtcattaaatctcatcataattggttggtggggttaccaaaaaaaatgaaacttaaacttgttgagcctttaagagaacttttcaaggatgaagttagaaaattagggctggagatgagactcccaaaaaaattcattaacagacatccgtttccaggccctggattgggaataagaatacttggtgagataactgcagatagagtaaaaattttacaagaggctgataatatatatatagaagaaattaaagaagcgggcctatatgacaaaatatggcaggcatttgcagttcttatgcccgttaaaactgttggtgttatgggcgatcatagatcatacgagcaagtttgtggattaagagctgttacatctgttgatggaatgacggcagatttttatcctttcaaaggtgaatttttgagtaaagtatcaacaagaataataaatgaagttaaaggtataaatagagttgtatacgatacaacttcaaaaccaccaggaactattgagtgggaataag

SEQ ID NO: 317100 - DNA, 331 bp, Unknown
  Bacterial polypeptide expressing nucleotide sequence isolated from the Sargasso Sea
aaatgaaaagaagataaagattcttcaagaagcggattccatttttatagaagagcttagagaagctgatttgtatgactcagtcagccaagcattcgcagtatttttaccaattaaatctgttggagtggttggtgatgagagaagatactccgaagtgattgctttaagggctgtagagacagttgatttcatgacggcaaactgggcttatcttcctcacgaatttttagataaagtttcaagacggatagtaaacgaaatagaggatgtaagtagggtcgtttatgatatttctggaaaaccaccagcaactattgagtgggagtaa

SEQ ID NO: 317101 - DNA, 175 bp, Unknown
  Bacterial polypeptide expressing nucleotide sequence isolated from the Sargasso Sea
ctgattctcgattttggatcccagtacagtcaactgatcgcccgaagggtccgagaggcgggcgtatattccgaactgtttccctgggatgtttcatccaaaacagttattgattttcagccgagcgggatcattcttttcggcgggccggagagcgtccatggtgcggatgccc

SEQ ID NO: 317102 - DNA, 175 bp, Unknown
  Bacterial polypeptide expressing nucleotide sequence isolated from the Sargasso Sea
ctgtgtttacttagagcaataacctcagaggatggcatgaccgcagatttttatgaatttaaaaaatcatttatacaagaaatttcaaataaaatagtgaatagtattagaggaattaatagagtagtttacgatataacttcgaaaccaccgagtacaatcgaattagagtaaa

SEQ ID NO: 317103 - DNA, 358 bp, Unknown
  Bacterial polypeptide expressing nucleotide sequence isolated from the Sargasso Sea
aatgagcgatttatcagttgacaacaaaactatagatactattttagttttagattttgggtcccaatatactcagttaattgcaagacgtgtaagagaacttgatgtttattcagaaatcctcccatgggatatagatgaagaaaaaataattaaacttaatcctaagggcgttattctttctggaggcccaaactcagtaacagacagctatactccaagggtgcctcaagtaatttttgatttaaatattccgcttcttgggatttgctatggaatgcaaactttagcagagcaaatgggtggtcatgttatatctgcagacaaaaagagtttggacatgctgagctcgaaatag

SEQ ID NO: 317104 - DNA, 368 bp, Unknown
  Bacterial polypeptide expressing nucleotide sequence isolated from the Sargasso Sea
gatgccaaacaaagtattaattcttgattttggatcacaatacactcaattgattgccaggagggtaagagagttaaatattttttgtgaaatatatccatataatagttccaacttcatattaaacgattattcagcagtcattctttccggatcaccatactctgtgagatctaaagatgcattaaaaattaatcttgataaaattaaaggtgccataccacttttagggatatgttatggggcacaataccttgcccataattacggaggtctagtagatttatctaattccagagaatatggtagagctaatttagtctcaatatcttccgaatctaatttattggatggtatcaatcaaggat

SEQ ID NO: 317105 - DNA, 220 bp, Unknown
  Bacterial polypeptide expressing nucleotide sequence isolated from the Sargasso Sea
atggaaccaagtaattttcaaaaaattgttatcgttgactttggatctcaatttacacaacttgtagcaagaaaaatcagagagttaggctcatattctgaaataattaactttaaaaatatttttaaattaaaaaacgatacctctgtaaaaggcataatcctttctggtggtcctttaagtattacaactaataaaggtatcagtttaaatagttttt

SEQ ID NO: 317106 - DNA, 402 bp, Unknown
  Bacterial polypeptide expressing nucleotide sequence isolated from the Sargasso Sea
aatgattaattctgataacttttcattagataaaaaaaatattgatacaattttagtactagattttggatctcaatatacgcagctcattgcgagaagaattagagagttaaacgtattttctgaaatacttccatgggatatctctgttgacagaataaagtctttgaatcccaagggagttattctttctggaggccctgaatcagttactgaatctaatacgccaagaattccgaaaacaattttcgaattagaggtgccagttttaggcatctgttacggtatgcaaactcttgcagaacaatttggtgggcaagttacttcttcaaaaaataaggaatttggccatgctaaaatttttatagagagtgcttcgttactatttgatggatttatctc

SEQ ID NO: 317107 - DNA, 957 bp, Unknown
  Bacterial polypeptide expressing nucleotide sequence isolated from the Sargasso Sea
attttgtgaagtgattccatttaataaaataaataaaaaaattttaaatgatagggctttgtcaggtattattctatcaggagggcccaattcagtaaaagataaaaaatcacctaaattagatagtaaaattttaaatcttggaataccaattcttggtatttgttatgggcttcaactaatttgcagagagttcaaaggcaaaattggtcagtcaaaattaagagaatatggtcattctataattacccttaagagaaaatctttgctatttaaaaaagttaaaaccaaaaatcaagtttggatgtctcatggcgatcatattgaaaaaaaaccacacggatttgttattacttccttatcaagtgaaaaggtaattgcatcaattgaaaacttggatcaaaatcttttcggattgcagtttcacccagaagtataccattcattagagggcaaaaagatattatcgaattttctttttataatttgtaaaataaaaaataaatttaagttagaaaatttccttagtgtaaaaattaaaagtttaagagctgaattgcaaaataaaagagttatctgtggtttatcaggtggagtagactcaactgttacagcatttttattgcataaagctgttcaaaataatttattttgtatttttgttgatcatggtttgttaagattaaatgaatctaaagaagtagaaaaattgtttaaaaaaaaattcggaaaaaattttaaaaaaatagaagcatctaatatttttttacacaaattaaaaaaaataaaagatcctgaaaaaaaaagaaaaataattggtaaaacatttattgaagtatttgaaaaagaggcaaagaaaataaaaggtattgattaccttgctcaaggaactctttatcctgacattattgaaagcattcctttttttggtggacctacagctaaaataaaaagtca

SEQ ID NO: 317108 - DNA, 484 bp, Unknown
  Bacterial polypeptide expressing nucleotide sequence isolated from the Sargasso Sea
aaaagaccttaaatttgacgttatagagccttttaaagagctttttaaggacgaagttagaagattaggtctattctacaaattagatcagagatttgttaatcgccatccttttcctgggccaggacttggtatccgttgtattggaaaggttaatagacaaagactagacactttaagagaaatagatgaaatttttattaattttctcattgaaaaagatttgtacaacaaatcatggcaagcttttgcagttttacttcctgttaaatctgtaggtgtgatgggtgatgagagaacttatgaggagacttgtgtcttaagatgtattaattcagttgatggaatgacagcagatgtttcacagataaatgttgaaactttatctgaagtagcaactcatataattaataaagtacctagagtaaacaaagtcctctatgacataactagtaagcctccatctactattgagtgggaatga

SEQ ID NO: 317109 - DNA, 1074 bp, Unknown
  Bacterial polypeptide expressing nucleotide sequence isolated from the Sargasso Sea
tacacacagcttattgctcgaaggcttcgagagcttaatgtttattctgaagtttacccatgggatgaaatacctgtcctagaatctgttgatggttttgttttatcaggtggtcctgaatcatcaaacatagaaggcaacccaaatattttcaatgaaatatttgaatccaataaacctattcttggtatttgttatggaatgcaagttttagcttttcaagaaggtggagaaatacagaatgaaggaaaaaaagaatttggttacgcaaagatagacttaaataatcaaacttctttatttgctgacacctcagactcaattgatgtgtggatgtcgcatggagataaagtaatttcacttccagaaggttatgaaactttagctagttctgataattcaccaattgctgcttaccagaatttagaaaagaactattttggattgcaatttcatcctgaggtgactcatacagattttggtctaaaaattattgaaaattttattaatgtatgtggagttgaaaggaattggaatgctgatgacattctaaagaacattcataatcaagctaaaactgaggttggtgaaggtaaagtgcttttagctctaagtggaggcgttgattcaactgtactggcatctgttttacataaaactctggaagatagattagtttgtgtgatggttgatcatggtttgcttcgtaaagatgaggctaacaatgttgtgactaacctaaaagaaaaaattggacttgaagttaaccttgttaatgctcaagaaacctttttagaaaaattaaaaggcataaaagaccctgaagaaaaaagaaaaattattggtaatactttcatagaagtatttgaagcggaagcaaaaaaaattcagggcatagaatggttagcgcaaggaacaatttaccctgatgtgattgaatcagcaggcaattcaaaatcaaaagctaaagtcattaaatctcatcataatgttggtggtttaccagaaagaatgaatctaaaacttttagaaccatttcgtatgctttttaaagatgaggttagaaagatagga

SEQ ID NO: 317110 - DNA, 955 bp, Unknown
  Bacterial polypeptide expressing nucleotide sequence isolated from the Sargasso Sea
tttgcgtgaaactggtgtctataccgaaattttgccatgtaccactgcgccaaataagatcgcagcggcggcgccaaaaggcattattttatccggcggaccaaattcggtggcgcttgctgatacgccgcgtgcgccacaaattgtgtttgatcttggcgtgcctatttttggcatttgctatggccagcaaaccatgtgtgcccagcttggggggcgggtggaacctggcacgacccgtgaatttggccggtccgagttagaaattaaggaacattcagtactgtttgatggcgtctggtcgcaacaaagtcgctacgttgtttggatgagccacggtgaccatgtggcggctttgcccgatgggtttcgggttttggcaacatcggcgggtgcgccttatgcggtggttgaggatgcggcgcgtcgctattacggggtacagttccatccggaggtggtgcataccgaaggcggttcagatttattgcggaaatttgctctttgcatttgtggctgtagcggtaattggtcaatggcggcgtatcgacagcgagcaattgcggctattcgcgatcaagttggcgaggcgcgggtgatttgtggactgtctggcggggttgattcatccgttgccgcggttttgattcacgaggcgattggtgatcaacttacctgtgtgtttgttgatcatgggttgttgcgtgctggtgaagccgaagaagttgttcgtttatttggcgattgttataatgttaagctagtgcatgttaatgcttcagatatgtttttggaccgccttgcagggatcagcgacccagaacaaaagcgcaaaatcattggtgctagctttatcgaggtttttgacgctgaagccagcaaaatagctgatgcaaagtttttggcacaaggcacattatacccggatgtgattgagagtatttctgctgctggt

SEQ ID NO: 317111 - DNA, 935 bp, Unknown
  Bacterial polypeptide expressing nucleotide sequence isolated from the Sargasso Sea
tgataattctttctgcgctgctttcgagaaagatttattttatggagttcaatttcatcctgaagttgataacacagattatggaaaagaaatactcaaaaactttgccttagatatatgcaatatctcagataattggagcgctaaaaattttataaataaatctattgaaaatattagaaaagagattggcaacagcaaagttatatgcggaatctcaggtggtgttgactcaagtataactgccactttaattcataaagccataggaaataatttgacgtctatatttgttgataatgggttactaagaaaaggtgaatcagaagatgtaatgaattttcttcaaaaaggacttgggctaaatatcgttaaggtaaatgcaagtaaaaattttctatataaattaaaggacattattgacccagaagaaaagagaaaaataataggcaaagaattcattaatgtttttgaaaaagaagcaaaaaaaatcaaaaatgtaaaatacttagctcaaggtactctttattctgatgtagttgaatctgctgtcataaaatctggacatcaagcagttattaagagccatcataacgtaggaggacttcctgacaaaatgaagctaaaacttatcgaacctcttaggttgcattttaaggatgaggttagagaaattggttatgaattaggaatcaacaaagaaataattgaaagacatccttttccaggaccaggattagctataagaataatgggtgaaataacagaagaaaaattatatatattaagagaagctgatcatatttttatagatgaaattaagaaagctggtttgtaccataaaatatggcaagcctttgcagttttgactaatactcaaagtgtcggagttatgggagataatagaacgtatcaaaattgtgtagcaatacgag

SEQ ID NO: 317112 - DNA, 949 bp, Unknown
  Bacterial polypeptide expressing nucleotide sequence isolated from the Sargasso Sea
gttgaattttgggtctcaagttacaagactaattgctagaagaattagggactttggagtttatagtgagataataacaccagaagatttaggaaaaattataaactttaaagatatacatggtttaattttttctggaggtccatcaactgtaacaaataaattttttccgaaaatacccaaaagagttttttttcttaatatacctatattaggcatctgttacggacttcaattaattgctaaaaacttcggcggccggattaaatccaataccaaaaaacgtgagtatggaagaacacttattaaaaaaagaagaaattcagtacttacagaaaatttttataaaaacagaaaaagtgaagtatggatgagccatcaagattgtgtaactaaactccctaataatttttatactgtagcttcaagtaaaagttcaaagtatgcgatattagagcacaaaaataaaagtatatttggtattcaatttcatcctgaagttagtcatacgaacaggggaattattttattaaaaaattttgtttttaaaatttgcaatgctaaaaagaattggggaaccctgaattataaaaataatattattgaaaatttgagaaaaattagcaaatcagaaaaaattatatgcggtttgtcaggtggagtcgatagtagcgttacagcacttgttctgagcaaagcagtaaaaaaaaacttaacttgtataatagtagatactgggcttatgaggaaaaacgaatttaaaaatttatacaaaatatttaaaaacaaatataaaataaatgttaaacttgtaaatgaatcgatattatttttaacaaaattaaaaaatgtcactgaaccagaaaaaaaaaggaaaattataggtaaactttttgtcaagatttttgaacgtgagtcaaaaaaaattaaaggagtaaaatatttagcg

SEQ ID NO: 317113 - DNA, 822 bp, Unknown
  Bacterial polypeptide expressing nucleotide sequence isolated from the Sargasso Sea
cataacgggtataattttgtcaggtggtcctttaaatgtttatcaaactaaaaaggtaagttttgacaaaaaaatattaaatcaaaatataccaatattaggaatttgcttcggacatcaaataatttcaaaagtactaggtggtaaagtaaaacagtctaaattgagagaattcggtctggtaaatataaaaaaaaataaagacagtgttcttacaagaggtttttttaataaaaatgggattaataatgtttggatgagtcattcagaccaagtaacaaaacttccaaaaaattttgaaaaactcgcatcaagtgcaaattctaaattttgcataattcagaataaatataagaaattctatggtattcaattccatcctgaggtaacacatacacataatgggataaaattaataaaaaattttttattttccatctgcaagtcaaaaaaaaattggtcatcaaaaaaacaaaaagaaaagataatagatgagattaaaaatcaagtagggggctctaaagttatttgtgcattatccggaggcgtagatagtagtgtagttgcaaaaattatacataaggcaatcggtaaaaatttaacatgtatatttgttaataccggtttattaagaaaaaatgaggaaattcaagtaataaaaacatttaaacaaaaactaaaaattaaacttatttacgttaacgctaaaggtttattcattaaaaaattaaaaaaaataaatgatcctgaaaaaaaaagaaaaataattggaaatctatttattaaaattttcgaaaaatattcaaaaaaaatatcgaatat

SEQ ID NO: 317114 - DNA, 662 bp, Unknown
  Bacterial polypeptide expressing nucleotide sequence isolated from the Sargasso Sea
aatgttattaaagactgaaagtgaagaggtttttttaaggcatttgaaaaatattgaagatcctgagcaaaaaaggaaaattattggaagaacttttatagatgtttttgatgcggaggcaataaaatttaaagatattaaattcttagcacaaggaactatatatccagatgtaattgagtcatctggatcagagtcaaatgaagccagagttataaagtcgcatcataatgttggaggactgcctgaggaaatgaaattaaatctagttgagccacttagagatttatttaaagatgaagttagaagaatgggtattgaacttggtatcccaaaaaatatgttagaacgacatcctttccctggaccgggattgggtgtgagaataataggagaagttactaaagaaaaaactaaagtacttcaagaggctgatcatatttttatagaagaactcattaaagctgatttatatgacaaagtaagtcaggcattcgcagtattactcccggtaaaatcagtaggagttgttggagatgaaagaaggtatgctgaagtaattggattaagggcagttgaaacagtagattttatgacagcaaaatgggcacatttaccctatgaatttttagaatatgtttcaaatagaattgttaatgaaa

SEQ ID NO: 317115 - DNA, 400 bp, Unknown
  Bacterial polypeptide expressing nucleotide sequence isolated from the Sargasso Sea
gtagcatcaactcaaacagcacccatagcagctatggagcataaaaacttacctatatatggtattcaatttcacccagaagttacccatacaaataatggtcataagatattagaaaattttatttttaatgcatgcaatgctcgaactgattggaaaatggatgatttaatctcacagagaatacaagaaattaaagaagaggttcaaaaagataaagttttgcttggattatctgggggcgtagattcctcagtaacagctgctttgcttaataaggcaataggcaaaaaattaacatgtgtttttgttgataatggtttgttaagaaagggtgaagcagattcagtgatgcaaacttttaaggataatatggatttaaatgttattaaagactgaa

SEQ ID NO: 317116 - DNA, 1031 bp, Unknown
  Bacterial polypeptide expressing nucleotide sequence isolated from the Sargasso Sea
gaaaggaaaggttgaattagcctataaaagagaatttggccatgcggatttatctctcaagagccaaggttcaggactttttaaaggtatcaataaaaagaaaatgagtgtttggatgagtcatggagaccatgtttccaaacttcctaaagattttaaggtttgcgcaacaacctacaacagtcctatagcagcctttcatcatccaacaaaaaagatattcggtcttcagtttcatcctgaagtaacgcacacacctcaaggtaagaagatattgaaaaattttgttagagatatatcaggatgcaaaggtttgtggaattctaaaaatataattgatcgagcggtaagtgaaataagagagcaggtaggtgatcaagaagttttattgggtttatcgggaggggtggattctgctgttgttgcagcattactctcaaaagcaataggtaatcagttaacctgtatctttgtagacaatggactccttcggcttaatgaaggcgaccaagtcatggaaactttcaaaggtaaatttggaatcaaagtaaaaagagctaatgctggtaatcaattccttagagatttgaaaggaaaaaaagatccggagcttaaacgcaaagctattggaaaaacttttatagatgtctttcttaaagaggctaaaagaaatacaaaaattcaatggttagcacaggggacaatttatcctgatgttatcgaatctgctggaacgaagaatggatcggcgcatgtaataaaatctcatcacaatgtaggagggctgccgagctatcttaatctccctgtgatagagcccttaaaggacctatttaaagatgaagtcagaaagatgggtttagagcttggtttaccaaaagagatattatttagacacccttttccaggtccaggtttaggtgttcgaattcttggtgaaattaaaagaccttatattaaaacccttcaattagctgatgatatttttataagtgagttggttaaaaggtggttactacgagaaagttagt

SEQ ID NO: 317117 - DNA, 527 bp, Unknown
  Bacterial polypeptide expressing nucleotide sequence isolated from the Sargasso Sea
cgtgatcaaatcgcatcataacgtcggcggactgcccgatgatgtcgacctaatcatagtagaacccctaagagaattttacaaagatgaggttaggcagattgcccgtcaattgcagataccctcgagtgaaaggcaaccgtttcccggaccaggattggccgtcagggttcttggcgaaattactccgagcagggtcgagtcctgccgagaagcatgccatatcgtcgagactaggataaaagaagcagcctctcgaggaatgtgtgatttaccatggcaatactttgccgccttactacccgtaaggagcgtaggggttcacggggatactagggtacacggggaaactatagtcgtcagggcagtcacaagtatagatggtatgagtgctagatactcctccttgccacaagaccttttggcagagataagtaccgaaataacaaactcactgaagggccaagtgaatagggtagtgtacgatattacccataaaccacctggaactattgagtgggagtaat

SEQ ID NO: 317118 - DNA, 819 bp, Unknown
  Bacterial polypeptide expressing nucleotide sequence isolated from the Sargasso Sea
aattccaagaaattttagagcagttgcttcaagtacaaattctaaatttgccattgttgaagatagaattaagaaattttatggagttcagtttcatcctgaagttacacatactgaaaatggaaaaaaaataattagtaatttcgtttttctaatatgtaaaattaaaaaaaattggtcatctaaagatcaaaaattaaagttaattaaagatgtaagaagtcaagtaggatcaaataaagtgatttgcgcattatcaggtggtgttgatagtagtgtagttgcgcaacttctgaacaaagccataggtaaaaaattattttgtatttttgttaacaccggtcttttaagaaaaaatgaagaaattcaagttgttcaaacttttaagaaacgtttaaaaatgaatctaatatatgtaaatgctgaaaaagaatttttaaaaaaattatctaatgtttcagatccagaaaaaaaaagaaaaataattggtaatttatttattaaaatatttgaacgttatgctaagaagataaaaaacgtaaaatttttagctcaaggaactctttatccagatttaattgaaagtaaatctgttacaggaagtcaaacttcaaaaataaagtctcatcacaatgttggaggcttacctaaaagaatgaaattaaaacttgttgagccattaaagtttttatttaaagatgaagtaagaaagcttggtttagaattaaatttaaataatgaaattatatcaagacacccttttccgggccctggtcttgcaattagaatgcctggtgtaatcacaaatgaaaaaataaa

SEQ ID NO: 317119 - DNA, 847 bp, Unknown
  Bacterial polypeptide expressing nucleotide sequence isolated from the Sargasso Sea
gaatttggtttagctaatgtttataaaaaaaataaaagtcttttaacaactaatttttttggaaataaaaaatccaaacaagtttggatgagtcatgctgatcaagtttcaaaacttcctaagaattttaaagttgttgcatcaagcactaattcaaaatttgcaattgttgaaaataaaattaaaaaatattatggagtacaatttcatcctgaagtaactcatacggaaaatggaaagaaattaataagtaatttcatttttttaatttgcaaaattaaaagaaattggtcctctagggatcaaaaaaatcagcttattaaagatgttagaaaacaagttggaaataacaaagttatttgtgcattatcaggaggagtagatagtagtgtagtcgctcaattattgaataaagctattggtaaaaaactttattgtatttttgtaaacacaggccttttaagaaaaaaagaggaaattcaagtagttcaaacttttaagaagcgtttaaaaatgaatttaatttatgtaaatgctgaaaaagaatttttaaagaaattaaagaatgtttctgatccggagaaaaaaagaaaaataattggtaatttatttatcaaaatatttgagcggtatgcaaagaaaatcaataatgttaaatttttagctcaaggaactctctatccagacttaattgaaagtaagtcagttactggtagtcaaacttctaaaataaaatcacatcataatgttggtggtttaccaaaaaaaatgaatttaaaattagtcgaaccactaaaattcttatttaaagatgaggtaagaaaattaggattagagttaaatttaa

SEQ ID NO: 317120 - DNA, 985 bp, Unknown
  Bacterial polypeptide expressing nucleotide sequence isolated from the Sargasso Sea
ttgaaaattgccggttttgatggtgattggacaatgcaggcatataaaaaagaaatgatccaaaatataaaagatattgttaaaaaagatagagttatttgcggtatttcagggggtgtagatagtacagtgactgcaactttactccataaagctatcaataaacagctaacctgtattttcgtaaatcatggtttcctaagaaaatatgaagaaaaagaagttttaaaaatgtttaaaaacaatatcaaaatacccttgatatatgctgatgagagtgcactttttatgaaggaactagaaggagtagcagatccagaaataaaaagaaaaaaaataggaaaactattcataaatgtttttcaaaaatatgcaaaaaaaataaaaaatgcaaaatatttaggccaaggaactttataccctgatgttattgaaagtgtgtctgtaaatggacaaatctctgaaacgattaaatctcatcataatgtaggtggattaccaaaaaaaatgggattgaaactaatagaacctttaagagaagtttttaaagatgaagtaagaaacttgggaaaagaacttggaataagtaaagaatttattaatcgccaccctttccctggcccaggtttagcaataagatgtcctggtgaaataacaaaacaaaaaattgaaatattgagagacgctgatcatatttttatcgatcagataaaaaaattcggtttatacgatgagatttggcaagcttttgctgcaattttaccagttaaaacagttggtgtaatgggagataaaagaacatatgaatttgcctgtacacttcgtgcagttacgtctgttgatggaatgacagcagactattatccattcgatcatgaatttctaaaagatacctcaactagaattataaatgaagttagaggaattaatagagtaacatatgatattacttcaaaacctcctggcactattgagtgggaatagt

SEQ ID NO: 317121 - DNA, 754 bp, Unknown
  Bacterial polypeptide expressing nucleotide sequence isolated from the Sargasso Sea
acattttcagagcatatgaatctcaacgtcatcagagtcgatgccgaggaagcgttcttaaaaaggctcaaaggtattaatgacccagaggaaaagagaaaaataattggtagaacgtttatagaagtttttgaggacgaggcatcaaagttagaaaatgtgaaatggttggctcaaggaactatctatccagatgttattgagtctgcaggatcaaagaccggtaaggcgcatgtaatcaagtcgcatcataatgttggaggtcttcctgaagacatgaagttaaagctgatcgaaccgctgagagatctatttaaagacgaggtgagaaaaattggtaaagagcttggtttaacctcaaagttggttgatcgacatccatttccaggacctggtctaggagtcagaatattgggagcagttaaaaaagagtatgccgatttattgagattggctgatgatatttttatagaagaattacataaagagaatctatacgataaagtaagtcaggcgtttgcagtttttcttccagtaaaatctgtaggcgtcatgggtgatggaagaaaatatgaatatgtcattgctttaagggcagtagagacaaccgattttatgactgcaaattcagctaaattgccatacgaatttctagatcatgtatcaacacgaatcatcaatgaagtcccaggaatatcgagagttactttagatatatcctcaaaaccgccttcaactattgagtgggaatgaa

SEQ ID NO: 317122 - DNA, 373 bp, Unknown
  Bacterial polypeptide expressing nucleotide sequence isolated from the Sargasso Sea
aatgagtcttgatcaaaatcttgacaagatcttaattgtagattttggctcacaatttacacaattaatagcgagaagaattagagaattaggtattttttctgagattgtgagtcacaaaaaaattagagttaaagatataaatcaatctataaaaggaataattttatctggaggaccactaaatgtttatcaaataagcaaatatacatttaatgaaaaaattttagacctaaacataccaatacttggaatttgttttggtcatcaaatattatctaagttaaatggaggtagagttaaacaatcaaagcatcgtgaatttggtttagcaaatatttatagaaagaatagtagtcttttaacaaaataa

SEQ ID NO: 317123 - DNA, 784 bp, Unknown
  Bacterial polypeptide expressing nucleotide sequence isolated from the Sargasso Sea
cggcgtgcagttccaccccgaggtggtgcactccacctgcggcatggctctgatccgcaatttcgtttaccacatctgtggctgtgagccggactggaccaccagcgccttcatcgatgaggccgtcgcggtggtgcgggagcaggtgggcgagaagcgggtcctgctggccctgtccggtggagtggattcctcaacccttgctttcctgctgaagaaagccattggtgatcagctcacctgcatgttcatcgaccagggcttcatgcggaaaggggagccggagttcctgatggacttcttcgatcggaagttcaacatccatgtggagtacatcaatgcccgccagcggttcatcggaaaactgaagggcatcaccgatccggaggagaagcgcaagatcatcggcacggaattcatccgtgtgttcgaagaggagagcaagcgcctcggaccgttcgattacctggcgcagggaactctctatccggatgtgatcgagagcgccggtaccaatgtcgatcccaagaccggtgagcgggtggcggtgaagatcaagagccaccacaacgtgggcggattgcccaaggatctgcagttcaagctggtggagccgctgcgcaagttgttcaaggacgaggtgcgcaaggtggggcgtgccctgggcctgccggaggagatcgtccgccgccatcccttccccggccctggcttggcgatccgcatcctgggggaggtcaccgacgagaagctcaattgcctgcgggatgccgacctgatcgtg

SEQ ID NO: 317124 - DNA, 907 bp, Unknown
  Bacterial polypeptide expressing nucleotide sequence isolated from the Sargasso Sea
catggcacaaacagtcgtagtattggatttcggatctcagtatacccaagtgatcgctcgtcgtatcagggaggcgagcgtttattcgaaagtcttgccctacgataccccgatcggcgaaatcaagaagattgatccggttggcctggtcttgtccggtggccctgcaagcgtcttggctaagggagcccccaagccccaccctcggctgttcgaattgggtattccaactttgggaatctgttacggtcttcagctcatgggcaagatgctgggtggccgcgtaatgtccagtcagcaccgggaatatggtcgaggcaaattgaccatcaagaaaaagggacctcttttcaagtccttgccgggcgagctgaccgtatggaattcacacggtgattgcctgacgaaactccccaagggttttcatgcccttgcccagaccgaaaactctcccttcgcggccattgaggatccgtccagaaaattcttcggcctgcagtttcaccccgaagtcgagcattccgaaaagggtacgcaaataatcagaaactttctggttgcggtttgcggatgcaagggcgactggggaatggaggacttcaccgagtcggcggttcgctcgatccgtgcccaagtgggcgaccgaaaagtaattttggggcttagtggcggggtcgactcatccgtcgccgccgctctcattgatcgggctattggcaaacagctcacctgcattttcgtagacaatgggcttctgcgactcaacgagcgcgagcaggttcggcaacttttccgcaaccacataccgggaaagttgaaggtggccctagccggacctctttttctcggtcgcctcaagggcgtaaccaatccggaaaccaagcggaaaatcatcggcaggaccttc

SEQ ID NO: 317125 - DNA, 769 bp, Unknown
  Bacterial polypeptide expressing nucleotide sequence isolated from the Sargasso Sea
atgcaagacagaattctcatactcgattttggttcacaatatacccagctgattgcaagacgagttcgagaggcgggtgtttatagcgagatttatgtcggtgacattggtgtagaagccattgaatcatttcagccatcgggtttaatactctcgggtggaccggaatctgcattcactgatgatgctatcaaaccatctcaagagatttattcattgggtcttccgattttaggcatttgttacgggatgcaggtgatgtcagaacagctcggtggaaaagtttccccttcaagtcatagagaatttggccatgcagatataaagatagaatcaaatagtcgtcttttagagggcatcgagaattctgctgaacaaacagtttggatgagtcacggagacagagttgaatctttgcctgaggggtttcgaacaatttgtaccagtcaaaactcgccttcagcggcaatggcgagtgaggataaatcattttatgggcttcaatttcatcctgaagtgacgcatacaatttgcgggcaaaaaatcatcgaaaactttttgcatcatatttgtgggtgcgcaagcgattggaatccaggaaacatcattgcgaaacacatcaaaaaagttcaggaggcggttggcaatgaccagattcttctgggattatcgggcggtgtggattcctcagtcgttgctgcccttttgcacaaagcgattggcgatcaattggtctgtatttttgtagacaacggacttcttcgttgaa

SEQ ID NO: 317126 - DNA, 784 bp, Unknown
  Bacterial polypeptide expressing nucleotide sequence isolated from the Sargasso Sea
cggctcaatgaaggtgaccaagtcatggaaactttcaaaggtaaatttggaatcaaagtcaaaagagcaaatgccggcaatcaattcctaagagatttgaaaggaaaaaaagatccggagcagaaacgcaaagctattggaaaaacttttatagatgtctttcttaaagaggcaaaaagaaatacaaaaattcaatggttagcacagggaacaatttatcctgatgttattgaatcagctggcacaaagaatgggtcagcgcatgtaataaaatctcatcacaatgtaggagggctgccgagttatcttaatctccctgtgatagagcccttaaaggacctatttaaagatgaagtcagaaagattggtttagagcttggtttaccaaaagagatattatttagacacccttttccaggtccaggtttaggtgttcgaattcttggtgaaattaaacgaccttatattaaaacccttcaattagctgatgatatttttataagtgagttggttaaaggtggttactacgaaaaagttagtcaagcttttgcagtatttttgccagtcaaatctgtaggagtagtaggggacgcaagacgttacgaatatgtcattgctctaagagcagttgaaactatcgattttatgactgcaaagtccgccaaacttccccatgctttcttagaaaaggtttctaatagaattattaatgaaattccagaagtgtctagggtaacctatgatatttccagcaaacccccagctacaattgagtgggaatgag

SEQ ID NO: 317127 - DNA, 208 bp, Unknown
  Bacterial polypeptide expressing nucleotide sequence isolated from the Sargasso Sea
atgagtcaaacatctttaaaaaaagaacgagatccttcaatattaattctagattttggatctcaatattctgaattgattgcaagaagaattagagaaactaatgttttttctcttgtagtaagtaactgtatttcaattaaggatattagtgacattaatcctaaagggataattttgagtggaggccccaaattctgtatatgaa

SEQ ID NO: 317128 - DNA, 884 bp, Unknown
  Bacterial polypeptide expressing nucleotide sequence isolated from the Sargasso Sea
catgcaaaactatcttaaaattcaagttgccaaaataaagattaaggttgaaaaaaaccatgtcatttgtggtttatctggaggagttgacagtatggtgactgcagcaataatttcaaaagcaattaataaacaattaacgtgtatctatgtcgatactggcttaatgaggttgaatgaaactaaggaagttcaaaatttgttcaaaaagcattttaaatcaaagcttattacagttaatgctaagaatagattcttcacttcccttaaaggagtatttgatccagaaaaaaaacgtaaaattattggcaatttatttattaaaatatttaacgctgaatctagcaaaatctctaaagcaaaatttttagctcaaggcacgatctacccagacataatagagagtcaaagttttcatggggggccaacttcagtaatcaagtcacatcacaatgttggaggcctgcctaaagaaatgaagctgggtcttatcgaacctttacaagagttatttaaggatgaagttcgtagactgggtaaagagctaaaattacccaaagaatttattcaaagacatccatttccaggacctggattaggaattcgagtattaagtgacattacaatagataaagtacgaatgttacaacatgcagataaaatttatattgatgagattaaagcagcagatttatacaatgatatatggcaagcttttgcagttctattacctgttcgaactgttggcgtaatgggtgatcaaaggtcatatgagttcgtttgtggcttgagagctgtaacttctgtagatggtatgacggctgatttctatcctttcagtggtgaatttttaagcaaagtatcaactcgtattataaatgagg

SEQ ID NO: 317129 - DNA, 469 bp, Unknown
  Bacterial polypeptide expressing nucleotide sequence isolated from the Sargasso Sea
atgcctgataaggaatacgacaaaattttaatcatagattttggttcgcaggttacaaaactaatagcacgctcgattcgagagttaaacgtgtattgcgagattgtgactataagcaaatttaacaaaattttaaacgataaattaaaatttaaaggtattatattgtcgggtggacccgactcggtagcaaaacataaatatttcccaaacgttaacaagtcaacttttcaacataatattccaattcttggtatatgttatgggcatcaattaatttcatatctatttggtggaaaaataaaaaaagcaaaaaaaagagaatttggtagaacatttttacatcaattaaccaaaagtgatttaacaaatgggttttttcaaaataaaaaaaatgttgtctggatgagtcactctgactccgtaataaaaatacccaaaggatttaaggtaattgctagatcagaga

SEQ ID NO: 317130 - DNA, 840 bp, Unknown
  Bacterial polypeptide expressing nucleotide sequence isolated from the Sargasso Sea
cttgtcaggaggagtagatagtagtgtggtagctttattattaaaaagggcagtaggaaataaattgacatgcatttttattaatactggattattaagaaaaaatgaggaacgtgaagttataaataactttaaaaaaaaattaaagctcaaattaatatatatagacgcttctaagattttcttgagcagacttaaaaatgttaataatccagagactaaaagaaaaattattggaaaactttttattcaattatttgaaaagtatgcaaaaaaaattaaaaatgttaaattcttagcacaaggaactttgtacccagatctaattgaaagtaaaacagtcaccggcagcccttcttcaaaaattaaatctcatcataatgtaggaggtttgcctaaaaaaatgaaactagatttggttgaaccgctcaatagtttatttaaagatgaagttagaaaacttggtaaagaattatcattatctaaagatttacttttaagacatccatttcctggacctggacttgctataagaattcctggcaagattacaaaagaaaaaattaatatcttaaaagaggcggattacatattcataaatgaattaaaaaaatcaaacctgtataataaaatttggcaagcttatgcggcattacttccattaaaaacagttggagttatgggagataaaagaacttatgaatatacttgtttattaagagcagtaacctcagaagatggaatgactgctgatttttttccatttagcaaaaacttttttcaaaaggtttctaataaaattattaattctgtaagtggtattaataggggtgtttatga

SEQ ID NO: 317131 - DNA, 829 bp, Unknown
  Bacterial polypeptide expressing nucleotide sequence isolated from the Sargasso Sea
aatgaaaaaaaacaatagagataagaaaattcttataattgattttggctctcaatatacccaattaattgcaagacgtgtaagagagcttggtgtattttcagaaatatcaaatcacaaacaagttaaaaaagttgatgtagaggaactattcgggattattttatcaggcggtcctttaaatgtttatgaagataaaaaaataaattttaataaaaagattttaaacttgaaagttcctattttaggtctttgcttcggccatcaattaatttcaagacattatggtggtaaagtcataacagcgaaaaatagagagttcggtttagcaactataaaaaaaaaactaaactccaaactaaccaaaaacttttttgataaccgcaaacaaaggaatgtatggatgagtcatgctgatcacgtaactagactaccaaaaggttttaaagcagcagcatcaacaaaaggttcaaaatttacaataattgaaaatgatttaatcaagagatatggtattcaattccaccctgaagtaactcatacagaaaaaggaattttattactcaaaaattttgtgtttggtatatgtaaatcgaaaaaaaattggtcaacagatcatcaaaaaaaaacattaattaaaaatgttcaaaatcaaattggtaataaaaaaataatatgcgcactctctgggggtgtagatagcagcgttgtagcacaattattaaataaagcggttggtaaacaattacactgtatatttgttaatacaggattgttaagacttaatgaggaaaaacaagtagtaaatacttttaaaaaaaaattaaaa

SEQ ID NO: 317132 - DNA, 453 bp, Unknown
  Bacterial polypeptide expressing nucleotide sequence isolated from the Sargasso Sea
taagagaattgtataaagatgaagtaagagatgtagcaagaattctaggagttcccgagaaattattgaagagacatccattcccaggaccaggattagcagtacgaattattggggacattactccttcaaagttagcaatttgtagaaaagcaagtaagattgtggaagaggagttatgggatgcaggagtttatgataaagtttggcaggcatatgcagcagttggagatgataaagctgtgggggtagtaggtgacgaacgaaagtatggtagaattgtaacagttcgagttgtggattcaattgatgcgatgactgcagattggactagacttccaaatggagttttagagaagatcagtaacagaattactaatgagattgaggaagtaacatgggtgtcatatgtaatatcaagtaaaccaccagctacaattgaacctcagtaga

SEQ ID NO: 317133 - DNA, 697 bp, Unknown
  Bacterial polypeptide expressing nucleotide sequence isolated from the Sargasso Sea
atgcttaataaactattgattgtcgatttcggctctcaagttacccaacttatagcaagaaatgttagaagccaaaaagtatattgtgaagtagttgcgtataataaagtttcactaaattatattaaaaaagaaaaacctttagggataattttatctggaagcccattatctgttacaaaaaaaagatttcctaaaattaaaaaagatattttttttctaggaattcctattttaggaatctgctatggaatgcaacttatatcttctactcttggaggaaaaataaaaaaaatttctggtagagaatatggagatacttctattaaagttctcaaaaaatcttctattaatcctaataactggaacacaaacactaaacataatgtttggatgtcccatggagatagtgtgaaaaaattaccaaaaaattttactagttttgctaaaagtaataatgaaaactatgttggaatagcaaatgaaaaaatgaaaatatttggtcttcaatttcatccagaagttacacacacaaaagacggaaaatccctaataaaaaaattcctatttaatgtttgtaaatgcaagccccattggaatatgaaaaaatttaaaaaagaaaatattaaattattgaagaaaaaactggctaacaaaaaagttttatgcgctttatcaggaggagttgattcgagtg

SEQ ID NO: 317134 - DNA, 884 bp, Unknown
  Bacterial polypeptide expressing nucleotide sequence isolated from the Sargasso Sea
ttgttacgggatgcaagtcatgacagaacaactcggaggaaaagtttcaccatcaaatgagagagaatttggtcatgcagatgcaaaaatggaagcaaatagcagtcttttcaagggcattgagactgatgatgagcaaccggtttggatgagtcacggagacagagtcgaatctttgcctcagggattccaaaaaatatgtacaagtgcaaactcaccttcagcagcaatggcaaatgaagataactcattttatgggctccaattccatcctgaggtcactcatacaagttgtggacagagaatcattaaaaactttgttcacaatatttgtggttgtgaaaatgattggaatccaggaaatattattgaaaaagacatcaaagaagttcaggaagcggttggcgatgatcaggttcttctcggattatcaggtggtgttgattcctcagttgtagctgcccttttacacaaagcgatcggtgatcaattagtctgtattttcgtagacaatggtcttcttcgtctaaatgaaggtgatcaggtcatggaaacattctcagagcatatgaatctcaatgtcatcagagtaaatgccgaggatattttcttagagaaacttaaaggtgttgatgatccagaggacaaaagaaaaataattggtcgaacattcatagaggtttttgaggacgaggcttcaaagttagaaaatgtgaaatggttggctcaaggaaccatttacccagatgttatagagtcagcaggatccaaaacaggaaaagcgcatgtaattaagtcacatcataacgttggcggtctccctgaggagatgaaattaaagctggttgagccgctcaggggatttattcaaagaccgaggtaag

SEQ ID NO: 317135 - DNA, 976 bp, Unknown
  Bacterial polypeptide expressing nucleotide sequence isolated from the Sargasso Sea
gagtcattatcctccggattttggatcacaatatacacaacttatcgctaggaaaattcgagagttaaatgtctactctcgtattttatcacatgattcaacattggatgatattatggtttataagccaaaggcaatcatattatctggaggtccatctagcgtatatgagaaaaatgctcctcaatatgataatgaaattttagaagtagatataccaattcttggtatttgttatggcctacatattttagcacatcatagtggtggctccgtaaaatctactggtcaaggagaatatggttttgcaaaaatttctattactgataagacggagtttttacaatcagatttgaatggttcacaagtttggatgtctcatatggatcaagtaacgaaagtacctgattcatggtctgttattgcagagtcatcgaacggagttgtggctgcaatggcaagcaatgatttgagccgtttagcaacacagtttcatccagaagtttcccatacagaatatggaaaagaaatgttgaaaaactttttgttcaagattgcttcctgcaatgctgattggactccagataactttattgatcaacaagtagatttaattcgtgaagtagttggtagcagcaatgttcttattggagtcagtggaggagttgattcttctgttgttgcagctatactgaataaggcaattggagataaagcaatagcagtattaattgaccatggattaatgcgaaaaaatgaagctttagattgtattaatgctttaaaagatggattaggtattaatattaatctagaaaatgaatcagatacttttctcgaaaaactttctggcattacagatccagagcaaaaacgtaaaattattggaaatcagtttatttattcttttgaatctatagcatcaagatttgataaaatggaatatttggcacaaggtactttatatcctgatgta

SEQ ID NO: 317136 - DNA, 1019 bp, Unknown
  Bacterial polypeptide expressing nucleotide sequence isolated from the Sargasso Sea
gcgtgctccgcaggccgtgtgggacttgggcgtgcccgtgcttggcatctgctacggcatgcagaccatggccgtgcagctgggcggcaaggtcgagtggagcgatcaccgcgaattcggttacgccgaagtgcgcgcgcatggccacacccgcctgctcaaggacatccaggacttcgccacgccggaaggccacggcatgctcaaggtgtggatgagccacggcgacaaggtcgccgagctgcccccgggcttcaagctgctggcctcaacgccgagctgccccatcgccggcatggccgacgaggcgcgtggctactacgccgtgcagttccacccggaagtcacgcacaccgtgcagggccgcgcaatgctcgagcgtttcgtgctggagatcgccggtgccaagccagactggatcatgcgcgaccacatcgaggaagccgtcaagcgcatccgcgagcaggtcggcgatgaagaggtgatcctcggcctgtcgggcggcgtcgattcgtcggtggcggcggcgctcattcaccgcgcgatcggtgaccaactgacctgcgtgttcgtcgaccacggcctgctgcgcctggacgaaggcaagatggtgatggacatgttcgccggccgcctgcacgccaaggtcgtgcacgtggacgcgtctgagcagttcctcggccacctggccggtgtgacggacccggaagccaagcgcaagatcatcggccgcgagttcgttgaggtgttccaggccgaagccaagaaactcagcaacgccaagtggctggcgcagggcacgatctacccggacgtggtggaatcgggcggcaccaagaccaagaaggcaacgacgatcaagagccaccacaacgtgggcggcctgccggaaacactcggcctgaagttgctcgagccgctgcgcgacctgttcaaggatgaagtgcgcgagctgggcgtggcgctgggcctgccgcacgaaatggtctatcgccatccgttcccggggccgggcctgg

SEQ ID NO: 317137 - DNA, 937 bp, Unknown
  Bacterial polypeptide expressing nucleotide sequence isolated from the Sargasso Sea
aatttagatcgcatcttaataattgattatggttcccagtacacgcagctaatagctagaagggttagggaaatagggatatatagcgagatttatccgcctaatgtgtctaaaaagagagttgaaatttttaggcctagcggggtgatactatctggtagtcctgattcagtatcaaatgaagctattgatgttgaagggttacctttatttgttgctcttggagtacccatccttgggatatgtttcggtatgcagagtcttgcttcttataccggaggagaggtgcaaacaagtcaagaaaaagagtttggatttgctcaggttcgagcaaggggacactcccgactactggagggcattcaggatgccactaatgagagtaagcatggtcttctagatgtctggatgagtcatggagatagcgtaactaagctgcctcctggttttaaggtgattgcctctaccttaaatacccctatagcagggatcgccgatgaagtgagaagattttatgggctgcagtttcatcctgaagtcacacacacaaaacgaggtaaagaaatcttggaaagattttgtttagagatatgtgattgcgataaatcgtggagtacagaggactttataaaaagtagtttaagatccataaagaaagaaataggctccgaaaaagttctcctaggcctttcaggtggagttgattcgtctgtagcggcgtcccttttgcacaaagctgtaggagatcaattgctttgcgtatttgtagacaatggtttgcttagattaggggaagctgagcaagtcatgaataccttccaaaaatctatgggtttaaatattcgttttgttaatgctcaaaacgagtttctggaggcattagatggcgtaaatgatcctgaagaaaagagaaagattatcggaaaaaagtttgttg

SEQ ID NO: 317138 - DNA, 235 bp, Unknown
  Bacterial polypeptide expressing nucleotide sequence isolated from the Sargasso Sea
aatggatcttaacaataatttaaataagattttaattattgattttggttcacaattcacacaacttatagctagaagaattagagaactcggtgtttattcagagataattagtcataaaaaattaaattcaaaattaattaaatcaaaaatactaggaattattttatctggcggtccgttaaatgtttaccaatctaaaaaagtaaagttcaaaagagaattattcaaatgg

SEQ ID NO: 317139 - DNA, 821 bp, Unknown
  Bacterial polypeptide expressing nucleotide sequence isolated from the Sargasso Sea
aatgcaaaagatccttgtagttgattttggttcacaatacacacagcttattgctcgaaggcttcgagagcttaatgtttattctgaagtttacccatgggatgaaatacctaacttggaatctgttgatggttttgttttatcaggtggtcctgaatcatcaaacatagaaggcaacccaaatatttccaatgaaatacttgaatccaataaacctattcttggtatttgttatggaatgcaagttttagcttttcaagaaggtggagaaatacagaatgaaggaaaaaaagaatttggttacgcaaagatagacttaaataatcaaacttctttatttgctgatacctcagactcaattgatgtgtggatgtcgcatggagataaagtaatttcacttccagaaggttatgaaacattagctagttctgataattcaccaattgctgcctatcagaatttagaaaagaactattttggattgcaatttcatcctgaggtaactcatacagatttcggtataaaaattattgaaaattttattaatgtatgtggagttgaaaggaattggaatgctgatgacattctaaagaacatccataatcaagctaaaactaaggttggtaaaggtaaagtgcttttagctctaagtgggggcgttgattcaactgtactggcatctgttttacataaaactctggaagataggttagtttgtgtgatggttgatcatggtttgcttcgtaaagatgaggccaataatgttgtgactaacctaaaagaaaaaattggacttgaagtaaaccttgttaatgctcagg

SEQ ID NO: 317140 - DNA, 927 bp, Unknown
  Bacterial polypeptide expressing nucleotide sequence isolated from the Sargasso Sea
aatgagcaaggaagataaaatcatcattcttgattttggctctcaatatacacagctaattgctaggagagttagagaaataggtgtgttttctgtgattttgccttgtgatatcagtattgataaaatacagtctttgaatccaaaaggaattattctatctggaggtcccgaaacagttacagagagcgataatccaaagataaataaagctttatttgatacagaaattcctcttttaggcatttgttatggtatgcaaacaatggcacaagagctaggagggaatgttgttcaatcagataagcgagaatttggtcatgctacaattaatagaattaatcattccattttgtttgatgaagtcaaatttaaaaatgatacgttaaatgtttggatgagccatggagataaagtctctgtcgtccctggtaattttaatgccattgctgaatcagataattgtcctattgcagcatttgcacatacagataaagattggtttggattacaatttcatcctgaagtaacacatacggatgaaggtataaagattattgaaaattttgtatataaaatatgcaaatgtcaaaaaaattgggatataacaaacattattgatggaatgaaatctgatgttacgtcaacagttaaagatgacaaggttatattaggtctttctggcggagttgattcatctgtagttgcaattttactgcatcaatgtattcaagataatttaacatgcatttttgttgacaacggtttattaagattaaatgaagtggaagaagtattagatactttctcaaaaataggtattaaggttcatttatctaaatcaagtgatacgtttttatctcgtttaaaaggggtaaaagatccagagaaaaaaagaattattattggcaacacttttattgaagt

SEQ ID NO: 317141 - DNA, 805 bp, Unknown
  Bacterial polypeptide expressing nucleotide sequence isolated from the Sargasso Sea
aatggaccttaacaataatttaaataaaattttaattattgattttggttcacagtttacgcaacttattgcaaggagaataagagaattcggaatatattcagaaatattaagtcataaaaagttaaacttaaacataaacaagaaccaaattaaggggataatcttatcaggtggacctttaaatgtttatcaatcaaaaaaagtaaaattcaaaaaggaaatatttaaatggaatattccaattctaggaatttgtttcggccatcaagttatttccaaagaattaggaggtaaagtgaaaaaagctaaacacagggagttcggtttagcaaaacttaatagactaaataatagtaaacttacaaaaaatttttttaataaaagaggatcaaacaatgtgtggatgagtcatgcagacgaggtaacaaaattagcaaaaggtttcaaagtaattgcagatacagaaacatctaaattttcaattgttgaaaaccctaagcaaaaattttatggcatacaatttcatcctgaagtaacacatacagaaaagggcaaaataatccttaaaaactttatttttagtatttgtatgattaaaaaaaattggtcaccaagtaatcaaaaaaaaatacttattgaagacttaaaaaaaattgtgggaaattccaaagtaatatgcgctttatcaggaggggttgatagcagcgtagttgctaaattaattcataatgcaattggaaaaaaacttacatgtatttttgtaaatacaggtttattgagaaaaaatgaggaaaaccaagtt

SEQ ID NO: 317142 - DNA, 766 bp, Unknown
  Bacterial polypeptide expressing nucleotide sequence isolated from the Sargasso Sea
aaaagaccaagtaggagatcaagaagtactattgggtttatctgggggtgttgattctgctgttgtagcagcactactttcaaaggctataggcaatcagttaacctgtatctttgtagacaatggactcctaaggctcaatgaaggtgaccaagtgatggaaactttcaaggataaatttggaatcaaagtaaaaagagctaatgctggtaatcaattcttaagagatttgaaaggaaaaaaagatccggagcagaaacgcaaagctattggaaaaacttttatagatgtctttcttaaagaagcaaaaagaaataaaaagattcaatggttagcacaagggacaatttatcctgatgttattgaatcagctggcacaaagaatgggtcagcgcatgtaataaaatctcatcacaatgtgggagggctgccgagttatcttaatctccctgtgatagagcccttaaaggacctatttaaagatgaagtcagaaagattggtttagagcttggtttaccaaaagagatattatttagacatccttttccaggaccaggtttgggtgtccgaattcttggtgaaataaaaagaccttatattaaaacccttcaattagctgatgacatttttattggtgagttgattaaaggtggttattacgaaaaagtaagtcaagcttttgcagtatttttaccagtcaaatccgttggggtagtaggggatgctaggcgttacgaatatgtaattgctctaagagcagttgaa

SEQ ID NO: 317143 - DNA, 580 bp, Unknown
  Bacterial polypeptide expressing nucleotide sequence isolated from the Sargasso Sea
tttgaagcaagatacaattgtagtttttgattatggatcacaatacacaaggcttatatctagaaggctaagagagataaatgtattttgtgatttggtttatccagaaattgacaaatcattttttgatgaaagaaacattaaaggttttattttatctggtggcccaaatagtgtgtttgaagagaattcacctgaccttccaagatgggttatggagagtaaacttcctattttaggtatttgttatggaatgcaattaatagcaataaatcatcaaggcaaagtcaaaaaaacttccaaaagagaatacggtaactcaatattaaacatattagactcttcaaaattatttaatggtatcccaaaaaaaagtaatgtctggatgagtcatggtgataaagtaatcgatcttcctgacgactttcaaatagtggctaaaactgataattctttctgcgctgctttcgagaaagatttattttatggagttcagtttcatcctgaagttgataacacagattatggaaaagaaatactcaaaaactttgccttagatatatgtaatatctcagaataa

SEQ ID NO: 317144 - DNA, 955 bp, Unknown
  Bacterial polypeptide expressing nucleotide sequence isolated from the Sargasso Sea
tatggagtgcaatttcatcctgaagtaacacatacagagaatggaaaaaaattaataagtaattttatatttttaatttgtaaaataaaaagaaattggtcctctaaggatcaaaaaaatcagcttatcaaaaatattaaaaaacaagttggaaataaaaaagttatttgtgcattatcaggaggtgtagatagtagtgtagttgctcaactactgaataaagctattggtaaaaaactttattgtatttttgtaaacactggccttctaagaaaaaatgaggaaatacaagtagttcagacatttaaaaaacgtttaaagatgaatttaatttatgtaaatgctgaaaaggaatttttaaaaaagttaaagaatgtttctgacccagagaaaaaaagaaaaataattggtaatttatttattaaaatttttgaacgatatgccaagaaaattaaaaatgttaaatttttagctcaaggtactctatatccagatttaattgagagcaaatctgttactggaagccaaacctcaaaaataaaatctcatcataatgtgggtggtttaccaaaaaaaatgaatttaaagttagtagaaccacttaaatttttatttaaggacgaggttagaaaattaggattagagcttaaattaagtaaagaaattatttcaagacatccatttcctggaccaggcttagcaattagaatgcctggtaagataacgtatgaaaaaattaaaattttaaaagaagctgattattattttattcaagcgttaaaagatcacggtctttatcataagatttggcaagcttatgctgctttgctacctgtaaaaacagttggagtaatgggtgataatcgtacttatgaatatctctgcttattaagagcaataacttcctacgatggaatgacagcagattattatgaatttaaaaaagttttttatg

SEQ ID NO: 317145 - DNA, 389 bp, Unknown
  Bacterial polypeptide expressing nucleotide sequence isolated from the Sargasso Sea
tttgaacaaaatcttaataatagattttggttcgcaatttactcaattgattgctcggagaataagagaacttggagttttttctgaaattataagtcacaaaaaaattaaaaataaagatattactaattcaattaaaggtataattttgtcgggtggacctttaaatgtctatcaaataaatgattattcttttgataaaaagattatacaaaacgaaatacccgttttaggaatttgttttggtcatcaaattctttcaaaattaaatggaggaagagtaaagcaatctaaatacagagaatttggcttagcaaatatttacaaaaaaaaagaaagtattttaactaaaaatttttataatcaaaaaaatactaataaagtatgga

SEQ ID NO: 317146 - DNA, 823 bp, Unknown
  Bacterial polypeptide expressing nucleotide sequence isolated from the Sargasso Sea
catgaaggacttcatcgctattctagattttgggagtcaatatgcgcatctcatttcaaaacgtattcgtcatattggtgcctatacaagagttttttcaccctcgtctgatgaaaaattacttgcaaaggctaaggggataattttgtctggcggaccagcatctgttaattcaataaatattccagaatttaattcaaaaatactagagcttaataagcctattctggggttgtgttttggtcatcaattgattgcccattcatttggaggatcaatttcaaacactagcaaaggagagtttggaaaagctatgctaaaccaaaaatctgactgtcctctctgggaaaatatctcttttccaaaccaagtatggatgagtcatcatgatagtgttacaaaatgtcctgatgaatttgaagttactgcagaaacagaaacaggaagtttagctgctttaaaacattataagcgtccaatattcacgtttcaatttcatcctgaagtaaaggatacttcccagggagagattatgctaaaaaattttgttaacgtttgtgaagttcgctcaagatggtcaatggaatcctttatagagttaactacaaaacgtttaagtaacaaagttgtaaacaaaaaagtactaatgtttctgagtggaggagtagattcttcagtggcatttgctttgttacataaagtacttggaaatgaaaatttacttggattgtatattaataatggtttcatgcggaaacatgaaagtgaagaaatactttcactgtattctcaactaggatataaaaatatcatatccccgtga

SEQ ID NO: 317147 - DNA, 860 bp, Unknown
  Bacterial polypeptide expressing nucleotide sequence isolated from the Sargasso Sea
atcggttaccgcagctcttttaataaaggctattggtaataagttaatttgtgtatttgttgataacggactgttaagaaaaggcgaaccagatgaggtcatgaatacttttaaaaaaaatatgaacctaaatgtaattaaatcgaatagtgaagatatttttctaagacacttagagggtgtcgaggatcccgaacaaaaaagaaagattattggaagaacttttatagatgtctttgatgctgaagcaaataaactcaaagaaattaattttttagcgcaagggacaatttatccagatgtaattgagtcctcaggatcagaatctaaggaggcgagagttattaaatcacatcataatgttggaggacttccagatgagatgaatatggaattagttgaaccactgagagatttgtttaaagatgaagttcgaaagttaggagttgaacttggcttaccaaaagaaatgctgaacagacatccatttccaggtcctggacttggtgtaagaattttaggagaagtaacaaaagaaaaaacgacaatcctcaaagaagcagatcatatttttattgaagagctaattagagctgatttatatagaatggttagtcaagcttttgctgtattccttccaattaaatcagttggtgttgttggtgatgaaagaagatatgcagaagttattggacttagagcagttgagacagtagatttcatgacagcgagatgggctcaccttccttatgattttcttgaacatgtatcaagcagaatagttaatgagatagaacaagtgagtagggttgtttatgatatttctagcaaacctcccgcaaccatagagtgggagtaat

SEQ ID NO: 317148 - DNA, 772 bp, Unknown
  Bacterial polypeptide expressing nucleotide sequence isolated from the Sargasso Sea
aggagaagtagatgaggtaatgtcaacctttgaagctttagatattgatataagattagttgatgcatctgaattatttctttcaaaactttccggtgtaactgatccagaacaaaaaagaaaaattattggaaatactttcattgatgtttttgaaattgaagctaataaaataaaggatgtagattggttagctcaaggaactatctatcctgatgtaatagaatcttcttctgatgatcataattcaagcgtaattaaatcacatcataatgttggcggtcttcctgatcgaatgaacttaaagttgttagaacctatcagagagctttttaaagatgaggttagaaaaattggtgctgaattaaataccccagaacatattcttttgagacatccatttccaggtcctggtttaggaattagaattatgggggacatcaataaagaaagaattgatattttacaaaaagcagataaaatttttattgatgagcttaaagctaataacttgtatgattcattgagccaggcatttgtagtctatcttccagttaaatcagttggtgttgttggagatgaaagaagatatgaagatgttttagcattgagagctatagaaacagttgattttatgaccgcaaattgggcgcacctaccatacgatttcatcggaaaagtctctaatagaatcgttaatgagatttcttcaataagtagagttgtctatgactgtactggtaaacctcctgctactattgaatgggagtga

SEQ ID NO: 317149 - DNA, 778 bp, Unknown
  Bacterial polypeptide expressing nucleotide sequence isolated from the Sargasso Sea
atgagccactcagatgaggtaacaaagttaccaaaagattttaaaattatagctaaaagttctaactcaaaactatgcatagtagaaaatacaaaaaagaatttatatggaattcaatttcatcctgaagtaactcatacaaataaaggaaaaataattttaaaaaattttgtttttcatatatgcaaattaaaaaaaaactggtcaataaaaaaccaaaaaacaagacttattaaaaaaattaaaaatcaagttggaaattcaaaagtaatttgtgccttatcaggaggagttgatagtagtgtggttgcaaaacttttagctaatgcaattggaaaaaaattaatatgtgtttttgtaaatacaggattgttgagaaagaatgaggaacaccaagttataaatacttttaaaaaaaaattaaaaattaatttgatttatgtaaatgcagaaaaagaatttttgtctaaattaaaaaatatctcagaccctgaaaaaaaaagaaaaattataggaaatttatttataaaaatttttgaaaagtatgcaaaaaaaattcaaaatgttaagtttcttgcacagggaactctttatcccgatcttatagaaagcaaatcagttacaggcagccaaacttcaaaaatcaaatctcaccataatgtaggtggtttaccaaaaaaaatgaatttaagattagttgaaccattaaaatatttgtttaaaaaagaagtaagaaaacttgggttagaattaaatttgagtaaagaaaattatttga

SEQ ID NO: 317150 - DNA, 886 bp, Unknown
  Bacterial polypeptide expressing nucleotide sequence isolated from the Sargasso Sea
atgagtcatcaagatgcagttatcaaattaccgaaaaattttattaaaattgcatctactaataattctgctttatcggtcatagaaaacagagaaaataaaatttacgggatacaatttcatccagaagtgactcataccaataggggaaaaattatatttagaaattttatatataatgtttgcaaagttaagaaaaattggaaggctggtttagaaaagaaaagaataataaatgagatacgtaaagaagtgaaaaacaataaagtagtctgcgctttatccggaggtgtagatagcagtgtagttgcactaattattaatgaagcaataggctcaaaattaaaatgcataatggttgacacagggttaatgagaaaaaatgaatttaaatttacatcaaaaatttttaaaaaaaaatataagcttaatatcaagattattaatgcaaaaaaaatatatcttaataaattaaaaaatgtacaggatcctgaaaaaaaaagaaaaattattgggaatctttttattaaaatttttgaaaaggaagcaaagaaatttaaaaatgttaagtatctagcccagggaacattatatcctgatgttattgagagccaatctgccactggaagcaaaacttcaaaaattaaatctcatcataatgttggtggtttaccaaaaaaaatgaaactaaaacttttagagccattaagggaattttttaaagatgaggtcagatctttagcaaaatctttagatctaattccatctataagaaacaagcatcctttccccgggccagggttagcgataagaataattgggaaagtctctgaaaataaagtgaaaattcttcaagaggctgataatatttttattaacgaactac

SEQ ID NO: 317151 - DNA, 662 bp, Unknown
  Bacterial polypeptide expressing nucleotide sequence isolated from the Sargasso Sea
tagagaatttattagagtttttgaagaggagagtaatagattaggtcctttccaatatttggctcaaggcactctttacccagatgttattgagagtgctggaacgaatttagatcctaagactggtgagcgaattgcagtaaaaataaaaagccatcataacgtaggcggtttaccaaaagatttacaatttaaattagttgaaccattaagaaaactttttaaagatgaagtaagaaaggttggaggtgctttaggattgccagatgaaattataaaaagacatccatttcctggtcctggcttggcaataagaattttaggtgcagtttctcatgaaaaactaaactgtttgagagatgcagattggatagtaagagatgaaattaaaaaagcaggtctttataatgatatttggcaagcatttgcagttcttttacctgtcaagactgttggtgtaatgggagacaaacggacttatgcttggccaatagttttaagatgcgtatcaagcgaagatggtatgacggctgattggtcgagaattccttatgaaatcttagagagaatttctaatagaatcgttaatgaagtagagcaggttaatagagttgttttcgatattactagtaagcctccaggaacaattgagtgggaataac

SEQ ID NO: 317152 - DNA, 589 bp, Unknown
  Bacterial polypeptide expressing nucleotide sequence isolated from the Sargasso Sea
tggctggcgcaaggcaccatctatccggacgtcattgaatctgccgccagcaagaccggcaaggcccacgtcatcaagtctcaccacaacgtcggcggcctgccggaagagatgaagatgggtctggtggagccgctgcgcgagctgttcaaagacgaagtgcgccgcgttggcctcgagctgggtctgccctacgacatgctctaccgtcacccgttcccgggtccgggtctgggcgtgcgggtgcttggcgaagtgaagaaagagtactgcgatctgctgcgcaaggccgatgcggtctttatcgaagagctgcgcaaggccgacctctacaaccaggtcagccaggcgttcgccgtgttcctgccggtgcgctccgtcggagtcatgggcgatggtcgcaaatatgactgggtcattgccctgcgcgccgtcgagaccatcgattttatgaccgcccactgggcccatctgccgtacgacttcctgggtcacgtgtcgaatcgcatcatcaacgagatcaacggcatctcccgcgtggtgtacgacgtctccggcaagccgcccgcaaccatcgaatgggaataag

SEQ ID NO: 317153 - DNA, 801 bp, Unknown
  Bacterial polypeptide expressing nucleotide sequence isolated from the Sargasso Sea
ggtaaatcaaaagtaatttgtgctttatctggtggagtagacagcagtgtagtagctaaattaattcacaatgcagtaggaaaacaattaacatgtatttttgtcaatacaggccttctaagaaagaatgaagaaattcaagttgtaaaaacatttaaaaaaaaatttaaaataaatctaatttatgtaaatgctaaaaaattatttttaagacggcttaaaaaagttactgatcctgaaaaaaaacgaaaaattattggaaagttatttattaaaatttttgagaagtatgcaaaaaaaataaaaaaagttaaatatttagctcaaggaaccctttatccagatttaattgaaagtaagtcagtaacaggcagtcaaacgtctaaaataaaatctcatcataatgtcgggggactgccaaaaaaaatgaagctgaaattagttgagcctttaagattattatttaaggacgaggtacgaaagttaggcttagaactaaaattatcaaaacaaattgtattaaggcacccttttcctggcccaggtttagcaataagaatgcctggtgaaataactgaaaataaaattaaaattttgaaagaagctgattatatttttataaactcattaagagagcacaatttatataacaagatatggcaagcttacgctgcattgcttcccgtaaaaacagttggcgtaatgggtgataaccgaacttatgaatatatgtgcttgctaagagcaattacatctgaagatggtatgacagctgatttttttagcttttcaaaagaattt

SEQ ID NO: 317154 - DNA, 772 bp, Unknown
  Bacterial polypeptide expressing nucleotide sequence isolated from the Sargasso Sea
taaatcagtgtggatgagccatgaagatgcagttgttaaattacctaaaaatttcaaaattatcgcttacactaaagactcaaaattaacaatcattgaaaatagcaagaaaaaaatatatggagttcaatttcatcccgaagttactcatactgataatggtaaacaattatttaaaaatttcctttttttaatttgcaaggttaaaaaaaaatggaatgtaatttcacaaaaaaggagattaattaaagatattaaaaatgttacaaaaaataataaagtcatttgtgctttatctggtggagtagatagtagcgtagtcgctcttttagtacataaggcaattaaaaaaaacttaatttgcattatggtagacactggcttaatgagaaaaaatgaatttaaaattacttacaagctttttaaaaaaaaatataaacttaatgtaaaattagtcgactcatcaaatttatttatcaaaaaactaaaaaatgtaattaaccctgaaaaaaaaagaaaaattattggtcagttattcattaaaatatttgaaaaagaggcaagaaaatttaaaaatgtaaaatatcttgctcaaggaactttgtatccagatataatcgaaagtagatcttctagcggtagcaaaacatctaaaattaagtcccatcacaatgtaggaggtttgccgaaaaaaatgaacttaaaattaatagaacctttaaaagagttttttaaagatgaagtaagggttttgggtaattctttaggtctc

SEQ ID NO: 317155 - DNA, 786 bp, Unknown
  Bacterial polypeptide expressing nucleotide sequence isolated from the Sargasso Sea
aatgagtcttaattataaaatagataaaatcttaattatagattttggttctcaatttacacaactaatagcgagaagaattagagagcttggtgttttctctgaaataataagtcataaaaaagtaaaaaataaagatataaataattcaataaaaggcatagttttgtcgggcggtcctttaaatgtttatcaaataaacaaatactcatttgataaaaagattattgaaaatcaaatacctgtcttaggtatttgttttggacatcagattatttcaaaattaagtggtggtagagtgaaacattctaaacatagagagtttggactcgtaaatatcataaaaaaaaaagatagccctctaataaaaaatttttttaaaaataaaaaaaataacgtttggatgagtcatgcagaccaggtttcaaaattaccaaagaattttactgtaattgcctcaagccaaaattcaaagtttgctatagttgagaataaattaagaaaactttatggagttcaatttcaccctgaagtaacacatacagaaaatggaataaaaattatcggcaattttatttttgatatttgcagaataaagaaaaactggtcctcaaaagatcaaaaaaatagattaatcaaagatgtaagagaaatagttggtaataataaagttatctgtgcattatcaggtggagttgacagtagcgttgttgcacaacttctaaataaagcaatttgggaaaagttatattgtgtttttgtaaatacaggtttgttgagaaaaaa

SEQ ID NO: 317156 - DNA, 913 bp, Unknown
  Bacterial polypeptide expressing nucleotide sequence isolated from the Sargasso Sea
ttccaatgattgggaggtggttgcatacagctcaaataatattgtcgccgcaattgctagtaatgataacttgagatttgctactcaatttcatcctgaggtttctcacacggaagagggtgacattttattaaataattttctttttcatatttctgattgtgataaaaattggacagcaggaaattttgttaatgaagagatctcctcattgaaaaataagatcggtaaagatagaattttagtaggtgctagtggtggagttgactctactgtagttgccagtttaattaacaaagcggtagggggtaaatgtcttgctgtgctcatagaccatggtttaatgagaaaaaatgaggccagggactgtgtgaatgctttaaagcaagggcttggaatgaatattcatttgtatgatgaatcagaggtgtttttctcaagattaaagggaataaaggatccagaagaaaagcgaaaggtcattggggaccagtttattcaatcatttgatcgaattgcatctgagatcggaaaatttaaatttcttggtcaaggtacattatacccagatattatagagagtggtgtaagtgctgggaaatctgcacatgtaataaaaagtcatcataacgttggtgggctaccggaaaaaatgaattttgaattaattgaaccattaaaagatctgttcaaggatgaagttagaaaagtaggaagcgaattaaatatttcagatgaactaacgaaaagacatcctttcccagggccgggtctcgctgttaggattattggtgaaataacgaaggagcgtgtgtctatacttcaagaggcagatgagatattcataaatgtattaaaggaagagcaggagtatgataatatttggcaagctttcgcggttttaattcccgta

SEQ ID NO: 317157 - DNA, 580 bp, Unknown
  Bacterial polypeptide expressing nucleotide sequence isolated from the Sargasso Sea
aaaattaagtctaaaaagatcaatgtatggatgagtcacggcgatcatgtctctaagttacctaaaggctttaaatcttgcgcgaccacctcaaacagtcctatagctgctttgtatcatcctactaagaagatatttggacttcaatttcatcccgaggtgactcacacgccacaaggcaagcaaatactcaagaatttcgtaagagagatatcaaattgcaaaggtctttggaattctaagaacattattaccaaagcagttgaagagattaaaagagaggttggtgatcaagaagtgttactcggtttgtcagggggagtagattctgcagttgtggctgctcttttatctaaagcgataggagatcaactcacttgtatatttgttgataacggccttttacgattgaacgaaggagatcaggtgatgaacaccttcaaagatagatttggtattaaagtaaagagagcaaatgccggtaatcaattcttaaaagaccttaaaggaaaaagagaccctgaacataagcgcaaagccatcggtaaaacttttattgatgtttttcttaaagaagcaa

SEQ ID NO: 317158 - DNA, 598 bp, Unknown
  Bacterial polypeptide expressing nucleotide sequence isolated from the Sargasso Sea
atgactaaactgtcagttgaagacaaaaaaattgatactattttagttttggattttggatcccagtatactcaattaattgcaaggagaataagagagagtaatgtttactcagaaatcctaccgtgggatattgatgaatcaaaaataattgatctcaatccaaaaggtataattttatcgggtggaccaaattctgttactgaaagttatacacccaggcttcctcaaagtgtttttgatttaggcattccaattcttggaatttgttacggaatgcaaactcttgcggaacagatgggaggacatgttatttcatcagatcaaaaggaatttggtcattcagaacttacaattgttaaggattcagttttatttaaaaatttaaaaaagcaaataaatgtttggatgagtcacggcgatcaggttcaagatataccagatgaatttgatttgatagctgcaaccgaaactgctcctatatcagctatggaacatattaatttgcctatatatgctattcaatttcatccagaagtaacacatacagaagacggaaaaacaatattagataactttatttttgaaatatgtggtg

SEQ ID NO: 317159 - DNA, 834 bp, Unknown
  Bacterial polypeptide expressing nucleotide sequence isolated from the Sargasso Sea
actcatttaagtcaaattatagaaagaaatccttcagctataattttatctggtgggccatcaagtgtctttggagatgaggcgccaatctttgataagaaaatctttgatattgatgttcctattttaggtatttgctatggtcttcagttattagcccatcatcacggtggtcttgtagaatctaatggccagggagaatatggttttgctgaaattgaaattgatgatgataaaaagctttttcaaaatgttccaaaattttcagaggtttggatgagtcatatggatcgagtaacaaaattacctgatggatggcatacattagcgcattcctctaatggtgttattgctgcaatggcaaataaggatgaaacaagagtagcaacccaatttcatcctgaagttattcattctaaagaaggaaaaaatattcttaaaaactttttatttaatatttctaattgttatgctaattggacagctgaaaattttgtagaacaaaaagtaaaattgatcagagaagaagttggaaaatctaatatccttgttggtgtcagcggaggagtagattctacagttgttgcagctttaatgaataaagcagttggccctcaatgtaatgcagtcctaattgaccatggattattaagaaaagatgaggcagaaaattgtgttactgctcttaaagaggggcttggagttaatatacattgctataatgaatcaaaaatatttttatcaaagcttaaaggagttactgacccagaaaagaaaagaaaagttataggtaatcaatttatttttgcgtttgaaaaaatctcaaaggaattc

SEQ ID NO: 317160 - DNA, 787 bp, Unknown
  Bacterial polypeptide expressing nucleotide sequence isolated from the Sargasso Sea
atgagtcttgatcaaaatttagataaaatcttaatcatagattttggatcacaatttactcagttgatagctagaagaataagggaactgggtgttttttcagaaatagttagtcataaaaaaattaaaaataaagatattgataattctattaagggtttaattttatctggaggccctctaaatgtttatgaaataaataaatattcatttgataaaaaaataattaaaaatcaaataccagttttaggcatttgttttggtcatcaaattctatcaaaattaagtggtggtcaagtcaagcaatctaaacatagagagttcggcttagcaaatatttataaaaaaaaagatagtcttctaactaaaaaactatttgataataaaaaaaaaattaaagtatggatgagtcatgctgatcaagtttcaaaattaccaagaaattttaaagtaatagcttctagtcaaaattcaaaatttgcaatagttgaaaacaaatctaaaaaattttatggagttcaatttcaccccgaagtaactcatactgaaaatggaaaaaaacttattagaaattttatttttttgatatgtagaataaaaaaaaactggtcttcaaaagatcaaaaaattagattaattaaagatattagaaatcaagtgatgaataataaagttatctgtgcactttctggaggagtagatagtagtgttgttgcacaattattaaacaaagctatcggaaaaaatttatattgcatttttgtaaataccaggacttctaaggaaa

SEQ ID NO: 317161 - DNA, 700 bp, Unknown
  Bacterial polypeptide expressing nucleotide sequence isolated from the Sargasso Sea
atgacacttgagccaaacttaaataaaattttaatcgttgattttggctcacaatttacacagctcattgctagaagaataagagaattaggagttttttcagaaataattagtcacaaaaagatcaaaaaaaaatatattggcgaaggggttaagggtattatcttatctggtggacctttaaatgtatacgaaaataaaaagtattcatttgataaagatataattgaaagtaatgttcctgtccttggaatttgttttggccatcagattatttcgaaagtaaatggaggcaaagtaaaacaatcaaaacatagagaatttggtttagcaaacattaaaaaaaagatggaaagtccattaacaaaaaacttttttaaaggtaaaaaattaattaaagtttggatgagtcatgctgatcaagtttcaaaattaccaaaaaattttgaagtaattgcttcaagtcagaattctaagtatgccattgtagaaaataagataaagaaactctatggagttcaatttcaccctgaagttacacacactcagaatggaaaaaagattttaagtaattttgttttctttatctgcaaaataaaaaaaaactggtcttctagggatcagaaaaaaaaattgatcacagatataagaagaacggtggaaaaaataaagttatttgtgcactttctggaggtgtgat

SEQ ID NO: 317162 - DNA, 649 bp, Unknown
  Bacterial polypeptide expressing nucleotide sequence isolated from the Sargasso Sea
atctcaaaaaaaaagaattatattagatattaaaaaagtagtaaaaaatgagagagttttatgcgctttatccggaggagttgatagtagcgttgttgccttgctgattaatcgagcgataaaaaaaaacttaatttgtattatggtagatactggtctaatgagaaaaaatgagtttaagtatacttataaaattttcaaaaataaatataaatttaatgtaaaattaataaatgcttctagtatatttttaaaaaaattaaaagatatttctgacccagaaacaaaaaggaaaataattggtaaactattcataaaaatattcgaaagagagtcaaaaaaaatcaaaaatgtaaaatttcttgctcaaggcacactctatcctgatgtaattgaaagtaaatcagctacaggcagtaaaacctctaagataaaatctcaccataatgtcggaggtctaccaaagcgcatgaactttaagttaatagagcctttaagagaattttttaaagatgaagtaagaattttaggaaaatccttaggtttatcaaaagatatttataatagacatccttttcctggccctggtttagcaataagaattctaggaaagatttcctctgaaaaaattaagattcttcaggaagca

SEQ ID NO: 317163 - DNA, 676 bp, Unknown
  Bacterial polypeptide expressing nucleotide sequence isolated from the Sargasso Sea
ttattttttgaaaactctttcaccaaaagcaattatattatcaggtggcccaaaaagtgttaatgagcaacatagtccaaaagtaaattctgttgtttataaattaggaataccaatacttggtatttgctatggacaacaattaatgatgcatcagctcggtggaaaagtacaaaatagcaaattttcatcagagtttggaagagcatttctaaaactaaaaaaagaaacaaaactactcgaaggctggtttaatgattctaaggaagtagtttggatgagtcatggagaccacgtttcaaaaatagcaccaggatttgaagtatttgctatctctaaaaatgcacctcttgctgtagttgcagatataaaaagaaacttttatggtgtccaatttcatccagaagttcatcataccccaaaaggcattgtactttttgaaaattttttgaaaattgccggttttaatggtgattggacaatgcaggcatataaaaaagaaatgatccaaaatataaaagatattgttaaaaaagatagagtaatttgcggtatttcagggggtgtagatagtacagtgactgcaactttactccataaagctattaataaacagctaacctgcattttcgtaaatcatgggttcctaagaaaatatgaagaaaaagaagtttta

SEQ ID NO: 317164 - DNA, 445 bp, Unknown
  Bacterial polypeptide expressing nucleotide sequence isolated from the Sargasso Sea
aatgagtcttgatcaaaatttgaataagattttaattgttgattttggttcacaatttacacagttaatagcaagacgagttagagaattaggaattttttctgagatagtaagtcacaaaaaaattaaaagtaaaaatatcaatcacacgatcaaaggtattattctatctggtggtcctttaaatgtttatcaaattaataaatactccttcgataaaaagataattcaaaaagacgttccagttttaggcatttgttttgggcatcaaataatatctaaattaaatggtggaaaagtgaaacaatctaaacatagagagtttggtttagctaatattacaaaaaaaaataatagtcttttaattaaaaatttatttaagaaaaaaaagtcaattaaagtttggatgagtcacgctgatcaagttcaaaatacccaaaaattt

SEQ ID NO: 317165 - DNA, 730 bp, Unknown
  Bacterial polypeptide expressing nucleotide sequence isolated from the Sargasso Sea
atgagtcttgaagataatttaaataaaattttaataatagattttggctcacaattcactcagcttattgcaagacgtattagagagcttggggtttattcacaaataattagtcataaaaaaataaataatcatattctaaaaacaaaaaatataattggtattattttgtcagggggaccactcaatgtttatgaggtaaaaaaagtaaaatttaataaaaaaatacttaattcaaaagttcctatattaggtatatgttttggtcaccaaattatagccaaggagtttggaggaagtgttaataaatctaaggtaagagaatttggtctagctaatataaaaagaattaaaaaaagtatactaacaagaaacttttttaatagaaatggcttgaataatgtttggatgagccattctgatgaggttacaaaaattccaaaaggatttaaggtcattgcatcaagtaaaaactctaaatttgcagctatagagaataaatcaaagaatttttatggtatccaatttcatccagaggtaacccatactcacaatggaaaaaaattgattaaaaacttcattttctcaatttgtaaagcacaaagaaactggtcatctaaaattcaaaaaaaaataataataaataatgtaaaaaattctgttggtacatcaaaagtaatctgtgctctatcaggaggagtagacagtagtgtagtagctaaattataaa

SEQ ID NO: 317166 - DNA, 604 bp, Unknown
  Bacterial polypeptide expressing nucleotide sequence isolated from the Sargasso Sea
tttagcacaaggtactctttatcctgatgttattgaaagtgctgggactaatattgatcctaaaacaggagaaagaatagctgtaaaaataaagagtcatcataatgtgggtggattgccaaaagatttacaatttaaattagttgagccattaagaaacctttttaaggatgaagtccgaaaagtgggtgctgctctagggttgccggatgaaattgtaaaaaggcatccatttccaggaccaggattagctataagaattttgggagaggtgaataatgaaaaacttgattgtttaagagatgcagactggatagtaagagatgaagtcaaaaaagctggtctttacaatgatatttggcaagcttttgctgtattgctacctgtaaaaacagtaggagttatgggtgataaaaggacttatgcatggccaatagttttacgttgtgtatctagtgaagatggtatgacagccgattggtcaaaaattccttttcagattttggagaggattgcgaatagaatcgtaaacgaagtaagttcagttaatagagttgtttatgatattacaagcaaacctcctggaactattgagtgggagtaa

SEQ ID NO: 317167 - DNA, 364 bp, Unknown
  Bacterial polypeptide expressing nucleotide sequence isolated from the Sargasso Sea
ccaggattagcaataagaattttgggtgaagtgaccaatgaaaaactagattgtttaagagatgcagactggatagtgagagatgaaattaagaaagcaggtctttataatgatatttggcaagcttttgcagtattgttaccggttaaaactgtaggagttatgggtgataaaagaacttatgcatggccaatagttttacgctgtgtatctagtgaagatggtatgacagcagactggtcaaaaataccttttcaaattttagagagaatttctaatagaatcgttaatgaagtagtttcagttaatagggttgtttatgatattacaagcaaacctcctggaactatagagtgggaataaa

SEQ ID NO: 317168 - DNA, 796 bp, Unknown
  Bacterial polypeptide expressing nucleotide sequence isolated from the Sargasso Sea
aatgagtcttgaacaaaatttgaataaaatcttaataatagactttggttctcagtttacgcaattaatcgcaagaagagtaagagaattaggtgttttttcagaaatagttagtcacaaaaagataaaactaaaagatataaatagcagtattaaaggagtaatattatctggtggtccattaaatgtttatcaaataaataagtattcatttgataaaaaaattttacaatttgatttgccagttctcgggatatgttttgggcatcaaattttatcaaaacttaatggtggaagagtaaaacaatcgaaacatagagaatttggcctagctaatgtttttaaaaaaaataacagccttttaacatctaatttttttggaaataaaaaatctaaacaagtttggatgagtcatgctgatcaggtttcaaaactgcctaagaatttcaaagttattgcatcaagtacaaattcaaaatttgcaattgttgaaaataaaataaaaaaatattatggggttcaatttcacccagaggtgacccacacagagaatggaaaaaaattaataagtaattttatttttttaatttgtaaaattaaaagaaattggtcctctaaacatcaaaaaaatcagcttattaaggatgttagaaaacaagttggaaataataaagttatttgtgcattatcaggaggtgtagatagtagtgtagttgcccagttattgaataaagctattggaaaaaaactttattgtatttttgtaaacactggccttctaagaaaaaatgaggaa

SEQ ID NO: 317169 - DNA, 352 bp, Unknown
  Bacterial polypeptide expressing nucleotide sequence isolated from the Sargasso Sea
atggcaaagaatatccttgccgataagattttaataattgacttcggttcacagtacacgcaactcattgccagaagagtaagagaattgggtgtttattgcgagatatacaaccatcgtgcttctcttaaatctattaaagactttaacgccaaaggcatcatcctgtctggaggtccagaaaccgtaaagcaaaaaggttctcctaaaataccggacaaagtatttgatttaggcatcccacttcttggtatttgctatggcatgcaatccatagccaagcaactcaaaggaaaagttgaattggcggataaacgagaattggacatgctgatctattgtgaaaaataaa

SEQ ID NO: 317170 - DNA, 649 bp, Unknown
  Bacterial polypeptide expressing nucleotide sequence isolated from the Sargasso Sea
aattggaaatttatttataaaaattttcgagcgatatgcaaaaaaaattaaagatgttaagtttttagctcaaggaacgctttatcctgatttgattgaaagtaaatcagttactggtagtcaaacttctaaaattaaatctcatcataatgttggtggtttaccgaaaaaaatgaaccttaaacttgtcgagccactaaagtttttatttaaagatgaagttagaaaattaggcttagaattaaaattaagtaaagagatcatatcaaggcatccttttccaggccctggtttagcaattagaatgccaggaaaaatcactaatgagaaaataaaaattttaaaagaggcagattattatttcatacaagctttaaaagatcgtggtctttatcataaaatttggcaagcgtatgctgctctgctacctgtcaaaactgtaggggtgatgggagacaaccgtacttatgaatatctctgtctcttaagagcaattacctctgaagatggaatgacagcagatttctttgaatttagaaaatctttcatgcaaactatttctaataaaatagttaatagcataagaggcataaatagagttgtttatgacgttacctcaaaacctccaagtactattgaattagagtag

SEQ ID NO: 317171 - DNA, 828 bp, Unknown
  Bacterial polypeptide expressing nucleotide sequence isolated from the Sargasso Sea
tttgaacaaaatcttaataatagattttggttcacaattttttcagttaatagccagacgaataagagagtcaggagtttattccgaaattattagtcataaaaaggttaaaaataaaaatattgataattcaattaaaggaataattttatcaggcggaccattaaatgtttaccaaattaataaatattcttttgataaaaggattatagaaaatcaaataccagtcttaggtatttgttttggtcatcaaattttatcaaaacttaatggtggcagagttaaacaatcaaaatatagagagtttggattagcaaatattcggaaaaagagggaaagtattttgacaaaaaacttctttaataaaaaaaatattaataaagtttggatgagtcacgctgaccaagtttctaaacttcctaaaaattttgatgttattgcctcaagtcaaaactcaaaatttgctattattgaaaataagaaaaaaaaattttatggtgtccagtttcatcctgaagttacccacacagaaaatgggaaaaaattaataaacaattttatatttttagtatgtaaaattaaaagaaattggtcatcaaaagatcaaaagattaaattgattaaagatgttcaaaatttagtcggtaaaaataaagtaatatgtgcattatcgggtggagttgatagcagtgttgtcgctcaactattgaataaagcaattggtaaaaaattattttgtatcttcgttaacacaggtcttcttagaaaaaatgaggaaatacaagtagttaaaacttttaaaaaaaaattgaaaataaatctaattta

SEQ ID NO: 317172 - DNA, 794 bp, Unknown
  Bacterial polypeptide expressing nucleotide sequence isolated from the Sargasso Sea
tggtcttctaagaaaaaatgaggaagtacaagtggttcaaacttttaagaagcgtttaaaaatgaatttaatttatgtaaatgctgaaaaagaattcttaaaaaagttaaaaaatgtttccgatccagagaaaaaaagaaaaataattggtaatttatttattaaaatatttgagagatatgctaagaaaattaaaaatgttaaatttttagcacagggaactctttatcccgatttaattgagagcaagtctgttactggcagccaaacttcaaaaataaaatctcatcacaatgttggtggtttgcccaaaaaaatgaatttaaaattagtagaaccactaaagtttttatttaaggacgaggtaagaaaattaggattagagttaaatttaaccaaagaaattatttcaagacacccttttcctggaccaggcttagcaattcgaatgccaggtattataactaatgtaaaaattaaaattttaaaagaagctgattattattttattcaagccttaaaagatcacggtatttatcataagatttggcaagcatatgcagctttgctgccagttaaaactgttggtgttatgggagacaatcgaacttatgaatatttgtgtttattaagagcaattacatctgaagatggaatgaccgctgactattatgaatttaaaaagtcttttatgcagtctatttcaaataaaatagtaaatagtataaggggtattaatagagtcgtttatgatgttacatcaaagccaccaagtactattgaattagagtaat

SEQ ID NO: 317173 - DNA, 599 bp, Unknown
  Bacterial polypeptide expressing nucleotide sequence isolated from the Sargasso Sea
gacctaaaattctacgccgtgcagttccacccggaagtggtacacactccagatggtggaaagttgctgaccaatttcgcccacaatatctgcggttgcaggggtacgtggactatgtccgctttcaaagatgaggcggtccaaaagattcgcgaccaggtaagtgatggcaaagtaatttgtggcctttcaggaggcgtcgactcatcggtcgtcgccgtgttgttgcatgaagctattggagatcagttgcaatgtgtgttcgtagaccatggcctcatgaggattaacgagccggacgaggtggtccgtctattccgagatcacttcaacattccccttgtccaccgggatgcgtctactctgttcatcgatgcgcttgaaggtgtgaccgaccctgaggtcaagcggaagattattggcaagctatttatcgatgtcttcgaagaagaggcaaaaaatattggcggcgctaaatttttggcccaaggcacgttatatcccgacgtgattgagagcgtttccttcactggcggacctagcgtcaccattaaatcgcaccacaacgtgggtggtctgccggaacgcatgaatatgaa

SEQ ID NO: 317174 - DNA, 810 bp, Unknown
  Bacterial polypeptide expressing nucleotide sequence isolated from the Sargasso Sea
aaaatatttagaattaaacattccaattttaggaatttgctttggtcatcaaattttatcaaagttaaatgggggaagtgtaagacaatcaaaacatcgtgaatttggattagccaatatttttaaaaaaagggacagcttactaactaaaaatttctatggtgttaaaaaaactaaagaggtttggatgagtcatgcagatcaagtgtctaaactaccgaaaaattttcaggtcatcgcgtctagtacaaattctaaatatgccatagttgaaaataaacttaaaaaatattatggaatacaatttcatccagaggttacacatactgaaaatggaaaaaaactgatcagtaattttgtatttttaatctgtaaaattaaaaaaaattggtcttccaaagatcaaaaaataaaattaatcaaagaaataagagatcaagtaggtacccataaagttatttgtgctttatctggaggagtagatagtagtgtcgttgctcaattattaaataaagcaatcggtaagaaattatattgtatttttgttaatacaggacttttaagaaaaaatgaggaaactcaagtagttcgaacttttaagaagaaattaaaaatgaacctcatctacgtaaatgcagaaaagcaatttttaggaaaactaaaaaatgtttccgatccagaaaaaaaaagaaaaataattggaaatttatttataaaaatttttgaacgatatgcaaaaaaaattaaaaatgttaaatttttagcccaaggaacgctttatcctgatttgattgaaagtaaatcagttac

SEQ ID NO: 317175 - DNA, 829 bp, Unknown
  Bacterial polypeptide expressing nucleotide sequence isolated from the Sargasso Sea
attgggtaagaaattatattgtatatttgttaatacaggccttttaaggaaagatgaggaaaaacaggtagttcgaacctttaaaaaacgactaaaaataaaccttatctatataaatgctgaaaaggagtttctgagaaaattaaaaaacgtttctgagcctgaaaaaaaaagaaaaataataggaaatctatttataaaaatttttgaacgatatgcaaaaaaaattaaaaatgttaaatttttggctcaagggacgctttatcctgatttgattgaaagtaaatctgtcactggcagtcaaacttctaagattaaatctcatcataatgttggaggtttaccaaaaaaaatgaacttaaaacttgttgagccattaaagtttttatttaaagatgaagttagaaaattaggtttagaattaaaattaaatgaagagattatatcaagacacccttttccaggccctggactggcaattagaatgccaggaattattactaatgaaaaaataaaaattttaaaagaagcagattattattttataaaagcattaagagatcatggtctttatcataaaatttggcaagcatatgctgctctcttacctgtcaaaactgtaggtgtgatgggagacaatcgtacttatgaatatctctgcctcttaagagcaattacgtctgaagatggaatgacagctgatttctttgaatttagaaaatctttcatgcaaactatttctaacaaaatagttaatagcataagaggcataaatagagttgtttatgacgttacctcaaaacctccaagtactattgaattagagtag

SEQ ID NO: 317176 - DNA, 742 bp, Unknown
  Bacterial polypeptide expressing nucleotide sequence isolated from the Sargasso Sea
aaatttaaattaaatttgatttatataaatgctgaaaaagactttttgaagaaattaaaaaatgttatagatccagaaaaaaaaagaaaaattataggaaatttatttataaaaatttttgaaaaatgtgcaaaaaaaattaaaaatgttaaatttctagcacaaggaactctttaccccgatcttatagagagtaaatcggttactggaagccaaacttcgaaaattaaatctcatcataatgtcggaggtttaccaaaaaaaatgaatttaaaattagttgaacctttaaaatatctttttaaagatgaggtgagaaaactaggtttagaattaaatttaagtaaagaaattatttctagacatccttttccaggcccaggtttagcgataagaatgcctggcataataacaaaagataaaattaaaatattaaaggaagctgactactattttataaaatcattaaaggaaaataatttgtatgataaaatatggcaagcgtatgctgcactattgccagttaaaacagtaggcgttatgggtgataatcgtacgtatgaatacttgtgtttattaagagcaattacttctgaagatggaatgacggcagattttttcgaattcaaaaaatcatttatgcagtcaatatccaaccaaatagtcaataatataagaggaataaatagagtagtttacgatattacatctaaacctccaagtactattgaattagagtaat

SEQ ID NO: 317177 - DNA, 697 bp, Unknown
  Bacterial polypeptide expressing nucleotide sequence isolated from the Sargasso Sea
aatgactaaagacattcaccagcaccgtatccttatcctcgacttcggttcccagtacacccagctgatcgcccgtcgcgtgcgcgaaatcggcgtctactgcgaactgtgggcctgggatgtgaccgaagagcagatccgcgaattcaatccgagcggcatcatcctctccggcggccccgagtccgtcaccgaagcgggcagcccgcgcgcccccgagtacgtgttcaacgccggcgtgccggtgttcggcatctgctacggcatgcagaccatggccgagcagctgggtggcaaggtgcaatcctccaccgagcgtgaattcggttacgccaaggtggaagtgctgggcaactccggcaagaccagtgcgctgctgcgcaacatcgaagatgccatcgccgacaacggcaatgcgctgctggacgtgtggatgagccatggcgacaaggtcaccaccatcccagccgacttcaccaccatcgcccagaccgccacctgcccgcacgccgccatggccaacgaagccaagcgtttctacggcgtgcagttccacccggaagtgacccacacccgtcagggtgcccgcatgctggagcactttgtcaaagacatctgcggctgcgaatgcctgtggaccccggccaccatcatcgacgacgccgttgcccgcatccgcgagcaggtgggtgacgac

SEQ ID NO: 317178 - DNA, 794 bp, Unknown
  Bacterial polypeptide expressing nucleotide sequence isolated from the Sargasso Sea
aatgatatttattgttgattttggatctcaagtaacacagttaatagctagaagagtaagagaagccggagtctattgtgaaattgtgtcaagcaaatcaatttataagcaaatacttaatagaggatgttcaggaatagttttctctgggggtccagcaagtgttcataagtcaaatactccaaaaattgacaaaagaatatttaatctaaatatcccaatattgggaatttgctatggtatgcaattactatgttatcaacttggtgggaaggttaaaatttcaaaaaaaagagaatttggtaaaactcttataaagccctcaaaaaaaagtgttttattctcaggatttagaaaaggaatgagctcgaattatgtctggatgagccatggtgacaaggttattagtctaccaagagattttaaaagcattgcatcaagttcaaatactaagtttgcagcagttgagaataaaaaaaaatcttattatggtttacaatttcatcctgaagttgttcatacgcctaatggtcataagataatcgaaaattttatatttaaaatttgcaaggtaaaaagaaactggagcatgaaaaatcatttaagaaatcagattactgaaattcaacattctgttcataaggatcaggtaatttgtggattgtcgggtggagtggatagtactgtcactgcagctataatttcaaaagccataaataagcaattaacatgcatttatgttgatacaggtttaatgagactaaatgaaacaaaagaagtagtaaaaatgtttt

SEQ ID NO: 317179 - DNA, 316 bp, Unknown
  Bacterial polypeptide expressing nucleotide sequence isolated from the Sargasso Sea
acggcgcaggacgctgccgctggcctctgcggcgaaggcgatgtgggcaagagctggtacgacctgaccagccaggcgtttgcggtgttcctgccgatcaagtccgtcggcgtgatgggcgatggccgcacgtacgactacgtgacggcgctgcgcgcagtgcagaccaccgatttcatgaccgcacattgggcgcatctgccgtacacgctgctgggccgcgtgtcgaaccgcatcatcaacgaggtgcgtggtttgagccgcgtcgtgtatgacgtgtcgggcaagccgcccgcgacgatcgagtgggagtgat

SEQ ID NO: 317180 - DNA, 865 bp, Unknown
  Bacterial polypeptide expressing nucleotide sequence isolated from the Sargasso Sea
gatgatttgatagaccaaagagttaaagaaattaaaaatcaggtaggagataacaaagtcttgcttggcctttcaggcggagttgactcttcagttacagcagctcttttacataaagctattggtaaaaagcttgtgtgtgtttttgtcgataatggattattaagaaaaggcgaagcagaagaagttatgaatacttttaaagaaaatatgaacttaaatgttattaaatctgatagtgaagaagttttcttaagacatttaaaggatgttgatgatcctgagcaaaaaagaaaaattataggtagaacttttatagatgtattcgatgctgaagcaaaaaaattaacagaggtacattttttagctcaaggaacaatatatccagatataatcgaatcttcaggctcagaatctaaagaggcaagggttattaaatcacatcataatgttggtggacttccagaagaaatgaagatggaattagttgaaccattaagagacctttttaaagatgaagttagaagaatgggagctgagctaggcctttcaaaagaaatattaaatagacatccattcccaggacctggacttggagtaagaattttaggagatattactaaggaaaaaattacaattcttaaaaatgcggatcatatttttattgaggagcttataaaagctgatctttataacaaagtaagccaagcctttgcagtttatctgccaataaagtcagtaggtgttgttggtgatgagagacgatatgctgaggttataggcttaagagcagtagagacagtagattttatgactgcaagatgggctcatcttccttatgatttccttgaacatgtatctaaca

SEQ ID NO: 317181 - DNA, 582 bp, Unknown
  Bacterial polypeptide expressing nucleotide sequence isolated from the Sargasso Sea
cacaaggaactctttatcctgatcttatagaaagcaaatcagttactggaagtcaaacttctaaaattaaatctcatcataatgtaggaggtcttccaaaaaaaatgaatttgaaattagtagagccattaaaatttttatttaaagatgaagttagaaaattgggactagaattgaatttaagtaaagaaattatttcaagacatccatttccaggaccaggattagccattagaatgccaggcataattacaaatgaaaaaataaaaattttaaaagaggcagattattattttatccaagctttaaaagatcatggtctttatcataaaatttggcaagcttatgccgctttactaccagttaaaactgtgggagttatgggtgataatcgtacttatgaatacctatgtttattaagagcaatcacctcagaagatggcatgacagcagattattatgaatttaaaaagtcttttatgcaaactatatcaaacaaaatagttaacagtataagaggtataaacagagtggtttatgacgttacatcaaaacctcctagcactattgaattagaataaa

SEQ ID NO: 317182 - DNA, 814 bp, Unknown
  Bacterial polypeptide expressing nucleotide sequence isolated from the Sargasso Sea
gtctgtattttcgtagacaatggtcttcttcgtctaaatgaaggtgatcaggtcatggagacattctcagagcatatgaatctcaatgtcatcagagtcaatgctgaggatatttttttggagaggcttaaaggtattgatgatccagaggacaagagaaaaataattggtcgaacattcatagaggtttttgaggatgaagcttcaaagttagaaaatgtgaaatggttggctcaaggaaccatttacccagatgttatagagtcagcaggatcgaagacgggaaaagctcatgtaattaagtcacatcataacgttggcggtctccctgaggatatgaaattaaaactggtagagccactcagggatttattcaaagacgaggtaagaaaaattggcaaagaacttggactgacgtcaaagttggttgatcgacatcctttcccaggtcctggcttgggagtgagaatcttaggagaagttaaaaaagagtacgctgatctattgaggttggccgacgatatttttattgaggaactacataaagagaatctatacgacaaagtaagtcaggcatttgcagtttttctaccagtcaaatctgttggcgtcatgggcgatgggagaaaatatgaatatgtcattgctttaagagcagtggagacaactgattttatgacggcaaattcggctaaattaccttatgaatttttggatcatgtatcaacacgaatcatcaatgaagtctctggtatttcaagagtcacgttagatatatcttcaaaaccaccatcaactattgagtgggaataaa

SEQ ID NO: 317183 - DNA, 547 bp, Unknown
  Bacterial polypeptide expressing nucleotide sequence isolated from the Sargasso Sea
agcaggatccaaaacaggaaaagcgcatgtaattaagtcacatcataacgttggcggtctccctgaggatatgaaattaaagctggttgagccgctcagggatttatttaaagacgaggtaagaaaaataggcaaagaacttggactgtcctcaaagttggttgatcgacatcctttcccaggtcctggcttgggagtgagaatcttaggagaagttaaaaaagaatacgctgatctattgaggttggccgatgatatttttatcgaggaactacataaagagaatctatacgacaaagtaagtcaggcatttgcagtttttctaccagtcaaatctgttggcgtcatgggcgatggaagaaaatatgaatacgttattgcactaagagcggttgagacaactgattttatgactgccaattcggctaaattgccctatgaatttttggatcgtgtatcaacacgaatcatcaatgaagtctctggtatttcaagagtcacgttagatatatcctcaaaaccaccatcaactattgagtgggaataa

SEQ ID NO: 317184 - DNA, 823 bp, Unknown
  Bacterial polypeptide expressing nucleotide sequence isolated from the Sargasso Sea
agaccaattgacatgcatttatgtggataccggtttaatgcgagagaatgaaacggatgaagtggtaaatctatttagagaaaattttaatattcctcttatagatgttgatgcaggcgatacttttttaactagattgactggagtaagtgatcctgaagaaaaaagaaaaattattggttcttcttttatcgatatttttgaagaagaggcaaataaaattggcggagctgattttttagctcaaggaactctttatccggatgttattgagagcgtttcttttacgggcggaccatctgtgacaattaaaagccatcacaatgtaggagggcttccagaacgaatgaatatggagctagtcgagcctttacgagaactttttaaagatgaggtcagagaactcggaaaagaactaggaattcccagtcactttattgagagacacccattcccaggtcctggacttgcaattcgtttacctggtgaaatttcttctgaaaaagccgatattttaaggaaagctgacactatttatattgaagagataagaaaagccggactttataatgaaatttggcaagcttttgctgtacttttacctgttcagacggttggtgtgatgggagacgagagaacatatgattttgtttgtgctttaagggctgtgacttcacttgatggtatgacagcggattattatccttttgaacaagagttcttagctaatgtaagtactcgtattattaatgaagtaaaaggaattaatagagtggtttacgatataacatcaaaaccacccggcactattgagtgggagtag

SEQ ID NO: 317185 - DNA, 398 bp, Unknown
  Bacterial polypeptide expressing nucleotide sequence isolated from the Sargasso Sea
aagaataactctcaggtatggatgtctcatggagatacgattatttctgaaccttcagattcttcgattatatgtagcacaaaagatgttcgtgttgctggttttaaaataaacaatgaagaaacttatggcattcagtttcatcctgaagtttaccatacagaaggtggattatctatcatgaaaaatttcattgtcacaatttgtaattgttctcaagaatggacacctttttcttttgtagaagaaacagtttctaaacttaagaataaactaggaagtgattctgttattatgggtttatctggtggagtagattcaactgttgcatctgttcttttgcataaagcaattggagaaaagttgcattgtatttttgttaataatggcttggttcg

SEQ ID NO: 317186 - DNA, 781 bp, Unknown
  Bacterial polypeptide expressing nucleotide sequence isolated from the Sargasso Sea
aatgaaacatgaaaaaaatattaaagataatctacgtatatcaacttcagatgatattgagttaggtacatatctagaaattgctaaatcccatactcttaagggtactagcccagaaattgattcgaaaaatcagactattgtaatttttgattttggttctcaatactcaaggcttatagcaagaagagtaagagaactaaataccttttgtgaaatcataaattttgattcagatccttcgataatgaatgagcaaaatgttatagggtttattttctcaggtggaccaaatagtgtttatgataaaaatgccccccttgctccaaattgggtttatgcatcaaacaagcctattttaggtatatgttacggtatgcaaatacttgcccatcaacttggaggaaaggtggttcctggccaaaaaaaagagtatggtcatactgtaatacataagaataaaaatagtaaaattcttgcggaaattgctgatgatgtaacagtgtggatgagtcatggagacagaatagaatctaagccaataggttttgaaactatagcttttagtgataattcaccgaatgctataatttcagatgagaacaagatgtattatggtattcagtttcatcctgaggtagttcacactcctaatggaactgaaatattaaaaaattttatatttaaaatttgtaattcaagtggcagttggacatcaaaaaattttgtatcacaaactgttaagaatattaaacaaagaataggaaacgataaagtgatt

SEQ ID NO: 317187 - DNA, 469 bp, Unknown
  Bacterial polypeptide expressing nucleotide sequence isolated from the Sargasso Sea
ggagttagttgagcctttacgagaactttttaaagatgaagttagagagcttggaaaagagctagggattccaagtcactttattgaaagacatccatttcctggccctgggcttgcaattcgtttacctggtgagatttctcctgaaaaggctgatattttaaggaaagctgatacaatttatattgaagagattagaaaagcaggactttataatgagatttggcaagcttttgccgtacttttgcctgttcagacggttggtgtaatgggagatgaaagaacatatgattttgtctgtgctttaagagctgtgacttcacttgacggtatgacagctgattactacccatttgagcaagaatttttagctaatgtaagtactcggattattaatgaggttaaaggaattaatagagtagtttatgatataacttccaaaccaccaggtaccatagagtgggaataa

SEQ ID NO: 317188 - DNA, 821 bp, Unknown
  Bacterial polypeptide expressing nucleotide sequence isolated from the Sargasso Sea
aaaattaacatgcgtatttgtagataatggattattaagaaaaggtgaaagtgaccaagtaatgcaaacttttaaagagaatatgaatctaaatgtcattaaatcagacagtcaagacattttcatgagacatcttgaaaatattgatgatccagagcaaaaaagaaaaattattggaagaacctttatcgatgtttttgatgctgaggcaataaaattaaaggatataaagtttttagcacagggtactatttatccagatgtaatagagtcttcaggttctgaatcaaatgaagctagagtaattaaatctcatcataatgtaggggggttacctgaagaaatggaactagatctagtagagcccttgagagatctttttaaagatgaggtaagaagaatggggcttgaactaggaataccaaaagaaatgctagaaaggcatccttttcctggaccaggattgggcgtaagaattattggagaaattactgttgagaaaacactaattttacaagaggcagataatattttcatagaagaactaataaaagcagatttatacgataaagtaagccaagcatttgctgttttgctacccgttaagtctgttggtgtagttggagatgagagaagatacgccgaagttattggtttaagggcagttgaaacggtggattttatgactgcaagatgggcccatcttccttatgaattcttggagcatgtctcaaataggatagtaaatgaaatagaacaggtgagcagagttgtatatgatatctcaagcaaacctccagcaactatcgagtgggagtaat

SEQ ID NO: 317189 - DNA, 850 bp, Unknown
  Bacterial polypeptide expressing nucleotide sequence isolated from the Sargasso Sea
atgaatcttgatcaaaatctggacaaagttgtaatcatagattttggttcacagtttacacaattaatcgcaagaagaataagagaattaggagttttttcagaaattgttagccataaaaaaattagaactagtgatattaatcagagtgtaagaggaattattttgtctggcggtcccttaaatgtttaccaaattaacaaatattcctttaataaaaaaatattagaattaaacattccaatattaggaatttgttttggtcaccaaattttatcaaagttaaatgggggaagagtaagacaatcaaaacatcgtgaatttggattagccaatatttttaaaaaaagggacagcttactaactaaaaatttctatggtgttagaaaaaccaaagaggtttggatgagtcatgcagatcaagtgtctaaactaccgaaaaattttcaggtcatcgcatctagtacaaattctaaatatgccatagttgaaaataaacttaaaaaatattatggagtacaatttcatcctgaagttactcatactcaaaatggaaaaaaattgatcagtaattttgtatttttaatctgtaaaattaaaaaaaactggtcttccaaagatcaaaaaataaaattaatcaatgaagtaagagatcaagtaggtagccataaagttatttgtgcattatctggaggtgtagatagcagtgtcgttgctcaattattaaataaagccataggaaaaaaattgtattgtatttttgttaatacaggacttttaagaaaagatgaagagatacaggttgttagaactttcaaaaaacaattaaaaatgaacttaatctacgtaa

SEQ ID NO: 317190 - DNA, 728 bp, Unknown
  Bacterial polypeptide expressing nucleotide sequence isolated from the Sargasso Sea
aatgaacaacggtattatcatactagatttcggatcacaatataatcagcttatcggaagaagaatccgtgaaatgggcgtatattctgaaattttaccattcaatacacccttagaaacaattttagaaaagcagccaaaaggaattattctttccggaggacctagttctgtgaatgcagaaaacgcccatcttgttgaaaaagaattgtacgaacagggcattccaattttgggaatctgctacggaatgcagcttacggctcatcttttaggcggtaaagttcataaaggcgtaaaaggtgaatacggaaaagctcaccttgaaattgtaaacgagtcatctctgttgaaaggagttaccaataattctatagtttggatgagtcattttgacgaggtcggaatgctgcctccaggttttgaacttaatgcacaatccggagtaattgcctctattgcaaacgaagaaaagaaaatctattgtgtacagtttcatcctgaagtttctcatacggaagaaggtggaaaaatgcttgaaaatttcgttttcggaatttgtgatgcagaaaaaaactggaaactgacgaattatattgaaaaaaccgttgcagaaatccgtgaaagagtaggagatcaaaaagtaattttaggtttatccggcggggtagattcatctgttgcagcagttctcattcacaaagcaatcgggggatcagttaacttgt

SEQ ID NO: 317191 - DNA, 580 bp, Unknown
  Bacterial polypeptide expressing nucleotide sequence isolated from the Sargasso Sea
atgagtcttcatgatgatcgattactgatcctcgacttcggctctcagtatactcaactaattgcgcgtcgcgtgcgtgaacatggcgtttattcagaaatattaccgtgcgacgtagacccgctacggattcaatcgtcttccccaaagggggtcatcttatcgggtggcccggaatccaccacagacgtggccggatggaaaattccgaaggaagtgtatgacctgaatgttcctgtgttgggtatttgttatggcatgcaggctttggcacaagagctcggtggccgcgtcgaatcaagtgatttacgagagtttggtcacgcggatcttgtcattgaaagagaggagtcgttgctgactggggtgtcggacacaggctctctgtctgtatggatgagtcacggtgaccgagtcacggagctcccccctggattcaaagtgatcggttcgagtgatcacgcacctatcgccgccatggccgatgaggaacgagcgatctatgggctgcagtttcatccggaggttacccactctgagggtggctccgagatacttgcaaagtttgcacatgcgattt

SEQ ID NO: 317192 - DNA, 496 bp, Unknown
  Bacterial polypeptide expressing nucleotide sequence isolated from the Sargasso Sea
ggtggactacccaaaaacatgaaattaaaattggttgagccattaagattattgtttaaagatgaagtaagaaaattggggttagaacttaaattgtctaaagagatcgtattaagacatccatttcctggtccaggtttggcaataagaataccaggcgaaataacagagaataaaattaaaattttacaagaagctgatgatatttttattaattcattgagagagcacaatttatatagcaagatatggcaagcctatgcagctttattgccagttaaaactgttggagttatgggcgacaacagaacttatgaatatatgtgtttgttaagagcaattacatcagaggacggtatgactgctgatttttttaatttttcaaaagagtttatgcagcttgtttcaaataaaataattaataatataaatggtattaatagagtggtttacgatataacatccaaaccaccaagtacaatagaactagagtaat

SEQ ID NO: 317193 - DNA, 736 bp, Unknown
  Bacterial polypeptide expressing nucleotide sequence isolated from the Sargasso Sea
actaaaaaaaattaaatcatttcaaaaaataaagggattaattttatctggaggccctgcaactgtaactaaaaagtctttcccaaaaattccaatgtatattttctcaaaaaatattcctattttaggaatttgttatggtttacaactaatagctaaaagttttggagggaaagttaaatccggaaataaaaaaagagaattcggaagagctattttgaaaaaaaataataattcattactgacaaaaaatttttttaaaaaaaacaaaacaaaagtatggatgagccaccaagatactgtttataaaattcccaaaggttttaataaaatagcctcaacgaaggactccgctttaacaattattgaaaataaagaaaaaaaattatttggtattcagtttcatcctgaagtaacccatactgataaaggcgatattttaattaaaaactttgtttatttgatttgcaaagtaaaaaaaaattggaaaatgaattatgaaaaagacagaattattaaatccattaaagaaaaagtaaaaaaacaaaaagttatctgtgctctttcaggaggtgtagatagtagcgtagttgcaattttagtacataaagcaattaaaaataatttaaggtgtattatggttgatacgggacttttgagaaaaaatgaatttagatacacatataagatcttaaaaaataaatataaattaaatattaaactagtaaaagcttct

SEQ ID NO: 317194 - DNA, 569 bp, Unknown
  Bacterial polypeptide expressing nucleotide sequence isolated from the Sargasso Sea
aaaatttaatagcaagatcctaaaattgggtatccccgttttaggtatttgctttggacatcaaattatctctaaagaattaggtggaagagttaaaaattcaaaatttagagagtttggtttagctgaagtagaagaggttaaaaaaagtatacttacaaaaaatttcttttttaaaggtaaaaacaatgtatggatgagtcatgcagatcaagtaaccaagttaccaaaaaatttttatgtacttgcaaaaagtaaaaactcaaaattatgtataattgaaaatttagaaaaaaaatttttcggtattcaatttcacccagaggttagtcataccaacaaaggaaaacaaatactgaaaaattttgtattttctatttgtaaaatcaaaagaaactggtcttcaatcgaccaaaagaaaaaacttataaacgaagttagaaatctagttggagactctaaagtaatatgtgcgttatcaggaggagtagatagcagtgttgttgcaaaattattgtcaaatgctattggaaaaaaattgacttgtatatttgttaataacaggcctt

SEQ ID NO: 317195 - DNA, 400 bp, Unknown
  Bacterial polypeptide expressing nucleotide sequence isolated from the Sargasso Sea
aatggatcttaacaataatttaaataagattctaattattgattttggttcacaatttacacaactcatagctagaagaataagagaacttggtgtttattctgagataattagtcataaaaaattaaattcgaaattaaataaatcaagaatacgaggaataattttatctggtggcccattaaacgtttatcaatctaaaaaagtaaagtttagaaaagaattatttgaatggaatattccaatattaggtatttgttttggtcatcaagtaatatctaaagaattaggagggaaagtcaaaaaagcaaaacatagagaatttggtttggcaaaattaaagagaattaataaaagtaaattaactcaaaacttttttaataaaaatggtttaaacaaa

SEQ ID NO: 317196 - DNA, 897 bp, Unknown
  Bacterial polypeptide expressing nucleotide sequence isolated from the Sargasso Sea
tctttctggtggaccaaactcagttactgattcctatacaccaagaattcctcaatgtatttttgaattaaatattccaattcttgggatttgttatggcatgcagactatggcagaacaaatgggtggtcaggtagtatctgttgataaaaaagaatttggacatacaaatttagatgtcgaaaatgattcagttctcttcaaagacattaataaaacaataaatgtttggatgagtcatggtgatcaagttcaagatttaccagacgaatttgatttaattgcttccactaagactgctccgattgcagccatgcagcataaaaatttacctatttatgcaatacagtttcatcctgaagtgacacacacacaagatggtcatgttctgctagataactttatttttgagatttgtcatgctcgttcggactggaaaatggatgatttaatttcttcaagaattaaagaaataaaagagcaagttcaagataataaagtattacttggtctttctggaggtgtcgattcttctgtcactgctgcacttttacataaagctattggtaaaaaattagtatgtgtttttgttgataatggacttttaagaaagggagaagcagagcaagtaatgcaaacatttaaagaaaatatgcaattaaatgtagttaaatctgatagtcaagacactttcctgagacatttaaaagaaattgaagatcctgaacagaaaagaaaaattattggaagaacttttattgatgtttttgatgctgaagcaatgaagctcaaagacataagatttttagcacaaggaacaatttatcctgatgtcatagagtcttcaggctcagagtcaaaagaagctcgagtgattaaatctcatcataatgttgg

SEQ ID NO: 317197 - DNA, 505 bp, Unknown
  Bacterial polypeptide expressing nucleotide sequence isolated from the Sargasso Sea
atgcctgctaatttatcatctacatctaaaataattgatactattcttgttcttgattttggttctcaatacacacaattaattgccagaagagtaagagatagtaatgtttattctgaaatacttccatgggatgttgatgaaaaaaaaattcaatcgatcaatccgaaaggcattattttatctggcggccctgactctgtcactgaaagttatacaccgaggatacctcaaataatttttgatttgaatatcccaatccttggcatatgttatggaatgcaaactttagccgaacaatttggaggtcaagtaatatcctctgaatttaaggagtttggatattctgaattaaaagttaagacagattgtgttttgttttctaatttagataaaactctaaatgtttggatgagccacggagatcaagttcaagaccttccagataactttgaattagtagctgcttctacttcagctccaatagctgcaatgcaacattaac

SEQ ID NO: 317198 - DNA, 496 bp, Unknown
  Bacterial polypeptide expressing nucleotide sequence isolated from the Sargasso Sea
ggaggcctgcctaaagaaatgaaactgggtcttgtcgaacctttacaagaattatttaaggatgaagttcgtagacttggtaaagagctgaaattacctaaagaatttattcaaagacatccgtttccaggtcctggattaggaattcgaatattaagtgacattacaaaagataaagtgcgaatgttacaacatgcagataaaatttatattgatgagattaaggcagccaatttatacaatgaaatctggcaagcttttgcagttctattgcctgtccgaactgttggcgtaatgggtgatcaaaggtcatatgagtttgtttgtggcttgagagctgtaacttctgtagatggcatgactgctgatttctatcctttcagtggtgaatttttaagcaaagtatcaactcgaattataaatgaagtaaaaggaattaatcgcgtagtttacgatacaacttctaagcctcctggtactattgagtgggagtagt

SEQ ID NO: 317199 - DNA, 466 bp, Unknown
  Bacterial polypeptide expressing nucleotide sequence isolated from the Sargasso Sea
tatggatattcatgttaatcaaattttaatacttgattttggaagccaatacacacaactgattgccagaagagtcagagagagtggggtctattgtgaaatacatccatgggatcaagacgaaaagatactccagaattttaaaccagcaggaattattctttctggaggcccagaatccgtcaatctagacaacccaccaactgctccagaatttttatttaatctctcaatacctatcctcgggatttgctatggaatgcaaacgatggcaaagcaacttggaggaaaggttgaggcatccagtgagcgagaatacggatatgcagaagttgaaccatcgaactcatttctccttaatggtttgagtgataacgatacaggtttattgaaagtatggatgagtcacggtgaccgggtagagtccattccagagggttttgtagcatcagcgagcagtaaaaac

SEQ ID NO: 317200 - DNA, 865 bp, Unknown
  Bacterial polypeptide expressing nucleotide sequence isolated from the Sargasso Sea
gttatatcagttcctcctggcttttcggtagttgggagttcagtaaattcctcggtagcgatgatggccaatgaagagagaaacctttttggcctgcagtttcatcctgaggttcatcatacgaagcaaggtaaagcgatactcgagcaatttgttaaagccgtgtgtgcttgtgaaaccctttggaatccgaccaacatagttgaggatttggtggaaaagataagagagcaggtagccggaaaaaaagttctattgggtctatcaggtggcgtggactcctcagtggtagcagctcttttagctaggtctattggcgaccagttgatttgcgtttttgtcaacaacggccttttaaggttcgatgaagttgaacaggttcaaaaaatggtagaaaaaggtttcggttcagggagctcttttgatttgcgcgtcgtcgacgcagaggatgtttttctagatcgtttagctggcatcaacgaccccgaaaaaaaacgtaagataataggaaatacttttattgaggtttttgaaaaagaggcagcaagtttgagtgatattaagttcttggcccaaggcaccatttatcctgatgtcatagaatctgcggcgggcaagggagggaaggcacatgttataaaatctcatcacaatgttggggggcttcccaggaacatgagcttggaactggttgaaccactgcgtcaattatttaaggacgaagttcgagagctagggacgcaacttgggttgccatcgagcatgataaataggcaccctttccctggaccgggtttagcggtccgaattttaggtgaggtaaaaagcgagtatctttccgtgcttcgaaaagccgacaaaattt

SEQ ID NO: 317201 - DNA, 832 bp, Unknown
  Bacterial polypeptide expressing nucleotide sequence isolated from the Sargasso Sea
gggatttcaggaggtgtagacagtacagtaacagctgttttattacataaagcaataaaaaagcaactaacatgcatttttgtcaatcatggatttcttagaaaaaatgaagaaaatgaagttttggagatgtttaaaaatgacattaaaattccactaatttatgctgatgagagcgatctttttttaagagaattggaaggaatatctgatcctgaagtaaaaagaaagaaaataggaaaactctttatcaatgtttttgagaagtatgctcaaaagataaagggtgcaaagttcttagggcaaggaactctttatcctgatgtaattgagagtatatctgttcatggaggagaatctgaaactataaaatctcatcataatgtaggaggattaccaaaaaaaatgggattaaaattaatagaaccattaaaagaaatttttaaggatgaagtgagagacttaggacgagaaatgggtataaacaaaaattttttaaatcgccatccatttccaggccctggattagctataagatgtccaggaaaaataactaaaaaaaaattagaaatattaaaaaatgctgatcatatctttattgaacagataagaaaatatggtttatatgataaaatttggcaagcattcgttgctatattaccgataaaaacagtaggtgtaatgggtgataaaagaacttatgacttcgcttgtacactaagagcagtcacatcagttgatggtatgaccgcagattactatccttttgaacatgaatttcttagagatacttccactagaataatcaatggaagtaaaaggaataaataga

SEQ ID NO: 317202 - DNA, 853 bp, Unknown
  Bacterial polypeptide expressing nucleotide sequence isolated from the Sargasso Sea
tattcagaagtatgcccttgggatgaaatcccagatctaagtggtgtaaaagggtttattttgtctggtggaccagaatcatcaaatattgaaggtaatccttctattcatcaacaaatcttcgatactaaaaaacctattttaggcatatgttatggcatgcaggttttagcgcatcaagaagaaggcagaattattaatgagggaaaaagagaatttggttacgccaaaattgatataaaacaagactcaattttatttaaaaattttgataagtctcaagatgtttggatgtcgcacggtgataaagttgaatcattaccagatggttataacattacggctgtttcaaataattcacccgtagcggcgtatgaaaacattgcaaaaaaatattttggtctacaatttcatccggaagttacgcataccgaaagtggtacaacgattattaaaaacttccttgagatctgtgatattgaacagaattggagtgctgatgacattctccaacaaataaatgctctcgtaaaaacagaagtaaaagacggggaagtactactagctctgagtggaggcgttgattcaacggtattagccgcagtattacacaaaacactaggcaataaattgacatgtgtcatggttgatcatggcttgctaagaaaagatgaggctttaaatgttgtaaacaatttaaaagaaaaaattggcctttcagtcaatctagtaaacgcacaagatacatttctttccaaacttaagggcattacagatcctgaagaaaaaagaaaaactaaaggaaatacctttatagaagttttgaaagcgagagcaaaaaataaacgatata

SEQ ID NO: 317203 - DNA, 907 bp, Unknown
  Bacterial polypeptide expressing nucleotide sequence isolated from the Sargasso Sea
atgcaatttcaaaaaataaaagaaaaaattttaattgtcgactttggctcacaagttactaagttaatagctagaagaattcgtgatttaggagtttattcagaaattttaaccccaaatgaaattaaaaaaatcaaagactttaaaagaattaaaggaattatcttatcaggcggtccatcaactgtaaccacacaaagatttcaaactattccaactgaaattttttctaaacaaatacctatcttaggaatttgttatggattacaattaatagcaaaaatatttggtgggaagattaagccgtcgaaaaaaagaagagaattcggaagagcttacatttataaaaaaaaaaaatcaattttaacgaaaaatttttttagtccaaactgttctgtatggatgagccatcaagatgccgttgtaaaactacctaaagattttaaattaatagcatatactacagactcaaagttatcaattatagaaaattctaaaaaaaaaatttacggagttcaatttcatcccgaagtcactcatactgataaaggaaaacaactttttaagaattttttattttcaatttgcaaaattaaaaagaaatggaatgttgtttcacaaaaaaaaagacttatctatgagataagaaaaacagtaaagaaagataaagtaatttgtgctttatcaggaggtgttgatagtagtgtagtggctttattaataaacaaagctatagaaaaaaatttaatctgtataatggttgacacaggattaatgcgtaaagatgagtttaaaacttcatacaaggtttttaaaaaaaaacacaaatttaatattaagctaataaatgcttctcatattttcctaaaaaaattaaaaaatgtttctaacccaagaaaaaaaaagg

SEQ ID NO: 317204 - DNA, 243 bp, Unknown
  Bacterial polypeptide expressing nucleotide sequence isolated from the Sargasso Sea
tatgggtaaaaatttattaaaaaaagagagagatccttcaatattaatattagattttggatctcaatattctgaattgattgcgagaagaataagagaggcaaatgtgttttctctcgtagtgactaaccttatttcaattaatgagattcaaaaaataaatcctcaagggatcatccttagtggcggaccaaattctgtatacgaaaattttgctcccaaatgtgatgataagatttttga

SEQ ID NO: 317205 - DNA, 763 bp, Unknown
  Bacterial polypeptide expressing nucleotide sequence isolated from the Sargasso Sea
gtcgagcaggtctttcgcgaccggttcaacatctctctattggtgcgcgacgcgaagaacatgttcctcgaccagcttcagggggtctcagatccggagaccaagcgcaagatcatcggcggcaccttcatcgacgtttttgaggaggaggcggcaaagattggcggcgcggacttcctcgctcagggcacgctctatcccgacgtgatcgaatcggtcagtccgttcggtgggccgagcgcgacaatcaagtcgcaccacaatgttggcggtttgcccgagcggatgaatatggagctagtagagccgcttcgcgagctattcaaggatgaggtccgcgacctaggacgcgaactgggcattcctcatgagatcgtcggtcgccacccgttcccggggcctggtctggcgatccgggtgccgggcgacttcgatcgggagaagctggagattctgcgccaggccgacgcgatctatctcgaagaaatccgcaaggcaggcctatatgattcaatctggcaggcattcgccgtactgcttccggtgcgtactgtgggggtcatgggcgatgcgcgtacttacgaccatgtctgcgcgttgcgcgccgtgacgtcgaccgacggcatgactgccgatagctatccgttcgagcacgctttcgttgccggcgtggccacgcgcatcatcaacgaggtgcgtggcatcaaccgggtcgtctacgatgtgacatcgaagccgccgggcacgatcgagtgggagtagt

SEQ ID NO: 317206 - DNA, 796 bp, Unknown
  Bacterial polypeptide expressing nucleotide sequence isolated from the Sargasso Sea
tgtctataatgaagatgcaccgaaaccagatgaagaattatttaattttgatttaccgttattaggaatttgttatggacaccaattaattgtaaataaatttggaggcaaagtaaaacgtgcaaacaaagaatatggttcatctcttctttcaatggataaaaattcaggattactggatggaataggagaatcaattcgtgcatggatgagccatggagacgaagcagaagaaattccagctaattttgaagtgataggccatactgaaaattcgcatgcagctgcaatagcaaatacagatagaaccgtatttggaatacaatttcatccagaagtagtacataccgaacgtggaaccgatattttgaaaaattttgttttgaatgtttgtaaggcaaaacaagaatggacaatggagggttttgtagaaaaaaccgtaaaaaagatttcagaaattgaaggaaatgtgttatgtggagttagtggaggtatagattcaacagtggcagcattactaatacacaaagcaatagggaataggcaaacaggagtttttgtagataatggattattgagattggatgaatccaaagaaattgaagatatgttcaaaaataatttttcattaaatttccatagaatagatgcaagtgaacaatttctttcaaaattaaaaggaataacggatccggaacaaaaaagaaaaattgttggagaggaatttattcaagtatttacggaatttgcaaaacagaaaggaccattcaaatggttagcacaaggtacgctttat

SEQ ID NO: 317207 - DNA, 853 bp, Unknown
  Bacterial polypeptide expressing nucleotide sequence isolated from the Sargasso Sea
aaaggaattcctattcttggtatatgttttggacatcagatactctcaaaacttaatggtggtaaaattaaaaaatctaaacaccgagagtttggattggctaatatttttaaaaaaaatgatagtcttttagtaaaaaaattttttaaaaataaaaaatttgcaaaagtatggatgagtcacgctgatcaagtttccaaattaccaaaaacttttaaagttgttgcttcgagtcagaattctaaatttgctatagttgaagataaaagtcaaaaattttatggagttcaatttcatccagaagtaactcatacagagaaaggcaagataattataagtaattttattttcttaatatgtaaaattaaaaaaaactggtcagtaaaaaatcaaaaaattaaattaattaaagaaattaaaaatcaagttggttcaaataaagtaatttgtgctttatcgggtggtgtagatagtagtgttgttgcgcaattattaaataaatctataggtaaaaaattgtattgcatttttgttaatacaggtctcttaagaaaaaatgaggaaaaacaagtattatcaacttttaaaaagaaactaaaaattaatttaatatatgtaaatgctgaaaaagaatttattaaaaaattaaaaaaagtttcagatccagaaaaaaaaagaaaaattataggtaatttatttataaaaatttttgaacgttacgcaaaaaaaattaagaatgtgaagtttttggctcaaggaactctttatccagatttaattgaaagtaaatcagtaacaggtagcaaaacttcaaaaattaaatctcatcataacgttgggggtttaccaaaaa

SEQ ID NO: 317208 - DNA, 897 bp, Unknown
  Bacterial polypeptide expressing nucleotide sequence isolated from the Sargasso Sea
tgttcataaaatttctgattgtgcggctgattggacaacagaaacatttctagaagaaacaattccaagtataagagagcaagttggtaataagaaggttttgcttgccttgtcaggaggagttgattcttcaactcttgcttttttgctgaataaggcaattggaaatcagctcacttgtatgtttatagaccaaggttttatgcgaaaaggtgaaccggaatttttaatgaatttttttgacaagaaatttcacataaaggttgaatatattaatgctagggaaaggtttattgctaaattagacgggattactgatccagaagaaaaaaggaaaattattggtgaagaatttattagagtatttgaagaagcaagtaaaagattaggaccttttcagtacttagcccagggtactctttatcctgatgtaatagaaagtgcaggcactaatattgatcccaagacaggtgagcgaatagctgtaaaaataaagagtcatcataacgtgggcggattacccaaagatttacaatttaaattagttgagccattaagaaaactttttaaggatgaagtccgaaaattgggaactgttttaggtctgccggatgaaattataaaaaggcatccattcccaggtccaggtttggcgataagaattttgggagaagttactaacgaaaaactcgattgtttaagagatgcagattggatagtgagagacgaaataaaaaaagctggtctttacaatgatatttggcaagcttttgcagtattgttgccagttaaaactgtaggagttatgggagataaaagaacttatgcatggccaatagttttacgttgtgtatctagtgaagatggtatgacagcagactggtcaaaaattccttt

SEQ ID NO: 317209 - DNA, 928 bp, Unknown
  Bacterial polypeptide expressing nucleotide sequence isolated from the Sargasso Sea
taaaagaaactgggagcatgaaaatcatttaagaaatcagattactgaaattcaacattctgttcataaggatcaggtaatttgtggattgtcgggtggagtggatagtactgtcactgcagctataatttcaaaagccataaataagcaattaacatgcatttatgttgatacaggtttaatgagactaaatgaaacaaaaaaagtagtaaaaatgtttaaaagacattttaaatctcgattaatagtcaaagattcaagaaagacatttataaaagccttaaaaggaatcacagatccagaaaaaaagagaaaaataataggtaatctttttattaaaatatttaatcaagaggcaaacaaaataaaacgtgccaaatatttagctcaaggaactatttatcctgatgtaatcgaaagccagagctttcatggcggtccgtcatcagtcattaaatctcatcataacgttggtgggttaccaaaaagaatgaaacttaaactcgttgagcctttaagagaactttttaaggacgaagttagaaaattaggactggagatgagattgccaaaaaaattcataaatagacatccatttccaggccccggattgggaataagaatacttggtgaggtaacagcagacagagtaaaaattttacaagaggccgataatatatatatcgaagaaattaaagaagcaggcctatatgacaaaatatggcaggcatttgcagtcctaatgcccgttaaaactgttggtgttatgggtgatcatagatcatatgaacaagtttgcggattaagagccgtaacgtctgttgatggaatgactgcagatttttatccttttaagggtgagtttttgagtaaagtttcaacaagaataataaatgaggttaagggcataaatagagttgtatacgat

SEQ ID NO: 317210 - DNA, 823 bp, Unknown
  Bacterial polypeptide expressing nucleotide sequence isolated from the Sargasso Sea
aaaggtttttcggttatagcatcaacaaaaaattcaaaatttgcaatgattgagaattataaaaaaaaaatatttggaattcaatttcatccagaagttacgcatactaagaatggaaagaaaatattaagaaattttgttttttctatttgtaagttaaaaagaaattggtcatcaaaacagcaaaaaacaaaattaattaaacaagttaaaaatcaagtaaaaaattcaaaagtaatttgtgctttatcaggaggcgttgatagtagtgtagtggccaagttattaaaagaggcaataggaaataaattaatctgtgtatttgttaatacaggcctattgagaaaagctgaagaaaaacaagtagttaatacttttaaaaaaaaatttaaaattaatctcatatatgtaaatgccaaaaatatgtttttatctaaacttaaaaatgtttcagatcctgaaaaaaaaagaaaaataattggaaatttatttattaaaatttttgaaaaacatgcaagaaaagtaaaaaaaataaagtttttagcacaaggaactctttaccctgacttaatagagagcagatctgttactggtagccaaacttcaaaaataaagtcacaccacaatgttggtggtttaccaaaaaaaatgaaactaaaattaattgaaccattaaaatatttatttaaagatgaagttagaaaacttggtttagaattaaaactagaaaaagaaattattttaagacatccattccctggacccggactagctataagaatgcctggaattattacagataaaaaaataaaaattcttcaag

SEQ ID NO: 317211 - DNA, 283 bp, Unknown
  Bacterial polypeptide expressing nucleotide sequence isolated from the Sargasso Sea
aatgagtagtcatattgaaatagctactaagttcagtgaagataatattttaataattgattttggcagccaatatacacaattaattgctagacgcgtaagagaggaaggagttttttgtcaaataattccttataataaggtaagtaagtatataattaataataatccaaaaggaataattttatctggtggaccttcatctgttttaggcattgaaacacctaggatatcaaaagaaattatagatatgggcaagcctattttaggtatatgctatgga

SEQ ID NO: 317212 - DNA, 943 bp, Unknown
  Bacterial polypeptide expressing nucleotide sequence isolated from the Sargasso Sea
ggccaggcgctgctgcgccgcttcgtggtggacgtgtgcggctgccagaccctgtggaccgccgccaatatcatcgacgaccagatcgcccgcgtgcgcgaacaggtgggcgacgatgaagtgatcctgggcctgtccggcggcgtcgattcgtccgtcgtggccgcgctgctgcacaaggccatcggcgacaagctgacctgcgtcttcgtcgataccggcctgctgcgctggcaggaaggcgaccaggtgatggcgatgttcgccgagcacatgggcgtcaaggtgatccgcgtcaatgcggcggaccgctatttcagcaagctggaaggcgtgagcgatccggaagccaagcgcaagatcatcggcaacctgttcgtggacatcttcgatgaagagtccaacaagctgagcaatgccaagtggctggcgcagggcaccatctacccggacgtgatcgagtcggccggcagcaagaccggcaaggcccacgtcatcaagagccaccacaacgtgggcggcctgcccgagcacatgaagctgggcctggtcgagccgctgcgcgagctgttcaaggacgaagtgcgtcgcctcggtgtcgaactcggcctgccgcgcagcatggtctaccgccacccgttcccgggcccgggtctgggcgtgcgcattcttggcgaagtgaagcgcgaatacgccgaactgctggccaaagccgatgcgatcttcatcgacgaactgcgcaaggccgacctgtacgacaagaccagccaggccttcgcggtgttcctgccggtgaaatcggtgggcgtggtgggcgatgcgcgtgcgtatgagtgggtgatcgcgctgcgtgctgtggagaccatcgatttcatgaccgcgcactgggcgcacctgccgtatgacttcctgggcaccgtgagcaaccgcatcatcaatgagc

SEQ ID NO: 317213 - DNA, 799 bp, Unknown
  Bacterial polypeptide expressing nucleotide sequence isolated from the Sargasso Sea
ggcaaaaagatattgaaaaactttgttagacatatatcagggtgcaaaggtttgtggaattctaaaaatataattgatcgagcggtaagtgaaataagagagcaggtaggtgatcaagaagtattattgggtttatcaggaggcgtggattctgctgttgttgcagcattactctcaaaagcaataggcaatcagttaacctgtatctttgtagacaatggactccttcggctcaatgaaggcgaccaagtcatggaaactttcaaaggtaaatttggaatcaaagtaaaaagagcaaatgccggcaatcaattcctcagagatttgaaaggaaaaaaggatccggagcagaaacgcaaagctattggaaaaacttttatagatgtctttcttaaagaggcaaaaagaaatacaaaaattcaatggttagcacagggaacaatttatcctgacgttatcgaatctgctggaacgaagaatggatcggcgcatgtaataaaatctcatcacaatgtaggaggtctgccgagttatcttaatctccctgtgatagagcccttaaaggatctatttaaagatgaagtcagaaagattggtttagagcttggtttaccaaaagagatattacttagacacccttttccaggtccaggtttaggtgtccgaattcttggtgaaattaaaagaccttatataaaaatccttcagttagccgatgacatttttattagtgagttggttaaagacggctattatgaaaaggtaagccaagcttttgcagtatttttaccgggttaaa

SEQ ID NO: 317214 - DNA, 676 bp, Unknown
  Bacterial polypeptide expressing nucleotide sequence isolated from the Sargasso Sea
atgaataataatttacaaaaaatattaataatagattacggatctcaatatacccaactgatagctagaagaattagggaattagaagtattttgtcttgtttatccatatcataaaattactaataaattactaaaagacattaaaccatcagcatttatcttatcaggaggcccaaaatctgttctggataaaaaatcaccaaaattaaaccaaagtattattaggagtaacaaaccaattcttgcaatttgttttggtatgcaattaataaccaaaagcctgaaaggcaaggttaagaaagcaaataatagagagtacggacatactttaattaacattaaaaacaaatcacctatttttagaggaattaaaaaaaatagatttaaggtgtggatgtcgcatggagataatatttataagataccaaattatttttccatttcttcattatctgataataacattatttcttcaatagagaatattaaaaataagatttattgtctgcaatttcatccagaagtatatcacacagacaatggtttaaaaattattaataattttgtatttaatattgttaaaatcaaaattaaatttagactaaacaaatttattgaaactaaaattttagaattaaaaaatcaactaaaagataagaagataatttgcggtc

SEQ ID NO: 317215 - DNA, 814 bp, Unknown
  Bacterial polypeptide expressing nucleotide sequence isolated from the Sargasso Sea
accaattttaggtatttgttatggcttgcatttgcttgtacatcataatggtggtgcagttaattcaactgggaaaggtgaatatggttttgctgaggttgactttacaagaggtaatacaattactgagcaaatgtctgatacatcaaatgtctggatgagccatatggatcaagtaactaaagttccggatggttggcaggttattgctacaagtgcaaacggcgttgttgcaggattaattaatcgaaagcaaaataaaattgctactcaatttcatcctgaggtctcacataccgaggagggtggacagctacttaaaaattttatttttaaaatagccaaatgtgaaaaaaattggactccaagcaattttataaaagaacaagtcaaaaaaattaaagaaaaaagtggagatgaaaatatattagttggcgttagcggaggtgtagattcaacagtaatggcttgtttaataaataggtctgttggaaataaatgtactgctgttttaattgataatggtttgttaagaaaagcagaagcaaagaattgtgttaatgctttgaaaaatggcttaggtatagatgtccatctttttgatgaatctaaattatttttttcaaggttaaaaggtgtaattgaccctgagcaaaaaaggaaaattattggggatcagtttattaaatcttttgatagaattgctgctgagtttggaaattataaatttttaggacaaggtactttgtaccctgatattattgaaagtggagttagtgcaagcaagtcggctcatgtaataaaaagtcatcat

SEQ ID NO: 317216 - DNA, 805 bp, Unknown
  Bacterial polypeptide expressing nucleotide sequence isolated from the Sargasso Sea
aatggttgatactggtttaatgagaaaagatgaatttaaattaacttatagaaaatttaaaaaaagatataatttaaatgtaaaacttataaacgcttcacagatatttttaaaaaagctcaaaaatatatctgatccagaaaaaaaaagaaaaattattggcaatctgtttattaagatttttgaaaaagaagctaaaaaaattaaaaatgtaaaatttcttgcacaaggaactctttatccggatattattgaaagtaaatcctctactggaagcaaaacttcaaagataaaatcgcaccataacgttggaggattacctaagaaaatgaatttacaactgattgaacctttaaaagagttatttaaagacgaagtgaggattcttggtaaatcattaggtcttagcagagatatcaattacaaacatccatttcctggtccaggtttaggtattaggataattggacaaattacagaagaaaaagtaaaaattttacaagaagctgattatatttatataaacgaacttttgaataataatttatatgacaaaatctggcaagcttacgcagctttattaccttttagaactgttggagttatgggagactcaagaacatatgaatatacatgcatgttaagagctgttatctcagaagatggaatgactgcagattattttaattttccaaggttttttttagacaaagtttctagtaaaattataaataatgttaaaggtataaatagagttgtctacgacataacctcaaaaccaccaagcacaatagaacttgaatga

SEQ ID NO: 317217 - DNA, 949 bp, Unknown
  Bacterial polypeptide expressing nucleotide sequence isolated from the Sargasso Sea
aatcgaaaattttatatttaaaatttgtaagataaaaagaaactggagtatgaaaaatcatttaagaaatcagattactgagattaaacattcagttcataaggatcaggtaatttgtggattgtcgggtggagtggatagtactgttactgcagctataatttcaaaagccataaataagcaattaacatgtatttatgttgatacaggtttaatgagactaaatgaaacaaaagaggtagtaaaaatgtttaaaaaacattttaaatctcgattaatagtcaaagactcaagaaagacatttataaaagccctaaagggtgccacagatccagaaaaaaagagaaaaataataggtaatctttttattaaaatatttaaccaagaggcaaacaaaataaaacgtgccaaatatttagctcaaggaactatttatcctgatgttatcgaaagtcagagcttccatggcggtcccacatcagttattaaatctcatcataatgtcggggggttaccaaaaagaatgaaacttaaacttgttgaacctttaagagaactttttaaggatgaagttagaaagttggggctggagatgagacttccaaaaaaattcattaacagacatccattcccaggccccggattgggaataagaatacttggtgaggtaacagcagctagagtaaagattttacaagaagccgataatatatatatcgaagaaattagagaagcgggcctatatgacaaaatatggcaggcatttgcagtcttgatgccaattaaaactgttggtgttatgggtgatcatagatcatatgaacaagtctgcggattaagagccgttacgtctgttgatggaatgactgcagatttttatcctttcaaaggtgaatttttgagtaaagtatcaacaagaataataaatgaggttaagggcataaataga

SEQ ID NO: 317218 - DNA, 487 bp, Unknown
  Bacterial polypeptide expressing nucleotide sequence isolated from the Sargasso Sea
atgtcccagccttcgtccgacggtcagcgtcagccggccatcgtcatccttgatttcggctcccaatactccgaactgatcgcccgcagagtgcgggagaccgaagtgttctcggtggtgctggggtacagcacgacggcggaggagctgcgccggatcgcgccgaaggggatcatcctcagtggcggtcccagttcggtctatgccgaaggcgcccctctctgcgacccctcgatctgggagctgggcatcccagtgctcggcgtctgctacggcatgcagctgatggtgcagcagctggggggtgtggtggaagccgccaccggcaaggccgagtacggcaaggcgccgctcgaggtggacgacccgacggatctgctgaccaatgtcgacagtggctcaacgatgtggatgagtcatggtgattcggtgaaagccctcccggtgggctttgtgcgtctggcgcacaccgttaacaccccggaag

SEQ ID NO: 317219 - DNA, 763 bp, Unknown
  Bacterial polypeptide expressing nucleotide sequence isolated from the Sargasso Sea
ctatataaattatttaaaagcaaatacaaaattaacgtaaaattaataaatgcaaaatctctttttttaaaaaacttacaaaaagttaaaaatcctgaaaaaaaaagaaaaataataggaaaactattcattaaaatttttgaacgtgaggccaaaaaaaataaaaatataaagtttttagctcaaggaactttatacccagatgttattgaaagtaagtcgtctactggcagcaaaacttcaaaaattaaatctcaccataatgtagggggtcttccaaaaaaaatgaaattaaaattagtagaacctttaagagatttatttaaagacgaagttcgaaaattaggtatttctttgggattagataaaaaaattgttaatcgacacccattcccaggtccaggtttagcgataagaattataggtgaagttactccagaaaaagttaagatgctacaagaggcagactatatttttatgaatgaattaaaaacaaataaactatattcaaaaatatggcaggcatatgcagcattattaccaattaaaactgttggagttatgggagatacaagaacatatgaatacacttgtcttcttagagctgttgtatctaaagatggaatgacagcagactatttttcttttccaaagaaattcttggataatatttcaaataaaatcattaataatgttattggtattaatagagtagtctatgatataacctcaaaaccaccaggtacaattgaactagaataga

SEQ ID NO: 317220 - DNA, 1007 bp, Unknown
  Bacterial polypeptide expressing nucleotide sequence isolated from the Sargasso Sea
actcacattttatgggctccaattccaccctgaggtcactcatacaagttgcggacagagaatcattgaaaactttgttcatgatatttgtgggtgtggaagtgattggaatcctggaaatattattgaaaaagacatcaaagaagttcaggaagcggttggcgatgatcaggttcttctcggattatcaggtggtgttgattcctcagttgtagctgcccttttgcacaaagcgatcggtgatcaattggcctgtattttcgtagacaatggtcttcttcgtctcaatgaaggtgatcaggtcatggagacattctcagagcatatgaatctcaatgtgattagagtcaatgctgaggatattttcttggagaaacttaaaggtattgatgacccagaggacaaaagaaaaataattggtcgaacattcatagaggtttttgaggatgaagcttcaaagttagaaaatgtgaaatggttggctcaaggaaccatttacccagatgttatagagtcggcaggatcgaagacgggaaaagcacatgtaattaagtcacatcataacgttggcggtctccctgaggatatgaaattaaaactggtagaaccgctcagggatttattcaaagatgaggtaagaaaaattggcaaagaacttggactgacctcaaagttggttgatcgacatcctttcccaggtcctggcttgggagtcagaatcttaggagaagttaaaaaagagtacgctgatctattgaggttggctgatgacatttttattgaggaattacataaagaagatctttacgacaaagtaagtcaggcctttgcagtttttctgccagttaaatctgtgggtgtcatgggcgatgggagaaaatatgaatatgtgattgcttttagagcagtggagacaactgattttatgacggcaaattcggctaaatttgcctatgaatttctggatcgtgtatccacacgaatcatcaatgagatatctggcattt

SEQ ID NO: 317221 - DNA, 472 bp, Unknown
  Bacterial polypeptide expressing nucleotide sequence isolated from the Sargasso Sea
gtttgatcttgtggagcccttgagagatctctttaaagacgaggttagaagaatgggcactaaactaggaattccaaaagaaatgcttgagaggcatccttttcctggacctggtttaggagttaggattattggagagataacaaaagaaaaaacattaatacttcaagaagcagatcatatatttattgaagaactaattaaggcagacttgtatgacaaagtaagtcaagcatttgctgttttattgcctgttaagtcagttggtgttgttggagatgagagaagatatgctgaagtaattggattaagggcagttgaaacggtagactttatgaccgctagatgggctcaccttccttataaattcttagagcatgtatcaaataggatagtgaatgaaatagaagaagtcagtagagtagtatacgatatctcaagtaagccacctgcgactattgagtgggaatga

SEQ ID NO: 317222 - DNA, 886 bp, Unknown
  Bacterial polypeptide expressing nucleotide sequence isolated from the Sargasso Sea
tagatctaaaaaattttatggggtacaatctcatccagaggtaactcacacaaaaaatggaaaaaaatttatcagtaattttatttttttaatatgtcgaattaagaaaaattggtcctccaaagatcaaaaaaagaaattaataaaagatgtaaaaaaacaagtagggggaaacaaagttatatgtgcactttcaggaggagtagacagtagcgttgttgctcaactattaaataaggcgattggtaaaaagctatattgtatttttgtaaatactggtcttcttagaaaaaatgaggagaagcaagtaattgaaacttttaaaaaaagattaaagattaatttaatttatgtaaatgctgaaaagttattcattaaaagattaaataatatttctgatccagaaaaaaaaaggaagataattggaaatttgtttattgaaatttttgaaagatatgcaaaaaaaattaaaaatgttaaattcttagcacaaggaacactttatccagatctaatagaaagtaaatctgtcactgggagtcacacttcaaaaattaaatctcatcataatgttggtggtttacctaaaaaaatgaaacttaaacttgtagagccattaaaatttttatttaaggatgaagttagaaaattaggattagagttaaatttaagtaaagaaatcatttcacgacatccttttccaggtcctggtttagctattagaatgccaggtataattacaaaagaaaaaataaatattcttaaagatgcagatcattattttatccaagctttgaaaaaaaataatctttataataaaatttggcaagcttatgccgctttgcttcctgtaaaaactgttggagttatgggcgataatcgaacc

SEQ ID NO: 317223 - DNA, 745 bp, Unknown
  Bacterial polypeptide expressing nucleotide sequence isolated from the Sargasso Sea
gaaaatatgaatttaaatgttattaaatctgatagtgaagaaattttcttaaggcacttggagggaattgaagaccctgagcagaaaagaaaaattattggaagaacttttatagatgtttttgatgctgaggcagccaagttaaataacatacattttttagctcaaggcacaatatatcctgacgtaatagaatcttctgtatcagaatctaaagaggcaagagttataaaatctcatcataatgttggtggtcttcctgatgaaatgaagatgaaattagttgaacctctgaaagatctatttaaagacgaagtcagaagaatgggaatagaacttggcctaccatcagaaattttatctagacatccattccctggcccaggacttggagtgagaatacttggtgagataacaaaagaaaaaacaacaatactaaaggaagccgaccacatttttattgatgagttagtagcagcggatctttataaaacagttagccaagctttcgcagtatatttaccaattaaatctgtaggagtggttggtgatgaaagaagatatgcagaagttataggattgagggcagttgaaactgttgatttcatgactgcaagatgggctcatctaccttatgattttcttgagcatgtatcaaacagaatagttaatgagattgagcaggtaagcagagttgtttatgatatttcaagtaagcctccagcaacaatagagtgggaatgaa

SEQ ID NO: 317224 - DNA, 826 bp, Unknown
  Bacterial polypeptide expressing nucleotide sequence isolated from the Sargasso Sea
gttgttgcacaactattaaacaagtctgtcggaaaacaactaaaatgtatatttgttaatacagggttgttaagaaaaaatgaagaaagacaggtcgtaaatacttttaaaaaaaaattaaaaatgaatcttatttatgtaaatgcagaaaaacaattcttaaagaagttaaaaaacattacagatcctgaaaaaaagagaaaaattattggtaatttatttattaaaatatttgagagatattcaaaaaaaattaaaaatgttaaattcttagctcaaggcactttgtatccagatttaattgaaagtaaatctgtgaccggttcacaaacatcaaaaataaaatcgcatcataatgttgggggtttaccaaaaaagatgaagcttgatttagttgaacctctaaaatttttgtttaaagatgaagttagaaaattaggacttgaactaaaactttcaagagaaattatttctagacatccattcccaggacctggtttagcaattagaatgcccggtgttattactaaagaaaaaataaaaatcttaaaagaggcagacttttattttatagacgaactaaaaaaacaaaatttatacgataaaatttggcaagcatatgctgcactattaccagtcaagacggtaggtgtgatgggtgacaacagaacatatgaatatatttgtttattaagagcaatcacatcatcagatggaatgacagctgactattttgatttctctaaaaaatttatgcaaaaagtttcaaataaaattataaataatattcggggtataaatagagtagtgtatgacgtgacatcga

SEQ ID NO: 317225 - DNA, 726 bp, Unknown
  Bacterial polypeptide expressing nucleotide sequence isolated from the Sargasso Sea
ttacatacgtaaatgctgagaaagagtttttaagaaaattatcaaatatttctgatcctgaaaagaaaagaaagataataggaaacttatttataaaaatatttgagcgttatgccaaaaaaattaaaaatgtaaaatttttggctcaaggaactctttaccctgacttaatagaaagtaaatcagttactggtagtcaaacatcaaaaattaaatctcaccataatgttggaggtcttccaaaaaaaatgaaacttaaactagtagagccattaaaatttttattcaaagacgaggtaagaaaacttggattagaacttaacttaagtaaagaaattatttctcgtcatccttttccaggacctggactggcaatacgaatgccaggaataataactaaagaaaagattaatattttaaaagaagctgatcattattttattcaagctttgagagatcacaaactatatcataaaatttggcaagcttatgcagctttactcccagttaaaacagttggagtaatgggtgataatagaacttatgagtatttgtgtttgcttagagcaataacatccgaagatggtatgacagcagatttttatgaatttaaaaaatcatttatacaagaaatttcaaataaaatagtgaatagtattagagggattaatagagtagtttacgatataacttcgaaaccaccgagtacaatcgaattagagtaaa

SEQ ID NO: 317226 - DNA, 526 bp, Unknown
  Bacterial polypeptide expressing nucleotide sequence isolated from the Sargasso Sea
agctaaagtcattaaatctcatcataatgttggtgggttaccagaaagaatgaatctaaaacttttagaaccatttcgtatgctttttaaagatgaggttagaaagataggaaaagccattaatctacctgatgagattattggtaggcatccttttccaggaccaggcttagggataagaataataggagaggttacaaaagagcgattagataaacttagagaagccgatcatattttcctctctgaaatgaagaaacataatctctacaatcaggctagccaagcctatgctttttatctgccgataaaatctgtaggagtagttggtgataatagaatttatgccgatgttatagggctaagatccgtagataccacagactttatgacagcaaacgtctcaaatcttcccaatgatttcattcaacatgtttcaacccgaatagttaatgaagtagaaggcataagtagagttgtatatgacgtgacttctaagcctcccgcaaccatcgaatgggaataa

SEQ ID NO: 317227 - DNA, 556 bp, Unknown
  Bacterial polypeptide expressing nucleotide sequence isolated from the Sargasso Sea
tattgagagcgtttcttttacgggcggaccatctgtgacaattaaaagccatcacaatgtaggagggcttccagaacgaatgaatatggagctagttgagcctttgcgagaactttttaaagatgaggtcagagaactcggaaaagaactaggaattcccagtcactttattgagagacacccattcccaggtcctggacttgcaattcgtttacctggtgaaatttcttctgaaaaagccgatattttaaggaaagctgacactatttatattgaagagataagaaaagccggactttataatgaaatttggcaagcttttgctgtacttttacctgttcagacggttggtgtgatgggagacgagagaacatatgattttgtttgtgctttaagggctgtgacttcacttgatggtatgacagcggattattatccttttgaacaagagttcttagctaatgtaagtactcgtattattaatgaagtaaaaggaattaatagagtggtttacgatataacatcaaaaccacccggcactattgagtgggaataa

SEQ ID NO: 317228 - DNA, 795 bp, Unknown
  Bacterial polypeptide expressing nucleotide sequence isolated from the Sargasso Sea
gtgggaaaagtaaagaatagcgaattttcatcagagtttggaagagcatttctaaaactaaaaaaagaaacaaacctactcgaaggctggtttattaactctaaggaagtagtttggatgagtcatggagatcacgtttcaaaaatagccccaggatttgaagtatttgccatctctaaaaatgcacctcatgctgtagttgcagatacaaaaagaaacttttatggtgttcaatttcatccagaagttcatcatacacccaaaggtattttactttttgaaaactttttgaaaattgccggttttaatggtgattggacaatgcaggcatataaaaaagaaatgatccaaaatataaaagatattgttaaaaaagatagagttatttgcggtatttcagggggtgtagatagtacagtgactgcaactttactccataaagctgtcaataaacagctaacctgtattttcgtaaatcatggtttcctaagaaaatatgaagaaaaagaagttttaaaaatgtttaaaaacaatataaaaatacccttgatatatgctgatgagagtgcactttttatgaaggaactacaaggagtagcagatccagaaataaaaagaaaaaaaataggaaaactattcataaatgtttttcaaaaatatgcaaaaaaaataaaaaatgcaaaatatttaggccaaggaactttataccctgatgttattgaaagtgtgtctgtaaatggacaaatctctgaaacgattaaatctcatcataatgtaggtggattaccaaaaaaa

SEQ ID NO: 317229 - DNA, 697 bp, Unknown
  Bacterial polypeptide expressing nucleotide sequence isolated from the Sargasso Sea
atgcaggatttcatagcagtgttggattttgggagtcaatatgctcatctgattgcgaaacgtattcgtcacattggtgcatacaccagaattttttctccatcgacaaataatacttctcttgctaaagctaaggggattgttttatctggtggaccagcatctgttaattcctcaaatgtaccagaattcaattcaaaattattagaacttgataagcctattctaggaatatgctatggtcatcaacttattgcgcaatcgtttggaggatcgatttcaaacaccggtaaaggagagtttgggaaagcgatactagagcataaatctgactctcctctttgggaaaacgtttcgttcccaaaccaggtgtggatgagtcatcaggatagtgttacaaaatgccctcaagaatttgatgttactgcagaaacagaaaatggtattttggctgctctgaaacaccgtcagcgtccaatattcacatttcaattccatcctgaagctacggattcttcccatggcaggatcatgcttaaaaattttgtcaacgcttgtgatgtaagctcaaaatggtctatggaaacttttatagagatcactattcaacgtttaagtaaggaagttgggaacagaaaagtactgatgtttctgagtggaggtgtcgattcgtcagtggcttttgctttgttaaata

SEQ ID NO: 317230 - DNA, 876 bp, Unknown
  Bacterial polypeptide expressing nucleotide sequence isolated from the Sargasso Sea
aaaagaaattatagacctgggcaagcctattttgggtatatgctatggacaacaagttttagttcaacaacttggaggtactgtagtatcgtctgaaaaaagtgagtttggaagagctaatataaaagtagtatcgtcttgttctctgacggaccaagtatgggataaaggtaaaaaataccaggtgtggatgagccatggcgacagtgtagtcgaaatgccagaaggttttgatttagtggctgaaactgagggggcagcttttgctgtaatagcaaatgaaaaagctaaacaatatggtgttcaattccacccagaggtagtgcatactctagatggaaaaaatttaattcataattttgtaaaaaaaatttcaggttgtaaaactacatggaatatggggtcctttatagattataaagttgatattttaaaaaatcaggtaggattagaaaaagtattatgtggcttatctggcggtgttgattcatcagttaccgcagctttattagataaagctattggtgaccaattagtttgtgtttttgtagatcacggtctacttagaggaggtgaagcggaagaaatttgttctatttttaaaagaagacttggtcctaggtttattaatgttaaagcagaaaaagtatttttagatgccttacaaggtataaatgatcctgaaaagaaaagaaaaattataggtaataaatttatagaagtttttgaatctgaagcaaaaaaattgggaaatattcaatttttagcacaaggaacattatatccagatgtaattgaatctgtatctttttcaggaggtccttctgtaactattaaatctcatcataatgtagggggtttgcctgaaaaaatgaa

SEQ ID NO: 317231 - DNA, 871 bp, Unknown
  Bacterial polypeptide expressing nucleotide sequence isolated from the Sargasso Sea
actgaaccataaaaaagcaaataattttaagatatttaataaatatattagaggaataattttatcaggaggacctcttaatgtatatgaaagtaataaatttaagtttaataaaagaatttttaatttgaatattccaattcttggaatatgttttggacaccaaattatttctaaagaacttggaggcaaggtacaaaagtcagaatttagagaatttggtctagcacaagttaaaaaaattaatgacagtcaactagttaaaaatttttttaataaaaaaaatattaataatgtatggatgagccacggtgatcaagtatctaaacttccaaatgattttaaaataattgcatcaagtaaaaattctaaatttacaataattgaaaattataagaaaaaattttatggagttcaatttcatccagaagtaactcatacaaataaaggaagagtagttttaaaaaattttttattttctatatgtaaaattaaaaaaaattggtcatcaaaacatcaaaaattaaagctaatcaaagatgtaaaagaacaagtaggacgcaataaagtcatatgtgctttatctggtggagttgatagcagtgttgttgctcaactattaagtaaagccattggtaaaaaacttacatgtatttttgtaaatactggattacttagaaaaaatgaagaaagacaagtaataaatattttcaaaaaaaaattgaagattaatttaatttatgtgaatgctaaaaaagaatttattaaaaagttaaaaaatatatctaatcctgaaaaaaaaaggaaaattataggcaatttatttatcaaaatatttgaaagatatgcaaaaaaaataaaaaatattaaa

SEQ ID NO: 317232 - DNA, 625 bp, Unknown
  Bacterial polypeptide expressing nucleotide sequence isolated from the Sargasso Sea
atgagtcttgatcaaaatctaaacaaaatattgattgtagattttggttcccagtttactcaattaatagcacgaagaataagagaattaggagttttttctgaaattataagtcacaaaaaaattaaaattaaagacattaacaaaagtgttagaggaataattttgtccggaggaccattaaacgtatatcaaattaacaaatattcttttgacaaaaaaatattagatttgaaacttccaattttagggatttgttttggccatcaaatactttcgaaattgaatggtggaaaagtaaaacaatcaaaacaccgtgaatttggcttggctaagatttataaaaaaaaagaaagccttttaacaaaaaatttctttggaacaaaaaaaacaaaaaaggtatggatgagtcattcagatcaagtatccaaactacctttaaattttaaggttattgctacaagtacaaattcaaaatttgcaattgttgaaaacaaaaacaaaaagttttttggtatacaatttcatcccgaagtaacacatactgaaagtggaaaaaaactgataagaaattttattttcttaatatgtaaaattaagagaaattggtcttccaaagatcaaa

SEQ ID NO: 317233 - DNA, 820 bp, Unknown
  Bacterial polypeptide expressing nucleotide sequence isolated from the Sargasso Sea
aattattgattttggatctcaagtgacaaaacttatagctagaagaataagggaatttggagttttttcagaaattttaacaattaatgatctctataaaattagagattataaaaaaataaaaggaatagttttatcaggtggaccctcaactgtaacaaagaaaaaatatctaaaaattccaaaagaaatattcctaaaaaaaattcctgttcttggaatatgttatgggttgcaattaataacaaaattatttggcggttcaattaaatctttgagaaaaaaaagggaatttgggagagctatactttataaaaaaagaaaatctttacttatcaaaaattttttcgatactaagaaaaaatccgtatggatgagccatcaagatgcagtaactaaactacctaaaggctttaaagtagttgcgtcaacaaaagaatctaagttaactattattgaaaatactaaaattaaaatctacggggtacaatttcatccagaagttacacatacagaaaatggaaaagaaatttttaaaaattttttattttctatatgtaaaatgaaaaaaaaatggcgagtagcttctgaagcaaatagattgattaacgatataagaaaaactgttaaaaaagataaagtaatttgcgcattgtcaggaggcgtagatagtagcgtggttgctttattggttaataaagctattaaaaagaatcttatttgtataatggtcgatacaggattaatgagaaagaacgaattcaaagactcatatgatatatttaaaaaaaagtataagctaaatgtaaaattaattaat

SEQ ID NO: 317234 - DNA, 700 bp, Unknown
  Bacterial polypeptide expressing nucleotide sequence isolated from the Sargasso Sea
aatgtctgaaaagattttaatcattgattgtggatcacaatatacgcaactaattgcgagaagagtaagagaattaaatgtttattgtgaaattcattcatttgaaattagcttagcatcaattttaaaatacaaaccaaaaggaataataatatctggcggtcctgactcagtatatggaaattctaatttaaataatttaggaaaaatattcacgttggaaattcctgtccttggaatttgctttggaatgcaactaatagctaaattttttggaggagaggtccaagagtcaaaaactagagaatttggatatgctgaagtaagattgagaggacattcaaatctatttacaggtatcgaggatcgaaaaaataatgatggaaatgcatttttagacgtatggatgagtcatggggacagcgtagtaaaacttcctgataaatttaaggttatagcctcaaataaggatactcccctagctggaatcgcacttgaggagaaaaaaatttatggattacaatttcatccagaagtaacacataccaaaaaaggcaaattaattataaaaaaatttatttcgaacatttgtgatacaaagcaatcttggttcatttcaaattttcttaaccaatccatctctgagataaaaaaaacgatcaaaaatgagaaagtaattttaggtttatctggcggtgta

SEQ ID NO: 317235 - DNA, 862 bp, Unknown
  Bacterial polypeptide expressing nucleotide sequence isolated from the Sargasso Sea
actatattttagttcttttgactttggatctcaatatactcaattaattgctagaagagtaagagaaagtaaagtttattcagaaattcttccttgggatattaacgatcaaaaaataaggatgttaaatccaaaaggtgttattttatctggaggccctaactcagttactgaaagttttacaccaagagttccacaagttatttttgatttatcagttccagttcttggaatctgttacggtatgcaaactctagctgaacaaatgggaggacacgttgtgtctgtagatcaaaaggagtttggacattcatctcttgatgttgtttcaaattcaaaaatatttgaaggcattaataaaaaattaaacgtttggatgagtcatggtgatcaagtacaagatttaccagataattttaatcttatagcgtcaacctcgactgccccaattgctgttatggaacacgaatctttgccaatatatggaattcaatttcaccctgaggtaactcacaccgagcagggtaaaaaaatattggataattttattttgaatatatgtcatgctaaaactgaatggaatattgatgacgtaatttcacaaagaattgatgacataaaagaaaaagttaaaaatgataaggttcttctcggtttatctggtggagttgattcttctgtaacagcaacattacttcataaagcaataggcaagaatctaacttgtgtttttgtagataatggacttttaagaaaaggtgaagcagaagatgtaatgcaaaccttcaaagaaaacatgagcctaaatgttattaaatcagatagtgaggagatttttctcaggcatttaaaaaatattgaa

SEQ ID NO: 317236 - DNA, 465 bp, Unknown
  Bacterial polypeptide expressing nucleotide sequence isolated from the Sargasso Sea
aatgagtcttgataagaatttgaacaaaatcttaataatagattttggttcacaatttactcagttaatagccaggcgaataagagagtcaggagtttattccgaaattataagtcataaaaaggttaaaaataaaaatattgataattccattaaaggaataattttatcaggcggaccattaaatgtttaccaaattaacaaatattcttttgataaaaggattatagaaaatcaaataccgatcttaggtatttgctttggtcatcaaattttatcaaaacttaacgggggcagagttaaacaatcaaaatatagagagtttggattagcaaatattcgcaaaaagagggaaagtattttgacaaaaaacttctttaataaaaaaaatattaataaagtttggatgagtcatgctgatcaagtttcgaaacttcccaaaaattttagtgttattgcctcaag

SEQ ID NO: 317237 - DNA, 797 bp, Unknown
  Bacterial polypeptide expressing nucleotide sequence isolated from the Sargasso Sea
tattggtaaaaaactttattgtatttttgtaaacacaggccttttaagaaaaaatgaagaagtacaggtagttcaaacttttaagaaacgtttaaaaatgaatttaatttatgtaaatgctgaaaaggaattcttaaaaaaattaaaaaatgtttctgatccagaaaaaaaaagaaaaataattggtaatttatttatcaaaatatttgagcgatacgctaagaaaattaaaaatgttaaatttttagctcagggcactctttatccagacttgattgaaagtaaatcagttactggtagtcaaacttctaaaattaaatcacatcataatgttggtggcttaccaaaaaaaatgaatttaaaattagtagaaccactaaaattcttgtttaaggatgaggtaagaaaattaggattagagttaaatttaagtaaagaaattatttcaagacatccttttcctggaccaggtttagcaattcgaatgccaggtgcaatcacaaacgaaaaaattaaaattttaaaagaagcagattattattttattcaagctttaaaagaccacagtctttatcatgagatttggcaagcttatgcagcattacttccagtaaaaaccgtgggtgttatgggagacaatcgaacttatgaatatttatgtttattaagagcaattacgtctgaagatggaatgacagcagattattatgaatttaaaaagtcttttatgcagtctatatcaaacaaaatagtcaacagcataagaggtatcaacagagttgtttatgatgttacat

SEQ ID NO: 317238 - DNA, 646 bp, Unknown
  Bacterial polypeptide expressing nucleotide sequence isolated from the Sargasso Sea
aattggttcaacatttattaatgtctttgaacgtgttgcaatagaagctggtggggcagacttcctagctcaaggaactttataccctgatgtaattgaaagtatttctgtagcaggcccgagtgttgttataaaatctcaccacaatgttggcgggcttcctgagcggatggacttgaagttagttgagccagtaagagagttgtttaaggatgaggttcgagaacttggtagacaattaaatttatctgaattgttggttggtcgccatcccttcccaggaccaggattggcaattcgaatccctggagaagtaaccagggaaagggcagatattttgaggagagcagatttaatttttctcgaagagattcgtaatgccaatttatatgatgaaatatggcaagcatttgccgttcttttgccagtccgaacagttggtgttatgggtgatgctcgtacttatgatcatgtttgtgcgttaagggctattacatctactgatggtatgacggcagacttttatccttttgatatggtatttcttggtcgggtggctagcaggatagtgaatgaggtgcgcggcataaacagagtagtgtatgatgtgacaagtaagccccctggaacgatagagtgggagtga

SEQ ID NO: 317239 - DNA, 590 bp, Unknown
  Bacterial polypeptide expressing nucleotide sequence isolated from the Sargasso Sea
tatggcaaagaatatccttgccgataagattttaataattgacttcggttcacagtacacacaactaattgccagaagagttagagaattaggtgtttattgcgagatatataaccatcgtgcttctcttaaatctattaaagactttaatgcaaaaggcatcatcctgtctggaggtccagaaaccgtaaagcaaaaaggttctcctaaaataccagacaaagtatttgatttaggcattccacttcttggtatttgctatggcatgcaatccatagccaagcaactcaaaggaaaagttgaattagcggataaaagagaattcggacatgctgatctattattgaaaaataaagggtctggactttttaaaggtataaacaataacaaaatcggtgtttggatgagccatggagaccatgtttccaaacttcctaaagattttaaggtttgcgcaacaaccaaaaacagtcctatagcagcctttcatcatccaacaaaaaagatattcggtcttcagtttcatcctgaggtaacccacacaccgcaaggcaagaagatattgaaaaactttgttagagatatatcgg

SEQ ID NO: 317240 - DNA, 672 bp, Unknown
  Bacterial polypeptide expressing nucleotide sequence isolated from the Sargasso Sea
cagatcctgaaaagaaaagaaaaatcatagggaagtgtttcattgatacttttaataaagctgccttaaaaatcaaagaagtaaaatttctcgcccaaggaacaatatatccagatgtcattgaatcatcctcaaaaaactctaagtctgatattattaaatcacatcataacgttggcggtctcccaaaaaatatgaagcttaagcttgttgaaccaataagagaccttttcaaagatgaggtgagaagaatcggtaaacagttaggtctacctaatagcttactagaaagacatccttttcctgggccgggtctagccgtaagaattttaggagaagtaaatcatatcaaagtaaatattttacaagaagttgactctatttttcttgatgaactcagagttaatggtttctataataaaactgatcaagcgctctgtgtcttgattccgcagaaatctgtaggtgtgatgggtgataaaaggcaatatgggtttgttgtagctattagagctgtcaatacaactgattttatgacagcaacatcgacaccaatccctcataaattgttaaataatatttcctctcgaattattaatgaagttaatggtgtagcaagagtcgtatatgatattacctcgaaaccacctggcacaattgagtgggaatagt

SEQ ID NO: 317241 - DNA, 746 bp, Unknown
  Bacterial polypeptide expressing nucleotide sequence isolated from the Sargasso Sea
aatgagtcttgatcaaaatttagataaaatcttaatcatagattttggatctcaatttactcagttgatagctagaagaataagggaactgggtgttttttcagaaatagttagtcataaaaaaattaaaaataaaaatattaataattctattaagggtttaattttatctggaggccctatgaatgtttatgaaataaataaatattcatttgataaaaaaataattgaaaatcaaataccagttttaggtatttgttttggtcatcaaattctatcaaaattgagtggtggtcaagtcaagcaatctaaacatagagagtttggcctggcaaatatttataaaaaaaaagatagccttctaactaaaaaactatttgataataaaaaaaaaattaaagtatggatgagtcatgctgatcaagtttcaaaattaccaagaaacttcaaagtaatagcttcaagtcaaaattcaaaatttgcaatagttgaaaataaatctaaaaaattttatggagttcagtttcatcctgaagtaactcatactgaaaatggaaaaaaaattattagaaattttatttttttgatatgtagaataaaaaaaaactggtcttcaaaagatcaaaaaattagattaattaaagatattagaaatcaagtgatgaataataaagttatttgtgcactttctggaggagtagatagtagtgttgttgcacaattattaataaagctattggaaaaaa

SEQ ID NO: 317242 - DNA, 556 bp, Unknown
  Bacterial polypeptide expressing nucleotide sequence isolated from the Sargasso Sea
aattgaaagcaaaactgtaactggaagtccttcttcaaaaattaagtctcatcacaatgttggtggtttaccaaaaaaaatgagtcttgcgttagttgaacctcttagtagtttatttaaggatgaagtaagaaaacttggtaaacaattattagtacctaaagatattttattaagacatccatttcctgggcctggcctcgcaataagaattcctggaaaaattacaaaagaaaaagttgatattttgaaagaagctgattttatatttattaatgaattaaaaaaattaaatctttataataaaatttggcaagcttacgctgctttgttaccacttaaaactgttggtgttatgggtgataaaagaacttacgaatatacatgcctattaagagctgttacttctgaagatggaatgactgctgattttttttcttttaataaagattttttccaaagaatatctaataaaattattaactcagttagtggaataaacagagtggtttatgatataacctcaaaaccgccaagtacaattgaattagaataa

SEQ ID NO: 317243 - DNA, 511 bp, Unknown
  Bacterial polypeptide expressing nucleotide sequence isolated from the Sargasso Sea
atcacatcataatgttggaggccttccagatgaaatgaagctggatttagttgagcccttaagagatctctttaaagacgaggtgagaaaaatgggtaaagagcttggattgcctcaagaaatgttagacagacatccatttcctggtcctggtctgggtgtaagaataataggtgagataacaaaagaaaaaacaaaaattctaaaagaggcagatcatatttttatacaggagcttattaaggctgatttgtatgatcaagtctctcaagcatttgcagttcttttgccagtgaaatctgttggagttgttggcgatgagaggcgatatgcagaagtaattggtttaagggccgttgaaactgtagatttcatgactgctaagtgggcgcatttaccttatgattttcttgaacttgtatcaaatagaatagttaatgagatagaagatgtcagtagagtggtttatgacatatcaagcaaacctcctgcaaccatagagtgggaatga

SEQ ID NO: 317244 - DNA, 886 bp, Unknown
  Bacterial polypeptide expressing nucleotide sequence isolated from the Sargasso Sea
tgtggtctttcaggaggggtagattcatctgttgctgctgttcttattcatgaagcaataggagaccaattgacatgcatttatgtggataccggtttaatgcgagagaatgaaacggatgaagtggtaaatctatttagagaaaattttaatattcctcttatagatgttgatgcaggcgatacttttttaactagattgactggagtaagtgatcctgaagaaaaaagaaaaattattggttcttcttttatcgatatttttgaagaagaggcaaataaaattggcggagctgattttttagctcaaggaactctttatccggatgttattgagagcgtttcttttacgggcggaccatctgtgacaattaaaagccatcacaatgtaggagggcttccagaacgaatgaatatggagctagttgagcctttgcgagaactttttaaagatgaggtcagagaactcggaaaagaattaggaattcccagtcactttattgagagacacccttttccaggccctggacttgcaattcgtttacctggtgaaatttcttctgaaaaagctgatattttaagaaaagctgacactatttatattgaagagataagaaaagccggactttataatgagatttggcaagcttttgctgtacttttacctgttcagacggttggtgtgatgggagacgagagaacatatgattttgtttgtgctttaagggctgtgacttcacttgatggtatgacagcggattattatccttttgaacaagagttcttagctaatgtaagtactcgtattattaatgaagtaaaaggaattaatagagtggtttatgatataacatcaaaaccacctggcactattgagtgggaataat

SEQ ID NO: 317245 - DNA, 796 bp, Unknown
  Bacterial polypeptide expressing nucleotide sequence isolated from the Sargasso Sea
gatgaaaaaaatcttagttatagatttcggttctcaatacacacaacttattgcaagaaggctcagagagctcaatatatactccgaagtacgtccttgggatgaggtcgcaaatcttgaagatgttaaaggatttgttctttcaggtggtccagagtcctcaaatatagatggcaatcccaaaatagataaaagcatatttgattctaaaaaacctatcttaggtgtttgttatggaatgcaagtgcttgcacatcaagaaggtggggagatagccaacgagggcaaaaaagaatttggtcacgctgaaattgagctgaaaaataattctttgatatttaatggtattgatgaaaaagtaaatgtatggatgtcacatggtgacaaagtgaaatcactccctgaaggatatgaaattattgcttcttctaataactcaccaattgcagcatttcaaaatcattcaaaaaatcactttggattgcaattccaccctgaggttactcatacaaaatttggtactaaaatcattgaaaacttcgtagagatgtgtgacattcagcaaaattggaatgcatcaaatattcttaatcaaataaatgaagaagttgcaagaacggcaaaaaatgagaatgtattattagcattaagtggcggtgtagattctacagttctagcagcagttctttataaaatattaggcaaacgactaacatgtgtcatggtagatcatggtttactaagaatgaacgaaggaaaaaatgtgataaataatttgaaagaaaaatcggtttag

SEQ ID NO: 317246 - DNA, 847 bp, Unknown
  Bacterial polypeptide expressing nucleotide sequence isolated from the Sargasso Sea
aatcacagtattaaaggaatagtattatctggtggtccattaaatgtttatcaaataaataaatattcatttgataaaaaaattttacaacttgatgtaccagttcttggaatatgttttgggcatcaaattttatcaaaacttaacggtggaagggtaaaacaatcaaaacatagagaatttggtttagctaatgtttataaaaagaataacagtcttttaacaactaatttttttggaaataaaaaatccaaacaagtttggatgagtcatgctgatcaagtttcaaaacttcctaagaattttaaagttttagcatcaagcacaaattcaaaatttgcaattgttgaaaataaaataaaaaaatattatggggtacaatttcatcccgaagtaactcatacacagaatggaaagaaattaataagtaatttcatttttttaatttgtaaaattaaaaaaaattggtcctctaaggatcaaaaaaatcagcttattaaagatgcaagaaaacaagttggaaataacaaagtgatttgtgctttatcaggaggtgtagatagtagtgtagttgctcaattactaaataaagctattggaaaaaaactttattgtattttcgtaaacactggccttttaagaaaaaatgaggaaacacaagtagttcaaacttttaagaagcgtttaaaaatgaatttaatttacgtaaatgctgaaaaagaattcttaaaaaaattaagaaatgtttctgatccagagaaaaaaagaaaaataatcggtaatttatttattaaaatatttgagcggtatgctaagaaattcaaaaatgttaaatttttagctcaag

SEQ ID NO: 317247 - DNA, 866 bp, Unknown
  Bacterial polypeptide expressing nucleotide sequence isolated from the Sargasso Sea
ggacagcagtgttgttgctcaattactgaataaagctattggcaaaaaactttattgtatttttgttaataccggtcttctaagaaaaaatgaggaagtacaagtagttcaaacttttaagaagcgtttaaaaatgaatttaatttatgtaaatgctgaaaaggaattcttaaaaaaattaaaaaatgtttctgatccagaaaaaaaaagaaaaataattggtaatttatttattaaaatatttgagcgatatgctaagaaaattaaaaatgttaaatttttagctcagggaactctttatccagatttaattgagagtaaatctgttactggtagtcaaacttctaaaataaaatctcatcataatgttgggggtttacccaaaaaaatgaatttaaagttagtagaaccacttaaattcttgtttaaagacgaagttagaaaattaggattagagctaaatttaagtaaagaaattatatcaaggcacccttttcctggaccaggattagcaattcgaatgccaggtataattaccaatgagaaaataaaaattttaaaagaagctgactattatttcattcaagctttaagagatcatggtctctaccataagatttggcaagcttatgcagcattacttccagtaaaaactgtgggtgttatgggagacaatcgaacttatgaatatttatgtttattaagagcaattacgtctgaagatggaatgacagcagattattatgaatttaaaaaatcatttatgcaaactattgcaaataaaatagttaacagcataagaggaattaatagagttgtttatgatgttacatcaaaaccgccaagtaccatcgaattggaatagt

SEQ ID NO: 317248 - DNA, 451 bp, Unknown
  Bacterial polypeptide expressing nucleotide sequence isolated from the Sargasso Sea
aatgagtcatgataattatttacacaaaatcttaattgtagattttggatcacaatttacacaattaattgctagaagaattagagagttaggtgttttttctgaaattataagtcataaaaaaattaagataaaagatatagataaatcagtaaaagggattattttatctggtggacctttaaatgtttatgaaattaaaaaatattcatttgataaaaggataattcaaaataaattgccagttttaggaatttgttttggtcatcaaattttatctaaaataaatggtggtaaagttaaacaatcaaaacaccgagaatttggcttagcaaatatttatagaataaaagaaagtcttttaacaaaaaatctttttaacaaaaaaaaattcattagagtttggatgagtcacgcagaccaggtttcaaaattaccgaaaaactttagt

SEQ ID NO: 317249 - DNA, 919 bp, Unknown
  Bacterial polypeptide expressing nucleotide sequence isolated from the Sargasso Sea
atattaattttagatttcggatctcaatactcggagttaattgcaagaagaattagagaaactaatgttttttctcttgtagtaagtaattgcatttcaattcaggacattaatggtataaatcctaaaggaattattttgagtggaggcccaaattctgtttatgaacaaaatgctcctaaatgtgatgagaaaatttttaatctaggaattcctattcttggcatatgctatggaatgcaattaatggtcaaagaacttggaggatctgttatttcagcaaccaaaaaagctgaatatggtagagcaccactaaatatagatcaggaatccgacctcctttttgatgtagaagataaatctataatgtggatgagtcatggcgattcaattaattgtctgcctgatggttttaataagattgctcataccgagaacacaccccatgcagcaatttcaaatgatgaaaagaaattatttggcgtacaatttcatcctgaagttgtgcattcagagtttggaatgacggtaattaaaaactttgtttataaaatttcttgttgtgcggctgattggacaaccgaaacatatatagatgaaactattccaagaataagagagcaagttggcaataaaaaagttttacttgccttatctggaggagtggattcttcaactcttgcttttcttctcaataaagccattggaaatcagcttacatgcatgtttatagaccaaggtttcatgaggaaaggtgaaccagaatttttaatgaatttttttgataagaaatttgacataaaagttgaatatattaatgcaagggaaaggtttattgccaaattaaaaggtattactgatccagaacaaaaaagaaaaataataggtgaagaatttattagagtattgaggaagaaag

SEQ ID NO: 317250 - DNA, 922 bp, Unknown
  Bacterial polypeptide expressing nucleotide sequence isolated from the Sargasso Sea
ataaaaaaccaagcttctggtttatttaagaaaattaaggctaaaaagatcaatgtatggatgagtcacggtgatcatgtctctaagttgcccaaaggctttaaatcttgcgggaccacctcgaacagtcctatagctgctttgtatcatcctactaagaagatatttgggcttcaatttcatcccgaggtaactcacacgccacaaggcaagcaaatactaaagaatttcgtaagagatatatcaaattgtaaaggtctctggaattctaagaatattattacgaaagcagtcgaagagatcaaaagagaggtaggtgaccaggaagtgttactcggtttgtcagggggagtagactccgcagttgttgccgctctattatctgaagcgatagacgatcaactcacttgtatttttgttgataatggccttttacgattgaacgaaggagatcaggtgatgaataccttcaaagatagatttggtattaaagtaaagagagcaaatgctggtaatcaattcttaaaagatcttaaaggaaaaaaagaccctgaacataaacgtaaagccattggtaaaacttttattgatgtttttctcaaagaagctaaaaagaataagaaaataaagtggttggctcaaggaacaatctatccagacgtcattgaatcagcaggcaccaaaaatggtacagcccatgttattaaatctcatcataacgtaggcggcttaccaagttatcttaatttaccggttattgagcccctcaaagatctttttaaagacgaagtaagaaagataggtttagagctaggattacctaaagaaattctctttagacatccatttccaggtcctggtttgggcgaaaggattctaggcgagataaaaagaccttacataaagacccttcaattagcag

SEQ ID NO: 317251 - DNA, 862 bp, Unknown
  Bacterial polypeptide expressing nucleotide sequence isolated from the Sargasso Sea
ttaaagggtaaagtaaagcgttcaactaatagagaatacggatatacattattaaatattaaaaacagatctccaatatttaaaggtataaaaaaaaataaatttacagtatggatgtcgcatggagataacataaataaaattccaaaacattttactatttcttcaatttcggataataaaattatttcttcaattgaaaatataaaaagcaaaatttactgtcttcaatttcatccagaagtttttcatacagattacggtttaaaaattattaataattttgttttcaatataactaaaataaaaataaaatttaaaatagaaaattttatagataataaaattcaagaattaaaaaaacaaattcaggataaaaaaataatatgtggtttatcaggaggtgtagattcaactgttacagcatatttattgagcaaagcaataaataaaaatttatattgtatttttgttgatcatggttttctaagaaaaaatgaagcaattgaagtatcaaagatatttagaataaagtttggaaaaaattttattaaaattaatgcttcgaatattttcttgaataaactaaaaaatatttctgatccagaaaaaaaaagaaaaattattggaaaaacatttattgaagtatttgaaaaagaagcaaaaaaaatatccaatgttaaatatttagggcagggaactctatacccagatgtaatagaaagtttaccattctttggaggaccaactgctaagattaaaagtcatcataacgtcggagggcttcccaaaaaaatgaaacttaaaataatagaaccattgagagaattatttaaagatgaagttagaaatgttggtaaaa

SEQ ID NO: 317252 - DNA, 907 bp, Unknown
  Bacterial polypeptide expressing nucleotide sequence isolated from the Sargasso Sea
taaaaaattaaacaaaagtaaactaacaaataatttttttaataaaaatggaataaataatgtatggatgagtcatgccgatgaggttgtgaaattagcaaaaggatttaaaattattgcaaaaacaaattcatcaaagttttcaattatagagaatagatcaaaaaatttttatggaattcaatttcatcctgaagtttcacatacagaaaaaggaaaagttataataaaaaactttattttctctatatgcaaaatgaaaagaaattggacatcaaaaaatcaaaaacatgtattgataaaagaagtaaaacaaaagattggaaaatcaaaagttatttgtgctttatcaggaggtgttgatagcagtgttgttgctaagttgatccataatgctataggtaagcaattattttgtatttttgtaaatacaggcttattaagaaaaaacgaggaaactcaagttattaaaacatttaagaaaaaatttaaaataaatcttatctatgttgatgctaaaaaattgtttttaaataaactaaaaaatattaaagatcctgaaaagaaaagaaaaattattggtaatttatttattatgatttttgaaaaatacgcaaaaaaaattaaaaatgtaaaattcttagctcaaggtactctttacccagatttaattgaaagtaggtcagtgacaggaagtcaaacatctaaaattaaatctcatcataacgttggtggattaccaaaaaaaatgaaactaaaattagtcgaacctttgaaattgctttttaaagatgaagtgagaaaattaggcttagagcttaaattatcaaaagatattgtattaagacacccctttcctggtccaggtttagcaataagaatgccgggaagaaataacagaaaataa

SEQ ID NO: 317253 - DNA, 550 bp, Unknown
  Bacterial polypeptide expressing nucleotide sequence isolated from the Sargasso Sea
atgtctcagccttcgtccgacggtcagcgtcagccggccatcgtcatccttgatttcggttcccagtactcggagctgatcgcccggcgcgtgcgcgaaaccgaggtgttttcggtggtgctcggctacagcacctcagcggaggagttgcgggcaatgcagcctaaggggatcatcctcagcggcggccccagttcggtgtacgccgagcacgcgcccctctgtgatccggcaatctgggagctgggcatcccggtgctgggggtttgctacggcatgcagctgatggtgcagcagctggggggcgtggtggaagccgctagcggcaaggccgaatacggtaaggcaccgctagaggtggacgatcccaccgatctcctcaccaacgtcaccggtggatccacgatgtggatgagccatggcgactcggtgaaggccctgcccgagggatttgttcgcctggcccacaccgccaacaccccggaagccgcggttgcccatctgcagcgtcgcctctacggggtgcagttccaccccgaggtggtgcact

SEQ ID NO: 317254 - DNA, 775 bp, Unknown
  Bacterial polypeptide expressing nucleotide sequence isolated from the Sargasso Sea
gagttgtttaaattgaatataccgattttagggatttgttttggtcaccaagtaatatctaaagaattgggtggtaaagttaaaaaagcaaaacatagagaatttggactagcaaaattgagcagaataaagaacagcaggctaactcaaaatttttttaataaaagtggctcaaataatgtttggatgagccatgcagatgaagtgactaaattagcaaaaggatttaaagtagtcgcaaaaactgaaacgtctaaattttcagtaattgaaaattcttctaaaaaactttatggaatccaatttcatcctgaagtaacccataccgagaaaggaaaaataattttaaaaaactttgttttttcaatttgtatgattaaaaaaaattggacatctaaaaatcaaaaaaaaattcttatacatgatgttaaaaaaattgtaggaaattccaatgttatatgtgctctttccggaggtgtagacagcagtgttgttgcaaaattaattcataacgcaataggaaaaaagctgacatgtatttttgtaaatacaggtttattgagaaaaaatgaagaagctcaagttataaaaacttttaaaaaaaaatttaagataaatctgatttatgtagatgctaaaagcctttttttaaataagcttagaaaagtttctgatcccgaaaagaaaagaaaaataattggaaatctttttattaaaatttttgaaaaatatgcaaaaaagacaaaaaatgttaaatatttagcgcaaggcacat

SEQ ID NO: 317255 - DNA, 838 bp, Unknown
  Bacterial polypeptide expressing nucleotide sequence isolated from the Sargasso Sea
tgataaagcagtaaaaaaaaaccttatatgtgtaatggtggatacaggtttaatgagaaaaaatgagtttaaacatacctatcaaatatttaaaaaaaaatataaattaaacgtcaaacttataaatgcgtcagatattttttatagaaaacttaaaaatattgttgatccagagcaaaaaagaagaataatcggtaatttatttataaaagtttttgagaaggaatctaaaaagtacaaaaaaattaagtacttagcacagggaactttatatccagatattattgagagcaaatcagctactggaagcaaaacctccaaaattaaatctcatcataatgttggcgggctgccaaaaagaatgaatttaaagttaatagagccattaaaagaattatttaaggatgaggcaagacttttagggaagtcagtaggtttatcccaagagattgtaaatagacatccttttccaggtcctggacttgctatccgaattttgggtaaagttacaccaaaaaaaataaagattttacaagaaatagataatatttttgttaaagaattggttaaaaataatttatataataaaatttggcaagcatatgcagctttattgccagtaaaaaccgtcggagtcatgggagactcgcgaacctacgaatatacttgtttaatcagggctgtaaaatcagaggatgggatgacagcagatttttataattttaaaaaagattttttagacaaaatatcaaataaaattataaatggtgtaattggcgttaacagagtagtatatgatataacttcgaaaccaccaggtacgattgaacttgaataa

SEQ ID NO: 317256 - DNA, 640 bp, Unknown
  Bacterial polypeptide expressing nucleotide sequence isolated from the Sargasso Sea
atggaaaagataattgttttagattttggttctcagtatagtcatttaatctgcagaagaataagagaattttcagtgtatgcagaattagttccatatgacataactcctgaagaattaaagaaaatgaatccaaaagggattattttttcaggaggtccatcaagcgtctataatgacgattcgccaaagccagatgaagaattattcgactttaacttgccgctattaggaatttgttatggtcatcaattaattgtaaataaatttggaggtaaagtcaagagagcaaacaaagaatatggttcatccctcctatcaatggataaaaattctgtattattagatggaattggtgaatctattcgtgcatggatgagtcatggtgacgaagctgaagaaattccaactaattttgaagttattggacacacagagaattcacatgcagctgcaattgcaaatacagaaagaacagtttttgggattcagtttcatccagaagtagtacatacagaacgtggtacggacattttgaagaattttgttctgaatgtgtgtaaagcaaaacaggaatggacgatggaaggatttgtagagaagacagttaaaggaatatcagaaattgatggaaacgttc

SEQ ID NO: 317257 - DNA, 910 bp, Unknown
  Bacterial polypeptide expressing nucleotide sequence isolated from the Sargasso Sea
atgtttgggcatcaaattttatccaaatataatggtggaagggtaaaacagtctaaacacagagaatttggattagcacaaatttttaaaaaaaaaaatagtttattagtaaaaaatttttttaataaaaaaagatttaatagggtttggatgagtcacgcagatcaagtttctaagttaccaaaaaattttaaagttattgcttctacaaagaactcaagatttgcaatagttgaaaatgaaaatcaaaatttatttggagtacagtttcatccagaagtaacacatacagaaaatggaaaaaaaattctaagtaattttgtttttttaatatgcaaaattaaaaagaattggtctcctaaagatcaaaaaatccaattaatcaaagatgtaagagaacaagttggatcaagtaaagtaatttgtgcactttcaggaggggtagatagcagtgttgtttcacaactacttaataaagcaatcggtaaaaaactttattgtatttttgttaatacaggtttgttaagaaaaaatgaagaaactcaagttataagaatttttaaaaaaaaattaaaattaaatataatttatgtgaatgcagaaaaagaatttttaaaaaaacttaaaaatgtttctgatccagaagataaaagaaaaataattgggaacttgtttataaaaatttttgaaaaacacgctaaaaaaataaaagatgttaaatttttagctcaaggaactctttatccagatttaattgagagcaaatctgttactggaagtcaatcctcaaaaattaaatctcatcataatgttggaggtttaccaaaaaaaatgaaacttaaattaattgaaccacttaaatatttatttaaagatgaagttagaaaattaggattagagttaaattaaa

SEQ ID NO: 317258 - DNA, 917 bp, Unknown
  Bacterial polypeptide expressing nucleotide sequence isolated from the Sargasso Sea
tatgataaacttactaggaggaaaagttgaaaaaggtgttgcaacggcagaatttggacgggcttttatcataccaagtgggaaaaaaactgattttttaattggatgctttgttaatggcagtgaagaggtttggatgagtcatggtgatcatgtttcagaaaatgcggaaggttttgaagtgtttgctaagtcctcaagcgctccattcgcaataactgctgatttgtcgagaaaactgtttggcgtccagtttcatcctgaggttcagcacaccgtaaacggcacaaaagtttatgaaaattttctcaatatagcaaattttaaaagagattggacgatgggttcttacatgcttgaagcaatacaagcaatccgaacccaagttggaaacgaaaaagttatttgtgggttgtctggtggtgtcgatagttccgtcaccgcaatactcttacaccgagccattggaaataacttgacttgtgtatttgtagacaacgggcttttaaggaaaggagagtcaaagcaggtcataaaaatgttcaaagacaaatatcaaattcctctcattcacgtaaataagaaaaaaatcttcatgaaagcccttaaagggacaaccaaccctgaaaagaaaaggaaaattattggtaaattatttgtaaaagtttttgaaaaagtggctgagtcactgggagacgtaaaatttttagctcaaggcactctttatcccgacattattgaaagtgtctcagtatcaggagctccttcagaaaagattaaaagtcatcacaacgttgggggtcttccaaaaaaaatgcgactaaagcttgtagagcccttgaaagcactctttcaagacgaagtgcggcttttgggtcgagaattggctctacccaataattttgttgaaagacatc

SEQ ID NO: 317259 - DNA, 883 bp, Unknown
  Bacterial polypeptide expressing nucleotide sequence isolated from the Sargasso Sea
ggtttatcaggaggcgtggattctgctgtgtttgcagcattactctcaaaagcaataggcaatcagttaacctgtatctttgtagacaatggactccttcggctcaatgaaggcgaccaagtcatggaaactttcaaaggtaaatttggaatcaaagtaaaaagagcaaatgccggcaatcaattcctcagagatttgaaaggaaaaaaggatccggagcagaaacgcaaagctattggaaaaacttttatagatgtctttcttaaagaggcaaaaagaaatacaaaaattcaatggttagcacaggggacaatttatcctgacgttatcgaatctgctggaacgaagaatggatcggcgcatgtaataaaatctcatcacaatgtaggaggtctgccgagttatcttaatctccctgtgatagagcccttaaaggatctatttaaagatgaagtcagaaagattggtttagagcttggtttaccaaaagagatattatttagacacccttttccaggtccaggtttaggtgtccgaattcttggtgaaattaaaagaccttatataaaaatccttcagttagccgatgacatttttattagtgagttggttaaagacggctattatgaaaaggtaagccaagcttttgcagtatttttaccggttaaatccgttggagtagtaggggattctaggcggtataaatatgtcattgccctaagagcagttgaaactatagattttatgacagctaagtcagctaaactccctcatactttcttagaaaaagtttctaatagaattatcaatgaaattcctgaagtatcacgggtaacttatgatatttctagtaaaccaccagctacaattgagtgggagtaaa

SEQ ID NO: 317260 - DNA, 823 bp, Unknown
  Bacterial polypeptide expressing nucleotide sequence isolated from the Sargasso Sea
aatttcactcataaaatttctgaatgcaggagcaattggactatggattcatttaaaaagaccgcaatagaaaatatacgaactcaagttggaaaaggaaaagtaatttgtggtctttcgggaggagtagattcatctgttgcagctgttctgattcatgaagcaattggagaccaattgacatgcatttatgtggataccggtttaatgcgggagaatgaaacggatgaagtggtaaatctatttaaagaaaattttaatattcctcttatagatgttgatgcaggcgatacttttataactagattgactggagtaagtgatcctgaagaaaaaagaaaaattattggttcctcttttatcgatatttttgaagaagaggcaaataaaattggaggagcagattttttagctcaaggaactctttatccggatgttattgagagcgtttcttttacgggtggaccatctgtgacaattaaaagccatcacaatgtaggagggcttccagaacgaatgaatatggagctagttgagcctttgcgagaactttttaaagatgaagtcagagaactcggaaaagatttaggaattcccagtcactttattgagagacatccatttccaggccctggacttgcaattcgtttacctggtgaaatttcttctgaaaaagctgacattttaagaaaagctgacactatttatattgaagagataagaaaagccggactttataatgagatttggcaagcttttgctgtacttttacctgttcagacggttggtgtgatgggagacgagaggacatatgattttgttt

SEQ ID NO: 317261 - DNA, 759 bp, Unknown
  Bacterial polypeptide expressing nucleotide sequence isolated from the Sargasso Sea
aaatctttccttgggatattgatgaaaaaaaaattagccaactcaaacctaagggaattattctttctggaggtcctaattcagtaacaaaaagctttactccaagagttccacaatcaattttaaattctaatgtaccaatttttggtatttgttatggaatgcaaactttagctgagcaaatgggtggacacgttgtatctgcagataaaaaagagtttggtcatgctgaacttgaaattgttgctgattcaaaattatttaagaatttaaatagtaaaattaatgtatggatgagtcatggcgatcaagttcaagatttaccagatgaatttgaattgacagcattgacttctactgctccaattgctgcaatgcaacataaagatttaccaatttacgccattcaatttcacccagaggttacacatactgaaaatggaatgaccatattaagtaattttatttttgatgtatgtggagctaataatgattggaagatggatgatttaatttcttcaagagttgaagaaatcaagcaaaaggttggaaataacgatgttctgcttggtttatctggtggtgttgattcttctgttacagccactcttcttaataaggctataggaaagaaacttacttgtgtttttgttgataatggcttattgagaaaaggtgagagtcatcaagtaatgcaaactttcaaagaaaatatgaatctcaacgttattaaatctgatagccaagaagttttttaag

SEQ ID NO: 317262 - DNA, 613 bp, Unknown
  Bacterial polypeptide expressing nucleotide sequence isolated from the Sargasso Sea
atgcaagacagaattctcatacttgattttggttcacaatatacccagctaattgcaagaagagttagggaggcgggtgtttatagtgagatctatataggcgatattgatttcaacgtcattgaatcatttaagccatctggattaatactctcaggcggacccgaatctgcattcattgatgatgcacccaaaccatccaaagagatttactcaatgggtcttcccattctaggtatttgttacgggatgcaagtgatgacagagcaactcggaggaaaagtttcaccatcaaatgagagagaatttggtcatgccgatgcaaaaatggaagcaaatagccgtcttttcgagggcattgagactgatgatgagcaatcggtttggatgagtcacggagacagagtcgaatctttgcctcagggattccaaaaaatatgtacaagtgcaaactcaccttcagccgcaatggcaaatgaagataaatcattttacgggctccaattccatcctgaggtcactcatacaagttgtggacagataatcattaaaaactttgttcacaatatttgtggttgtggaagtgattggaatcccaggaaatatcattgaa

SEQ ID NO: 317263 - DNA, 812 bp, Unknown
  Bacterial polypeptide expressing nucleotide sequence isolated from the Sargasso Sea
aagtaaaacgtgcaaacaaagaatacggttcatcacttttttcaatggacaaaaattcaggattactggatggaataggagaatcaattcgtgcatggatgagtcatggagatgaagcagaagaaattccatctaattttgaagttataggtcatactgaaaattcacacgcagctgcaatagcaaatacagatagaactgtatttggaatacaatttcatccagaagtagttcatactgaacgcggaaccgatattttgaaaaattttgttttgaatgtttgtaaggcaaaacaagaatggacaatggaaggttttgtggaaaaaacggtaaaagaaatttcagaaattgaaggaaatgtgttatgcggagttagtggaggcatagattcaacagtggcagcattactaatacacaaagcaataggggataggcaaacaggagtttttgtagataatggattattgagattggatgaatccaaagaaattgaagatatgttcaaaaataatttttcattaaatttccacagagtagatgcaagcgagcaatttctttcaaaattaaaaggaataacggatccggaacaaaaaagaaaaattgttggggaagaatttattcaagtatttacggaatttgcaaaacaaaagggtccattcaaatggttagcacaaggtacactttatccagatgtaattgaaagcggagtatcaaaaggtcctgcagctgtaattaaatctcatcacaatgtaggaggattaccagaatggttgaatctcaaaaatcttagaaccattaagagagttgtataa

SEQ ID NO: 317264 - DNA, 340 bp, Unknown
  Bacterial polypeptide expressing nucleotide sequence isolated from the Sargasso Sea
tggagctttaagtagggaaaagataaaaatacttcaagaagccgaccatatatatatcaatgccttaaaagaatatgacttatatgatcaagtatggcaagctggggcaatacttcttccagttaaaactgttggggttatgggagatgaaagaacatatgaatatgtagtatgtctaagggcagttaattctgttgatggcatgacggctgattggagccttttacctcatagctttcttcaagatgtgtctaataaaatcataaatgaagtaagaggagttaatagagttgtatatgatatcagctcaaaaccaccagctactattgaatgggaataa

SEQ ID NO: 317265 - DNA, 763 bp, Unknown
  Bacterial polypeptide expressing nucleotide sequence isolated from the Sargasso Sea
gttgttaatactttttaaaaaaaaattaaagattaaattaatttatgtaaatgcagaaaaagagtttattaaaaaattaaagaatattaataatccagaaaaaaaaagaaaaattattggaaacctatttattaaaattttcgaaagatattctaaaaaattaaaaaatattaaatacttagctcaaggtacgctttatccagacttaattgaaagtaagtcagttactggtagccaaacttcaaaaataaaatcacatcataatgttggtggcctacccaaggtaatgaaattaaagttaattgaacctctaaagtttttatttaaagatgaagttagaagattaggacttgaattaaatttatctaaagaaattatatctaggcatcctttcccaggtcctggattggcaataagaattcctggaattattactgaagaaaaaattaaaatacttaaagaagcagactattattttataaatgagcttaaaaaaaataatttgtataataaaatttggcaagcatatgcagccttgcttccagttaaaactgttggagttatgggcgacaatagaacttatgagtatatctgtttattaagagcaattacatcagaagatggaatgactgcagacttttacaattttaataataattttatgcagaaaatatctaataaaatcattaataatattagagggataaatagagttgtttatgatattacatctaagccaccaagcacaatagaactagagtaa

SEQ ID NO: 317266 - DNA, 948 bp, Unknown
  Bacterial polypeptide expressing nucleotide sequence isolated from the Sargasso Sea
aaatcaaaaagaaaattttattcaaagaaattaaaaaaaatgtaggaaattcaaaagtaatttgtgcactttctggtggggttgacagtagtgttgtcgctaaactaattcataatgcaattggtaaacaattaacctgtatttttgttaatacaggtttattaagaaaaaacgaagaaatacaggttgtaaaaacatttagaagaaaattcaaaattaatttgatttatgtcgatgcaaaaaaattatttattaataagctaaagaaaataacagatcctgagagaaaaagaaaaataattggaaatttatttattaaaattttcgaaaaacattcaaaaaaaataaaaaatgttaaatttttagcccaaggtactctttatccagatttaattgaaagtaaatctgtaactggaagccaaacatcaaaaataaaatctcatcataatgttggtggtttaccaaaaaaaatgaagttaaaattagttgagcctttaaggttgttgtttaaagatgaggtaagaaaattaggattagagcttaaattgtcaaaagatatagtgttaagacatccgtttcctggaccaggtttagcaataaggatgcccggtgaaatatcagaaagcaaaattaagattttacaagaagctgaccatattttcataagcttattaattaaacacaatttatataaaaaaatatggcaggcatatgcagctttacttcccgttaaaactgtaggagttatgggcgataatagaacttacgaatatatgtgttctcttagagcaattacttctgaagatggtatgactgctgatttttattatttttctagagaatttatgcagctagtatcaaataaaattgtgaataatataaaaggtattaatagggtagttttcgatataacatctaagccaccaagcacaatagaattagaataat

SEQ ID NO: 317267 - DNA, 886 bp, Unknown
  Bacterial polypeptide expressing nucleotide sequence isolated from the Sargasso Sea
gatcttggagtttattctgagataattacccctaaagacacgaaaaaaattagagattttactttaataaaaggcattatactttcaggtggtccttcgactgttacaaaacaaaagtttcaaaaaataccaaaacaaatttttacaaaaaaaataccaattttaggtatatgttacgggttacaacttattgctaagatatttggtggaaaaattaaatctttaaacaaaaggagagaatttggtagagcattaatatttaaaaaaaacacgtcacttcttacaaaaaatttttttaaatctcaaaaaacagtttggatgagccatgaagacgctgtaataaaattacctaaaagttttaaaaatatcgcatatactaaagattcaaggttaacaataattgagagtaaaaaacataaaatatacggtgttcaatttcatcctgaagttacccacacagataatggaaaacaaatattcaaaaattttttatttttaatttgcaagattaaaaaaaagtggaatgttgtttctcaaaaaaataaattaattaaagaaataaaagaaatagtcaaagatgataaggttatatgcgctttatcaggaggtgtagatagtagtgttgttgctttattgatcaataaggcaattaaaaaaaatttaatttgtataatggttgatacgggcctaatgaggaaaaatgaatttagatacacttataaattgtttagatataaatataaattaaatttaaaattgattaaagcatcgaatatttttttaaaaaaattaaaaaatatcacaaacccggaaaaaaaaagaaaaataataggaaattcgtttatcaaaatatttgaaaaggagtctaaaaagattaaaaatgtca

SEQ ID NO: 317268 - DNA, 592 bp, Unknown
  Bacterial polypeptide expressing nucleotide sequence isolated from the Sargasso Sea
ttggattttggttcccaatacactcagctcatcgcgagaagagtaagagaatgcggagtgtactgcgaaattcagcctttcgatgttgagaaatcgtattttgacgaacgactacctaggggcgtgattttgtctggtggacctgagacggtcaccactggcgatacgccaagaattcctgagcgattgctcaagttagaaataccgatactaggtatttgttatggaatgcaggctctcgccgcacagttgggaggtggggtcaagagctctgcacatagggagttcggccctgctgagattgatttgcaagatggtagcgatttactgggggctctggacccagacaagcttggaaaggcgcaggtttggatgagtcacggagacaaggtcaccgatttgccagatgggtttagcgttaccgctagcacggggagcgccccggttgcggcaatggagaatccgttaaaacgaatttacgctgttcaatttcatccagaggttacgcataccccaaacggagatcatttgattgatcggttcgcaaaggatatttgccagtgcgacggtgatggactattgaaaacatcgc

SEQ ID NO: 317269 - DNA, 913 bp, Unknown
  Bacterial polypeptide expressing nucleotide sequence isolated from the Sargasso Sea
aattaatgaattaaattataaattaaaaaataaaaaagtaatttgtggactatcaggtggagtagactcaactgtaacttcatttttacttcataaagctataaaaaataacttatattgtatttttgttgatcatggactattacgatataacgaatccaatgaagttgtatctatatttaaaaaaaaatttggaaaaaattttataagagttgatgcatctaatatttttttatcaaaattaaaaaatataaaagatccagaaaagaaaagaaaaattattggaaaaacttttatcaaagtttttgaaaaagaagcaagaaaaataaaaaacgtccaatatcttgctcaaggaactttataccctgatattatagagagtattcctttctttggaggaccaaccgctaaaattaaaagtcatcataatgtgggaggtcttcctaaaaatatgaatttaaaaattgttgaaccattaaaagaattatttaaagatgaggttaggcttttaggaaaaaaactaaaaattagtcaagacttactaagtagacatccttttcctggacctggactttctattcgaataccaggttcaattgataaaaataaaataaaaattctacaaagagttgataatcttttaataaactatttgaaacaaaataatatttacaaagatatatggcaagcatttgcaattttattacctgttaaatcagtaggtgtaatgggtgatgcaaggacttacaattattctattgttattagatcagtaacatcagtcgatggaatgacagctgatttttatatgtatagcaaaaaagatttaactgaaatttcaaacaaaatcattagtgaggtaaaagaggtaaatagagtattatatgattttacctcaaaaacaccaggtact

SEQ ID NO: 317270 - DNA, 850 bp, Unknown
  Bacterial polypeptide expressing nucleotide sequence isolated from the Sargasso Sea
aaacgtgcaaacaaagaatacggttcatcacttctttcaatggataaaaattcaggattgctggatggaataggagaatcaattcgtgcatggatgagtcatggagatgaagcagaagaaattccatctaattttgaagttataggtcatactgaaaattcacacgcagctgcaatagcaaatacagatagaaccgtatttggaatacaatttcatccagaagtagttcatactgaacgcggaaccgatattttgaaaaattttgttttgaatgtttgtaaggcaaaacaagaatggacaatggaaggttttgtggaaaaaacggtaaaagaaatttcagaaattgaaggaaatgtgttatgcggagttagtggaggtatagattcaacagtggcagcattattaatacacaaagcaataggggataggcaaacaggagtttttgtagacaatggattattgagattggatgaatccaaagaaattgaagatatgttcaaaaataatttttcattaaatttccatagaatagatgcaagtgaacaatttctttcaaaattaaaaggaattacagatccggaacaaaaaagaaaaattgttggagaagaatttattcaggtatttacggaatttgcaaaacaaaagggaccattcaaatggttagcgcaaggtacactttatccagatgtaattgaaagtggagtatcaaaaggtcctgcagctgtaataaaatctcatcacaatgtaggaggattaccagaatggttgaacctcaaaatcttagaaccgttaagagaattatacaaagatgaagtaagagatgttgctagaattttgggtgttccagaaa

SEQ ID NO: 317271 - DNA, 898 bp, Unknown
  Bacterial polypeptide expressing nucleotide sequence isolated from the Sargasso Sea
taaaaataactctgtctggatgagccatcaagatattgtaacaaaaatacccggtggatttaaaaaaatagcttcaacacaaaactcaaaatttgcaattatatcaaatgaaaagagaaagctttacggagtacagtttcatcctgaagttactcatactgaaaatggaaaaattcttttaagtaattttgtattgaacatatgccacacaaaaaaaatgtggagtcttagaaaacaaaaagatttaataattaatgatatcaaaaacaaagtaaaaaatgaaaaagtcatatgtgctttatcaggaggtgttgatagtagtgtggttgcatttttattaaacaaagcaatcggtaaaaaattaaaatgtgtgtttataaatactggtcttctaagaaaaaacgaggaaaaagaagttgtaaaaacttttaaaaaaaaattgaaatcaaatctagtttacgttgatgcatctaaactttttttaaaaaaattaaaaaatgttactgatcctgaattgaaaagaaaaattattggtaaactttttattaagttgtttgaaaaaaaggcaaaaaaaattaagtttttagcccaaggtactttatatccagatttgatagaaagcaggtctgtcactggaagtcctacctcaaaaatcaagtcacatcataatgtaggaggattaccaaaaaatttgaaattttcattagtagaacctttgcaaacattatttaaagatgaagtaagaaaattaggaaaagaattatcggttccaaaagctatccttcaaagacatccttttccagggcctggtcttgctataagaataccagggaaaatttcaaaatataaaattaaagtgttacaggaagcagattttatatttattgatgaattaaaa

SEQ ID NO: 317272 - DNA, 709 bp, Unknown
  Bacterial polypeptide expressing nucleotide sequence isolated from the Sargasso Sea
aaatataaatttgatgtaaaattaattgatgcatcatatttatattataaaaaattaaaaaatatttctgaccctgaaaaaaaaagaaaaattattggaaatttatttgtaaaaatttttgaaaatgaggcaaaaaaaataaagaaagttaaatacttggcacaaggaactttatatcctgatgtaattgaaagtagatctgttactggaagtaaaacatcaaaaattaaatctcatcacaatgttggaggtttacccaaaaaaatgaatcttgaattaatcgaacctttaaaagaattattcaaagatgaagtgagaaaacttggctattcagcaggtttagaaaaaaaaataataaatagacacccctttccaggtcctggattggctatacgtatagctggtaaaattactcctaaaaaagtaaaaattcttcaagaagcagatcatatatttataaacgaattaattaaaaataatttatacgataaaatatggcaagcgtacgctgcactgcttccaataaaaactgtaggggttatgggagacagtaggacttatgaatatatttgtcttttaagagcagtgacatcagaagatggtatgaccgctaattacttcaatttttcaaaagactttttagacaaaattgcaaataaaattattaatagtgttgttggtataaatagagttgtttatgatataactt

SEQ ID NO: 317273 - DNA, 706 bp, Unknown
  Bacterial polypeptide expressing nucleotide sequence isolated from the Sargasso Sea
caaattaaagaacaagttggaaattctaaagtaatttgtgcattatctggtggagtagatagtagtgtagtagcaaaattaattagtaatgcgattggaaaaaacttaacttgtatattcgttaatactggccttctgagaaaaaatgaagaaaaacaagtagtaaatacttttagaaaaaaatttaaattgaatttaatttatgtaaatgctgaaaaattatttataagcaaattaaaaaacgtaacagatccagaaaaaaaaagaaaaattattgggaatttatttatcaaactttttgaaaaatatgcaaaaaaaataaaaaatgtaaaatttttagctcaaggaactctataccccgatctaattgaaagtaagtctgttacaggaagtcaaacgtcaaaaattaagtctcatcataatgtaggtggtctgccgaaaaggatgaaattaaaactggttgagccattgaagtatttatttaaagatgaagttagaatgttaggtctagaattaaatttaagtaaagaaattatttctagacatccttttcctggtcctggtttagcaattagaatgccaggcataattactaaagaaaaaataaaaattttaaaagaagcagataattattttgtaaatgcattaagagaacacaatctatatcataagatatggcaggcttatgctgcattactgcctgtta

SEQ ID NO: 317274 - DNA, 478 bp, Unknown
  Bacterial polypeptide expressing nucleotide sequence isolated from the Sargasso Sea
aatgaaattaaaattggttgaaccacttaaactcttatttaaagatgaagtaagaaaattaggattagaattaaatttaagtaaagaaattatttttcgacatccattccccggtccaggtcttgcaataagaatgccgggaattattaataaagaaaagattaatattttaaaagaagctgaccatctttttattcaaggtttaaaggatcacaaactttataataaaatttggcaagcttacgcagctctacttccagtcaaaactgtaggtgttatgggtgataatagaacctatgagtatttatgtttgctgagagcaattacttctgaagatggcatgactgcagatttttttgaatttaagaaatcatttatacaagagatctctaataaaattgtgaatagtattaggggaattaatagagtagtttatgatataacttcaaagcctcctagtactattgagttagagtaa

SEQ ID NO: 317275 - DNA, 847 bp, Unknown
  Bacterial polypeptide expressing nucleotide sequence isolated from the Sargasso Sea
gatgagccatgcagaccaagtaacgaaattaccaaaaaactttaaaataattgcacaaagtatcaattctaagatgtgtattatcgaaaacatagaaaaaaaaatgtttggtatccaatttcatccagaagtaagtcatacaattaaaggaaagctaatattaaaaaattttatattttctatatgtaaattatctaaaaactggtcctcaaggtatcaaaaaaaaaaattaataaatgagataagaaacagcgtaggaaattcaaaggttatttgtgcgttatctggaggtgttgatagcagtgtagttgctaaattactatcaaatgctatcgggaaaaaattaacatgcatctttgtcaatactggtctccttagaaaaaatgaagaaaagcaagttgttaatacatttaaaaagagatttaaaataaatttgatctatgtaaatgctgaaaaattatttttgtcaaaattaaaaaacgtttctgatccagaaaaaaaaagaaaaataataggaaatctatttattaaaatttttgaaaaatactcaaataaaattaaaaatgtaaaattcttagcccagggaactttgtatcctgatttaattgaaagcaaatcagtaactggaagcaaaacatcaaaaatcaagtcacatcataatgtaggtggtttaccaaaaaaaatgaaattgaaattaattgaaccactaaaatatctttttaaagatgaggttagaaaactaggattagaacttggattaagtaatgaaattatatctaggcatccattcccaggaccaggtcttgcaataagaatgccaggtataatcactgaagaaaaaataaaa

SEQ ID NO: 317276 - DNA, 440 bp, Unknown
  Bacterial polypeptide expressing nucleotide sequence isolated from the Sargasso Sea
tctggccggccttgagggggcggacggacgccgcccggccattgtcatccttgatttcggctcccagtactcggagctgattgctcgcaggattcgcgagaccgaggtgtattcactggtgttgagccacaccaccacggtggagcagctgaaggagctctctccgcggggaatcattctcagcggcggacccagttcggtctacgccgccgatgctcccgtgtgtgacacggcgctgtgggatctgggaattccggtgctgggcgtttgttacggcatgcagctgatggtgcagcagctcggaggtgtggtggaagcctccgagcgtggtgagtacggcaaggcgccgctgtttgttgacgacccaacggacctgcttaccaatgtggaggacggctccacgatgtggatgagccatggcgattcggtgcagcgtctgc

SEQ ID NO: 317277 - DNA, 568 bp, Unknown
  Bacterial polypeptide expressing nucleotide sequence isolated from the Sargasso Sea
tggcccttcaactgttactaacaaaaaatttccagatataccgtataatattttttcattacatattcctattttaggaatatgttacggtctgcaattaattgttaaaaaacttaaaggtaaagttaaatccttttcaaaaagaagagaatttggaagagcaatattaaataaaaattcatcatcaaaattgacaaaaaatttttttataaacaaaagaactgaagtctggatgagtcatcaagactcggtttataaacttccttctggatttaaaaagattgcttctacgaaaaactcatctttaactattattgaaaatacaaaaaaaaaaatttatggtattcaattccaccccgaagtaactcatactattaatggcaaaattcttataaaaaattttattttttccatatgtaaagctaagaagaattggaatccctctcatgaaaagaaaaaaataataaaaaatattaaaaatattgtcaaaaaagagaaagttatttgtgcattatctggaggtgttgatagcagtgttgtagctctccttattcacaaagcaatttaa

SEQ ID NO: 317278 - DNA, 565 bp, Unknown
  Bacterial polypeptide expressing nucleotide sequence isolated from the Sargasso Sea
cctgatattatagaaagtaagtccgcaacaggcagtaaaacatctacaataaaatcacatcacaatgttggaggattacctaaaagaatgaagttgaaattaatagagcctttaaaagatttatttaaagatgaagtgaggaatttaggaaaatcaataggattaacaaaaaaaattttacatagacatccttttccgggtccaggattagcaattagaatcataggaaaaattaattttgaaaaagttaaaattctacaggaagccgaccatatctttataaacgaacttattaatttgaatatctatgataaaatttggcaggcttatgcagcacttcttccagtaaaaactgtaggagtaatgggtgatagcagaacatatgaaaatttgtgtttaattcgagctgttaagtcggaggatggtatgaccgcagatttttacagttttaaaaaaggagttttagaggaaatatcaaataaaattattaatagagtaaaaggaattaatagagtagtttatgatataacttcaaaaccaccaggtactattgaattagaatgaa

SEQ ID NO: 317279 - DNA, 424 bp, Unknown
  Bacterial polypeptide expressing nucleotide sequence isolated from the Sargasso Sea
aaagttggtaaagaaattgggtttaccagattccttagtatatagacatccattcccaggtcctggactagcagtccgcattataggagatatttccgaagaacgaatctctattttacaagaagcagataaaatctttattgataccttggttgaggatgatctatacaatgatatttggcaagcatttgcaatattaattccaattaaaacagttggtgttatgggagaccaaaggacttatgagaatttaatcggtattcgagctgttactagtactgacggtatgacggctgattggtataaaatgccttcaaaaaccctaaacaaaatttccaatcgcattgtaaataatgtccggggagtaaatagagtggtttatgatattacttcaaagccaccaggtacaatagaatgggaataa

SEQ ID NO: 317280 - DNA, 946 bp, Unknown
  Bacterial polypeptide expressing nucleotide sequence isolated from the Sargasso Sea
taataaagaagtaaaaggaataattctgtccggtggtcctcttaatgtttatgacagcaataaatttaaatttaataaaaaaatattaaatttaaaaatcccaattcttggaatatgttttggacatcaaataatttctaaaatattaggtggaaaagtaaagaaatcaaaacatagagagtttggctcagccattgttaaaaaaaaaaataaaagtaaattggtaaaaaatttttttaataagacacaagtaaataatgtttggatgagccatgcagaccaagtaacaaaactaccaaaagactttactattgttgcatcgacaaaaagttctaaatatacaattatagaaaataaaaaaaaaaatttgtttggagttcagtttcaccctgaagttactcataccaataatggaaaaactttattaaaaaattttgtaataaaaatttgcaaagctaaaagaaactggtcttcaaagcatcaaaaaattaaattaattaatgatattagaaagcaaattggaaaagaaaaagtgttatgtgcattgtcaggtggagttgatagcagtgtagttgctcaactactaagtaaggcaataggtaaaaatctcacctgtatttttgttaatactggtttgttgagaaaaaatgaggaaaaacaagtaataaacacttttaaaaataaactaaaaattaacctaatttatgtaaatgcagaaaatgaatttataaaaaaacttgaaaatatttctgatccagaaaaaaagagaaaaattataggaaaattatttattaaaatttttgaaagatttgcaaataaaattaaaaacgtaaaatttttagcacaaggtaccctttatcctgatttaatagaaagtaagtcggtcacaggcagtcaaacttctaaaataaaatctcatcataatgttggtggttgcccaaaaaaa

SEQ ID NO: 317281 - DNA, 622 bp, Unknown
  Bacterial polypeptide expressing nucleotide sequence isolated from the Sargasso Sea
aatgactagtaatattgaaatagctaccaagtttaatgatgataatattttaataattgattttggtagccaatatacacaattaattgctagacgtgtaagagaagaaggagttttttgtcaaataattccttataataaggtaagtaagtatataattaataataatccaaaaggaataattttatctggtggaccttcatctgttttaggcattgaaacacctaggatctcaagagaaattatagatatgggtaagcctattttaggtatatgctatggacaacaagttttagttcaacaacttggaggtacagtagtatcgtctgaaaaaagtgagtttggaagagctaatataaaggtagtatcgtcttgttctctgacggacaaagtatggaatgaaggtaaaaagtaccaagtgtggatgagccatggagacagcgtagtcgaaatgccagatggttttgatttagttgctgaaactgagggtgcggcttttgctgtgatagcaaatgaaaaagctaaacaatatggtgttcaattccatccagaggtagtgcatacactagatggaaaaaaattaattcataattttgtaaaaaatatttcaagctgtaaaact

SEQ ID NO: 317282 - DNA, 793 bp, Unknown
  Bacterial polypeptide expressing nucleotide sequence isolated from the Sargasso Sea
aatgtcaaaaactaatttaattgaaaacaaaaaaaaaattttaattattgattttggttctcaagttaccaaattaattgcaagaagaatacgtgagctgcatgtctactgtgagataatcaatattaaaaaatttaataacttaaaaaattttaaaaatatcaagggaattatattatcgggtgggccctcaacagtcacaaatgagggttttcctaaaatttctaaaaaaatttttagcctcaatatccctatactaggaatttgttatgggttacaattaatagcaaagctatttggcggaaagataaaatcaaatatcaagaaaagagaatttggtaaagcgatccttataaaaaaatcaaattcaattttaactaataatttttacatcaataataaaagtgatgtatggatgagtcatcaagacggcgtagttaaaattccaaaatattttaaagtaatagcttctaccaaaagtgtaaaattcacttcaatagaacataaaacaaaaaaaatttatgggatacaattccatcctgaggttacacacacatcaaggggaaaagagattttaaaaaattttgcaataaaaatttgcaaattaaaaaaaaactggaaagtaccttctgaaaaaaatagaataatcaagaatttacgattaaaattaaaagatggaaaagtaatttgtgctctatcgggaggcgtggatagtagtgtagttgcattgttaattcacaaagcgataaaaaaaaatcttatttgtttgatggtagacactggtctgctacga

SEQ ID NO: 317283 - DNA, 325 bp, Unknown
  Bacterial polypeptide expressing nucleotide sequence isolated from the Sargasso Sea
gttgtcagtcaataaaaaacgtattgatacaatattagtattggactttggttctcaatatacccaattaatagcgagaagaatacgagaaagcaatgtatattctgaaattcttccatgggatattgatgaaaaaaaaatactagacttgaatccaaaaggtgttgttctctctggtggaccaaactcagtaaccgactcttatacaccaagagttcctcaatgtgtttttgaattgaatgttccaattttaggtatttgctatggcatgcagactttagcagaacaaatgggcggccaggtagtatctgtagataaaaaggaa

SEQ ID NO: 317284 - DNA, 735 bp, Unknown
  Bacterial polypeptide expressing nucleotide sequence isolated from the Sargasso Sea
aaattaaattaatttatgtgaatgcagaaaaagagtttattaaaaaattaaagaatattaacaatccagaaaaaaaaagaaaaattattggaaacctatttattaaaattttcgaaagatattctaaaaaattaaaaaatattaaatacttagcccaaggtacgctttatccagacttaatcgaaagtaagtcagttactggaagccaaacttcaaaaataaaatcacatcataatgttggtggcctacccaaggcaatgaaattaaagttaattgaacctctaaagtttttatttaaagatgaagtgagaagattaggactagaattaaatttatctaaagaaattatatcccggcatcctttcccaggtcctggattggcaataagaattcctggaattattactgaagaaaaaattaaaatacttaaagaggcggactattattttataaatgaacttaaaaaaaataatttgtataataaaatttggcaagcatatgcagcgttgcttccagttaaaactgttggagttatgggcgacaatagaacttatgagtatatttgtttattaagagcaattacatcagaagatggaatgactgcagacttttacaattttaataataattttatgcagaaaatatctaataaaatcattaataatattagagggataaatagagttgtttatgatattacatctaagccaccaagcacaatagaactagagtaat

SEQ ID NO: 317285 - DNA, 808 bp, Unknown
  Bacterial polypeptide expressing nucleotide sequence isolated from the Sargasso Sea
ggtatcccagttttaggtatttgctttggacatcaaattatctctaaagaattaggcggaagggttaaaaattcaaaatatagagagtttggtttagctgaagtagaagaggttaaaaaaagtatacttacaaaaaatttcttttctaaaggtaaaaacaatgtatggatgagtcatgcagatcaggtaaccaagttaccaaaaaattttcatgttctagcaaagagtaaaaactcaaaattatgtataattgaaaatttagaaaaaaaattttttggtattcaatttcacccagaggttagtcataccaacaaaggaaaacaaatactgaaaaattttgtgttttctatttgtaaagtcaaaagaaactggtcttcaattgaccagaagaaaaaactgataaacgaagttagaaatctagttggaaattcgaaagtaatatgtgcattatcgggaggcgtagatagcagcgttgttgcaaaactattatcaaatgcaattggaaaaaaattaacttgtatatttgttaatacaggccttttaagaaaaaatgaagaaatccaggtagtaaatacatttaaaaaaagatttaaaattaatttaatatatgtaaacgcagaaaatatatttttgaataaattaaaaaacgttacagatcctgaaaaaaaaaggaaaataattggtaacctttttattaaaatttttgaaaagtatgccaaaaaaattaaaaatgtaaaatttttagcacagggtaccttatatccagatttaatagagagcaaatctgttacaggaagccaaacttcaa

SEQ ID NO: 317286 - DNA, 922 bp, Unknown
  Bacterial polypeptide expressing nucleotide sequence isolated from the Sargasso Sea
accattttgaatcttcctgagagctttgaattgacggcttccacttccagtattccggttgccggatttcacatcaaaggcacgaaacaatacggcattcagtttcacccggaggtcacgcacaccacggatggcttgactctcttgcgaaatttcgttgtgggaatttgcggagctcagtgtgactggactcccgatcaatttgtggaaagcacggtcgaagagctaaaagaaaaattgggagacgacaaggtggtgctcgggctttcgggtggagtagactcatctgttgcagctgagctgattcatttggccataggaaaaaatctctactgcattttcgtagacaatggactcctcagaaagaatgagtttgaaaaagtgctggagtcctacaaagcgatgggcctgaatgtgaagggcgtggatgcaaaagataaattctatgaagcacttgatggattgacagagccagaagccaaaagaaaagccatcggtaaggtgtttatcgacgtgtttgatgaggaggcgcacaagattgaaaacgtgaagtggctcggccaaggtacaatctacccagacgtgatcgagtctgtttcggtgaaggggccttccgccaccatcaagtcgcatcacaatgtcggtggattgccagactacatgaaactaaaagtcgtggagccgctgaacaccctcttcaaagatgaggtgcgaagagtaggtcgaaccattggcgtgcctgagaccattctgggacgtcatccttttccaggaccagggttaggcatcagaatacttggagacatcactcctgagaaggttcgagtgttgcaggacgtggatgatattttcattcaagggcttcatgacgaaaggctctatgatgaggtgtggcaagccggagcgatgttgcttccggtgc

SEQ ID NO: 317287 - DNA, 874 bp, Unknown
  Bacterial polypeptide expressing nucleotide sequence isolated from the Sargasso Sea
ggaggagtcgactcttctgtcactgctacacttttacataaagctattggtaaaaaattagtatgtgtttttgttgataatggacttttaagaaagggagaagcagagcaagtaatgcaaacatttaaaaaaaatatgcaattaaatgtagttaaatctgatagtcaagacactttcctgagacatttaaaagaaattgaagatcctgaacagaaaagaaaaattattggaagaacttttattgatgtttttgatgctgaagcaatgaagctaaaagacataagatttttagcacaaggaacaatttatcctgatgtcatagagtcttcaggctcagagtcaaaagaagctagagtaattaaatctcatcataatgttggaggtctcccagaagatatgaagctagatttggtagagcctttaagagatttatttaaggatgaagtaagaaaaatgggaattgagcttggaatacctaaagagatgatagaaaggcatccttttcctggtccaggtttgggagtaaggatacttggcgaagttactaaagaaaaaaccaaaattcttcaaaatgctgaccacatttttatcgaagaattaattagagctgatttatataattcagttagtcaagcctttgcagttttgttgcctgtaaaatctgtgggtgtagttggtgatgaaagaagatatgcagaggttattgcattaagagctgttgaaacagtagatttcatgacagctagatgggcacaactaccatatgagtttctagaacatgtttcaaatagaattgttaatgaaattgaggcagtaagcagagttgtttatgatatttctagcaaaccacctgcaactattgagtgggagtgaa

SEQ ID NO: 317288 - DNA, 788 bp, Unknown
  Bacterial polypeptide expressing nucleotide sequence isolated from the Sargasso Sea
caacttatatgcattacaatttcacccagaggttttccatactgagaatggattgaaaatttttgaaaacttttttataaaagaattaggctttattcaggaatggaacccagagtcatttattgatagaactgttgattatttgaaaacaaagcttaagaatgataaagtaattcttggactttctgggggtgttgattcaagtgttgcatctgttttgttagataaagccatcggtgataacctctattgtgtatttgttaataatgggcttttaagaaaaggtgaatttgatgaagtgttaaaacaatatgaagggatgggtcttaatgttaaaggagtcgattcctctgatttattcataaatgctttaaaaggagtctcagatcctgagaaaaaaagaaaaattattggtaatatttttgttgaggtttttgaacaggaatcaaaaaaaattgaagatgctaaatggttagttcaaggtacgatttatcctgatgtaattgaatctatatcagtaaaaggtccatctgctactattaagtctcaccataatgtaggaggattacctgaaaaaatgaacctaaaggttgtagaacctctaaaaacgttattcaaggacgaagtaagaaaaattggaaactctttaaatatgtctaaggatatattaaacagacatccatttccaggtcctggattaggtatcagaattattggagaggttaattatgaaagtattaggttaatacaggaagctgacaaaatatatatagacggtttgaaagaat

SEQ ID NO: 317289 - DNA, 848 bp, Unknown
  Bacterial polypeptide expressing nucleotide sequence isolated from the Sargasso Sea
aattttaaaataattgcacaaagtataaattctaagatgtgtattattgaaaatgtagaaaaaaaaatgtttggtattcaatttcacccagaagtaagtcatactattaaaggaaagttaatacttaaaaattttatattttctatatgtaaatttactaaaaattggtcttcaagagatcagaaaaaaaaattaataaatgaagtaagaaatagcgtaggaaattcaaaggttatttgtgcactatctggaggtgttgatagcagtgtagttgctaaattactgtcaaatgccatagggaaaaaattaacatgtatatttgttaatactggtttacttaggaaagatgaagaaaagcaagttgtaaacacatttaagaagagatttaaaattaatctaatctatgtaaatgcagaaaatttatttttatctaaattaaaaaatatttctgatccagaaaaaaaaagaaaaataataggaaatctttttattaaaatttttgaaaaatattcaaataaaattaaaaacgtaaaattcttagcccaaggaactttgtatcctgatttaattgaaagtaaatctgttacaggaagtcaaacatcaaaaattaaatcgcatcataatgtaggcggtttgccaaaaaaaatgaaacttaaattagttgagccattgaaatatctttttaaagatgaggttagaacactaggattagaacttggattaagtcatgagattatatctagacacccatttccaggaccaggtcttgcaataagaatgcctggtataatctctaaagaaaaaataaaaattttaaaagaggcagattattactttatcaaatcttt

SEQ ID NO: 317290 - DNA, 781 bp, Unknown
  Bacterial polypeptide expressing nucleotide sequence isolated from the Sargasso Sea
aaaattaataagtaactttatattcttaatatgtaaaatgagaaaaaattggtcttctaaagatcaaaaaataaaattgataaaagatgcaagagaaatggtaggaaataataaagtcatttgtgctttatcaggcggggtagatagtagtgtagttgcgcaattattaaataaagcaattggtaaaaatttacactgtatttttgttaacactgggctcttaagaaaagatgaggaaaaacaagttgttgcaacattcaaaaaaaaattaaagattaatcttacgtacgtgaatgctgagaaagagtttttgaaaaaattatcaaatatttcagatcctgaaaagaaaagaaagataataggaaacttgtttataaaaatatttgagcgttatgccaaaaaaattaaaaatgtaaaatttttagctcaaggaactctttatcctgacttaatagaaagtaaatcagttactggtagtcaaacatcgaaaataaaatctcaccataatgttggaggtcttcccaaaaaaatgaaacttaaactagtagagccattaaaatttttattcaaggacgaggttagaaaacttggattagaactcaatttaagtaaagaaattatttctcgtcatcctttcccgggacctggactagcaatacgaatgccaggaataataactaaagaaaagattaacattttaaaagaagctgatcattattttattcaagctttgagagatcacaaactatatcataaaatttggcaagcttatgcagcttta

SEQ ID NO: 317291 - DNA, 889 bp, Unknown
  Bacterial polypeptide expressing nucleotide sequence isolated from the Sargasso Sea
tccaatattaggtatttgctacgggcaccagcttatttgcaaaatgttgggtggtaaaatatcaaagtcaaaaaaaagggaatttggaaaaacgataatccgtagaaagagcagaaatcagtctctgtttttaaaggatttatttaaaaaaaacatagaagaagtttggatgagtcatggagatgcaataaccgagttgccccaaggattcgtggagctagcaagctcggatacttcttcgttttcaattatcgaggatgctgcaaggaagatttttggtgtccaattccatccagaagtgtttcatacagtaaatggaaaaaagtttatagaaaactttgttaatattgcaaacgttgaaagaaactggacaccaattaagataacggaaagcttaattgaaagactaaaagctgaaataggagatgaaaaggttatatgcggactatctggtggtgttgacagcacagtcacagctcttttattacatagagcgatcgataaaaatcttacctgtatttttgtcgataacggtcttcttagaaagcaagaggcgtatcagataaaaactctcttccagacgcactttaaaataaaattaatatctataaatgcgaaaaatcattttttaaaaaatcttaaaggtgtgactaatcctgaaaagaaaagaaaaattataggaaagctttttatagatgtttttgaaagagaggctaaaaaacttaatgatgtaagttttctggctcagggcactctttaccctgacgttatcgagtccacgtcggtgcatggaaaatcagcagcaaccattaagagtcatcataacgtcggtggcttgccgaagaaaatgcacctcaagttggttgagcccttaaaaacacttttaaag

SEQ ID NO: 317292 - DNA, 907 bp, Unknown
  Bacterial polypeptide expressing nucleotide sequence isolated from the Sargasso Sea
tgttatggtatgcagttaatcgctgattattttgggggaaaagttagctcttcacaaaaaaaagagtttgggcatgctacattcaagataacggatagagttgccttatttaaaggcattaaaaataaaatagggtttgatgtttggatgagtcattcagataaagtaataaaaaatcctgttggatttaaaaatattggaaatagcaacaatacaaaaaatgcagctatttataataataaaaaaaatatatactgtctgcaatttcatcccgaagtaacacatacaaaaaatggtgaaataattattaaaaattttatttatgaagtatgtagatgtaaaaagaaatggacaactactaatatcattaaagacattattagtaccttacagactcaggtaggtaagaaaaaagttatattagcattatctggaggtgttgattctactgttgttgcagccttattgaataaagcattacctaaacaattaacctgtgtatttattgatacaggtttaatgcgtaaagatgaagttaaagaagtccaagataacatatcaataaaacttggtattaatctagttacagttaatgccaaatcaatattttttaaaaaactcaaaggagtttcaagcccagaaaaaaagagaaagattatcggagagacttttattagaatatttgaatcacactcaaaaaaattaacgaatatagaatatttagctcaaggaacaatatatccagatgttattgaatcatcatcaaaagattctaaatctgatgttataaagtctcaccataacgttggtggtttgcctaaaagtatgcaatttaaacttgtagaacctattaagtcactgtttaaggatgaagtaagaagaattggtcgtgcactaaagatccaaa

SEQ ID NO: 317293 - DNA, 538 bp, Unknown
  Bacterial polypeptide expressing nucleotide sequence isolated from the Sargasso Sea
actgggaagtaaaacatctaagattaaatcacatcataatgtaggagggctcccaaaaaaaatgaacttgaaattagtagagcctttaaaggaattctttaaagacgaggttagagtactaggtaattcactcggcctaaccagaaacatttcttacaaacacccttttccggggccaggtttaggaattagaataattggaaatattacatctgaaaaaataaaaatccttcaagaagctgattatatttatataaatgaattaaaaaacagtggactttataaaaaaatttggcaggcttatgccgcattacttccaataaaaacggtcggagtaatgggtgactcacgaacttatgaatatacatgtttattgagagctgttacctctgaagacggtatgacagcagattattttaattttccaaaaacgtttttagataaaatctctaataaaattgtaaataatgttaaaggtataaacagagtattatatgatataagctcaaaaccacctagcactattgaactagaataa

SEQ ID NO: 317294 - DNA, 292 bp, Unknown
  Bacterial polypeptide expressing nucleotide sequence isolated from the Sargasso Sea
atgagcgatattcatgagcataagatactgatcctcgactttggatctcagtacacccagctgattgcccgtcgtatccgtgaaattggtgtttactgtgagttatgggcgtgggatgtgaccgaagcccaaatccgcgagtttgcccctaacgggattatcctcgctggcggccctgaaagtgtgaccgccgacaattctccccgcgcacctgaatatgtgtttaatgctggtgtgcctgttctagggatctgctacggcatgcaaaccatgtctgagcagctcggcggta

SEQ ID NO: 317295 - DNA, 636 bp, Unknown
  Bacterial polypeptide expressing nucleotide sequence isolated from the Sargasso Sea
cgtgctcccgacgccgtgttcgagttgaacctgcccgtgctgggcatttgctacggcatgcagaccatggccacccagctcggcggcaaggtcgaaggctccaacacccgtgaattcggttacgccgaagtgcgcgcccatggccacaccaagctgctggaaggcatcgaagacttcgccacggctgaaggccacggcatgctcaaggtttggatgagccacggcgacaaggtcaccgaactgcctcccggcttcaaggtcatggcctccacgccctcctgccccatcgccggcatggccgatgaagcgcgtcgctactacgccgtgcagttccaccccgaagtcacgcataccgtgcagggtcaggcgctgctcaaccgctttgtgctcgacatctgcggcacgcaagccgactggatcatgggcgactacatcgaagaagccgtggccaagatccgcgagcaggtaggcgacgaagaagtgatcctgggcctgtccggcggcgtggattcgtccgtggctgccgccctgatccaccgcgccatcggcgaccagctgacctgcgtgttcgtcgatcacggcctgctgcgcctgaacgaaagcgatatggtcatggacatgttcgaaggcaagctg

SEQ ID NO: 317296 - DNA, 555 bp, Unknown
  Bacterial polypeptide expressing nucleotide sequence isolated from the Sargasso Sea
catgcaaaataaagtcttaatagttgattttggctctcagtatactcaattaattgctaggagaattagagagctttttatttactgtgagatttcaccatttaacaatatccctgaagatttaaatcaatataaagccattgtgctttctggttctcctttttctgttaatcaagaaaattctcctgaaattaatcttaaaagtattttagggaacattcctttaatcgcaatttgttatggagcacaactaattgcaaagtcccttaatggaaaagttgagaactcaaactccagagaatatggaagagccaatctttcattcattgaaaaggattgtaagctttttcataacataaaaatcaacaatcaagtatggatgagccatggtgatacgattacaactttacctgatggtgcaagagttattgcaagtacagactctgtaacaaatgctgcttactcaatagattctcttaatttatatgctttacaatttcatcctgaggtttttcatacagataatggtctaaaatatttgaaaactttttcata

SEQ ID NO: 317297 - DNA, 786 bp, Unknown
  Bacterial polypeptide expressing nucleotide sequence isolated from the Sargasso Sea
gtttcttgaggataagaaaaaaattttaattatagactttggttcacaagtgacaaaactaattgccagaagaataagggatttaggtgtttattctgaagtgataacccctacagaaattaaaaatattaaaagctttaattttataaaaggaataatactttcaggtggtccgtcatcagttacaaaactttcattccaaagcattccaagaaacatacttttaaaaaaaattccaatacttggtatatgctatggcttacaacttatttctaaactaaacggtggaaaaataaaatcatcgaaaaaaaggagagaatttggaagagcttacatttttaaaaaaaaggactcattattaactaaaaatttttttaaaccaaaaatgtctgtatggatgagccatgaagatgcagtagtaaaattgccaaaaaacttttctgcagttgcgtatactaaagactcgaaactaactattatagaaaataaaaagcagaaaatttatggtgtccaattccaccctgaagtaacacatactcataatggagaacaaatatttaaaaattttttattttcaatttgtaaattaagaaaaaattggagtgtcgtatcacaaaaaaagcgtcttattaaagaattaaaaaatacaattaaaaaagataaagtaatttgtgctttatcgggaggggttgacagcagtgtagttgctttattaataaacaaagcaattaaaaaaaatttaatttgcattatggttgatacaggacttatgagaaaaaatgagtt

SEQ ID NO: 317298 - DNA, 820 bp, Unknown
  Bacterial polypeptide expressing nucleotide sequence isolated from the Sargasso Sea
ggaattcaatttcaccctgaggtttatcatagctcggatggaaaaaaattattaaaaaattttttagttaatatttctgatattaatcctaactggactgctagttcatttgttgataaaacaatatatgatctcaaaaatataattggtaatgaaagcgttgttcttggtttgtccggtggagttgactcatcagttgcagccgtattgctaaacaaagccatcaaaaataatttgtactgtgtttttattgataatggtttacttcgaaaaaatgaatttgattctgttttaaaacaatacgaaggtatgggtttgaacgttaagggtgtagatgcaaaagataaattttattcagctctgaaaaatattgatgaccctgaaaaaaagagaaaagtaattggaaaagtttttgttgatgtatttgatcaagaatcaaaaaaaattaaaaatgtcaaatggcttggtcagggaacaatttatcccgatgttattgaatcaatttctgtaaaaggtccttcagcaaccattaaatcacatcataatgttggtggtctaccagattatatgaaattaaaggttatagagccattaaaaatgttgtttaaagatgaagttagaagagttggtaaagagttaaaaattagtgataaaatcttaaaaagacatccttttcctggtccaggtttagctattcgaattctaggtgatattaatgaagaaaaggtaaaaatccttcaggacgcagatgatatttttataagtgaattaatttctaataatatttatgataaaacttggcaagccaggtgttatttta

SEQ ID NO: 317299 - DNA, 361 bp, Unknown
  Bacterial polypeptide expressing nucleotide sequence isolated from the Sargasso Sea
atgaaaagtaacgataaaatactaattttagattttggctctcaatatactcagctaattgctagaagagttagagagattggcgttttttctgaagtaaaaccttcctcaatatcaactgaagaaataattaaaattaatccatcaggcattatcctttctggagggcctgaaactgttactataagttcttcgcagaaagtacataaatcattattggaagcaaaaataccaattttaggtatatgttatggaatgcaaactattgcaaatgaacttggtggtacggttgttaaatctgatataagggaatttggtcatgcagaaatttctcacgttaatcagtctatcttatttgata

SEQ ID NO: 317300 - DNA, 804 bp, Unknown
  Bacterial polypeptide expressing nucleotide sequence isolated from the Sargasso Sea
ttcgtagacaatgtcttcttcgtctcaatgaaggtgatcaggtcatggagacattctcagagcatatgaatctcaatgtcatcagagtcaatgctgaggatattttcttggagaggcttaaaggtattgatgatccagaggacaagagaaaaataattggtcgaacattcatagaggtttttgaggatgaagcttcaaagttagaaaatgtgaaatggttggctcaaggaaccatttatccagatgttatagaatcagcaggatcgaagacgggaaaagctcatgtaattaagtcacatcataacgttggcggtctccctgaggatatgaaattaaaactggtagagccgctcagggatttatttaaggatgaggtaagaaaaattggcaaagaacttggactgacctcaaagttggttgatcgacatcctttcccgggtcctggcttgggagtgagaatcttaggagaagttaagaaagagttcgctgatctattgaggtcagcagatgatatttttattgaggaactacacaaggaaaatctatacaataaagtaagccaggcatttgcagtttttctaccagtcaaatctgtgggcgtcatgggtgatggaagaaaatatgaatacgtcatagctttaagagctgtagagacaacagattttatgaccgcaaattcgtctaaattgccttatgaatttttggatcatgtatcaacacgaatcatcaatgaagtctctggtatttcaagagtcacattagatatatcctcaaaaccgccatcaacgattgagtgggaatgaa

SEQ ID NO: 317301 - DNA, 512 bp, Unknown
  Bacterial polypeptide expressing nucleotide sequence isolated from the Sargasso Sea
atctcatcataatgtcggtggtttaccaaaaagaatgaaacttaaacttgttgaacctttaagagaactttttaaggatgaagttagaaaattggggctggagatgagactcccaaaaaaattcattaacagacatccatttccaggccccggattgggaataagaatattaggtgaggtaacagcagttagagtaaaaattttacaagaagccgataatatatatatcgaagaaattaaagaagcaggtttatacgataaaatttggcaagcatttgcagtcttgatgccaattaaaactgttggtgttatgggtgatcatagatcatatgaacaagtctgcggattaagagccgttacttctgtagatggaatgactgcagatttttatccttttaaagctgaatttttgagtaaagtttcaacaagaataataaacgaggtaaaaggtattaatagagttgtatatgatacaacttcaaaaccaccaggaactattgagtgggaataag

SEQ ID NO: 317302 - DNA, 787 bp, Unknown
  Bacterial polypeptide expressing nucleotide sequence isolated from the Sargasso Sea
ttaagaaaaaatgaagcaaatgaagtatcagaaatattttcaaaaaaatttggaaataactttattaaaattaatgcttccaatatttttttaaaaaatttaaaaaatgtatctgatcctgagaaaaaaaggaaaatcattggaaaaacatttatagaagtatttgataaagcagctaaaaaaatatccaatgtagattatttaggacaaggtactctttatcctgatattatagagagtattccattttttggaggccctacagctaaaattaaaagtcatcataatgtaggaggattgccaaaaaaaatgaaacttaaagttatagagcctttaagagaattatttaaagatgaagtaagaaatgttggaagagaattaaaaatagataaacaactacttttgagacatccatttcctggaccaggattagcaataagaataccaggagtaattgataaaaaaaagattttaattctccaagaagcagattatatttttattcagtttcttaaagagaaaaaactttacaataaaatttggcaagcttttgttgttttattaccagtaaaatcagttggtgtgatgggagatgaaagaacatacaactactctgtttcattaagagctataacttcagtagatggaatgacagctgatttttatatgtttacaaataatcaattaaaagaaatatcttctcgtataattaataatgtcaaagggattaatagagtcttatatgactttacttcaaaacctccaggaacaatcgagtgggaatgat

SEQ ID NO: 317303 - DNA, 847 bp, Unknown
  Bacterial polypeptide expressing nucleotide sequence isolated from the Sargasso Sea
atatttacttcataaggcaattggtaataatttattttgtatttttgttgatcatggctttttaagatataatgaatcttttgaagtaagtaatatttttaataaaaaatttggaaaaaattttattagagttaatgcatcgaaaattttttttcaaagattaaaaaaaataaaagatcctgaaaaaaaaagaaaaattataggaaaaacttttatcgaagtttttgaaaaagaagctaaaaaaattaaaaatatagaatttttggctcaaggaacattgtacccagatataattgaaagtgtacccttttttggaggtcctacagctaaaataaaaagtcatcacaatgttggaggtctcccaaaaaaaatgaaattaaagattatagaacccttaaaagagttatttaaggatgaagtaagaaaattaggaaaaaaattaaaaatacattcagaattattgaatagacatccttttcctggccctggtcttgctatacgtattcctggtgagattaatagagctaaaattaaaattcttcaaaaagttgataatattttcattagttatttgaaagaaaataatctttacaatgatatttggcaagcttttgcaattttattacctataaaatctgttggtgttatgggtgatgaaagaacttatagctattgtgtttctctaagagcagttacatctgtggatggtatgacagcagatttttttatattcaaaaaaaaacatttaacagaaatttcaaaaagaataattagtgaaacaaaagaagtaaatagagttttatatgattttacctcaaaaccacctggaactattgagtgggaataa

SEQ ID NO: 317304 - DNA, 883 bp, Unknown
  Bacterial polypeptide expressing nucleotide sequence isolated from the Sargasso Sea
aaaatcccagtattaggtatatgttatggtttgcagttaattacaaaactatttggaggaagtgttaaccaaatcaaaacatatagagagtttggtcgatcaactcttttaaaaagaaataattctttattgacaaaaaacttttttatcaatcggaaagctattgtatggatgagtcatcaagattcagtaacaaaaattccaaaaaattttaaaaaaattgcatacactaaagactcagtatcaactatcatagctaatgaaaaaagaaatatttatggcatacagtttcatccggaggttactcatacagaaaggggtaaaataattttaaaaaattttttattttctatttgtaaaattaaaaaaaattggaaactttcaaatgaaaaaaacaaacttattgccaaaataagagaacaagtaggtagtaataaaaaagttctatgtgcactttcgggaggtgtggatagtacagtggttgcattacttttaaataaagcaataaagaaaaatttaaaatgtataatggtaaatactggtcttatgagaaagaatgaatttgaatactcatcaaatattttaagaaaaaaatataagttaaatataaaaattataaactctaataaattgtttttaaaaagattgaaaaatgtttcagatccagaaaaaaaaagaaaaataattggagctttatttattaaaatatttgagaaggaagctaaaaaaattaagaatgtcaaatttctagcccaaggcactttatatacagatttaattgagagtaaatctgcgactggaagtaaaacttcaaaaattaaatctcatcataatgttggaggactaccgaaaaaaatgaatttagtgcttgttgaacccactt

SEQ ID NO: 317305 - DNA, 992 bp, Unknown
  Bacterial polypeptide expressing nucleotide sequence isolated from the Sargasso Sea
cgaatttggcaaacattaattacgcacattcataaaagtaagctatttcaaaattttaagttaataaataagcaacattatgtatggatgagtcatggtgacaaggcaattagattgcctaatgattttacaaccatagcgaaaagtaaaaattctaaatttgtgggcatagaaaataaaaaactaaatatttatggtcttcaatttcatcctgaagttgttcacacacatcaaggtgaaaagataatcaagaacttcataattaatatatgcaaaactaaacctacatggagcatgcaaaactatcttaaaactcaagttgccaaaatcaaaatcaaggttgaaaaaaaccatgtcatttgtggtttatctggaggagttgacagtatggtgactgcagcaataatttcaaaagcaattaacaaacaattaacatgtatctacgtcgatactggcttaatgaggttaaatgaaactgaggaagttgaaagtttattcaaaaagcattttaaatcaaagcttattactgttaatgccaagaatagattcttctcttcccttaaaggagtatctgatccagaaaaaaaacgtaaaattattggcaatttatttattaaaatatttaacgctgagtctagcaaaatctctaaagcaaaatttttagctcaaggcacgatctacccagacataatagagagtcaaagttttcatggggggccaacttcagtaatcaagtcacatcacaatgttggaggcctgcctaaagaaatgaaactgggtcttgttgaacctttacaagagttatttaaggatgaagttcgtagactcggtaaagagctaaaattacctaaagaatttattcaaaggcacccattcccaggtcctgaattaggaattcgagtattaagtgacattacaatagataaagtgcgaatgttacaacatgcagataaaatttatattgatgaaattaaagcagcagatttatacaa

SEQ ID NO: 317306 - DNA, 752 bp, Unknown
  Bacterial polypeptide expressing nucleotide sequence isolated from the Sargasso Sea
ttttaaaaaaaaattaaaattaaaaattatttatattgatgcctctaaaatttttacaaaaagattaaaaaacattgtaaatcctgaaaagaaaagaaaaattattggaaaactttttattcaactatttgaaaaacatgcaaaaaagatacgcaaagtaaaatttttagcccaaggaacgctttatccagatctaattgaaagcaaaactgtaactggaagcccatcttctaaaattaaatctcaccacaatgtcgggggtttgcctaaaaaaatgaatctttcgttagttgagccacttagtagtttatttaaagatgaagtaagaaagcttggtcaagaattgtcattacctaaagaacttcttctaagacacccatttcctggtccaggccttgctataagaatacctggtaaaattacaatcgaaaaaattgatattttaaaagaagcagattttatatttacaaatgaactaaaaaaaacaagactttataataaaatttggcaggcttatgcagctttgttgccactgaaaacagttggagttatgggtgataaaagaacctatgaatatacttgtttattaagagctgttacttctgaggatggaatgactgctgatttttattcatttgataaaaatttttttcagaacgtttcaaataaaattattaattcagtaaatggaataaacagagtggtttatgatattacttcaaaaccacctagtacaatagaactagagtaat

SEQ ID NO: 317307 - DNA, 928 bp, Unknown
  Bacterial polypeptide expressing nucleotide sequence isolated from the Sargasso Sea
ttgggtatttgctttggacatcaaattttatcaaaattttgtggtggaaaagttaaacaatctaaatacagagaatttggtttagctaatatttttaaaaaaaataatagtcccataataaaaaacttttttagtcataaaaaaaaactaaaggtatggatgagtcatgctgatcaagtatctaaaataccaaaaaactttaaggtaattgcttcgagtgataattctaaatatgctttagttgagagtaaatcaaggaaattttttggagttcaatttcatccagaggttacacatactgaaaatggaaaaaaaataattagtaattttatttttttgatttgtaaaattaagaaaaattggtccccacgagatcaaaaagtaaagcttataagagaaataaaagagcaagttggttcaagcaaagttatttgtgcactttctggaggtgtagatagtagtgtagttgcacaacttttgaataaggcaatcggaaaaaaactttattgtatatttgtaaacacaggacttttaagaaaaaatgaggaaaaacaagttgttaaaacttttaaaaaaaaacttaagattaatttaacttacgtaaatgcagaaaatgaatttttaaaaaaattaaaaaatatttctgatccagaaaaaaagagaaaaattattggaaatctttttataaagatctttgaaaaatactcaaaaaaaataaagaatgtaagatttttagctcaaggaactctttaccctgatcttattgaaagtcgatctgtcactggaagccaaacatcaaaaataaaatcacatcataacgttggaggcttacctaaaagtatgaaattgaacttagtcgaacctttaaagtttctgtttaaagatgaagtaagaaagcttggattagagcttaacttaagtaaagaaa

SEQ ID NO: 317308 - DNA, 199 bp, Unknown
  Bacterial polypeptide expressing nucleotide sequence isolated from the Sargasso Sea
gggtgatgcccgtaagtacgactgggtagtatcactgcgtgcagtagaaactatcgactttatgaccgcgcactgggcacacctgccatatgatttactgggcaaggtatctaaccgcattatcaatgaaatcaatggtatttcccgtgtggtttatgatatcagcggtaaaccaccagccaccattgagtgggaataa

SEQ ID NO: 317309 - DNA, 932 bp, Unknown
  Bacterial polypeptide expressing nucleotide sequence isolated from the Sargasso Sea
cccctataatagatttaattcgaaagttttaataaatagcaaattatctggaattatatattctgaggtcccaaattcagttaaagatttaaaatctccaaaattagataaaaaaatactttcattaaaaattcctatattaggtatttgttatggattgcagttaatttgcaaaaaattcaaagggaagattgggcaatcaagttcaagagaatatggtcattcattaattaatcataataataaatctttattatttaaaggtttaaaaaggacaagccaagtctggatgtcacatggagatcatattgaaagagagccaaaaggatttgttgtaacttctttttctaataaaaatgtaatctcctctatagaaaataaaaagaaaatgatttttggattgcaatttcatcctgaagtttatcattctattgatggaaaaaaaatattgtcaaattttctaaacaacatatgcaaaattactacaaaatttaagttagaagattttctaaataataaaattaacgatttaaaaaatacattaaaaaataaaaaagttatttgtggactttcaggcggagttgactctactgtaacttcttttttattacataaggctataaagaataacctatactgtatatttgttgatcatgggcttttaagatttaatgagtccaaagaagtggtatcaattttcaaaaaaaaatttggaaaaaatttcatacgtgttgatgcttcaagtatttttttacgtaaattaaaaaaaataaaagaccccgaaagaaaaaggaaaattattggaaaaacatttattgaagtttttgaaaaagaggcaaaaaaaattaaaaatgtaaaattccttgctcaaggtacattgtatccagacattattgaaagtatacctttttttggtggacccaactgctaaa

SEQ ID NO: 317310 - DNA, 582 bp, Unknown
  Bacterial polypeptide expressing nucleotide sequence isolated from the Sargasso Sea
aatgagtcttgatcaaagtttgaataaaatcttaataatagattttggttctcaatttacccagttaattgcaagaagagttagagaattaggtgttttttcagaaatagtaagtcacaaaaagataaaacttaaagatataaatagtagcatcaaaggaataatattatccggtggtccattaaatgtttatcaaataaacaagtattcatttaacaaaaaaattttacaacttgatttgccagttcttggcatatgttttgggcatcaaattttatcaaaacttaatggtggaagagtaaaacaatcgaaacacagagaatttgggctggccaatgtttataaaaaaaacaacagtcttttaacatcaaatttttttggaaataaaaaatcaaaacaagtatggatgagccatgccgatcaagtttcaaaattgcctaaaaattttaaagttgttgcatcaagtactaattcaaaatttgcaattgttgaaaataaaataaaaaaatattatggtgtacaatttcatccagaggtaactcacacagagaatgggaaaaaattaataagtaattttatttt

SEQ ID NO: 317311 - DNA, 583 bp, Unknown
  Bacterial polypeptide expressing nucleotide sequence isolated from the Sargasso Sea
gcacaaggaacaatttatccagatgttatagagtcatctgaatccgaatcaaaagaggcaagaattataaaatctcatcacaatgttggtggattgcctgatgaaatgaaaatgactctagtagagccactaagagatttatttaaggacgaagttaggagaatgggtgccttattgggcttgccaaaggaaatacttaatagacatccctttcccgggccggggcttggtgtaagaatattgggtgaaataaaccaagaaaatatctccattctccaagaggcggattcaatatttattgaagaactaaaaaagaacgacctttatgatgaagttagtcaggcattctgtgtatatcttccaataaaatcagttggcgtggttggtgatgaaaggcgttacgctgatgtcattgcattgagagcggttaaaacaattgattttatgactgctgaatggtcaaaacttccatatgactttctgggtaaagtatctaatagaatcgtaaatgaattagagggagtaagcagagtcgtttatgacatttcaggtaaaccacccgctaccattgagtgggagtaat

SEQ ID NO: 317312 - DNA, 694 bp, Unknown
  Bacterial polypeptide expressing nucleotide sequence isolated from the Sargasso Sea
atgattctcatcgtcgattttggttcacaatacactctcctgattgccaaaacactccgtcaggtcggtgtgtacagtgaagtctgcccataccatcgtatgcacgaggtttatccacagtgcaccgattgtacgggtgttattctttcgggcggaccgtgttcggtcaatgattccgacgccccacgtgtcgagtgggagtcgttgtcggttcctgtattggggatttgctacggggcacaactgatggcgtcgtgtctgtcaggggtcaccgtgaatagctcgggtgcatcatcgggtgcagaatacggtgaacagacattggattggacacccgacagcgtgacggatgcgtggtgtgccacgtggtcatcccaaacgacaacatcaccaccattctcatcggctacggcctcatcgggtacggcctcatcggctacggtatggatgtctcacggtgaccatattgtggtctcgtctatactggacgatgctgatgaggataaacgaccttcaatggttccattggcctactcgtctgctgcaacaacgtccgggtcttcggaacgtgtcttggcagcattcgccatacgtccgagcggacaacaaccctcacggtacggtgttcaattccaccccgaagtgacccatacctcacacggtgcatccttgttgcatacctttgcgacacaac

SEQ ID NO: 317313 - DNA, 661 bp, Unknown
  Bacterial polypeptide expressing nucleotide sequence isolated from the Sargasso Sea
gaaaagaaaaattattggagatcagtttattaaatcttttgataaaatatctgatgatttaggaggttataaatacttagggcagggaactctttatcctgatataattgaaagtggtattagtactggtaattctgcgcatgttatcaaaagccatcacaatgtcgggggactgccaaaagatttcagatttaaacttattgagccattaaaggacctttttaaagatgaggttagagctgttggaaataagttgggtatatctagagcattaattgataggcaccctttccctggacctggattgggagtaagaataattggcgaggttacaaaagaacgagtttcaattcttcaaaatgcagatgctatttttataagagtattgaacgagatgggagaatatgaaaatatttggcaagcatttgctgtcttagttcctgtaaaaacagttggtgtaatgggagaccaaagaacatatgaaaatcttattgcacttagagcagttacgagcattgatggtatgactgctgattggtataaaatgccaccagaagttttatctttagtatcgagtgaaattgttaataatgttcaaggcgttaatagagtagtttatgatattacctcaaaaccacctggaacgatcgagtgggaataa

SEQ ID NO: 317314 - DNA, 892 bp, Unknown
  Bacterial polypeptide expressing nucleotide sequence isolated from the Sargasso Sea
ctctataaaattagagattataaaaaaataaaagggatagttttatcaggcggaccttcaactgtaacaaagaaaaaatatttaaaaattccaaaagaaatatttttaaaaaaaatccctgttcttggaatatgttatgggttgcaattaataacaaaattatttgggggttcaattaaatctttgagaaaaaaaagggaatttggtagagctatactttataaaaaaagaaaatctttacttatcaaaaatttcttcaatactaagaaaaaatctgtatggatgagccatcaagatgcggtaactaaactacccaaaggctttaaagtagttgcgtcaacaaaagactctaagttaactattattgaaaatactaaaattaagatatacggggtgcaatttcatccagaagttacacatacagaaaatggaaaagaaatttttaaaaattttttattttctatatgtaaaatgaaaaaaaaatggcgagcagcttctgaagtaaatagattaattaatgatataagaaaaactgttaaaaaagataaagtaatttgcgcattatcaggaggcgtagatagtagcgtggttgctttattggttaataaagcgattaaaaagaatcttatttgcataatggtcgatacaggattaatgagaaagaacgaattcaaagacacatattatatatttaaaaaaaagtataagctgaatgtaaaattaattaatgcctctaaattatttttaaaaaaactaaaaaatattcataatccagaaaagaaaagaaaaataataggaaatttatttatcaaaatttttgaaaaagaatctaaaaaatataaatctataaaataccttgctcaaggaactctttatcccgaatattatagaa

SEQ ID NO: 317315 - DNA, 637 bp, Unknown
  Bacterial polypeptide expressing nucleotide sequence isolated from the Sargasso Sea
tttattttcaaaatagtagatataaaaaataaattcagaattaaaaaatttattgaaaataaagtatcagaattaaaaaatgaaattaataataaaaaaataatttgtggtttatctggaggtgtagattctacagttactgcatatttgttaagtaaggctgttaacaaaaatctttattgtatttttgttgatcacggtcttttaagaaaaaatgaagctaatgaagtttcaaaaatattttccaaaaaatttggaaataactttactaaaataaatgcttcgaatatttttttaaaaaaattaaaaaatgtatctgaccctgagagaaaaagaaaaataattggcaaaacatttatagaagtttttgataaagcagctaaaaaaatatcaaatgtagattatttaggacaggggactctttatcctgatatcatagagagcattccattttttggaggtccaacagctaaaattaaaagccaccataatgttggaggcttaccaaaaaaaatgaaattaaaaattgtggagccattaagagaattatttaaagatgaggtaagaaatgttggaaagcaattaaaaatagataaacatttacttttaagacatccatttccagggccaggtttag

SEQ ID NO: 317316 - DNA, 655 bp, Unknown
  Bacterial polypeptide expressing nucleotide sequence isolated from the Sargasso Sea
gatgcgtcttgaggacactctcaataaaatactaattgtagactttggttcccaatttacacagttaatcgcaagaaaaatcagagaactgggtgtttattgtgagataataagtcacaaaaaaatagaaaaattcacaaagtttgaaaaaaatattaaagggataattttatctggtggtcctttaaatgtctatgagagtaaaaaagtaaaatttaataataaaattcttaaactaggagtacctgtactaggcatatgttttggtcatcaaattatttcaaaagcaatgggaggaagtgtaagaagctctaaacatagggaatttgggcttgctgaagtaaaagaaactagaaaaagcaagttaactaaaaactttttttctaacagaaaaaataatgtatggatgagccatgcagatcaagtaacaaaattaccaaaaaatttcaaaataattgcacaaagtaaaaattctaagatgtgtattattgaaaattttgaaaaaaaaatgtttggtatccaatttcatccagaagtaagtcatacaatcaaaggaaaactaatactaaaaaattttatattttctatttgtaaattaactaaagattggtcttcaagagatcagaaaaaaaaattaataaacgaagtaagaaat

SEQ ID NO: 317317 - DNA, 466 bp, Unknown
  Bacterial polypeptide expressing nucleotide sequence isolated from the Sargasso Sea
atgaaaagtagtgataaaatactaattttagactttggttctcaatatactcagctaattgctagaagagttagagagattggtgttttttctgaagttaaaccatcttcaatatctattgataaaatacttgagttaaatccttctggaattatcctttctggaggccctgaaactgttactataagctcttcacaaaaagtgcataaatcattattggaattaaaaataccaattttgggaatatgttatggaatgcaaactattgcaaatgaacttggaggtttggttgttaaatctgatgtaagggaatttggtcatgctgaaatttcccatattaatcagtctgttttatttgatgatataagttttgattcaaacactcttgatgtttggatgagtcatggagataaggttgaagtgctcccagagaactttgagataattgcttcttctaaagatgtaa

SEQ ID NO: 317318 - DNA, 829 bp, Unknown
  Bacterial polypeptide expressing nucleotide sequence isolated from the Sargasso Sea
agctaccaagttcagtgaagataatattttaataattgattttggcagccaatatacacaattaattgctagacgcgtaagagaggaaggagttttttgtcaaataattccttataataaggtaagtaagtatataattaataataatccaaaaggaataattttatctggtggaccttcatctgttttaggcattgaaacacctaggatatcaaaagaaattatagatatgggtaagcctattttaggtatatgctatggacaacaagtattagttcaacaacttggaggtaccgtagtatcgtctcaaaaaagtgagtttggaagagctaatataaaagtagtatcgtcttgttctttgacggaccaagtatgggatgaaggtaaaaagtatcaggtgtggatgagccatggagatagtgtagtcgaaatgccagagggttttgatttagtggctgaaactgagggagcggcttttgctgtgatagcaaatgaaaaaactaaacaatatggtgttcaatttcatccagaggtagtacatacactagatggaaaaaaattaattcataattttgtaaaaaaaatttcactttgtaaaactacatggagtatggagtcctttttagattataaagttgatattttaaaaaatcaggtaggattaaaaaaagtactatgtggtttatcaggcggtgttgattcatcagttacggcagctttattagataaagctattggtgaccaattagtttgtgtttttgtggatcatggtctacttaggggaggtgaagcagaagaaatttcttctatttttaaaaaaagacttggt

SEQ ID NO: 317319 - DNA, 859 bp, Unknown
  Bacterial polypeptide expressing nucleotide sequence isolated from the Sargasso Sea
acagagaggggaaaaacaatattaaaaaactttgtttttaccatatgtatgattaaaaaaaactggtcctctaaaaatcaaaaaaaaatccttatagaggatgtaaaaaaaattgtgggtaattccagagtaatatgcgctctatctggaggtgttgatagtagcgtagttgcaaaattaattcataacgcaataggaaaaaaactgacgtgcatttttgtaaacactggtttactgagaaagaatgaagaagttcaggttgttaaaacatttagaagaaaatttaggataaaccttatttacgtagatgctaaaaatctttttttaaataaattaaataaagttaatgacccagaaaaaaagagaaaaataattggaaatttatttattaaaatatttgagaaatatgcaaaaaaaattcaaaacataaaatatttagcacaaggaacgctgtacccagatttaattgaaagtaaatcagtaacaggaagtcagacttctaaaataaaatctcatcacaatgttggtggcttaccaaagaaaatgaaattaaaattagttgaaccattgaggctattgtttaaggacgaggttagaaaattaggtttagaacttaagttgtcaaaagacattgtattaagacatccatttccaggaccaggactggcaattcgtatgcctggagaaataacaaaaaataaaattaaaattttaaaagatgcagatgatatttttataaattcattaaaagatttcaatttatatgacaagatatggcaagcttatgctgcattgttgccagtcaaaactgttggtgttatgggcgataatagaacctatgaatatatgtgtttattaa

SEQ ID NO: 317320 - DNA, 507 bp, Unknown
  Bacterial polypeptide expressing nucleotide sequence isolated from the Sargasso Sea
tatggttttggtgttggactttggatctcaatacactcaacttattgcaagaagaattagagagctaaatgtgttttcggtaatacttccatgggatgtttcacctaaaaaaattcaataccttaatcctaagggggtaattctatccggaggccctgaatccgttaccgaatctaatactccaagaatccctaaaatcatttttgaactagatgttcctttgctgggtatttgttacgggatgcaaactcttgcagagcaatttggggggcaagtttcttcctcaaaaaataaagaatttggccatgctcaaatttttttggaaaaaccatcattgctgtttgatggctttagcttaggatcttcaattgatgtttggatgagtcatggtgatcatgtatcaactctaccagatgaatttaatttaattgcttcaaccacatcagctccaatagcagcaatggagcatgcacaaaaacctatttatgcattgcagttccatccaga

SEQ ID NO: 317321 - DNA, 957 bp, Unknown
  Bacterial polypeptide expressing nucleotide sequence isolated from the Sargasso Sea
tccagaagtagttcatactgaacgcggaaccgatattttgaaaaattttgttttgaatgtttgtaaggcaaaacaagaatggacaatggaaggttttgtggaaaaaacggtaaaagaaatttcagaaattgaaggaaatgtgttatgcggagttagtggaggtatagattcaacagtggcagcattactaatacacaaagcaataggggatagacaaacaggagtttttgtagataatggattattgagattggatgaatccaaagaaattgaagatatgttcaaaaataatttttcattaaatttccacagagtagatgcaagcgagcaatttctttcaaaattaaaaggaataacggatccggaacaaaaaagaaaaattgttggggaagaatttattcaagtatttacggaatttgcaaaacaaaagggtccattcaaatggttagcgcaaggtacactttatccagatgtaattgaaagcggagtatcaaaaggtcctgcagctgtaataaaatctcatcacaatgtaggaggattaccagaatggttgaacctcaaaatcttagaaccgttaagagaattgtataaagatgaagtaagagatgttgctagaattttgggtgttccagaaaaattactgaagagacacccatttcctggaccaggattatctgtacgaattatgggagagattactccttcaaagttagcaatctgtagaaaagcaagtaaaattgttgaagaggaactatgggatgcaggagtttatgataaggtatggcaagcatatgcagctgtaggagatgataaggcagttggagttgtcggagatgaacgtaagtatggaagaattgttacggtcagggttgtagattcgattgatgcaatgactgctgactggactagacttccaaatggagttttagaaaaatcagtaacaggattactaatgaa

SEQ ID NO: 317322 - DNA, 255 bp, Unknown
  Bacterial polypeptide expressing nucleotide sequence isolated from the Sargasso Sea
acaaggtcagtcaggctttcgctgtttttctaccagtcaaatcggttggtgtggtaggggactccagaagatatgaatacgttatatctttaagggcggtggagacaattgatttcatgactgccaaatccgcaaaattacctcatgtattcctagaaaaagtatcaaatagaataattaatgaaatacctgaagtttctagggtaacttatgatatttctagtaaacctccagcaactattgagtgggaataaa

SEQ ID NO: 317323 - DNA, 505 bp, Unknown
  Bacterial polypeptide expressing nucleotide sequence isolated from the Sargasso Sea
tgttggaggatacctgatgatatggaaatgaagctttgtgaaccaataagagaactttacaaagatgaagtaagaattttagctgaatttcttgacgttcctgttgcacataggcaaccgtttccagggcccggattggcagttagagtaatgggtgaagcaacacctaaaagaacagaagtagttcgtcaagcatgtcatatagttgaaactgaacttgagtctgcatctagtgaaggtcatatggaggcaccttggcaatattttgcagttttacttccagtaaaaacagtaggtgttcaaggcgatgtaagggcctacagtaacacaatagcagtacgtgctgttcaaagttatgatgcaatgactgctcaagcatcagatgtcccttatcctatcctcaagaatatttcagaaagaattactcgtgaattaaagaacgatgtaaatcgagttgtttatgatattactgacaaaccacctggaacaatcgagtgggaatagt

SEQ ID NO: 317324 - DNA, 574 bp, Unknown
  Bacterial polypeptide expressing nucleotide sequence isolated from the Sargasso Sea
tcatttttccatgaaagaaacattaaaggatttattttatctggtggcccaaatagtgtgtttgaagagaattcgcctgatctaccaagatgggttatggagagtaaacttcctattttaggtatttgttatggaatgcaattaatagcaataaatcatcaaggtaaagtcaaaaaaactcccaaaagagaatacggtaactcaatattaaacatattagactcttcaaaattatttaatggtatcccaaaaaaaagtaatgtctggatgagtcatggtgataaagtaatcgatctccctgacgactttcaaatagtggctaaaactgataattctttctgcgctgctttcgagaaagatttattttatggagttcagtttcatccagaagttgataacacagattatgggaaagaaatactcaaaaactttgccttagatatatgtaatatctcagataattggagtgctaaaaattttataaataaatctattgaaaatattagaaaagagattggaaacagcaaagttatatgcggaatctcaggtggtgttgactcaagtataactgcca

SEQ ID NO: 317325 - DNA, 643 bp, Unknown
  Bacterial polypeptide expressing nucleotide sequence isolated from the Sargasso Sea
tatggtaaacgatcaacacaacgattcaatcttaattttagattttggtagccaagttacacagcttattgcaagaagggtaagagagagtggaatttattctgagatttttcctttttcaaaagcagatgaggctattaaaaaattaaaaccaaaaggcattatattatcaggtggtcctgcatcagttaacaaccaagatgcaccaacaattgatgataaaatatttgatttaaaaattcctatcttaggaatttgttatggacaacaaatcatgtgttcattgcttggaggcgaagtagaaaaatcaaatgaaagagagtttggtagagcaaatattaaattcctgaagccttcacctttatttgaggggttcgatattaaaggaaatacagaacctgtctggatgagtcatggtgataaagttacaaaactgccaaaaggatttgaagttattgcagaaagtaaaaacgctccatttgcggctatttctgatgaaatccgatcattttatggtgtacagtttcatccagaggttgttcatactccaaatggtgcaaaattactgaaaaattttactcataaaatttctggatgtagcggtaactggacaatggattcatttaaaaaggttgctattgag

SEQ ID NO: 317326 - DNA, 626 bp, Unknown
  Bacterial polypeptide expressing nucleotide sequence isolated from the Sargasso Sea
aatgcaaaagatccttgtagttgattttggttcacaatacacacagcttattgctcgaaggcttcgagaacttaatgtttattctgaagtttacccatgggatgaaatgcctaacttagaatctgttgatggttttgttttatcaggtggtcctgaatcatcaaacatagaaggtaatccaaatatttctgatgaaatatttgaatccaataaacctattcttggtatttgttatggaatgcaagttttagcttttcaagaaggtggagaaatacagaatgaaggaaaaaaagaatttggttacgcaaagatagacttaaataatcaaacttctttatttactgatacctcagactcaattgatgtgtggatgtcgcatggagataaagtaatttcacttccagaaggttatgaaactttagctagttctgataattcaccaattgctgcttaccagaatttagaaaagaactattttggattgcaatttcatcctgaggtgactcatacagattttggtctaaaaattattgaaaattttattaatgtatgtggagttgaaaggaattggaatgctgatgacattctaaaaaacattcataatcaagctaaaactgaggttgggt

SEQ ID NO: 317327 - DNA, 832 bp, Unknown
  Bacterial polypeptide expressing nucleotide sequence isolated from the Sargasso Sea
atgtcagttcaaccaaagctcgacacaaagagcaaaagcattgatactattctcgtcttggattttggttctcaatacactcaattaattgcaagaagaataagagagtcagatgtttattctgaaatccttccctgggatgtagatattaaaaaaatagaagatattaatccgaagggaattattttatcaggcggaccagaatctgtgactgacattcatacaccaagagcaccaaagatagtttttgacttacaagttcctattttaggtatatgttatgggatgcagactctagctgaacaaatgggaggtcaggttacaacctctgaaaaaaaagaatttggattctcaacttttaaaattgaagatgaatctagactattggctggatcttcatctgaaataattgatgtttggatgagtcatggagataaggtagaaactcttcccaatgattttaaactaattggttctacagaatctgcaccaatagctgctatggagcatatttcacaatctatctatgcgcttcagtttcatccagaagttactcatacaaaaggcggaaagttaattttagataactttatctttgagatttgctcatgcaaaccagattggaagcttgatgatttaatttctagcagaattgaagaaattaaaaacgcaacaaatggagaaaaagtacttcttgggctatcaggaggtgttgattcttcagttacagccgcacttttatctaaagcaataggagaaaatcttgtatgcgtttttgttgataacggactattaagaaaaaatgaagcagaggaggtagtcaaacatcaaa

SEQ ID NO: 317328 - DNA, 809 bp, Unknown
  Bacterial polypeptide expressing nucleotide sequence isolated from the Sargasso Sea
gatgagtcttaaagacagtctttccaaagtcttaattatagacttcggttcacaatttacacaactaatagcaagaagagtaagagagttaggagtatattctgaaattattagtcataaaaaattcaaatctaaattagataaaaaaaaaataagaggaataattttgtcagggggacctttaaatgtttatcaatctaaaaaagttaaatttgataaaaaaatatttaaatataacataccaattctaggaatttgttttggccatcaaataatttcaaaggagctaggtggaagagttaaaaaagctagacatagagagtttggtttagcgaaacttaagagattaagaaaaagtaaattaactaaaaatttttttaaaaaatctggatcgaataaagtatggatgagccatgcagatgaagtaacaaaattagcaaatggatttaaagttattgcaaaaacagaaacatctaagttttcaatagttgaaaattcatcaaagaaattttatggaattcaatttcatcctgaagtaactcatacagaaaaaggaaagataattttaaaaaattttattttttcaatttgcagtttcaaaagaaattggtcattaaaaaatcaaaaacaaatattaataaaaaatgttaaacaagttgtaggaaaatctaaagtaatttgtgcattatccggcggtgttgatagtagtgtagttgccaaactaattcataatgctgtaggaaaacaattaacatgtatttttgtaaacacaggtctattaagaaaaaatgaagaaactcaagttgtaa

SEQ ID NO: 317329 - DNA, 530 bp, Unknown
  Bacterial polypeptide expressing nucleotide sequence isolated from the Sargasso Sea
aacagcacaaaccattaaaacccaccataatgttggcgggctacccgaagatatgaattttgaaattattgaaccattaaaaatgttgtttaaagatgaagttcgacaggttggattaaccctaggtttaacggaagatatcgtatttcgacatccatttcctggcccaggtttggccatacgaattttaggagagccaaccaaagaacgtgctcaaattttacaaaaagccgatgccattgttatggaagaaattaaaaaagcaggattatatagacgtatatggcaagcgtttgccgtgctattacccgtcaagtcagttggagttatgggagatcaacgaacatatcaaaacacatgtgccattcgctgtgtcacatccgatgatgcaatgacggctaaatgggcacaaatcccatacgaagttctagaagccatgtccaaccgaattattaacgaagtggatggcatcaaccgtgtggtttacgatatttcctcaaaaccacctgctaccattgagtgggaataag

SEQ ID NO: 317330 - DNA, 313 bp, Unknown
  Bacterial polypeptide expressing nucleotide sequence isolated from the Sargasso Sea
taagctaagagaggcagatcatatttttttaacggaacttaaatcaagtggcttttataataaagcgagccaagcctacgccttttatttgccaataaaatcagttggagtagttggtgataacagaatttatgcggatgttattgggcttagatctgtagatacttcagattttatgacggcaaaagtgacaaatctccctaatgattttgtacagcatgtttcaacacgaatagtcaatgaggtgcaaggagtaagcagggttgtgtatgatataacttcaaaaccacctgcaactattgaatgggagtga

SEQ ID NO: 317331 - DNA, 588 bp, Unknown
  Bacterial polypeptide expressing nucleotide sequence isolated from the Sargasso Sea
gatgaatcttaaagatgatttgtccaaaatcttaattgtagattttggatcacaattcacacaacttattgcgagaaggattagagagtttggggtttattcagaaattattagccataaaaaaatcaattctcgaatgaggcgagacaaaataaaaggaataattttatctggaggtcctttaaatgtttatcaatctaagaaagttaaatttaatagagaaatattcaaatggaacatcccaattcttggtatctgctttggtcatcaattaattactaaagagcttgggggcaaagttaggcaagctaagcatagagagtttggacttgctaaattgaaaagattaaacaaaagcaaattaacaaataattttttcaaaaaaccgggagcttgcaatgtatggatgagtcatgcagacgaagtgataaggttagccagaggttttaaagtaattgcaaaaacagaaacatccaaattttctgttattgaaaactcacttatgaaattatatggaaattcattccatccagaagtgtcacatactgagaatggaaaaaaaattatattcaaactttatttttttct

SEQ ID NO: 317332 - DNA, 717 bp, Unknown
  Bacterial polypeptide expressing nucleotide sequence isolated from the Sargasso Sea
aatctgcggactaagtggtggtgtcgactcttctgtggctgctgtcctgatacacaaagctatcggcgataatctttattgcctgttcatcgataacggactcctgcgatctggagaaagagataaggtagaaaaaacctttcgcgataatttcaacattaatctggatgtcatcgatgcttcagacaagtttctgaataaactgaaaggaatcaatgatcccgaaaaaaaacgcaaatccatcggcaacacattcatagatgtgtttgaagaagaaggcaaacgtctaggcgatttcacatttctagcacagggaaccctgtatcctgatgtaatcgaatccatatcttttaagggaccctcggcagtgatcaaatcgcaccacaatgtaggtggtttgccagagaaaatgaatttaaaattactcgaacctttccgcgaattattcaaagacgaagttcgcgaattaggaagagagatgggtatatctgatgaaatcatcaaccgtcaaccttttcccggacccgggttggctatacggattctaggaaacatttcgcgtaaaaggctaaaaatactctgcgcagcagacaaaattatattggaggaaataaaaaaggcaggactctataacgacctctggcaatcctttgctgtattacttcccgttaagaccgttggagtaatgggtgattcaagaacatatgaaaacgtgat

SEQ ID NO: 317333 - DNA, 634 bp, Unknown
  Bacterial polypeptide expressing nucleotide sequence isolated from the Sargasso Sea
tggagctccacaaattgatccagccatctacgaactggatattccaatcctcgggatttgttatggagcacagctcatagcacaacaacttggaggcaccgtaagccaatttgaagcaggcgaatatggcagaacttctcttcgggtcgtaggagggaatcttctctcagaccaaccaaatgaacaagacgtctggatgagccattttgactgcattacccaaactccagcaggttttacaatgactgcctcgacgaaaaacgcgccggtagccgccttcgaaaaccagcggatctttggcgtccaataccaccccgaagtatcacacacggcatacggccaacaaactatcgaaaaatggttagatctcgcaggaataaagaaaacatggacaatgacaaatgtcatcgaagagcaagtcgcagcaattagatctcaagtaggcaaagaaagagccatatgtggcctatccggaggtgtggattctgcagtagcggcagcactggtccacaaggcaataggcaatcaactcacctgtgtctttgttgatacaggactgatgcgtaaaaatgaaggtcagcaagtagtagaaacctttcaaaaaactcaaggaattgagcttatccacgtcaaa

SEQ ID NO: 317334 - DNA, 285 bp, Unknown
  Bacterial polypeptide expressing nucleotide sequence isolated from the Sargasso Sea
aatgacaagaaatagggatttaatactcattttagattttgggtcacaatacactcaacttattgccagaagaattagagagcttggtatttttagtttagtagagccatataacatttctgtaagtaaaattagagagttgaatcccaaaggtatagtgttaagcggaggtccaaattcagtcaatttcagtaaaacattgaggcccaggagggatatattcaaccttaagatcccaattctaggcatatgctatgggatgcaattgatagcaaaagaatttgg

SEQ ID NO: 317335 - DNA, 809 bp, Unknown
  Bacterial polypeptide expressing nucleotide sequence isolated from the Sargasso Sea
aataaattaacatctatttttgtagataatggattactaagaaaaggagaatcagaagatgttatgaatttccttaagaacaatttagggttgaatataattaaggttgatgcaagagagaattttctaaataaattaaaaaatataattgatcctgaaaagaaaagaaaaataataggaaaagagtttatagacgtatttgaaaaagaagcaaaaaaaattgatgatgtaaaataccttgctcaaggtacactctactcagatatagttgaatctgctgttactaaaaatggtcatcaagttgttataaaaagtcatcataatgtgggtgggcttcctgaaaaaatgaatcttaagcttcttgaacctcttaagttacacttcaaagatgaggtaagagatattggatatgagcttggaatagataaagaaattatagaaagacatccattcccaggaccaggtttagctataagaattattggcaagataactaaacaaaaattaaatatattaagagaagcagatcatatatttatagatgaaataaaaaaagctgaattatatgatgagatttggcaggcttttgcagttttaacaaacattcaaagcgttggtgttatgggagataataggacttatcaaaattgtatagcaataagagcggtaaattcaaaagatgctatgacagctgattggtctaaaatcccctatgaagttctttcttcaatttcatctagaattattaatgaagttgatggaataaacagagtggtatatgacataacatcaaaacctccaggaacaat

SEQ ID NO: 317336 - DNA, 641 bp, Unknown
  Bacterial polypeptide expressing nucleotide sequence isolated from the Sargasso Sea
tatgagtcaagaattcttaaaaaaagaacgagatccttcaatattaattttagattttggatctcaatattctgaattgattgcaagaagaattagagaaactaatgttttttctcttgtagtaagtaactgtatttcaattgagaatattaatgatattaatcccaaaggaataattttgagcggagggccaaattctgtatatgaacaaaattcgcctaaatgtgataaaaaaatttttgatttaggaattcctattcttggcatatgctatggaatgcaattaatggtcaatgaacttggaggatctgttactgcagctacaaaaaaagcagagtatgggagagcaccaatcaatatagatttagagtgtgaactcctttctgatgtaaatgataaatcaataatgtggatgagtcatggagattcaattaattgtttgcctgatggatttaataaaattgctcataccgagaatacactccatgcagcaatttcaaatgataaaaagaaattatttggcgtacaatttcaccctgaagttgttcattcagagcagggcatgactgtaataaaaaattttgtttataaaatttctcattgtaaggctgattggaccaccgaaacctttttagatgaaa

SEQ ID NO: 317337 - DNA, 889 bp, Unknown
  Bacterial polypeptide expressing nucleotide sequence isolated from the Sargasso Sea
ttgtccacaaagattgcgggctgtaccggagactggacgatggcgaacttccgcgaggaggaaattgccaaggtccgcaaacaggttggcgacggcaatgtgatctgcggattgtctggcggcgtcgattcgtccgtggcggctgtcttgatccatgaggcgatcggcgagcagctcacttgtatcttcgtggatcacggtctgctgcgtcagggcgaggcggaacaggtggtcgagacgttccgcgaccggttcaacataaaactggtccatcgagacgcgagtgagctgttcatcagtgaacttgaagggaagggtgatcctgaagagaagcgcaagattatcggacgtctattcatcgaagtctttgaggaggaggcccagaaaacaggtggcgcggattttctggcacaagggacactttatccggacgtaatcgagagcgtctccttcaccggtggacccagcgttaccatcaaatcgcaccacaatgtaggcggcctgccggaacgcatgaacatggagctggtcgagccgctccgcgagcttttcaaggacgaggtacgcgaccttggccgtgaattgggtattccggaagacatcgtcggccgtcatccgtttccgggccccggtctcgcgatccggcttccgggcggcatcacgcgcgagaagctcgacatactgcgccaggcggacgccatctatatcgaggaaatccgcaatgctggtctctacgatacgatctggcaggctttcgccgtgctcctaccagtgcgtactgtcggcgtgatgggtgatgaccggacctacgattatgcctgcacgctgcgcgccgtgacgtcgaccgatggcataagggcggactactatccctttgagcacgagttcc

SEQ ID NO: 317338 - DNA, 768 bp, Unknown
  Bacterial polypeptide expressing nucleotide sequence isolated from the Sargasso Sea
attgataaaagaaataagagatcaagttggtcaaaataaagttatttgtgcactctctgggggtgttgatagcagtgtagttgctcaactgttaaataaagctattggcaaaaaattgtattgtatctttgttaacacaggtatgttgagaaaatatgaggaaaaacaggtcgtcaaaacatttaaaaaaagacttaagatcaatttaatctatgtaaatgcagaaaatgaatttataaaaaaattaaaaaatatttcagatcctgaaaaaaaaagaaagattataggaaatttgtttataaaaatttttgagcgttatgcaaaaaaaattaagaatgtaaaatttttagctcaaggaactttatacccagatttaattgaaagtagatcagttacaggcagccaaacatctaaaataaaatctcatcacaatgttggaggtctaccaaaaaagatgaagttaaaattagttgaaccattaaagtttttatttaaagatgaagtaagaaaattaggtttagaacttaatttaagtaaggaaattgtgctcagacatccttttcctggcccaggcttagctatacgtatgccgggtcatattacaaaagataaaattaaaattttaaaagatgcagatttttattttattcaggctttgaaagatcacaaactttatcataaaatttggcaggcatatgcagctcttcttcctgttaaaacagttggggttatgggagataacaggacttatgaatatttatgcctact

SEQ ID NO: 317339 - DNA, 847 bp, Unknown
  Bacterial polypeptide expressing nucleotide sequence isolated from the Sargasso Sea
agcattactaatacagaaagcgataggggatagactaacaggggtttttgtagataatggattgttgagattggatgaatccaaagaaattgaagatatgttcaaaaataatttttcattaaatttccatagaatagatgcaagtgaacaatttctttcaaaattaaaaggaataacagatccagaacaaaaaagaaaaattgttggagaagaatttattcaagtattcactgaatttgcaaaacaaaagggaccattcaaatggttagcacaaggtacgctttatccagatgtaattgaaagtggtgtatcaaaaggtcctgcagctgtaattaaatctcatcacaatgtaggaggattgccagaatggttgaatctcaaaatcttagaaccattaagagaattgtataaagacgaagtaagagatgttgctagaattttgggcgttccagaaaaactactaaagcgacatccatttcccggaccgggattatcggtacgaattatgggagaaattaccccttcaaaattagcaatttgtagaaaagcaagtaaaattgttgaagaagaattgtgggatgcgggagtttatgataaagtatggcaagcctatgcagctgtaggagatgataaggcagttggagtcgtaggagatgaacgcaaatatggtagaattgttacagttagggttgtagactcgattgatgcaatgaccgcagactggactagacttccaaatggagttttagaaaaaatcagtaacaggattactaatgaaattgatgaagttacatgggtttcttatgtaatttcaagcaaaccgcctgctaccattgaacctcaataa

SEQ ID NO: 317340 - DNA, 768 bp, Unknown
  Bacterial polypeptide expressing nucleotide sequence isolated from the Sargasso Sea
tttggatacgcgaaaataaatttaagcaatcaaacttccttgttcattaatacttcagattcaatagatgtttggatgtcacatggggataaggtaatttcattgccagaaggttatgaaactttagctagttctgataattcaccaattgctgcttatcaaaatttagaaaagaactattttggactccaatttcatcctgaggtaactcatacggatcatggtctaaaaattattgaaaattttattaatgtgtgtggagttaacaggaattggaatgctgacgacattctaaaaagtataaataatcaagttaaaaatgaagttggggatgggaaagttcttttggcattaagtggaggtgttgattcaactgtactagcatctgttttacataaaaatctaggagatagattagtatgcgtgatggttgaccatggtttgcttcgtaaagatgaagcaaataatgtcgtaactaatctcaaagaaaaaattgggctgaaagttaatcttattaatgctcaagcagcctttttaaaaaaattagaaggcataaaggatcctgaagaaaaaagaaaaattatcggcaacacttttatagaagtgtttgaagcagaagcaaaaaaacttgaaggtatagaatggttggcccaaggcacaatttatcctgatgtgattgaatcagcaggtaattccaaatccaaagctaaagttatcaaatctcatcataatgttggagggttaccagaaagaatgaatttaaaactt

SEQ ID NO: 317341 - DNA, 691 bp, Unknown
  Bacterial polypeptide expressing nucleotide sequence isolated from the Sargasso Sea
ttttttaataaattaaaaaatgtatctgatccagagttaaaaagaaaaattataggtaaactttttataaagttatttgaaaagaaagcaaaaaaaataaaatttcttgctcaaggaaccctatatccagatttaattgagagtaaatctgttactggaagtcccacttcaaaaatcaaatcacatcacaatgttggaggcttacctaaaaaattaaaattttctttaattgaaccgttaaaaactttgtttaaagacgaggtaagaaaattaggaaaagaactttcagtacctaaaaatattctccaaagacaccctttccctggaccaggacttgctatcagaatacctggaaagatttcaaaatataaaataaaaattttacaagaagcagactttatatttattgatgaactaaaaaaatcaaatctttataataaaatttggcaggcttatgctgctttactcccgctaaagactgtaggtgttatgggagatagtaggacttatgagtacacatgcatgttaagagctgtgacttctcacgatggcatgactgcagatttttataattttaaaaaaaattttattcaaaaagtatctaatagaataattaattctgtgaatgggattaacagggttctttatgatgtaacttcaaaaccacctagcacaatagaattagaatgat

SEQ ID NO: 317342 - DNA, 712 bp, Unknown
  Bacterial polypeptide expressing nucleotide sequence isolated from the Sargasso Sea
atgtctgcaaatttatcatctacatctaaaataattgatactattttagttcttgattttggttctcaatatacccaattaattgcaagacgagtaagagagagtaacgcttactctgaaatactaccatgggatattgatgaaaaaaaaattaaatcaatcaatcctagaggtatcattttatctggtggtcctgactctgttactgaaagctatacgcctaggattcctcaaataattttcgacttaaatgttccaattcttggaatatgttatggaatgcaaacgttagctgaacaatttggagggcaagtaatatcttctgaatttaaagagtttggatattctgagcttaaagttaagactgattctattttattttctaatttaaataacactttaaatgtttggatgagtcatggagatcaagttcaagatcttccagataattttgatttattagcttcttctacctcagctccaatagctgcaatgcagcatttaacagaaccaatttatgctcttcaatttcatccagaagttacccatactgatgatggcaaaactatattagataattttatatttaaaatttgtaaagttaattcagattggaagatggatgatttaatagatcaaagaatccgagaaataaaggacaaagttcaaaacaacaaagttttgctaggcctttctggaggtgtcgattcat

SEQ ID NO: 317343 - DNA, 393 bp, Unknown
  Bacterial polypeptide expressing nucleotide sequence isolated from the Sargasso Sea
aatgcaatttcaaaataaaaaagatttagtattaataatagattttggttcacaagtaacaaaattaattgcaagaagagttagagatttaggagtctattcagaaatactcacccctagccaaattaataagattacagactttgaaaaaattaagggtataatcctttccggaggaccatcaactgttacaaaaaaaagttttcagagtattcctaaacatatattaaaaaaaaagatacccatacttggaatttgttatggtttacaactgattgcaaaacttcacggtggtaggattaaatcatctaaaaaaaaaagggagttcggaagagcgttcatttttaaacaaaaaaattcgttacttacaaaaaatttctttaatggtaaaaa

SEQ ID NO: 317344 - DNA, 583 bp, Unknown
  Bacterial polypeptide expressing nucleotide sequence isolated from the Sargasso Sea
aatggatcttaacaataatttaaataaaattttaattattgattttggttcacaatttactcaacttatagcaagaagaataagagagttaggagtattttcagaaataattagccacacaaaactaagttcaaaattaaacaaaacagatgtgaagggaataatattatcaggcggtcccttaaatgtttatcaatccaaaaaggttaagtttagtaaggatatatttaaatggaaaatcccaactttgggaatttgttttggccaccaagttatttctaaagaattgggtggtaatgttaaaaaagcaaagagtagagaatttggtttagcaaaacttaaaagattgtccagaagcatacttactgacaatttttttgataaaaaaggatcaagtaatgtttggatgagtcatgctgatgaggttacaaaattagctaaaggtttcaaagcaattgcaaaaacagaaacttctaagttttcaattgttgaaaattcctcaagaaaactttatggcatacagtttcatcctgaggtaacacacactgaaaaaggaaagataattcttaaaaattttcttttt

SEQ ID NO: 317345 - DNA, 571 bp, Unknown
  Bacterial polypeptide expressing nucleotide sequence isolated from the Sargasso Sea
tctttatcctgatattattgagagcaaatccgccacaggtagcaaaacatcaaaaattaaatctcatcataatgtcggaggcttgcctaaaaaaatgaatttaaaattaattgaaccattaaaagaattttttaaagatgaagtgagagtattaggtgcgagtttaggattgaataaaagtatcaattttaaacatcctttccccggtcctgggctaggaattagaattgtaggtaaaatcacatctgataaattaaaaattcttcaggaggcagatgacatttatatcaaagaactcacaaaaagcggacattataataaaatatggcaagcttacgcagcattacttcccatcaaaactgttggagtgatgggtgactccagaacatatgaacatatttgtttattaagagctgtcacatcagaagatggaatgacagcggattattatagttttccaaaaaaatttttagataatatatctaataaaataatcaataatgtgaaaggaataaatagagttgtttatgatataacttcaaaacctccaagcactattgaattagaataa

SEQ ID NO: 317346 - DNA, 841 bp, Unknown
  Bacterial polypeptide expressing nucleotide sequence isolated from the Sargasso Sea
tttattgggtctttctggcggcgtggactcatcagtagtagcagctcttttagcaaggtctattggtaaacggttagtttgtgtgttcgtaaacaatggccttttaagattggatgaggttgaacaggtccaaaaaatggtaaaaacaggttttggctctgggatctcttttgaatttcgtatcgtcgatgcggagagtatttttttagatcgtttggctggcaccgatgaccccgaagaaaaacgaaagatagtgggtaacacttttattgaagtttttgaacaagaagcaaaaaagcttaaagatattcacttcctggctcaaggcacgatttaccctgatgtcatagagtctgcggagggcaaggggagtaaggcgcacgtcataaaatctcatcacaatgtgggcgggcttcctaggaatatgagcttgaagctgatagaacctcttcgtcaattatttaaagacgaagtccggcaattaggacgacagctcggtttgccatcgaccatgatagatagacatcctttccctggacccgggctagcggtgcgaattttaggtgaggtaaggaaggaatttcttactgtgcttcgaagagctgataaaatttttatggatgaattgcacagtcatgagctctacgaaaaagtaagtcaagcatttgttgtgttccttccagttaaaagtgtaggagtagtcggcgactctcgtagatatgattatgttgttagtttaagggctgtcgagacccttgatttcatgaccgcaacatgggctaggcttcctcatgaatttttggatctggtttcaagaagaataatgaatgaggttgaagag

SEQ ID NO: 317347 - DNA, 469 bp, Unknown
  Bacterial polypeptide expressing nucleotide sequence isolated from the Sargasso Sea
aaagctggttgagccgcttagggatttattcaaagacgaggtaagaaaaataggcaaagaacttggactgacctcaaaattggttgatcgacatcctttcccaggtcctggcttgggagtgagaatcttaggagaagttaaaaaagaatacgctgatctattgaggttggccgatgatatttttatcgaggaactacataaagagaatctatacgacaaagtaagtcaggcatttgcagtttttctaccagtcaaatctgttggcgtcatgggcgatggaagaaaatatgaatatgttattgctctaagagcggttgagacaactgattttatgactgccaattcggctaaattgccctatgaatttttggatcgtgtatcaacacgaatcatcaatgaagtctctggtatttcaagagtcacgttagatatatcctcaaaaccaccatcaactattgagtgggaatga

SEQ ID NO: 317348 - DNA, 739 bp, Unknown
  Bacterial polypeptide expressing nucleotide sequence isolated from the Sargasso Sea
cgattccgccaggctcctcgccaagctcgagggcgtgacggacccggagaagaagcgcaagaccatcggcgcgcagttcatcgaggtattcaaggagtacaaggacgacgtggagaagaagactggcgtgaggcccaagtttttggtgcagggtaccttgtatcccgacgtgatcgaatcgtgccccccgccgggctcggaccagaaacactcgcacaccatcaagtcgcatcacaacgtcgggggtctgcccaaggagctcgggttcgagctcgtcgagcccctgcgcatgctcttcaaggacgaggtgcgcaagctcggattgctcatggacgtgccgcaggctttcatctcgcgacacccgttccccggccccggcctcgcggtgagggtcctgggcgacgtctgcgccgaaggcgccctcgacaccatccgcgccgtggacgagatctacatcaacgccatcaaggacgcgggcctgtacgataagatctggcaggcgttcgcggtgtttttgcccatcaaatccgtgggcgtgcagggagaccaacgaacgcactcgcacgtcgtgggccttcgagccatcacctcatccgacggcatgaccgcggactggtaccagttcgagccgaagtttctgcaggaggtgagcgcgaagatctgcaacgaggtgaagagcgtgaaccgggtggtgtacgacatcacgtccaagccgccgtccacggtggagtgggagtaa

SEQ ID NO: 317349 - DNA, 640 bp, Unknown
  Bacterial polypeptide expressing nucleotide sequence isolated from the Sargasso Sea
tttatttattaaaatttttgaacaagagtcaaaaaaatataaatctatcaaatatttagcacaaggtactctttatcctgatgttatagaaagtagatcagctactggaagtcaatcatctaaaattaaatcacatcataatgtgggagggctgcctcgaaaaatgaatttaaagttaatagaacctcttaaagaattttttaaagatgaagtcagagttttagggaaatcaataggattagataatagtataagaaataaacatccttttcctggtcctggtttagcaattagaataataggtaatattacttctcaaaaaataaaaattctccaagaagctgaccacatttatattaatgaattaactaagcacaagctttacaaaaagatttggcaagcatatgcaggtttattgcccatgaaaactgtgggagtaatgggagacgcgagaacttatgaatatacttgtttattaagagctgttgtttctgaagatggcatgacagcagattactttagttttccaaaggattttttggataaaatttcaaataaaattgtaaatggagtacctggaataaatagagtagtgtatgatataacttcaaagccacctagcactattgagttggaataa

SEQ ID NO: 317350 - DNA, 589 bp, Unknown
  Bacterial polypeptide expressing nucleotide sequence isolated from the Sargasso Sea
actggtattagattttggttcccaatatactcaactaattgccagaagagttagggaaagtgatgtttattctgagatacttccatgggatattcctgaagaaaagatttctaatttaaagccaaaaggcataattctttctggaggacctaattctgtaactgaaagttttactccaagagtcccaaagtgtgtttttgatatgggagttccaattttaggtatctgttatggtatgcaaactcttgcagagcaaatgggcggacaggtaatttctgcagatcagaaagaatttggtcatactgaattagagattgcaagcgattcaattttattcgcaggcctagaaaaaaaaataaatgtctggatgagtcatggagaccaagtccaagatttgcctgatgaatttaatttaacagcattaactgcaacagcacctatagcagctatggagcatataagcttacccatatatgccattcaatttcatccagaagttactcataccgatcatggccaaaagatattagataattttatatttaatatatgtcatgctaaaactgattggaaaatggatgatttaatt

SEQ ID NO: 317351 - DNA, 757 bp, Unknown
  Bacterial polypeptide expressing nucleotide sequence isolated from the Sargasso Sea
aaaaacttttaagaagcgtttaaaaatgaatttaatttatgtaaatgctgaaagggagttcttgaaaaaattaaaaaatgttactgaaccagaaaaaaaaagaaaaataattggtaatttatttattaaaatctttgagagatacgcaaaaaaaattaaaaatgttaaatttttagctcaaggaactctctacccagatttaattgagagtaaatctgttactggaagccaaacatcaaaaataaaatctcatcataatgttggtggtttaccaaaaaaaatgaatttgaaattagtagagccactaaaattcttatttaaagacgaggtaagaaaattaggattagagttaaatttaaataaagaaattatttctaggcatccttttcctggaccaggtttagctattcgaatgccaggcataattactaatgaaaaaataaaaattttaaaagaagctgactattacttcattcaagctttgagagaccatggtctttataataagatttggcaagcttatgcagcattacttccagtaaaaactgtgggtgttatgggagataatcgaacttatgaatatttatgtttgttaagagcaattacgtctgaagatggaatgacagcagactattatgaatttaaaaagtcttttttgcaaacagtgtcaaataaaatagtcaacagcataagaggcatcaatagagttgtttatgatgttacatcaaagccaccaagcactattgaattagagtaa

SEQ ID NO: 317352 - DNA, 780 bp, Unknown
  Bacterial polypeptide expressing nucleotide sequence isolated from the Sargasso Sea
aatcagaatgtaagaggtattgtcttgtctggtggtcctttaaatgtttaccaaatacaaaaatactcttttgataaaaaaattttagaattgaacattccaattttaggaatttgttttggccaccaaattttatctaaattacatgggggtagagttaaacaatcaagacatcgtgaatttggattggctaatatttttaaaaaaagagacagcctattaactaaaaacttctatggtctgaaaaaaactaaacaagtttggatgagccatgcagatcaggtgtctaaactacctaagaattttaaggttattgcgtccagtacaaattctaaatatgccatagttgaaaataaacaaaaaaaattttatggagtacaatttcatccagaggttactcatactgaaaatggaaaaaaattaattagtaactttgtatttttaatatgcaagatcaaaagaaactggtcttcaagggatcaaaaaattaaattaattagagagataagggatcgggttggtattaataaggttatttgtgccttatccggaggtgtagatagcagtgttgttgctcaactattaaataaagcaattggtaagaaattatattgtattttcgtaaatacaggccttttaagaaaaaatgaagaaactcaagtaatccaaacttttaagaaaaggttaaaaatgaaccttatatatgtaaatgcagaaaaggagtttttaggaaaattaaaaaatatttctgatcctgaaaaaaaaagaaagataattgga

SEQ ID NO: 317353 - DNA, 526 bp, Unknown
  Bacterial polypeptide expressing nucleotide sequence isolated from the Sargasso Sea
tctggtgacaattaaaagccatcacaatgtaggagggcttccagaacgaatgaatatggagctagttgagcctttgcgagaactttttaaagatgaagtcagagaactcggaaaagaactaggaattcccagtcactttattgagagacacccattcccaggtcctggacttgcaattcgtttacctggtgaaatttcttctgaaaaagccgatattttaaggaaagctgacactatttatattgaagagataagaaaagccggactttataatgagatttggcaagcttttgctgtacttttacctgttcagacggttggtgtgatgggagacgagagaacatatgattttgtttgtgctttaagggctgtgacttcacttgatggtatgacagcggattattatccttttgaacaagagttcttagctaatgtaagtactcgtattattaatgaagtaaaaggaattaatagagtggtttacgatataacatcaaaaccacccggcactattgagtgggaataa

SEQ ID NO: 317354 - DNA, 896 bp, Unknown
  Bacterial polypeptide expressing nucleotide sequence isolated from the Sargasso Sea
tccttgggacgaaatcccagttatggatgatgtggaaggtttcattttatctggtggacctgaatcatcaaatctagagggtaatccaactattgatgacctgctttttaattctaacaaaccaattttaggaatctgttatggtatgcaagttcttgctcatcaagaagagggccagattattaatgaaggaaaaaaagaattcggctacgccaaaataaatatcaaagccgatacagttttatttaaaaatataagcgactcacttgatgtttggatgtctcatggcgataaggttcaatctctgccagacggctatgccattacggccacttcagataattcacctattgctgcctatgaaaatatttcaaaaaaatattttggtctgcaatttcatccagaagttacccataccgaaaatggcattgcgatcataaaaaattttcttgatatatgtggtattgagcagaattggagctctgatgatattctgcagcaaatcgatgcggtagtcgcagcagaagttaaggatgaagaagtattattggctttaagtggaggcgttgactcaacagtgcttgccgctgttttacatagaaccttaggcaataggctgacatgtgtcatggttgaccatggtttgcttagaaaagatgaagcacaaaatgttgtaacaggcctcaaagataaactaggccttttggttaatttggtgaatgcacaagatatattcctctctaaacttgaaggcgtcacagaccctgagcaaaaaagaaagattattggtaatacattcatagaagtatttgaaagcgagagtaaaaaattaaacgatactaagtggctagctcaaggcacaatatatcctgatgtcattgaatcagccaggtaat

SEQ ID NO: 317355 - DNA, 811 bp, Unknown
  Bacterial polypeptide expressing nucleotide sequence isolated from the Sargasso Sea
ccaaatgctccatatgcaatcattggcgatacagagcgccatttttatgctgtccagtttcatcctgaagttcatcatacacccaatggacagactttgtttgaaaattttatctcaatagcaggcattaaccaaaattggacaatggaagcatacagagagataacaattgcaaaaattagagaagaagtagggtccaaaagagttatttgcgggttatcgggaggcgtagatagctcggtagctgctgtcctaattcatgaagctgtcggagatcaacttacctgtgtatttgtagatcacggtttacttcgaaaaggagaagccgaagaagtcgtaacaatgtttagagaaaattataatattgctcttatacatgcagatgaatcagaactgtttttagaaaatttagaggggcaatctgaccctgaaactaaacgtaagacaataggccgattatttattgatgtatttcaaaagtacgcaaatacaattgaaaatgctaactttttagcgcaggggaccctatatccagacgttatagaaagtgtatcatttaaaggtggcccttcagttacaatcaaatcgcatcataatgtgggcggtttaccggagaaaatgggtttaaaactactagaaccattgagagaactttttaaagatgaagttcggacactaggacgagagttaaaattacccgagaatttcataaatcgacatccttttcccggtccaggtttagcaatcagatgtccaggcaaaataacaagaaataaacttgaaattttgcgtaacgcagatgcagtttaca

SEQ ID NO: 317356 - DNA, 810 bp, Unknown
  Bacterial polypeptide expressing nucleotide sequence isolated from the Sargasso Sea
aaagcaataattttatccggcggaccagacagcgtaacaagagatgggagcccaagagctcactcagttatttttgatatcggggtgcccttgttggggatttgctatggccaacaattaatgatgcagcagcttggtggtgaagtaaaatctggagttggaacagctgaatttggaaaagcatttgttgaaagaaaaaattcgtcagatttcataaaaggatggtttgttgatcaaaaagaacaggtctggatgagtcacggagaccacgttagtaaaatcgcacccggctttgaagtatttggtttttctcccaatgctccatatgcaatcatcggcgacgcaaagcgccattattatgctgttcagtttcacccagaagtttatcatactccaaatggtcaaactttatttgaaaattttatctcaatagcaggcattgatcaaaattggacgatggaagcatacagagaaatagcaattagaaaaattagaaacgaagttggctctaaaagagtaatttgcggtttgtcgggaggcgtagatagctcagttgctgctgttctgattcatgaagctataggcgatcaactaacctgtgtatttgttgatcacggtttacttcgacaaggagaggccaaagaagttgtaacaatgtttagagaaaattataaaatttctttaatacatgcagatgaatcagaactatttttaggcgaattagaagggcaatccgaccccgaaactaaacgtaaaataattgggcgattgtttatcgacgtttttcaaaagtacgcaaatcaaattgaa

SEQ ID NO: 317357 - DNA, 877 bp, Unknown
  Bacterial polypeptide expressing nucleotide sequence isolated from the Sargasso Sea
actctgggacaggaaaacttacttggactgtatattaataatggttttatgcgcaaacatgaaagtgaaggaatacttaaaagatattcgcagctaggatataaaaatattcaatctagaaactacagttctttttttttagatgcactcacaggacaggttgacccccagattaaaagacaaatcattggaaaaacttttataaagatgcgtgacaggtttttgaatgaactaaatttaaatccaaaggattggatgcttggacagggaactctatatcctgatataattgaatccggaggcactgagtatgctgaaattataaaaattcaccacaatcgtgtaaaggaggtattagaccttgaaaattcagggaaagtagttgaaccacttaaagatctttataaagatgaagtcaggaaggtaggaactttgttaggtcttcctgaatctattttatggagacacccttttcccggtcctggtctatcaataaatgttttgtgtgccagaggagatgagtcatttcctcaaatagaaaaatctataagaaaagtccgagattgcctaaaagattgtgaatgcagtttccatattcttccagtacgatctgttggagtacaaggtgatcaaaggacatatgcttctccagttgcacttataaatactcctcgaaattgggactggttggaaagtcaggctactcgaataacaaatgaagttaagacagttaatcgggtagtaattttattaggttcaaatataaaggactctagtgctcaatttaatttccataaagcattttgcagcaaagatcgacttgatttgcttagagaggctgattacaaagcaacaaaattttggaaaaacacggact

SEQ ID NO: 317358 - DNA, 913 bp, Unknown
  Bacterial polypeptide expressing nucleotide sequence isolated from the Sargasso Sea
cggaaggaaattaataagcaattttatttttttaatttgtaaaattaaaagaaattggtcgtcaaaggatcaaaaaaatcagcttataaaagatgttaggaaacaagttggatctagtaaagtaatttgtgcattatcaggaggcgtagatagtagtgtagtcgctcaattattgaataaagctattggaaaaaaactttattgtatttttgtaaatactggtcttttaagaaaaaatgaggaagtgcaagttgttcagacatttaagaagcgtttaaagattaatctgatttatgtaaatgctgaaaaagagtttttaaaaaaattaaaaaatgtttctgatccagagaaaaaaagaaaaataattggtaatttattcattaaaatatttgaacggtatgctaagaaaattaaaaatgttaaatttttagctcagggtactctttatccagatttaattgagagtaaatccgttactggtagccaaacctctaaaattaaatcacatcataatgttggtggtctgccaaaaaaaatgaatttaaaattagtagaaccgctaaaattcttatttaaggatgaggtaagaaaattaggattagagttaaatttaagtaaagaaataatttcaagacatccttttccaggaccaggcttggctattcgaatgccaggtataattacaaacgaaaaaataaaaattttaaaagaagctgattattatttcatccaagcgttaaaagattgcggactttatcataagatttggcaggcatatgcagctttactacctgttaaaacggtaggcgttatgggagacaatcgtacttatgaatatttatgtttgttaagagctattacatctgaagatgggatgacagcagattattttgaatttaaaaagtcttttatg

SEQ ID NO: 317359 - DNA, 451 bp, Unknown
  Bacterial polypeptide expressing nucleotide sequence isolated from the Sargasso Sea
gatgtcccagtcttcgtccgacggtcagcgtcagccggccatcgtcatccttgatttcggctcccagtactcggagctgatcgcccggcgcgtgcgcgaaaccgaggtgttttcggtggtgctcggctacagcacctcagcggaggagttgcgggcaatacagccgaaggggatcatcctcagcggcggccccagttcggtgtacgccgagcatgcgcccctctgtgatccggagatctgggagctgggcatcccggtgctgggggtctgctacggcatgcagctgatggtgcagcagctggggggtgtggtggaagccgccagcggcaaggccgaatacggcaaggcaccgctggaggtggatgatcccaccgatctgctcaccaacgtcaccggtggatccacgatgtggatgagccatggcgactcggtaaaggccctgcccgaggga

SEQ ID NO: 317360 - DNA, 478 bp, Unknown
  Bacterial polypeptide expressing nucleotide sequence isolated from the Sargasso Sea
atgaaattaaaactggttgagcctttaagacttttattcaaagacgaagttagaaaactaggattggaactaaaattatcaaaagaaatagtacttagacatcctttcccaggcccaggtttagccataagaatgcctggagaaattacacaacaaaaaattaaaattttaaaagatgcggacgacatattcatcaaagctttgagagattatgatttatataacaagatatggcaggcatatgcagcattattgcctgtcaaaactgttggtgtgatgggagataatagaacatatgaatatatgtgcttattaagagcaatcacatcagaggatggtatgaccgctgacacctttaattttaataaagactttatgcaatttgtttcaaacaaaataattaataatataaaaggtatcaatagggttgtttatgacataacatcaaaacctccaagcacgatagaattggaataat

SEQ ID NO: 317361 - DNA, 802 bp, Unknown
  Bacterial polypeptide expressing nucleotide sequence isolated from the Sargasso Sea
aatgtgtatttataaaccaggtcttcttagaaaaaatgaggaaaaagaagtagtaaaaacttttaaaaaaaaattaaaatctaatctaatttatgtagatgcatctaaaatatttttaaacaaacttaaaaatgtgactgaccctgagtataaaagaaaaattattggaagactttttataaaattatttgaaaaaaatgccaaaaaagttaaatttcttgcccaaggaactttataccctgatttaattgagagtaaatccgttactggaagtcccacttctaaaattaagtctcatcataatgtcggaggtttacctaaaaaaatgaaattctcattagttgaaccattaaaaacattgttcaaagatgaagtgagaaaattaggaaaagaactttcagtgcctacaaacatccttcaaagacatccttttcctggaccagggcttgcaataagaataccgggaaggatttcaaaatataaaatcaaagttttacaggaagcagactttatatttattgatgaattaaaaaaatcaaaactttatgataaaatctggcaagcatatgctgctctacttcctttaaaaactgtaggtgtcatgggtgatagcagaacttatgaatacacttgcatgctaagagctgtaacatctcatgatggtatgactgcagatttttttaatttcgaaaaaacttttattcagaaagtatcaaatagaataattaactctgttaacggaataaatagagtgctttatgatgtaacctctaaacctccaagcacaatagaattagaataa

SEQ ID NO: 317362 - DNA, 854 bp, Unknown
  Bacterial polypeptide expressing nucleotide sequence isolated from the Sargasso Sea
aaaaattggtctccaaaagatcaaaaaattaaacttattaataatataaaaaaacaagttggttcaagtaaagttatctgtgctttatcaggaggtgtagatagtagtgttgttgcacagcttttaaataaagcaattggaaaaaaattatattgtatttttgtaaacactggtcttttaagaaaaaatgaagaaaatcaagttattaataattttaaaaaaaaattaaaaattaatttaatttatgttaatgcagaaaaagagtttctaaaaaaactcaataatgtttctgatccagaaaaaaagaggaaaattattggtaattattttataaaaatatttgaaagttatgcaaaaaaaattaaaaatgtaaaatttttagcacaaggaacactttatcccgatctaattgaaagcaaatctgtcaccggaagcgaaagttctaaaattaaatctcatcataatgttgggggacttccaaaaaaaatgaaattaaagcttattgaacctttgaagtttttatttaaagacgaagttagaaaattaggtttagaactaaatttgagtaaaagtattatttcaaggcatccatttccaggtcctggattagcaataagaatacctggtttgattacaaaagaaaaattaaagattttaaaagatgccgattattattttattaaagctttaaaagatcatggtttttatcataaaatatggcaagcttatgcagctttattacctgtaaaaactgtaggtgtaatgggtgataatcggacatatgaatatatatgtttattaagagcaattacctctgaagatggaatgactgctgatttttatgattttaaaaa

SEQ ID NO: 317363 - DNA, 482 bp, Unknown
  Bacterial polypeptide expressing nucleotide sequence isolated from the Sargasso Sea
aagaatgaatatggagttagttgagcctttaagagagctttttaaagatgaggtaagagagcttggtaaagaattagggattccagattactttattgagagacatccttttccaggtcctggccttgcaattcgtttgccaggtgagatttctcctgaaaaggctgatattttaaggaaagctgatacaatttatattgaagagattagaaaagcaggactttataatgagatttggcaagcttttgccgtacttttgcctgttcagacggttggtgtaatgggggatgaaagaacatatgattttgtctgtgctttaagggctgtgacttcacttgacggtatgacagctgattactacccatttgagcaagaatttttagctaatgtgagcactcgtatcattaatgaggttaaaggaattaatagagtagtttatgatataacatcaaaaccaccaggtaccatagagtgggagtaat

SEQ ID NO: 317364 - DNA, 919 bp, Unknown
  Bacterial polypeptide expressing nucleotide sequence isolated from the Sargasso Sea
gtggatgtcgcatggagataaagtaatttcacttccagaaggttatgaaactttagctagttctgataattcaccaattgctgcttaccagaatttagaaaagaactattttggattgcaatttcatcctgaggtgactcatacagattttggtctaaaaattattgaaaattttattaatgtatgtggagttgaaaggaattggaatgctgatgacattctaaagaacattcataatcaagctaaaactgaggttggtgaaggtaaagtgcttttagctctaagtggaggcgttgattcaactgtactggcatctgttttacataaaactctggaagatagattagtttgtgtgatggttgatcatggtttgcttcgtaaggatgaggctaacaatgttgtgactaacttaaaagaaaaaattggacttgaagttaaccttgttaatgctcaagaaacctttttagaaaaattaaaaggtataaaagaccctgaagaaaaaagaaaaattattggtaatactttcatagaagtatttgaagcggaagcaaaaaaaattcagggcatagaatggttagcgcaaggaacaatttaccctgatgtgattgaatcagcaggcaattcaaaatcaaaagctaaagtcattaaatctcatcataatgttggtgggttaccagaaagaatgaatctaaaacttttagaaccatttcgtatgctttttaaagatgaggttagaaagataggaaaagccattaatctacctgatgagattattggtaggcatccttttccaggaccaggcttagggataagaataataggagaggttacaaaagagcgattagataaacttagagaagccgatcatattttcctctctgaaatgaagaaacataatctctacaatcaggctagccaa

SEQ ID NO: 317365 - DNA, 331 bp, Unknown
  Bacterial polypeptide expressing nucleotide sequence isolated from the Sargasso Sea
gatgagtcttaaatatggtctgtccaaaattttaatagttgattttggatctcaatttacgcagcttatagcaagaagaattagagagctaggtgtatattcagaaatcataagtcataaaaaattaaaatctaaaatagataaaaaatcaattaagggaattattttatctgggggacctttaaatgtttaccaatcaaaaaaagttaaattcaataatgtaattcttaaatggggcataccaattcttggaatttgttttgggcatcaggtaatatcaaagcaacttggtggaagggttaacaagcaaaaagcagagaatttggattag

SEQ ID NO: 317366 - DNA, 589 bp, Unknown
  Bacterial polypeptide expressing nucleotide sequence isolated from the Sargasso Sea
tatttggcacaaggaacactctaccccgacattatagaaagtaagtcagtaactggaagtggaacttcaaaaattaaatctcatcataatgtaggtggtctaccaaaaagaatgaaacttaagttggtagagccattaagagatttatttaaagatgaagtaagaagtctaggagcatcgctgggtttagataaaaaaattcttaacagacatccatttcctggtcctggtttagctataagaatagtaggaaaaattacaccagaaaaaataaaaatattaagagaggcagacaatatttttatgtacgaactaaaaaaatataatttgtattcgaaaatatggcaagcctatgctgctttactaccaataaaaaccgtaggagtgatgggcgacacaagaacttatgagtacacttgtcttcttagagctgtaacatcgaaagacggaatgacagcagatcatttttcctttccaaagaattttttagacaacatctctaataaaattataaataatgttattggaataaatagagtagtctatgatataacctctaaaccacctggtactattgagttggaataaa

SEQ ID NO: 317367 - DNA, 756 bp, Unknown
  Bacterial polypeptide expressing nucleotide sequence isolated from the Sargasso Sea
tatgatttatattgtagacttcggctctcaggtaactcaattaatcgcaagaagggttcgagaagcaagcgtttattgtgaaattgtaagtaataagaacctgtttcataaaattaaggatacgaagccaactggaattatattttcaggaggacctgcaagtgttcataagtcgcgtacaccaaaaattgataagaaaatcttttcgctcaatattccaattctaggaatttgctacggaatgcaacttatagttcatcaacttggaggtagggttgaaatatcaaaggaacgcgaatttggcaaaacattaattacgcacactcataaaagtaagctctttcaaaacattaagttaaaaaataagcaacattatgtatggatgagtcatggtgacaaggcaattaaattgcctaatgattttacaaccatagcgaaaagtaaaaactccaaatttgtgggcatagaaaataaaaaactaaatatttacggtcttcaatttcatcctgaagttgttcacacggatcaaggtgaaaagataatcaagaacttcataatcaatatatgcaaaactaaacctacatggagcatgcaaaactatcttaaaactcaagttgccaaaataaagattaaggttaaaaaaaaccatgtcatttgcggtttatctggaggagttgacagtatggtgacagcagcaataatttcaagagcaattaacaaacaattaacatgtatctatgtcgataccggcttaat

SEQ ID NO: 317368 - DNA, 847 bp, Unknown
  Bacterial polypeptide expressing nucleotide sequence isolated from the Sargasso Sea
tttttactaaataaaattatcaaacaaaatttaatttgtgtttatatcgatactggatttatgagaatgggcgagactcaagagatttgtaacatttttaaaaagagatttaaaaataacttttattatttaaataaaaaaaaaatatttattaatgctttaaaaggtgtaatagatcctgaaaaaaaacgaaaaataattggcgaaacatttattaaaattttcgaaaaattcactaaagaaaaaaaaaatatcaggtttcttgctcaaggaactctctatcccgatttaatagagagtcaaagttattcaggtagcaaaacttcaattattaaatctcatcataatgtaggtggattgcccaaaaaaatgaaactaaaactagtagagccatttaaagaaatgtttaaagatgaagtcaggattttaggtaaacaactcggtatagatagaaaaattctgttaagacacccatttcctggacctggtttagcaataagaattcctggtgaaattaatgaaaaaaaaattaaaatattacaatatgctgactctattttaattaaagaattaaaaaagagaaatatttatgataaaatttggcaagcatttacagttttaatacctataaaaacagtaggcgtgatgggtgatgagaggacttatgactatatttgcggcataagagcagttacctctgttgatggtatgacagcggattattataaatttaatcacaaagatttgtcagaaatatcaacaaaaatagttaacgaaacaaatggtattaatagagttgtatatgatgttacttctaaaccaccagggacaatagaatgggaataaa

SEQ ID NO: 317369 - DNA, 832 bp, Unknown
  Bacterial polypeptide expressing nucleotide sequence isolated from the Sargasso Sea
aatggaaaaaataattgttttagattttggttcccagtatagtcatttaatctgtaggagaataagagaattttcggtatatgcagaattagttccgtatgatatatctcctgaagaattaaagaagatgaatccaaaagggattattttttcaggtggtccatcaagtgtctataatgatgatgcaccaaaaccagatgaagaattattcaactttgacttgccactattaggaatttgttatggtcatcaattaattgtaaataagtttggaggtaaagtcaaaagagcaaacaaagaatatggttcatcgctactatccatggacaagaattcagcacttttagatggaattggagaatctatacgtgcatggatgagtcatggggatgaagcagaagagattccaactaattttgaagttattggacatacagaaaattcacatgcagctgcaatagcaaatacagatagaacggtttttggaattcaatttcatccagaagtagtacatactgagcgtggtacagatattttgaaaaattttgttctgaatgtttgtaaggcaaaacaagaatggactatggaaggatttgtagataaaacagttaaagagatatcagaaattgatggaaatgttctgtgtggagtgagtggaggtattgattctacagttgcagcactattaattcacaaagcaataggtaatagactaacaggagtgtttgtagataatggtttgttgagattgaacgaatctgaggagattgaggacatgttcaagaataattttgaattaaattttcatagaatagatgcaagtgaacagttc

SEQ ID NO: 317370 - DNA, 760 bp, Unknown
  Bacterial polypeptide expressing nucleotide sequence isolated from the Sargasso Sea
atgcagacgcagatgctggtcgatgaggccatcggggagctgaaatcccggatcgacgatacggccatcattgcctgctccggggggatagacagcacagtggcagccgtgcttgcccacaaggcggtaggaagcctcctccactgcgtctacgtcgataccggcctgatgaggaaggacgaaacgtcggaggtatccgagatgttctccgaaatgggcataaaactccaggtcgtagacgcgtccgccagattcttcgagagcctctccggagtaacagatcccgaggagaagcgcaagataatcggagagcagttcatcagggtgttcgaggaggagcagggatcctgcgccgccaagtacctagttcagggaaccatcgccccagactggatcgagtcgggcggaggggatagggacgttatcaagtcgcaccacaacgtaggagggcttcccgaggacgtcgatatgacaatcgtagagccactaagggagttctacaaggacgaggtcagggagattgcgaggtccctcgggatagaatccagcgagaggcaaccattccccggtccgggtcttgcagtcagagtactcggggaagtcacaccagaacgtgtagatgcatgcagggaagcatgccacatagtggagagtcgcatcagagagtcagcatccaggggggaatgcgatttgccgtggcagtacttcgcgacactgctgccggtcaggagcgtaggagtccatggggacgtaagggtcc

SEQ ID NO: 317371 - DNA, 492 bp, Unknown
  Bacterial polypeptide expressing nucleotide sequence isolated from the Sargasso Sea
ggcttcctgaaagaatgaatatggagttagttgagcctttaagagagctttttaaagatgaggttagagagcttggtaaagaattagggattccagatcactttattgagagacatccttttccaggtcctggtcttgcaattcgtttgccaggtgagatttctcctgaaaaggctgatattttaaggaaagctgatacaatttatattgaagagattagaaaagcaggactttataatgagatttggcaagcttttgccatacttttgcccgttcagacggttggtgtaatgggagatgaaagaacatatgattttgtctgtgctttaagagctgtgacttcacttgacggtatgacagctgattactatccatttgagcaagaatttttagctaatgtaagtactcgtattattaatgaggttaaaggaattaatagagtagtttatgatataacttccaaaccaccaggaactattgagtgggaataaa

SEQ ID NO: 317372 - DNA, 703 bp, Unknown
  Bacterial polypeptide expressing nucleotide sequence isolated from the Sargasso Sea
tacttttttaactagattgattggaataagtgattctgaagaaaaaagaaaaattattggttcttcttttatcgatatttttgaagaagaagcaaacaaaattggcggagctgattttttagcccaaggaactctttatccggatgttattgagagcgtttcttttacgggcggaccatctgtgacaattaaaagccatcacaatgtaggagggcttccagaacgaatgaatatggagctagttgagcctttgcgagaactttttaaagatgaggtcagagaactcggaaaagaactaggaattcccagtcactttattgagagacacccattcccaggtcctggacttgcaattcgtttacctggtgaaatttcttctgaaaaagccgatattttaaggaaagctgacactatttatattgaagagataagaaaagccggactttataatgagatttggcaagcttttgctgtacttttacctgttcagacggttggtgtgatgggagacgagagaacatatgattttgtttgtgctttaagggctgtgacttcgcttgatggtatgacagcggattattatccttttgaacaagagttcttagctaatgtaagtactcgtattattaatgaagtaaaaggaattaatagagtggtttatgatataacatcaaaaccacccggcactattgagtgggaataa

SEQ ID NO: 317373 - DNA, 942 bp, Unknown
  Bacterial polypeptide expressing nucleotide sequence isolated from the Sargasso Sea
aatggaagcctacagagagatagcaattaagaaaattagagaagaagtaggttctaaaagagttatttgtgggttatcgggaggagtagatagctcagtggctgctattctcattcatgaggctatcggagatcaacttacctgtgtatttgtggatcacggtttactccgacaaggagaggccgaagaagtcgtaacaatgtttagagaaaattataatattcctcttatacatgcagatgaatcagaactgtttctagataatttagaagggcaatctgacccagaaactaaacgtaaaataattgggcggttattcattgatgtattccaaaagtatgcaaatggaattgaaaatgctgaatttttagcacaggggaccctgtatccagacgtgatagaaagtgtatcatttaaaggcggtccttccgttacaatcaaatcgcatcacaatgtgggcggtttgcccaagaaaatgggtttgaaattagtcgaacctttgaaagaattatttaaagatgaagtccgagcgttagggcgagagttaaaattacccacgaatttcattaatcgacacccttttcccggcccaggtttagcaattagatgtccaggcaagataacaaggcataaacttgaaattttgcgtaaagctgatgcagtttacattgatcaaattcacaaatacgggctctataatgagatctggcaggcatttatagcaatattgccagttcggaccgtaggagtgatgggagatagccgaacttacgattatgcctgcacactgagagcagtaacctcggtagatggaatgaccgcggattattatccttttagtcacgaattcttaagcgatacagcaacccggatcataaatgaagttgaaggcataaatagagttacctatgacataacatctaaacccacaggcacaataga

SEQ ID NO: 317374 - DNA, 337 bp, Unknown
  Bacterial polypeptide expressing nucleotide sequence isolated from the Sargasso Sea
atgagtagtcatattgaaatagcttctaagttcagtgaagataatattttaataattgattttggcagccaatatacacaattaattgctagacgcgttagagaggaaggagttttttgtcaaataattccttataataaggtaagtaagtatataattaataataatccaaaaggaataattttatctggtggaccttcatctgttttaggcattgaaacacctaggatatcaaaagaaattatagatatgggcaagcctattttaggtatatgctatggacaacaagtattagttcaacaacttggaggtaccgtagtatcgtctgaaaaaagtg

SEQ ID NO: 317375 - DNA, 568 bp, Unknown
  Bacterial polypeptide expressing nucleotide sequence isolated from the Sargasso Sea
tatgctgaaaattgatcaagataagatagttatccttgattttggttcgcaatatacacagctgattgccagaaggataagagaaataggagttttatctgaaatcgtctcgtgtgaaatatccccaaaagaacttctaaaactaaatccaaaaggcattattttctctggcggcccagaatcggtaaattccaagtttaaacctaaatttaatcccaagattcttgaaataaaccaacctattttagggatttgctatggaatgcaattattagcgaaccaatataaaggaaaagtagatttatcggcgaaaagagaattcggtcactcaaaattagcatttaacaaaaatattcttttcaaaggagtaactgggaaaaaaacaaaaatggatgtatggatgagtcacggcgataaagttgtaaagctgccgaaacaattcaaaaggattgcctcgtcgacaaattctaaaattgcagctttcgcatcgaatgacaaacaacggctttggcgtgcaatttcatctcgaggtctctcacaccgatcaaggacaaaaaatattaagtaa

SEQ ID NO: 317376 - DNA, 805 bp, Unknown
  Bacterial polypeptide expressing nucleotide sequence isolated from the Sargasso Sea
ttgaagaattttgttttgaatgtttgtaaggctaaacaagaatggacaatggagggttttgtcgaaaagacagtaaaagacatttcacagattgacggaaatgtattgtgtggcgtgagtggaggtatagactcaacagtagcagcattactaatacacaaagcaataggaaatagactaacaggagtttttgtagataatggattattgagattggatgaatcaaaagaaattgaagatatgttcaaaaataatttttcattaaatttccatagaatagatgcaagtgaacaatttctttcaaaattaaaaggaataacagatccggaacagaaaagaaaaattgttggtgaagagtttattcaggtatttacggattttgcaaaacaaaagggtccattcaaatggttagcacaaggtacactttatccagatgtaattgaaagtggagtatcaaaaggtcctgcagctgtaataaaatctcatcacaatgtaggaggattaccagaatggttgaacctcaagatcttagagccattaagagaattgtacaaagatgaggtaagagatgttgctagaattttgggcgttccagaaaaactgctaaagagacatccatttccaggaccaggactatctgtacgaattatgggagagattactccttcgaaattagcaatctgtagaaaagcaagtaaaattgttgaagaggaattatgggatgcaggagtttatgatcaagtatggcaagcatatgcagctgtgggagacgataaagctgtaggagtggtaggagatgaacgaa

SEQ ID NO: 317377 - DNA, 382 bp, Unknown
  Bacterial polypeptide expressing nucleotide sequence isolated from the Sargasso Sea
attggtattagattttggttcccaatacactcaactaatagcgcgaagagtaagggaaagcaatgtatattccgaaatttttccatgggacataaatgaaaaaaaaatattagatttgaacccaaagggagttattctttctggtggaccaaactcagtaactgattcatttacaccaagaatacctcaatgtatttttgaattaaatgttccgattttagggatttgttatggtatgcagactttagctgaacaaatgggaggtcaggtagtgtctgcagataaaaaggaatttggtcatacaaacttagaaattgaaaatgaatcaattctctttaagggcattgataaaaaaataaatgtttggatgagtcatggcgat

SEQ ID NO: 317378 - DNA, 910 bp, Unknown
  Bacterial polypeptide expressing nucleotide sequence isolated from the Sargasso Sea
cgtcaaagacctatattcacgcttcaattccatcctgaggtaactgatacttcacatggcagaattatgctgaaaaattttgttaaagtctgtggcataatctcaagatggtcaatggaaaattttttggaggacattactaaaagtttaaataatgaagttgggagaaaaaaagtgctaatgtttcttagtggaggagtagattcttcagttgcctttgctttattaaacaaggtacttggacaggataatttgctaggattgtatgttaataatggttttatgcgtaaacatgaaagtgaggtaatacttaaaacatatttacagctaggatataagaatattcaatcccgaaattacagttctttttttttagacgctatcaaaactcagtttgaaccgcaaattaaaagaaaaattattggagcaacttttataaagatgcgtgacaggtttttgaatgaactaaacctaaatcccgaggattggatgctaggtcagggcactctctatcctgatattattgaatccggaggcaccaaacattctgaagttataaaatttcaccataatcgtgttcaagaagtattagtactagatacattaggacatgtaattgaaccactcaaaaatttatacaaagatgaggttagaaaattaggaactttgttaggacttcctgaatcgattgtatggagacatcctttccctgggccaggtctatcaataaatgttttgtgttctaatggaaatgactccttccctgaaacagatataactttaaaaaaattacaaaattgcttaaaagattgtgaatgtgatcacgagattcttcctgtacgatcagtaggagtacaaggagatcaaaggacatacgcttctccagttgcacttttaaatcaccctcgaa

SEQ ID NO: 317379 - DNA, 736 bp, Unknown
  Bacterial polypeptide expressing nucleotide sequence isolated from the Sargasso Sea
tttctaattattgactttggatcgcaggtaacgcaattgattgcacgccgtttgagggaagcgggagtcttcaccgaaattctgccctgcacggctgattcagaaaaaatcaaagctgtaagcccgaatggtatcattctgtcgggtgggccaaattcagtggcgcttgctaatacgccgcgtgcaccagaaattgtattcgatttggaggtgccagttcttggcatttgttatggccagcaaacaatgtgtgttcagcttggcgggcgggttgaaccaggcaccagccgtgaatttggccgggccttgctgaatattaccgcacctagtccgctgtttgaggggttttggcaggttggagagcagcatgctgtctggatgagccatggggatcatgttgcgagtttgcccgatgggttttccgttgtagcaacctcatctggagccccttttgccgcggttgctgatgaaagtcgtcattattacggggtgcagtttcatcccgaagttgtgcatacgcagaatggtacagatcttctgaagcgctttgctctcaatatttgtggctgtaccagcagttggtcaatggcgacctatcggcgcagggccattgaggcaattcagaaacaggttggagatgagcgggtgatttgcggcctgtctggcggtgtggactcatcggtggcggcggtgttgattcatcaagcaatcggtgatcaattaacctgtgtgtttg

SEQ ID NO: 317380 - DNA, 673 bp, Unknown
  Bacterial polypeptide expressing nucleotide sequence isolated from the Sargasso Sea
atgcaagaaaaggtattaattcttgattttggctctcagtatacacaattaatagccagacgagttagagaattaaatatttattgtgaaatttttccttttgatagtaaaaaatatcttttcaatcaatataaggctgttatactttcaggatctccatactcagttagagctgataattctttaaagcttgatttgagttccgtgaagggtaaaataccattgcttggtatttgttatggagctcaattacttgcaaataattatttaggagaagtaaaagcttcaaataaaagggaatatggtagagctaatttaacttcaatcatacaaagtgaattattagatggagtgataaatggttctcaagtttggatgagtcatgcagatactatttttaagttaccaaccaattcaaaaagaatagcaagtactgctgatgtagaaaatgctgcatttaaattcaataatgaaaacacctacggtattcaatttcacccggaggtttatcattcaattgatggaaaaaagattttatataattttttaattaatatttctaaaataaagcaatgttggactgctagttcatttgttgaaagtactattggagaattgagatctaaaatcaaggatgagaaagtgatcttaggtttatcaggtggagttgatt

SEQ ID NO: 317381 - DNA, 896 bp, Unknown
  Bacterial polypeptide expressing nucleotide sequence isolated from the Sargasso Sea
agattttaattctatcagaggtatcatactttctggtggaccatcaacagtgactaaagaaaagtttgaaagagtaccaatagaaattttttcaaaaaaaataccgatacttggtatatgttatggcttacaattgattgcaaaattatacggtggtaaaattaagtcctcgaaaagaaaaagagaatttggaagggcatttatatttaaaaaaaggcattcagaattaacaaaaaatttttttaaggggaaaggctcagtctggatgagtcatgaggatgcggtagtaaaattaccaagaaattttaaagttattgcttataccaaagactctagattgacaattattgagaataaaaaaaaaaatatctatggagttcagtttcatcctgaaatcactcatacagataatggaaaacaaatatttaaaaattttttattttcaatctgtaaaattaaaaaaagatggagtgtagtatctcaaaaaaataaactaattgatgatgttaaaaatatcgttcaaaaagataaggttctttgcgcattatcaggtggagtggatagtagtgtagtagcgcttttaataaataaggcaattaaaaaaaacttgatttgtattatggttgacacaggtttaatgcgtaaaaatgagtttaaatataattacaaaatctttaggaaaaaatataaacttaacgtaaagttaattaatgcttctaaaatctttcttaaaaaattaaaaaatgttactaatccagaaaaaaagaggaaaattattggtaatttatttattaagatatttgaaaaagagtcaaaaaaatttcaaaacataaaatatcttgctcaagggacactttatcctgatgtaattgaaagtaagtcttcaactggggagc

SEQ ID NO: 317382 - DNA, 942 bp, Unknown
  Bacterial polypeptide expressing nucleotide sequence isolated from the Sargasso Sea
caatatactcaattaattgctagaaaaataagagaacaaagtgtttattgtgttgttcatccttatataaaaatcagatcaattgatttaaattctaataatttatctggaataatattatctggtggacctaattctgttaaagatagacagtctccaaagcttgataaaaaaattttaaaattaaatatacccattttaggtatttgttatggtttacaattactttgcaacgcattcaatggaagcataggtaaatcaatttcaagagaatatggacattcttcaattttattaaaaaacagttcagaattgttttatggaataaaaaatggaaatcaagtatggatgtcacatggtgatcatattgaaaaaaaaccaaataaattcaaagtaacatctgtttcaacaaataaaattatatcatcaattgaaaatcaaaataaaaaaatttatgggttacaatttcatccagaagtttatcatacagaaaatggtcaaaaaatattatttaattttttacataaaatatgtaaaattaataaaaaatttagattggaaaactatctttcaaatcaaattaaaattttaaaaaaacaattgaaaaataagaaagttatttgtggtttgtcaggcggtgttgattctacagtaacatcatatttgcttcataaggcaattggaaaaaatttattttgtattttcgtagataatggacttctaagattaaatgaatcagaaaatatagagaatatttataaaaaaaaatttggtattaattttattaaagtagattcttcaaagattttcctcaaaagattaaaaaaaattactaaccctgaaatgaaaagaaaaattattggaaaaacatttattgaagtttttgataaagaagcaaaaagaattaaagatgtaaattatttagcccaaggaactctatat

SEQ ID NO: 317383 - DNA, 772 bp, Unknown
  Bacterial polypeptide expressing nucleotide sequence isolated from the Sargasso Sea
gaatccaaagaaattgaagatatgttcaaaaataatttttcattgaatttccatagaatagatgcaagtgaacaatttctttcaaaattaaaaggaataacagatccagaacaaaaaaggaaaattgttggagaagaatttattcaagtattcactgaatttgcaaaacaaaagggaccattcaaatggttagcacaaggtacgctttatccagatgtaattgaaagtggagtatcaaaaggtcctgcagctgtaattaaatctcatcacaatgtaggaggattaccagaatggttgaatctcaaaatcttagaaccattaagagagttgtataaagatgaagtaagagatgttgctagaattttaggggttccagaaaaactactaaagcgacatccatttcctggaccgggattatcggtacggattatgggagaaattactccttcaaaattagcaatttgtagaaaagcaagtaaaattgttgaagaagaattatgggatgcaggagtttatgataaggtatggcaggcatatgcagcagtaggagatgataaggcagtaggggttgtaggagatgaacgaaagtatggaagaattgttacagtcagggttgtagactcgattgatgcaatgactgcggactggactagacttccaaatggcgttttagaaaaaatcagtaatagaattactaatgaaattgatgaagttacatgggtttcttatgtaatttcaagtaaaccacctgctaccattgagcctcaataga

SEQ ID NO: 317384 - DNA, 691 bp, Unknown
  Bacterial polypeptide expressing nucleotide sequence isolated from the Sargasso Sea
atggaaaataaaaagtctaatctaattttaataatagattttggatcacaatatactcaattaattgctagaagggtgagagaatctggcgtatacagtattgtgaaatctaacacaattagtaaaaaagatttcagccaacttaatccaaaaggaattattttaagcggtggaccaaattcagtcgtcaataaaagtaaatataaattaccaagttttgtttttagttcaggtattccaatactaggaatttgttatggtatgcaattagttgctgattattttggaggtatagttaccccttcatcgaaaaaagaatttggacatgctacatttaagataaataatccaacaatactatttgagaatattaaagataatgatgaatttaacgtttggatgagtcattcagataaggtgactaaaaatccacctggatttaagaaaattggtagtagtaataatactaaaaatgcagctatatataatcttaaaaaaaatatctattgtttacagttccaccctgaagttacgcataccaaaaatggtcaaataattatcaataactttgtttataaagtatgtggctgtataaaaacatggactacaaaaaatatcatcaaagatataactaaaaaattacaagatcaggtaggaaagaaaaatattatattagcattgtcaggtggcg

SEQ ID NO: 317385 - DNA, 742 bp, Unknown
  Bacterial polypeptide expressing nucleotide sequence isolated from the Sargasso Sea
caagcaatcggaaaaaatttaatttgtgtttttgttgataatggattgctaagaaaaaatgaagctgaggatgtagaaaatttattcaaagataagatgaatttaaatttattagtcgttgatgcaaaaaaagttttttatagacatctaaaaggtatctcagatccagaacagaaaagaaaaattattggcagaacttttattgatatttttgataatgaggcagctaaattaaaagataatattaattttctagcacagggcactatttaccctgatgtgattgaatcttctgaatcagaatctaaagaagctagggtgattaaatctcatcacaatgttggtggtcttcctaatgatatgaagatgaaattactggagcccttgcgtgatttattcaaggatgaggtcagggaaataggatccgaactaggtcttccattagagatgttaaatcggcatccatttccaggtcctggattaggggtaagaattcttggggaaatttctcaagaaaaagtttcaatccttcaaaatgctgatgccatatttatagaggaattaattaaagcaggcttatatgatcaagtaagccaagcattttgtgcatttcttccaattaaatcagttggagttgttggtgatgagaggagatattcgtatgtgatagcaattagagcagttgagacagtagatttcatgactgctacttgggcaaggcttccatatgatttcttggcgc

SEQ ID NO: 317386 - DNA, 685 bp, Unknown
  Bacterial polypeptide expressing nucleotide sequence isolated from the Sargasso Sea
gaaaaatatctcagagcctgaaaaaaaaagaaaaataattggaaatttattcattaagatatttgaaaatgaatctaaaaagtataaggggataaaattcttagctcaaggtactttgtacccagatattattgaaagtaggtcagcaactggaagtcaatcctcaaagataaaatctcaccataatgtcggtggattaccaaaaaaaatgaagttgaaactgattgagcctttaaaagatttttttaaagatgaggtaagaatactcggcaagtcactaggattaattgataaaatttatgataaacatccttttcctggccctggtttggctataagaattattggtcaaattactccttacaagattaaaattttacaagaagcagactatattttcattaatgaacttataaaacataacctgtatcacaaaatctggcaagcatatgcaggtttacttccaatgaaaactgttggagtcatgggcgactctagaacttatgaatatacttgtttattacgagctgtcgtttcagaagatgggatgacagctgattattttaattttccgaaggattttttggataatatatcaaataaaattgttaatggagtaccgggtataaatagggtagtatatgatataacatcgaagccacccagcacaatagagcttgaataa

SEQ ID NO: 317387 - DNA, 263 bp, Unknown
  Bacterial polypeptide expressing nucleotide sequence isolated from the Sargasso Sea
aatgcaagacagaattctcatacttgattttggttcacaatatacccagctgattgcaagaagagttcgggaggcgggtgtttatagtgaaatctatataggcgatgttgatttcaacgccattgagtcatttcaaccatctggattgatactctcaggcggacccgaatctgcattcaatgatgatgcaccacgaccatctcaagaaatttactcgatgggtcttcccatactaggcatttgctatgggatgcaagtgatga

SEQ ID NO: 317388 - DNA, 748 bp, Unknown
  Bacterial polypeptide expressing nucleotide sequence isolated from the Sargasso Sea
aaaaatgaaatggatctaaatctttttaaagttgatgcacaaaagatatttttaagacatttgaagggcatagaagacccagaacagaaaagaaaaattatcggtagaactttcatcgatgtttttgatgctgaggctgctaagcttgagaacatagattttttagctcaaggaacaatttatccagatgtaatagagtcttcagaatctgaatcaaaggaagccagagttattaagtctcatcacaatgttggaggcttgcctgaggagatgaagctcaagcttgttgaacctttgagagatctatttaaagatgaagtcaggagattgggttcccaacttgatttgcctgagataattttaaacagacatccatttccaggccctggtttaggcgtgaggattcttggagaagtaaatgaaaagaagataaagattcttcaagaagcggattccatttttatagaagagcttaggaaagctgatttgtatgactcagttagccaagcattcgcagtatttttaccaattaaatctgttggagtggttggtgatgagagaagatactccgaagtgattgctttaagggctgtagagacagttgatttcatgacggcaaactgggcttatcttccccacgaatttttagataaagtttcaagacggatcgtaaacgaaatagaggatgtaagtagggtcgtttatgatatttctggaaaaccaccagcaactattgagtgggagtaga

SEQ ID NO: 317389 - DNA, 904 bp, Unknown
  Bacterial polypeptide expressing nucleotide sequence isolated from the Sargasso Sea
aaaggaatgagttcgaattatgtctggatgagccatggtgataaggttattagtctaccaaatgattttagaagcattgcatcaagttcaaatactaagtatgcagcagttgaaaataaaaaaaaatcttattacggcctacagtttcatccagaagtagtccatacacccaatggtcataagataatcgaaaattttatattcaaaatttgtaaggttaaaagaaactggagtatgaaaaatcatttaagaaatcagattactgagattaagtattcagttcataagaatcaggtaatttgtggattatcgggtggagtggatagtactgttactgcagcaataatttcaaaagctataaataagcaattaacatgtatttatgttgatactggtttaatgagactggatgaaacaaaagaggtggtaaaaatgtttaaaaaacattttaaatctcgcttaattgtcaaagactcaagaaagacatttataaaagccctaaagggcgttaaagatccagaaaaaaagagaaaaataataggtaatctttttattaaaatatttaaccaagaggcaagtaaaataaaacatgcaaaatatttagctcaaggtacgatttatcctgatgttatagagagtcagagctttcatggtggtccgacatcagtcattaaatctcatcataatgttggaggactgccaaaaagaatgaaacttaaacttatcgagcccttaagagagctttttaaagatgaagtaagaaaattgggattagaaatgagattaccaaaaaaatttattaatagacatccatttccaggtcctggattgggaataagaataattggtgaggtaacagcagagagagtgaaagttttgcaagcagcggataatatatatattg

SEQ ID NO: 317390 - DNA, 859 bp, Unknown
  Bacterial polypeptide expressing nucleotide sequence isolated from the Sargasso Sea
atatgcaaattgttgcggaggtaaaatatcaaagtcagaaaagagagaatttggaaaaacaataatccggagaaataccagaaatcaatctccactgctaaagggtttattcaagaaaaaaatagaagaagtttggatgagtcatggagatgcagtaaccgaattaccaaaaggatttgtagagctagcaagttcggatacttcttcatattcaattattggagatcccactaagagggtttttggtgttcagtttcatcccgaagtgtttcatactataaacggaaaaaagtttttagaaaactttgtaaatattgcaaatattaaaagaaactggacaccggttaagatcacggaaagcttaattgagaaactaaaaaacgagataggagatgaaaaggtaatttgtggcctatccggtggtgtagacagcacagttacagctcttctattgcatagggcaatcaaaaaaaatctaacctgtatttttgtcgataatggtcttcttcgaaagaaagaagctgaccagatagagtatcttttcaaaaaacacttcaaaataaaattaatatcagtaaacgcaaaacaattgtttttgcaaaacctaaaaggagtcggtgatcctgaaaagaagagaaggataataggcaagttatttataaaaatttttgaaaaagaagcaaaaaagcagaaaaatgttagttttttggctcaaggcactctttatccagatgttatcgagtccacttccgtacatggtaaagcttctgcaactattaagagtcatcacaacgttggtgggttgccaaagaaaatgaaactcaagttagtagagcctttaaggacactttttaaagat

SEQ ID NO: 317391 - DNA, 772 bp, Unknown
  Bacterial polypeptide expressing nucleotide sequence isolated from the Sargasso Sea
gaagttcaggttgttcaaacttttaaaaaaaggttaaaaatgaatttaatctatgtgaatgctgaaaatgaatttttaagtaaattaaaaaatgtatctgatccagagagaaaaagaaaaattataggaaatctattcattaaaatatttgagaggtatgcaaagaaaataaaacatgtaaaatttttagcacaaggaactttgtatccagatttaattgaaagtaagtctgttactggaagccaaacctctaaaataaaatctcatcacaacgttggtggtttacctaaaaaaatgaatttgaaattagttgagcctttaaaatttttatttaaagatgaggtaagaaaattaggtttagagttaaatttaagtcatgaaataatttcaagacatccatttcctggcccaggtctggcaatcagaatgcctggcattattaccaatgaaaagataaaaatattaaaggaagctgatcattattttattcaagctctgagagatcatggactttaccataaaatttggcaagcttacgcagcattacttccggttaaaacagtaggagttatgggagataacagaacatatgaatatttatgtttactaagagcaattacttctgaagatggaatgaccgcagatttttatgaatttaaaaaatcatttatgcaaactatttctaacaaaattgttaatagcataagaggaattaatagagttgtgtatgatattacttctaagcctccaagcactattgaattagagtaat

SEQ ID NO: 317392 - DNA, 325 bp, Unknown
  Bacterial polypeptide expressing nucleotide sequence isolated from the Sargasso Sea
agatactgcgatattctgcgccgcgccgatgccatcttcattgaagagctgcacaaagccgagttataccataaagtcagtcaggcgtttgccgtgttcctgccggtgaaatcagtaggggttatgggtgatgcccgtaagtacgactgggtagtatcactgcgtgcagtagaaactatcgactttatgaccgcgcactgggcacacctgccgtatgatttactgggcaaggtatctaaccgcattatcaatgaaatcaatggtatttcccgtgtggtgtacgacatcagcggtaaaccaccagccaccattgagtgggaataaa

SEQ ID NO: 317393 - DNA, 500 bp, Unknown
  Bacterial polypeptide expressing nucleotide sequence isolated from the Sargasso Sea
tgtgggagggttgccgaaaaaaatgaattttaaactaatcgagccattaaaggagcttttcaaagatgaagtgagagttttaggaaaatcgttaggtctctcaaaagatatatctaataggcatccttttcctggacctggtcttgctataagaataataggaaatataactcaagaaaaaatcaaaatacttcaagaagcagaccaaatttatataaaagagttaaataaaaacaaactttatgacaaaatttggcaagcttatgcagccctccttcctattaaaactgttggagtcatgggagactcaagaacttatgagtatacttgtttgataagagccgtaacttcggaagatggaatgacagctgactatttcaactttccaaaggagtttttagataagatttccaataaaattgtaaataatgttaaaggaattaatagagtagtatatgatataagttctaaaccaccgagtactattgaattagaataga

SEQ ID NO: 317394 - DNA, 403 bp, Unknown
  Bacterial polypeptide expressing nucleotide sequence isolated from the Sargasso Sea
atgaaaaaggttcttgttgtagactatggatcgcaatacacccaattaattgctcgccggctaagagaattaaatatatattctgaagtaactccttgggatgaaatatccaatgatgatgaggttgctggatttattcttagtggcgggccagaaacatcaaatatcaaaggcaatccaactattaaccaattaattttcgattcaaaaaaaccaattttaggcatttgttatggcatgcaagtgttggcgcatcaggaaggagggaagataattaatgatggtaaaaaagaatttggtaatgcaaaattaaccataaaagattggttctcattgtttaacaatcttcctaatcagatagatgtctggatgtcacatggcgataaagtagtagctcttcctg

SEQ ID NO: 317395 - DNA, 704 bp, Unknown
  Bacterial polypeptide expressing nucleotide sequence isolated from the Sargasso Sea
ggaattcattaaaagattaaccaatgtttctgatccagaaaaaaagaggaagataattggaaatttatttattgaaatttttgaaagatatgcaaaaaaaattaaaaatgttaaattcttagcacaaggaacactttatccagatttaatagaaagtaaatctgttactggtagtcaaacttcaaaaattaaatctcatcataacgttggtggtttacctaaaaaaatgaaatttaaacttgtagagccattaaaatttttatttaaggatgaagttagaaaattaggattagagttaaatttaagtaaagagatcatttcacgacatccttttccaggtcctggtttagctattagaatgccaggtataattacaaaagaaaaaataaatattcttaaagatgcagatcactattttatccaagctttgaaaaagaataatctttatcataaaatttggcaagcttatgctgctttgcttcctataaaaactgttggagtcatgggtgataatcgaacatacgaatatatatgtttgctgagagctataacttctgaagacgggatgacagctgacttttttgaatttaaaaaatcatttttacaaatgatttcaaataaaattgtgaatagcattagggggattaatagagtagtttatgatgttacatcaaaacctcctagtactattgaactagaataaa

SEQ ID NO: 317396 - DNA, 304 bp, Unknown
  Bacterial polypeptide expressing nucleotide sequence isolated from the Sargasso Sea
attagctgatgacatttttattagtgagttggttaaaggtggttactacgagagagtaagtcaagcttttgcagtatttttaccggtcaaatccgttggagtagtaggggatgcaaggcgttatgaatatgtcattgctctaagagcagttgaaactatagattttatgactgctaaatcagctaaactccctcatactttcttagaaaaagtttctaatagaatcatcaatgaaattcccgaagtatctcgggtaacttacgatatttctagtaaaccaccagctactattgagtgggaatga

SEQ ID NO: 317397 - DNA, 391 bp, Unknown
  Bacterial polypeptide expressing nucleotide sequence isolated from the Sargasso Sea
cttgttgatcgacatccttttccaggacctggcttgggagtgagaatcttaggagaagttaaaaaagagtacgctgatctattgaggttggccgacgatatttttattgaggaactacataaagaggatctatacgacaaagtaagtcaggcatttgcagtttttctaccagtcaaatctgttggcgtcatgggcgatgggagaaaatatgaatatgtcattgctttaagagcagtggagacaactgattttatgacggcaaattcggctaaattgccttatgaatttttggatcatgtatcaacacgaatcatcaatgaagtctctggtatttcaagagtcacgttagatatatcctcaaaaccaccatcaactattgagtgggaataaa

SEQ ID NO: 317398 - DNA, 748 bp, Unknown
  Bacterial polypeptide expressing nucleotide sequence isolated from the Sargasso Sea
cgccgaccacatgggcgtgcgcgtcctccgcgtcgacgccgaagaccacttcctctcccgcctggccggcgaagccgacccggagaagaagcgcaaaatcatcggcaacaccttcatcgacatcttcgacgccgaagccgccaaactcaaaaacgcccactggctcgcccagggcaccatctacccggacgtgatcgaatccgccgcctccaaaaccggcggcgcgcatgtgatcaaatcccaccacaacgtgggcggcctccccgagcatatgaagctcaagctcgtcgagcccctgcgcgaactgttcaaggacgaagtgcgtaaaatcggcctcgagctcggcctgccctacgacatggtctaccgccaccccttccccggccccggcctgggcgtgcgcatcctcggcgaagtaaagaaagaatacgccgacaccctgcgcctggcggaccacatcttcatccaggaactgcacgccgccggcctctaccacaaaaccagccaggccttcgccgtcttcctgccggtcaaatccgtcggcgtcgtcggcgacgcccgccgctacgaatacgtcgtggcccttcgcgccgtcgaaaccatcgacttcatgaccgcacgctgggcgcacctgccctacgagtttctggagaaggtctccagccggatcattaatgagatcccgggcatcagccgggtgacatatgacatctcgtccaaaccgccggctacgattgagtgggagtga

SEQ ID NO: 317399 - DNA, 916 bp, Unknown
  Bacterial polypeptide expressing nucleotide sequence isolated from the Sargasso Sea
caacttggtgggaaagttaaaatttcgaagaaaagagaatttggtaaaacacttgtaaagccatcaaaaaaaagtgttttattctcaggatttcaaaaaggtatgagcatgaattacgtctggatgagccatggtgataaggttattagtctgccaagagattttaaaagcattgcatcaagttcaaatactaagtttgcagcagttgagaataaaaaaaaatcttattatggtttacaatttcatcctgaagttgtccatacacctaatggtcataagataatcgaaaattttatatttaaaatttgtaaggtaaaaagaaactggagcatgaaaaatcatttaagaaatcagattactgagattaaacattcagttcacaaggatcaggtaatttgtggattgtcaggtggagtggatagtactgttactgcagctataatttcaaaatctataaataagcaattaacatgcatttatgttgatacgggtttaatgagactaaatgaaacaaaggaggtagtaaaaatgtttaaaaaacattttaaatctcgcttaattgtcaaagactcaagaaagacatttattaaagctcttaaaggtgccacagatcctgaaaaaaagagaaaaataataggtaatctttttattaaaatatttaaccaagaggcaaacaaaataaaacgcgctaaatatttagcgcaaggaactatttatcctgatgtaatcgaaagtcagagctttcatggtggtccgacatcagtcataaaatctcatcataatgtcggtgggttaccaaaaagaatgaaacttaaacttgttgagcctctaagagaactttttaaggatgaagttagaaaattagggcttgagatgagacttccaaaaaaatttataacagacacccattccaggc

SEQ ID NO: 317400 - DNA, 835 bp, Unknown
  Bacterial polypeptide expressing nucleotide sequence isolated from the Sargasso Sea
taaggcaataaaaaaaaatctgatttgcataatggttgacacagggttaatgagaaagaatgaatttaatagttcttatgatatttttaaaaaaaaatataaattgaatgtaaaactaattaatgcctcaaaactttttattaaaaaattaaaaggagtaacaaatccagaaaaaaaaagaaaaattattggaaatttatttattaatgtttttgaaaaagaagctaaaaagtataataatataaagtatttagctcaaggaacgctttatccagacattattgaaagtagatcttctactggtagcaaaacatccaaaattaaatctcaccataatgtaggcggtctcccaaaattaatgaaattaaaacttatcgaaccattaaaagaattttttaaagatgaggtaagagttttaggtaaatcattgaatttagtaaatgaaataaactataaacatccctttcctggtcccggactaggtataagaattgtgggagaaataactttagaaaaaataaaaattcttcaagaggcagaccaaatttatattgaagaattaattagagaaaacctttatggtaaaatttggcaagcatacgcagcattacttccaattaaaactgtcggggttatgggagactccaggacatatgagaacatttgtttactcagagctgttacatcgagcgatggcatgacagctgattattataatcttccaaaggcttttttagatagaatatctagtaaaattgtgaataatgttaaaggcatcaacagagttgtatatgatataacttctaaaccaccaagtacaatagaattagagtaa

SEQ ID NO: 317401 - DNA, 743 bp, Unknown
  Bacterial polypeptide expressing nucleotide sequence isolated from the Sargasso Sea
aacaaagttaaaaatgaaaaagtaatatgtgctttatccggtggagttgatagtagtgtagtcgcatttttactaaataaagcaattggaaaaaaattaaaatgcgtttttataaatactggtcttcttagaaaaaatgaagaaaaggaagttgtaaaaacttttagaaaaaaattgaaatctaacctaatttatttaaatgcctctaaaatttttttgaataaacttaaaaacattacagacccagagattaaaagaaaaattattggaaacctttttataaaattatttgaaaaaaaagcaaaaaaaattaaatttcttgctcaaggaacattatatccggatttaattgagagtaggtctgttactggaagccctacctctaaaattaaatctcatcataatgttggagggttacctaaaaaaatgaatttttcattggtagaaccattaaaaactttgtttaaggatgaagtaagaaaattaggaaaagaactttcggttcctataaacatacttcaaagacatcctttccccggaccaggtcttgcaataagaataccgggaaagatttcaaaatataaaataaaaatattacaagaagcagatttcatatttatggatgaattaaaaaaatcaaatctttataataaaatctggcaagcttatgctgctttactgcctttaaaaactgtaggtgttatgggtgatagcagaacttatgaatacacatgcatgttgag

SEQ ID NO: 317402 - DNA, 810 bp, Unknown
  Bacterial polypeptide expressing nucleotide sequence isolated from the Sargasso Sea
aaagataaaaaatttttcaaaaaatagagaatttggtaaagctacagtttttttagataaaagttcaaaaattacacaaaatttttttaatcgaggaaaaaatatagtctggatgagccatcaagatgctgtaattaaattaccaaaaggttttactaaagtagctcattcaaaaaattcctctaatacaataattgaaaatcaaaaaaaaaaaatttatgggatccaatttcatccagaagtaacccatacgaatcgtggaattatattattaaaaaattttgtgattcatatttgtaaatcaaagaaacagtggaaaataaaaaatcagaaaaatttgatcataaaaaaaattaaaaaaatagttggtaaaaataaagttgtctgtgcattatcaggaggggttgatagtgcggttgttgctttacttttaaagagggcaatcaataaaaatttaaaatgtattatggtaaataccggcttattaagaaaaaatgaatttaattacacttataaaatcatgagaaataaatataaaataaatgtaaaagttgtaaatgctgagagcaaatttctttattcgttaaaaaatatatctgatccagaaaaaaagagaaaaataattggtaaactattcattaatatatttgaaaaagaagctaaaaagattaaaaaaataaattttttagcacagggtacgctttacccagatgttatagagagcatatctccatctggagcaaaatcatcaaaaattaaatctcatcataatgtaggtggtttgccaaaaaaaatgaaattaaaattagt

SEQ ID NO: 317403 - DNA, 838 bp, Unknown
  Bacterial polypeptide expressing nucleotide sequence isolated from the Sargasso Sea
cgtgctcgcccacaaggcggtaggcagcctcctccactgcgtctacgtcgataccggcctgatgaggaagggcgaaacgtcggaggtgtccgagatgttctccgaaatgggcataaaactccaggtcgtagacgcatcagacagattcttcgagagcctctctggagtaacagatcctgaagagaagcgcaagataatcggagagcagttcatcagggtgttcgaggaggagaagggaacctgcgctgccaagtatctagttcagggaaccatcgcccccgactggattgagtcaggaggaggggatagggacgtaatcaagtcgcaccacaacgtaggggggctccccgaggacgtcgacatgacaatcgtagagccactaagggagttctacaaagacgaggtcagggagattgcgaggtccctcggtataaaatccagcgagaggcaaccattccccggtccgggtctagccgtcagagtactcggagaagtcactccagaacgtgtagattcatgcagggaagcgtgccacatagtggagagtcgcatcagagagtcagcagccaggggggaatgcgatttgccatggcagtacttcgcgacactgctgccggtcaggagcgtaggagtccatggggacgtaagggtccacggggagactgtcgtcgtcagggcagtggcaagcctagatgggatgagcgcccgctactccccgctcccgcacggccttctagccgagattagtactgagattacaaattcactgaagggccaggtaaaccgtgttgtgtacgatatcacccacaaaccaccgggcacgatagagtgggagtaa

SEQ ID NO: 317404 - DNA, 913 bp, Unknown
  Bacterial polypeptide expressing nucleotide sequence isolated from the Sargasso Sea
ggaggtccatattcactatcagataaggatgccccaaaaatagagaaagaaatcatacacatgggtgtccctgtactaggtatttgctatggtatgcaattaatgacagagatgttaggtggtacagtgaaaacatcaaaccaaagagagtatggggcagctaacttatttatagataataattttgatttatttgaagggttatggttagagatgtcatcttggatgtctcatggggatacagtagaggtacccccaccaggttttaaagtattagcacatacacaatcatgcaaagtagccgccataggaaatagtgagaagaaatattatggattacagtttcatccagaagtttctcacacacaaagagggcaagaactcattaggaatttcatgtttaatatatgtgaaatggagccaaattggtacgcagatacttttatcgataaaacgctaaaagaaattaaaaataaggttgaagatgaacaagtgttatgtgccttatctggaggaatagattcaactgtagtagcggtattattacaaaaagcaatttctaaaaacttaacatgtatgtttatcgatcatggattaatgcgtaaagatgaaggaaaaaatattaaacagatttttgaaaaagaatacaacatgaacctcatatacgtagatgcacaagatcgcttttataaaaaattaaaaggaatcacagatccagagaagaaaagaaaatgtataggcgaagaatttatccgcgtatttgaagaggaatcaaagaaattaaaaggagacatcaagtttcttgcccaaggaaccttgtatcctgatgtcattgaatctgcaattggggatgtctctaaaaccgcagtaacaataaaatcacatcataatgtaggcggcttgccagaggata

SEQ ID NO: 317405 - DNA, 670 bp, Unknown
  Bacterial polypeptide expressing nucleotide sequence isolated from the Sargasso Sea
cctggaggcaaaaagaaaaatatttggtgcaacttttattgatgtatttgaagaagaggctcagaaaattggtggagccaattttcttgctcaaggtacgttgtaccctgatgtgatagagtcagtttcattcacgggaggtccaagtgttacaattaaatcacatcataatgttggtgggctacctgaacgaatgaatatgtctttggtggaaccattgcgagaattattcaaggacgaggtgcgggaattagggaaggagttgggtcttccagatcaactcgtaggtcgacatccgtttccgggtcccggcttggctattcggatgcccggggagattacaaaagagagactagaaattttgaggaaggctgacgaaatatatatagatgaaattcaaaaagcgggactttacgatgatatttggcaggcatttgcggttttgttacccgtaaagacagtgggtgtgatgggggacgcccgttcctatgattatgtctgtgcattacgcgcggttacttcgacagatggtatgacagctgatacttacccctttgaacaccaatttatttcgaaagtagctaccagaattattaatgaggtacgcggtattaatagggttacatacgatattacttcaaaaccacctggaacaattgagtgggagtaa

SEQ ID NO: 317406 - DNA, 529 bp, Unknown
  Bacterial polypeptide expressing nucleotide sequence isolated from the Sargasso Sea
aatgcaaaagatccttgtagttgattttggttcacaatacacacaacttattgctcgaaggcttcgagagcttaatgtctattctgaagtttatccatgggatgaaatacctgtcctagaatctgttgatggttttgttttatcaggtggtcctgaatcatcaaacatagaaggcaacccaaatattttcaatgaaatatttgaatccaataaacctattcttggtatttgttatggaatgcaagttttagcttttcaagaaggtggagaaatacagaatgaaggaaaaaaagaatttggttacgcaaagatagacttaaataatcaaacttctttatttgctgacacctcagactcaattgatgtgtggatgtcgcatggagataaagtaatttcacttccagaaggttatgaaactttagctagttctgataattcaccaattgctgcttaccagaatttagaaaagaactattttggattgcaatttcatcctgaggtgactcatacagattttggtctaaaaatt

SEQ ID NO: 317407 - DNA, 898 bp, Unknown
  Bacterial polypeptide expressing nucleotide sequence isolated from the Sargasso Sea
atccccgatggatgggaattattagcttattcatccaatggtattatttccgcaattgtaaataaaagtcaaaatagatatgctactcaatttcatcctgaggttgatcatactcaaggtggagaccttattatatccaactttttattcaagatagctaaatgttctccaagttggaacacaaaaaatttcattgcagataaaataagttcaataagaaaactagttaacaaagatcgagtattagttggagttagtggtggagttgattcttctgttgtagcagcattactttataaagcgattggtgatagaatgtgtgccgtacttattgatcatggtttaatgaggaagaaagaagcagcggaatgtaaacaattccttcatgatggtttagcaattgatattaacctctatgacgaatcaaaactttttttttctaaactaaggggtgtggtaaacccagaacaaaaaagaaagattataggcaaacaatttattgaatcttttgaacgtatttcaaaagaacaaaacgatatcaaatttttagcacaaggtacattatatccagatgtgattgaaagtgggataagtaatagtaatacagcacatgttattaaaagccatcataatgttggtggacttccagaagaaatgaaatttgatttaattgaacctcttagggaattgttcaaagatgaagtgcgaaatataggtcgcgaattaggtttgaataaattattagttaatcgacatccttttcctggaccagggctaggtgtaagaataataggagaggttacattagagcgagtaaaaattctgcaaaattcagatagtatatatatcgatattttacacgaggatggattatatgatgaaatttggcaggcattgc

SEQ ID NO: 317408 - DNA, 856 bp, Unknown
  Bacterial polypeptide expressing nucleotide sequence isolated from the Sargasso Sea
cggtcccgcgattttgctgcatgaggccattggcgatcaactgacctgtgtttttgtcgatcatgggcttttgcgcctcaatgaggcaaccgaagtcgtcaaaatgttcagagagagctataatctcaacctgatccatgcggacgaaagcgaactgtttctgggcaagctcgagggcgtctcggaccccgaaaccaaacgcaaaatcatcggcggccttttcatcgacgtgttccagaaatacgccaatgacattgagggagccgaattcctcgcccaaggcacgctctaccccgatgtgattgaatcggtcagcttttccggcggcccgtcggtgacgatcaaatcgcaccacaatgttggcggactgcccgaaaaaatgggccttaagctggtcgagcctttgcgcgagcttttcaaagacgaagtgcgcgcgcttggccacgaattgggcctgcccgcatccttcatcggtcggcacccgttccctggtcccggccttgcgatccgctgccccggcgagatcacccgcgaaaaactgaagatcttgcagcaggccgatgcggtctacatcgaccagattcgcaaacacggtctctatgatgaaatctggcaagcctttgccgcgattttgccgatgcgcacggtcggcgtgatgggcgacgggcgcacctatgattatgcgcttgccctgcgcgcggtgacctctgtcgacgggatgacggcagattactaccccttcacccacgagttcttgggcgagaccatgacccgtatcatcaacgaggtggatggcatcaaccgggtgttctacgatgtaacatcaaaaccccccggcaccatcgaactcgaatag

SEQ ID NO: 317409 - DNA, 847 bp, Unknown
  Bacterial polypeptide expressing nucleotide sequence isolated from the Sargasso Sea
agtgaagttggtaacagaaacgtacttatgtttctgagtggaggtgttgattcttcagtggcctttgctttgttaaataagacacttggacaggaaaaggtgcttggattgtatattaataatggctttatgcgcaaaaatgaaagtgatgaaatacttacaaggtattcacagctaggatataagaatattcaatacagaaactacagttcattttttttagacgcactcacaggtcagtttgagccacagattaaaagacaaattattggggcaacttttataaagatgcgtgacaagtttctgaatgaactaaacttaaatcaacatgattggatgcttggtcaggggactctttatcctgatattattgaatcaggaggtactgaaaattctgaagtaataaaatatcaccacaaccgtgtaaaggaggtattggaattggaaagtacaggaaatgtcgtagaaccactcaaagacctttataaagatgaggtcaggcaggtaggaactttattaggtctccccgaatctattgtatggaggcatcctttccctggacctggtttatcaataaatgttttgtgttcccgtgaagatgaattctttcaggaaatagaaacaactctaaaagaagtcagagattgcatgaaagattttgaatgcgacaacatggttcttccagtgcggtcagttggagtacaaggggataaaaggacatatgcttctccagttgtacttttaaatactccccgagattgggactggctggaaagtcaggctatacgaataataaatgaagtcagaacagttaatcgggtagtacttttattaggttcaaatacaa

SEQ ID NO: 317410 - DNA, 793 bp, Unknown
  Bacterial polypeptide expressing nucleotide sequence isolated from the Sargasso Sea
aatgaaaaatgaaaaagtattaattgttgattttggttcacaatatacacaattaattgcgagaagagtaagagaaaataaggtttactcagaaataattacatactcaaaaaatttaaatcttgatctcacaacagtcaaagggattatattgtctggcgggccatcctcggttaaagatacattcgataaaaaatttttaaacgtacttattaattcaaatattcctatgttatgtatttgttatggaatgcaagctgtagcaaaattttatcagtcctcagtgaaaagtaaaaaaattagagagtatggtaaagctgatcttaggatacttaaagagagtaacatatttagaggttgtaataataattttcaagtttggatgtcgcatggagatagtgtcatagatgttaatccacactttgatgttatagcatcatctggtaataataatatttcggcaataaagcacaagactaaagagctttacgggcttcaatttcatccagaagttactcataccaaggataaaggaaaaattataaaaaactttttaattaatatttgtaaatttagaaaaacatggaactcaaaaaatataatctcagacactattagtgaaattaaaagccaaataggtaaagatcgagtaattcttggtttatcaggtggagtagattcttctgttgctgctgcattaattaataaagcaataggaaaaaatcttatttgtatttttattaacaatggtcttttgaggcaaaatgaagaaaatgaagttaagcaagctttt

SEQ ID NO: 317411 - DNA, 612 bp, Unknown
  Bacterial polypeptide expressing nucleotide sequence isolated from the Sargasso Sea
ccgagaagatcggcggcgccgacttcctggcgcaaggcaccctttatccagacgtgatcgagagcgtcagcccgttcggcggcccgagtgcgaccatcaagtcgcaccacaatgtgggtgggcttcccgagcgcatgaatatggagctcgtggaacccctgcgcgaactcttcaaggacgaggtgcgcgatctcggccgcgaactgggaattccccacgagatcgtcggacgccacccgttcccggggcccggcctggcgatccgcgtgcccggcacctttgagcgggacaagcttgatatcctgcgccaggccgacgcgatctatctcgacgagatccgcaaggcgggcctgtatgaccagatctggcaggcgtttgccgtgctgctgcccgttcgcaccgtcggggtgatgggcgacgcacggacttacgaccatgtctgcgccctgcgcgccgtcacctcgaccgacgggatgacggcggacagctacccctttgaacacaccttcgtggcgggtgtggcgacgcgcatcatcaacgaggtgcggggcatcaaccgggtcgtctacgacgtcacctcgaagccgcccggcacgatcgagtgggagtaat

SEQ ID NO: 317412 - DNA, 672 bp, Unknown
  Bacterial polypeptide expressing nucleotide sequence isolated from the Sargasso Sea
atcctgaaaaaaaaagaaaaataattggaaatttatttataaaaattttcgagcgatatgcaaaaaaaattaaagatgttaaatttttagctcaaggaacgctctatcctgatttaattgaaagtaaatcagttactggtagtcaaacttctaaaattaaatcgcatcataatgtcggtggtttacctaaaaaaatgaacctaaaacttgttgagccactaaagtttttatttaaagatgaagttagaaaattaggtttagaattaaaattaagtaaagagatcatatcaaggcacccttttccaggccctggtttagcaattagaatgccaggaaatatcactaatgagaaaataaaaattttaaaagaggctgattattattttatacaagcattaaaagatcatggtctttatcataaaatttggcaagcgtatgctgctctgctacctgtcaaaaccgtaggggtgatgggagacaaccgtacttatgaatatctctgcctcttaagagcaattacctctgaagatggaatgacagctgatttctttgaatttagaaaatctttcatgcaaactatttctaataaaatagttaatagcataagaggcataaatagagttgtttatgatgttacttcaaaacctccaagcactattgaattagagtagt

SEQ ID NO: 317413 - DNA, 622 bp, Unknown
  Bacterial polypeptide expressing nucleotide sequence isolated from the Sargasso Sea
gatgcagacacagatgctggtcgatgaggccatcggggagctgaaatcccgtatagacgacaccgccatcattgcctgctcaggtgggatagacagcacagtggcagccgtgctcgcccacaaggcggtaggcagcctcctccactgcgtctacgtcgataccggcctgatgaggaagggcgaaacgtcggaggtgtccgagatgttctccgaaatgggcataaaactccaggtcgtagacgcgtcagccagattcttcgagagtctctccggagtaacagatcctgaggagaagcgtaagataatcggagagcagttcatcagggtgttcgaggaggagaagggaacctgcgctgccaagttcctagttcagggaaccatcgcccccgactggattgagtcaggcggaggagatagggacgtaatcaagtcgcaccacaacgtcgggggactccccgaggacgtcgacatgacaatcgtagagccactaagggagttctacaaagacgaggtcagggagattgcgagatccctcggtataaaatccagcgagaggcaaccattccccggccccgggtctagccgtcagagtactttggagaagtcactccagaacgtgtag

SEQ ID NO: 317414 - DNA, 715 bp, Unknown
  Bacterial polypeptide expressing nucleotide sequence isolated from the Sargasso Sea
ttgcttgggctatcggggggcgtggattcgtctgtcgttgcatttttaatgcatgccgctatcggagaacaacttacatgtgtattcgtagataacggtctattgaggaaaaatgaggcagtagaagttatgaggactttttcggagaacatgggtctaaatgttcttcatgttgatgctagagggatattctataaagcccttgaaggtatttcagatccagaggaaaagcggcgtgttattgggcatactttcattgacgtttttgatcaagaagcatcgaaaatcaagggtgttaagtggctagcgcaaggtacgatatatcccgatgtggttgagtcagcagccactaaaacgggaaaggggcgcgttataaagtcacatcacaatgtaggcggattacccgagcagttgccttttgatttgatagagcctttgcgagagttgtttaaggatgaagtccgccgggttggcctcgaactagggttgccgaaaaaaatgatttttagacacccattccccgggcccggcctaggagtgagaattttgggcgaagtaacggaagagaaagcagaaacgcttcgtaatgccgacagtatcttcatagaggagctcaatactcagggtctatatgacacggtgagtcaagcttttgctgttttccttcctgttagatccgttggtgtgaaaggcgatgccagaacatacgagcacg

SEQ ID NO: 317415 - DNA, 871 bp, Unknown
  Bacterial polypeptide expressing nucleotide sequence isolated from the Sargasso Sea
tgggcaatcagataatgcaccatacgctgtaattgctgatttaaaccgacggatttatggagtacagtttcaccctgaagttcatcacacacctatgggcaaaaaattattagaaaacttttctaaaatatccggatttaaatacgattggaccgttgaatcttttcgagacaaagcaatttccgaaataaaaactcgtgttggagaaaataaagtaatttgtggtttatcgggaggagtagatagctcggtgacggccttattaatccacaaagctataggaaataaattgacctgtatttttgttgatcatggccttctaagagaaggggaagcagaatctgtggtaaaaatgtttaaagataattttaaaataaaactaatccatttaaaggaagacaaactattccttaatgccctagagggcgtttctgacccagaaaagaagagaaaaatcataggtaatttgtttattgaggtatttgaaaaaaaagctaaagaaataaaagatgtcacctttctcgcccaaggtacactttacccagatgtgatagagtctgtgtccccaacaggaggaccctctgctaaaatcaaatcgcaccataatgtcggggggcttccaaaaaaaatgaagcttaaacttttggaacccttacgagaactttttaaagatgaggtccgagctctaggaaaggaaattggtttaccaaaagaatttgtttcacgccaccctttccctggacctggtttggcaatacgctgcgtaggagaaattaatcaggaaaaagttgatctactgcgaaaagtagacaatgtttttattgatcaaattagaaaacatggcttgtatgatgaaatctggcaagctttg

SEQ ID NO: 317416 - DNA, 880 bp, Unknown
  Bacterial polypeptide expressing nucleotide sequence isolated from the Sargasso Sea
gataagagatattagaaaacaagtaggcaaaagtagagtgatttgtgctttatcaggcggggtagatagcagcgttgttgctcaattactgaataaagcaattggaaaaaatctctattgtatatttgttaatacaggtcttcttagaaaaaatgaggaaaaacaagttgtagaaacattcaaaaaaaaattaagaattaatttaatttatgtcaatgctgagaatgaatttattagaaaattaaagaatattacagacccagaaaaaaaaagaaaaattataggtaatttatttattaaaatttttgaaggttatgcaaaaaaaattaaaagagtaaaatatttagcacaagggactctttaccctgacttaattgagagtaaatctgttactggtagcaaaacctctaaaattaaatcgcatcataatgtaggaggattaccaaaaaaaatgaaacttagtcttgttgagccattaaagtttttatttaaagatgaggtaagaaaattaggattagagcttaacttaagtaaagaaataatatctaggcatccttttccaggccctggtttagctataagaatgccaggaatgataactagagaaaaaataaaaattttgaaagaagcagattattatttcattaagggtttaaaagatcacaaattatatgacaaaatttggcaagcttatgcagcattacttccagtaaaaacagtcggtgtaatgggagataatagaacatatgaatatctgtgtttgcttagggctataacttctgaagatggtatgacagctgatttttttcaatttaaaaaaacatttatccaagaaatttcaaataaaatcgttaatagcattaggggtattaatagagta

SEQ ID NO: 317417 - DNA, 685 bp, Unknown
  Bacterial polypeptide expressing nucleotide sequence isolated from the Sargasso Sea
aaaggtgtgagtgatccagaattaaaaagaaaaataattggtaatctttttatagaagtttttactaaatattcagaaaaatttggtgatatagaatacctagctcaaggcacgctttatccagatgtgattgaaagtgtcagctttactggcggaccatcagaaacaattaaatcacatcacaacgttggtggtttaccaaaaaaaatgaaactaaagcttgttgagccattacgtgagttatttaaagatgaagttagacagcttggttttgaattaggattaccaaaagaatttattgggcgacatccatttcctggtcctggacttgctataagatgccctggtgaggttacttctcataaaatagatattttaagaaaagcagattcaattttcatagatcaaattaaaaagtataatttatatgataaaatttggcaggcatttgttgttttgctccctgttagatctgtaggtgttatgggagatggaagaacatatgattttgtttgttctttgagagcagtcacttctgttgatggaatgacagcagatttttatccttttgataatgattttttaggtgagacatcaaataaaattattaatgaagttaaaggtatcaatagagttacttatgatattacatcaaagcctccaggaactatagagtgggagtgac

SEQ ID NO: 317418 - DNA, 648 bp, Unknown
  Bacterial polypeptide expressing nucleotide sequence isolated from the Sargasso Sea
tcccaactcatagcaagaagagtaagagagcagggtgtgtattgtgaaattatctcccataaaaatccctttaaagtaatttcaaagagtaaaaccaaagggataattttatcaggcggcccggcaagtgtacacgtgtccaatacaccgaaattagataaaagagtttacaatttaggagtccctattttaggaatatgttatggcatgcaacttttagtaagtcagttaggaggaaaagttagtatttctaaaaaaagagaatttggtaaaaccctaataaaaactgattataagaatttactatttagatctttgaaacaaaagggcgaaaaaagttttaatgtctggatgagtcacggagacaaagttgtaaagcttccaaagggctttaacagtatagcttcaagttataacacaaaatatgcagctattgaaaatgtagaacaaaaattctacggattgcaattccatcctgaagtagttcatactgttgatggttcaaaaataattaaaaattttatttttaaaatagctaagtgcaaaaaaaattggagtatgaaaaatcatcttcaaacacaaaaaagactaatcaaagacatagttggctgtaatcatgtaatatgtggtttatcggggggagtagat

SEQ ID NO: 317419 - DNA, 367 bp, Unknown
  Bacterial polypeptide expressing nucleotide sequence isolated from the Sargasso Sea
gtcctggattgggagttagaatttttgggagagatctctcaagaaaaagtttcaatccttcaagatgctgatgcaatctttattgaagaattaactaaggcaggcttatatgatcaagtaagccaagcattttgtgcatatcttccaataaaatcagttggagttgttggcgatgagagaagatatgcagatgtgatagcaattagagcggttgagacagttgactttatgactgctacctgggcgaggcttccatatgaatttttggcgcatgtctcaaatcgaattgtgaatgaattggagggagtgagtagagtggtttatgatatttcgagcaaaccaccagcaacaattgagtgggaataaa

SEQ ID NO: 317420 - DNA, 439 bp, Unknown
  Bacterial polypeptide expressing nucleotide sequence isolated from the Sargasso Sea
tgacccagaaaaaaagcgtaagaaaataggaaatctgtttatagatatttttgaaaaatatgcaaaaaggaataaaggcattaactatctagcacaaggaacgttatatccagatgtaatcgaaagcaaaacagttacggggagcaaaacatcaaaaatcaaatcccatcataatgtgggaggtcttcccaaaaaaatgaaattaaaattaattgaacctctaaaatttttgtttaaggacgaagtaagaagattaggtcttgagcttaaaatatccaaagaaataataatgagacatccttttccaggaccaggtttagcaattagaatgccaggttatattagttctgaaaaattggacattttaagggaggccgataatatatttatcaatgaactaaaatctaataagttatatagtaaaatttggcaggcatac

SEQ ID NO: 317421 - DNA, 868 bp, Unknown
  Bacterial polypeptide expressing nucleotide sequence isolated from the Sargasso Sea
gtgcaaaggtttgtggaattctaaaaatataattgatcgagcggtaagtgaaataagagagcaggtaggtgatcaagaagtattattaggtttatcaggaggcgtggattctgctgttgttgcagcattactctcaaaagcaataggcaatcagttaacctgtatctttgtagacaatggacttcttaggctcaatgaaggcaaccaagttatggaaactttcaaaggtaagttcggaatcaaagtaaaaagagctaatgcgggtaatcaattcttaagggatttgaaaggaaaaaaagatccagaactgaaacgaaaagctatcggtaaaactttcatagatgtcttcctgaaagaagcaaaaagaaacaaaaagattcaatggttagcacaagggacaatttatcctgatgttattgaatccgctggcacgaagaatggatcagcgcatgtcataaaatctcatcataatgttggagggctgccgagctatcttaatctccctgtgatagagcccttaaaggacctttttaaagatgaagtaagaaaaattggtttagagcttggtttaccaaaagagatactatttaggcacccttttccaggtccaggtttgggtgtccgaattcttggtgaaatcaaaagaccttatattcaaacccttcaattagctgatgacatttttattagtgagttggttaaaggtggttactacgagaaagtaagtcaagcttttgcagtatttttaccggtcaaatccgttggagtagtaggggatgcaaggcgttatgaatatgtcattgctctaagagcagttgaaactatagattttatgactgctaaatcagctaaactccctcatactttc

SEQ ID NO: 317422 - DNA, 937 bp, Unknown
  Bacterial polypeptide expressing nucleotide sequence isolated from the Sargasso Sea
tatcccttcaacattatcactctctcatttataaagagattgaacccaaaagctatcatattatcagggggaccagctactgttcttgacgattgttcaccaaaaataccatacgaagtatatagtttgtccattcccatactaggcatctgctacggtcagcaactaatggcaaatcaactaggtggaaaagtttcaaaaggaattggaagaggtgagtttggaagatctttagtccgccaaagtgagaaagaatcggaaattgtcaaaggatggtttctaaaaggggaagaacaggtttggatgagccatggcgatagcgtatcagagctgccaaataattttaaaattattggagtgtcgaaaaaggctccatttgcaataatagcaaacgaaaagaaaaaattttacggagtccaatttcaccctgaggttaaccaaacaactaaaggaaatttgctttttaaaaactttgtccaaatttctggtttctctcaagattggaatatgtcttcgtataagcaacatgcaattcaaactattcgtaaaaaagtgggcaaagagcatgtgatttgtgcaatatcaggaggcgtggacagctcagtggttggagttttgctccacgaagccatcggagatcaacttacttgtatttttgttgaccatggtctcttaagagctggagaatccaaagaagtcctaaaaatgtttcgccaaaactacaacataaaagtaatccacgcgaatgaaaaagagctttttgtcaaagctctttcaggtatcattgaccccgaactaaagagaaaaaaaattggaaatctttttattgaagtttttgaaaagtatgcaaagtctctcggtaaagtaaggtttttggctcaagggactttgtatccagacgtgatgaaagtgcgcctgccaagggagcccctcagca

SEQ ID NO: 317423 - DNA, 550 bp, Unknown
  Bacterial polypeptide expressing nucleotide sequence isolated from the Sargasso Sea
gtcttcaggatctgaatcaaaggaagccagggttattaagtctcatcacaatgttggaggcttgcctgaggaaatgaagctcaagcttgttgaacctttgagagatctatttaaagatgaagtcaggaggttgggctcccaactcgatttgcctgagataattttaaatagacatccctttccaggccctggtttaggcgtgagaatacttggagaagtaaatgaaaagaaaataaagattcttcaagaagcggattttatttttatagaagagcttagaaaagctgatttgtatgaatcagtcagccaagcatttgcagtttttttaccaattaaatcagttggagtggttggtgatgagagaagatactcggaagtaattgctttaagagctgtagagacagttgatttcatgacggcaaactgggcttatcttcctcatgattttttagataaagtttcaagacggattgtaaacgaaatagaggatgtaagtagagtcgtttatgatatttctggaaaaccaccagcaactattgagtgggagtga

SEQ ID NO: 317424 - DNA, 945 bp, Unknown
  Bacterial polypeptide expressing nucleotide sequence isolated from the Sargasso Sea
tgtttacgccggtgtgccggtattaggcatttgctatggtatgcagacgatggcggagcaactgggcggtaaggtgcagggctcggatctacgcgagtttggttatgctcaggtagaagtggttgctgaaaacgacctgtttgccaaaattgaagatcatgtcggcagcaacggtaatgcgttgttagatgtatggatgagccacggcgacaaagtagtgcaaattccgcaaggctttatcacctgcgccagtaccagcacttgtccgcacgccggcatggtagacgaagcccgccagttctacggtgtgcaattccacccggaagtgacccacacccgccagggcctgcggatgctggagcacttcgtcgttgatatctgcggttgcgacaagctgtggacaccggcatcgattattgaagatgccgttattcgcttaaaacagcaaattggtgacgatcaggttattttaggcttatccggcggtgtcgatagctcagtggtagcgatgttattgcaccgtgctatcggcaaaaaactgacctgcgtgtttgttgataacggcttgctgcgcctgaacgaaggcaagcaggttatggatatgtttggcgaccatttcggcctgaacattatcaaagtcgatgccgaagagcgtttcttatcagcacttgccggggagaatgagccggaagccaagcgtaaaatcatcggccgcgtgttcgttgaagtgttcgatgagcaggcgcaaaagctggctaacgccaagtggctggcgcaaggcaccatttaccctgatgtgattgaatcggccggctctgccaccggtaaagcacatgtgattaaatcgcaccacaacgtcggtggtttaccggagcatatgaaactgggcctggtagagccgctacgcgaactgtttaaagacgaagtacgcaaagtcggcttaga

SEQ ID NO: 317425 - DNA, 262 bp, Unknown
  Bacterial polypeptide expressing nucleotide sequence isolated from the Sargasso Sea
cctggagggggcggacggacgccgcccggccattgtcatcctcgattttggttcccagtactcggagttgattgcacggaggattcgcgagaccgaggttttttcacttgttctgagccataccaccacggtggagcagctcaaggagcttgctccacggggcatcatcctgagcggcggtcccagctcggtgtatgccaccgatgctccgctttgtgatccctctctctgggaattgggaatccccgtgttggggcgtttg

SEQ ID NO: 317426 - DNA, 715 bp, Unknown
  Bacterial polypeptide expressing nucleotide sequence isolated from the Sargasso Sea
aatgctgaaaaagaattctttgagaaaacttaataatgtttctcacccagagaaaaaaagaaaaataattggaaatttatttatcaaaatttttgaaagatacgccaaaagaattaaaaatgtaaaatttttagcacaaggaacactttatcctgatcttatagaaagtaagtcagtgactggaagtcaaacttcaaaaatcaaatctcatcacaatgtaggtggtttgccaaagaatatgaaacttaaactagtagaaccgttgaaatttttatttaaagatgaagttagaaaattaggactagaattgaaacttagtaaagaaatcatttcaagacatccattcccaggaccaggattagcaatcagaatgcccggtcttatctccaaagaaaagattaaaattttaaaagaggctgacaattattttattcaagctttaagagatcacaatttatatgataaaatttggcaagcttatgctgcattgcttccagttaaaactgtaggtgttatgggtgataatcgaacatatgaatatttatgtttattaagagcaattacatctgaggatggaatgacagctgacttttatgattttaaaaaatcgtttattcaaataatttctaataaaattgtaaatagcataagaggaataaatagagtagtttatgatgttacatccaaaccaccgagcactattgagcttgaatga

SEQ ID NO: 317427 - DNA, 676 bp, Unknown
  Bacterial polypeptide expressing nucleotide sequence isolated from the Sargasso Sea
gatgatcctgaacaaaaaagaaaaattatgcggtagaacatttattgatgttttcgatgcagaggcaattaaacttaaagatattaaatacttagctcaaggaacaatatatcctgatgttatagaatcatctggctctgaatcaaaagaagctagagtgattaaatctcatcataatgttggcggattaccagaagaaatgaagttagaattaattgaaccattaagagatttatttaaggatgaagtaagaaaaatgggtattgagttaggtatttcaaaagaaatgatagaaagacatcctttcccaggacctggacttggagtaagaataattggggaaattacaaaagataaaacagaaatcctacaagaagcagatcatatttttatagaggaactcattaaagctaaattatatgacaaagtaagccaggcttttgctgttcttctacctgtaaagtcagttggagtagttggagacgaaagaagatacgccgaggtaattggtttgagggctgttgaaactgttgatttcatgacggcaagatgggcacatttaccatatgatttcttagaacatgtttccaacaggatcgtaaatgaaatacaagatgtaagtcgagttgtatacgatatttctagtaaaccaccagcgacaattgagtgggaataa

SEQ ID NO: 317428 - DNA, 271 bp, Unknown
  Bacterial polypeptide expressing nucleotide sequence isolated from the Sargasso Sea
atgatatttattgttgattttggatctcaagtaacacagttaatagcaagaagagtaagagaagccggagtttattgtgaaattgtgtctagcaaatcactttataggcaaatacttaatagagggtgttcaggaatagttttttctgggggtccagcaagtgttcataagtcaaatactccaaaaattgataaaagaatattcaatttaaatattccaatattgggaatttgctatggcatgcaattattatgttaccaacttggtggga

SEQ ID NO: 317429 - DNA, 591 bp, Unknown
  Bacterial polypeptide expressing nucleotide sequence isolated from the Sargasso Sea
aatgcaagacagaattctcatacttgattttggttcacaatatacccagctgattgcaagaagagttcgggaggcgggtgtttatagtgagatctatataggcgatattgatttcaacgccatcgaatcatttaagccatctggaataatactctcaggcggacccgaatctgcattcattgatgatgcacccaaaccatccaaagagatttactcaatgggtcttcccatattaggtatttgttacgggatgcaagtgatgacagaacaactcggaggaaaagtttcgccatcaaatgaaagagaatttggtcatgccgatgcaaaaatggaagcaaatagccgtcttttcgagggcattgagactgatgatgagcaaccagtttggatgagtcacggagacagagtcgaatctttgcctgagggattccaaaaaatatgtacaagtgcaaactcaccttcagcagcaatggcaaatgaagataccacattttatgggctccaattccatcctgaggtcactcatacaagttgcggacagagaatcattaaaaactttgttcacaatatttgtggttgtggaaatgattg

SEQ ID NO: 317430 - DNA, 763 bp, Unknown
  Bacterial polypeptide expressing nucleotide sequence isolated from the Sargasso Sea
atgagtcttgatttaaatctagacaaaatcttgataatagattttggctcacagtttactcaattaatagcaagaagaataagggaattaggagtattttcagagataataagtcataaaaagattaagagttttcaaattaaatcaaatattaaaggaattattttatctggaggtcctttaaatgtttatcaattaaatgataacttatttgataaaaagattttaaaacttggaataccaacactaggaatttgttttggacatcaaattctatctaaatttaacggtgggaaagttaaaaaatcaaaacatagagagtttggtctagcaagtattaataaaaaaaataatagtcaattaattaaaaacttttttaataaaaaaagaaaaaaggtttggatgagtcattcagatcaagtaactaaacttccaaaaacttttaaagttattgcctcgagcgaaaactcaaaatttgctatagttgaaagtaaaataaccaaattttttggagtacaatttcatcctgaagttactcatactgagaatggaaaaaaaataattagtaatttcatttttttaatctgtagaattaaaaaaaattggtcttcaaaagatcagaaaataaaattaataaaagagataaaacaacaagtaggaaataacaaggttatttgtgcactttcaggaggtgtagatagcagcgtagtagctcaacttttaaataaagctattggaaaaaaactcttttgcatttttgtaa

SEQ ID NO: 317431 - DNA, 691 bp, Unknown
  Bacterial polypeptide expressing nucleotide sequence isolated from the Sargasso Sea
aatgcaagacagaattctcatacttgattttggttcacaatatacccagctgattgcaagaagagttcgggaggctggtgtttatagtgagatctatataggcgatattgatttcaacgccattgaatcatttaagccatctggaataatgctctcaggcggacccgaatctgcattcattgatgatgcacccaaaccatccaaagagatttactcaatgggtcttcccattctaggtatttgttacgggatgcaagtgatgacagaacaactcggaggaaaagtttcgccatcaaatgaaagagaatttggtcatgccgatgcaaaaatggaagcaaatagctgtcttttcgagggtattgagactgatgatgagcaaccggtttggatgagtcacggagacagagtcgaatctttgcctgagggattccaaaaaatatgtacaagcgcaaactcaccttcagcagcaatggcaaatgaagataactcattttatgggctccaattccatcctgaggtcactcatacaagttgcggacagagaatcattaataactttgttcacaatatttgtggttgtggaaatgattggaatccaggaaatatcattgaaaaagatatcaaagaagttcaggaagcggttggcgatgatctggttcttctcggattatcaggtggtgttgattcctca

SEQ ID NO: 317432 - DNA, 640 bp, Unknown
  Bacterial polypeptide expressing nucleotide sequence isolated from the Sargasso Sea
aagagtttattcaggtgtttacagacttgcaaaaacaaaaaggtccatttcaaatggttagcacaaggtacattgtatccggatgtaattgaaagtggagtatcaaaaggacctgcagcagtgattaaatctcaccacaacgttggtggattacctgattggttaaatctcaaaattttagaaccattaagagaattgtataaggatgaagtgagagatgttgcaagaatcttaggtgtacctgagaaattattgaaaagacatccattcccaggaccaggattatctgtgagaattattggcgatattactccgtcaaagctatcaatttgtagaaaagcaagtaaaattgtggaagaagagttatgggatgcaggagtttatgataaagtctggcaagcatatgcagcagtaggagacgataaagcagtaggagttgttggtgatgagagaaaatatggaagaattgttacagttagagttgttgattcaattgatgcaatgactgcagattggaccagacttccaaatggagtcttagagaaaataagtaacagaattactaatgaaattgaagaagtgacgtgggtttcttatgtgatttcaagtaaaccacctgctacaatcgaaccacaataat

SEQ ID NO: 317433 - DNA, 553 bp, Unknown
  Bacterial polypeptide expressing nucleotide sequence isolated from the Sargasso Sea
agagcaaatctggttactgggaagtcaaacttctaaaattaaatcacatcataatgtcggtggcttacccaaaaaaatgaatttaaaattagtagaaccactaaaattcttatttaaggacgaggtaagaaaattaggattagagttaaatttaagtaaagaaattatttcaagacatccttttcctggaccaggtttagctattcgaatgccaggcataataactaatgaaaaaattaaaattttaaaagaggctgattattactttattcaagctttaaaagatcacggtctttatcataagatttggcaagcttatgcagcattacttccagtaaaaacagtgggtgttatgggagacaatcgtacttatgaatacttatgtttattaagagcaattacatctgaagatggaatgacagctgactattatgaatttaaaaagtcttttatgcaaactatatcaaataaaatagttaacagtataaggggtataaacagagtagtgtatgatgtcacttcaaaaccacctagcactattgaattagagtag

SEQ ID NO: 317434 - DNA, 770 bp, Unknown
  Bacterial polypeptide expressing nucleotide sequence isolated from the Sargasso Sea
aacggagaagaagaagtttggatgtcacacggggatcatgtgagtagcctcgcacctggtttcgaagtttatggaacatcatcaaatgcgccgtttgcaattatagcggataagaagcgtcatttttatgcagtccaatttcatccagaggtgcaccatacgccaagtggtaaaaagctattcgagaactttgtggaaatatcaggagttaaaagagattggacaatgattgcctttcgaaccagagcaattgaggctatacgcagacaggttggtaagaaaaaagttatttgtgccttgtccggcggagtagatagctccgttacagcaattttggtacatgaggcaataggtgaccagctaacatgtgtctttgttgatcatggtttgctaagaaagaacgaaggtcagcaggttacagagatgtttaaagaacattataggatcccattgattcatgcaaaagagcaaaatatgtttcttgctgctcttgagggacaatcagacccggaaacaaaacgtcggattataggaaagctttttattgatgttttccaaaagcatgctaataagattcatggagtagaatttttagcacaaggcacgctctatccggatgtaatcgagtccgtctccgttaatggcggaccgtccgtcacaataaaatcgcatcacaatgtcggtggcttgcctgaaaaaatgggaatgacgctaatcgaaccaatccgagaactttttaaagatgaagttcgcgagcttggtcgtgaatt

SEQ ID NO: 317435 - DNA, 600 bp, Unknown
  Bacterial polypeptide expressing nucleotide sequence isolated from the Sargasso Sea
gatgattgaaaattataaaaaaaaattatttggaattcaatttcatccagaagttacccatactaaaaatggaaaaaaacttttaagtaattttgttttttccatttgtaaattaaaaagaaattggtcatcaaaacagcaaaaaataaagctaattaaacaggttaaaaatcaagtaaaaaattcaaaagtaatttgtgctttatcaggaggtgttgatagcagtgtagtggcaaagttattaaaagaagctataggaaaaaaattaatatgtatatttgttaatacaggtttgttgagaaaagatgaagaaaaacaagtagttagtacttttaaaaaaaaatttaaaatcaatctcatttatgtaaatgcaaaaaatatgtttttatctaaacttaaaaatgtttcagatcctgaaaaaaaaagaaaaataattggaaatttatttgttaaaatttttgaaaaacatgcgagaaaaataaaaaaaataaattttttagcacaaggaactctttaccctgacttaattgagagcaaatctgttactggaagccaaacctcaaaaataaagtcacaccataatgtcggaggtttgcctaa

SEQ ID NO: 317436 - DNA, 841 bp, Unknown
  Bacterial polypeptide expressing nucleotide sequence isolated from the Sargasso Sea
gttgattgctagaagagttcgtgagctaggtgtttattctgaaatagtaagtcataaaaaaaaagttaacttaaagagagatgatataattggattcatactctcaggtggtcctttaaatgtatatcagactaaaaaagtaagttttgataaacaaattttagatctagggatacctatactaggaatttgttttggacaccaaattatttcaaaagaactgggtggaaaagtcaaagagtcaaaacacagggaatttggacttgcacaaataaaacaaattaagaatagtgctttgacaaaaaatttttttaataaaaaaagaaataataatgtttggatgagtcattctgatcaagttacaaaattacctcgaagttttgaaaccgttgcatcaagtactaattctaagttttgcatcatacaaaataaatcaaagcatttttatggaatacaatttcaccctgaggtaacacacacaaaaaatggaataagaattataagaaactttttattttccatatgtaaagcaaaaaaaaattggtctccaaaaaaacaaaaagataaaataattgaggaaattaaattaaaagtaggtagctcaaaggttatatgcgctttatctggtggtgtggatagtagtgtagtagcaaaagtaattcacaaagcgattggtaaaaatttaatttgcatttttgttaatacaggacttttaagaaaaaacgaggaaaaacaagttattcaaacattcaaaaagagacttaaaattaaactgatatatattaatgccaaagatattttcataaaaaaattaaaattagtaaaagatcctgaaaaaaaa

SEQ ID NO: 317437 - DNA, 578 bp, Unknown
  Bacterial polypeptide expressing nucleotide sequence isolated from the Sargasso Sea
aatgaaaaatgaaaaagtattaattgttgattttggttcacaatacacacaattaattgcgagaagagtaagagaaaataaggtttactcagaaataattacatattcaaaaaatttaaatcttgatctcacaacagtcaaagggattatattgtctggcgggccatcctcggttaaagatacatttgataaaaaatttttaaacgtacttattaattcaaatattcctatgctatgtatttgttatggaatgcaagctgtagcaaaattttatcagtcctcagtgaaaagtagaaaaattagagagtatggtaaagctgaccttaggatactaaaagagagtaacatatttaaagggtgtaataataattttcaagtttggatgtcgcatggagatagtgtcatagatgttaattcacactttgatattatagcatcatctgggaataataatatttcggcaataaagcacaagactaaagagctttacgggcttcaatttcatccagaagttactcataccaaggataaaggaaaaattataaaaaactttttaattaatatttgtaaatttagaa

SEQ ID NO: 317438 - DNA, 250 bp, Unknown
  Bacterial polypeptide expressing nucleotide sequence isolated from the Sargasso Sea
gtgagtcaagcatttgcagtcctcttaccagtaaaatctgtaggcgtggttggagatgagagaaggtatgctgaagtggttgggttaagggcagttgaaacggtagactttatgacagcaaggtgggcgcatttaccctataaatttttagaacatgtttctaatagaataattaatgaaatagaggaagtaagcagggtagtttacaatatttccagtaaaccacctgcaactattgagtgggaataac

SEQ ID NO: 317439 - DNA, 787 bp, Unknown
  Bacterial polypeptide expressing nucleotide sequence isolated from the Sargasso Sea
gattattttatcaggtggaccagaatctgttactaacattcatacaccaagagcaccaaagatagtttttgacttacaagttcctattttaggtatctgttatggcatgcagactctagctgaacaaatgggaggccaggttacaacttctgaaaaaaaagaatttggattctcaacttttaaaattgaagacgaatctagactattggctggatcttcatctgaaataattgacgtttggatgagtcacggagataaagtagaaactcttcccaatgattttaagctaattggttctacagaatctgcaccaatagctgccatggagcatatttcacaatctatctatgcgcttcagtttcatccagaagttactcatacaaaaggcggaaagctaattttagataactttatctttgagatttgctcatgcaaaccagattggaagcttgatgatttgatttctagcagaattgaagaaattaaacacgcaactaatggagaaaaagtgctccttgggttatctggaggagttgactcttctgtaacagcagcacttttatctaaagcaattggagataatcttatatgcgtctttgttgataatggtttgttaagaaagaatgaggcagaggaagtagttcaaacttttaaaaatgagatggatcttaatctcattaaagttgatgcacaaaagatatttttaagacatttaaagggtgtagaggatccagagcagaaaagaaagattattggtagaacatttatagatgtttttgatgctgag

SEQ ID NO: 317440 - DNA, 972 bp, Unknown
  Bacterial polypeptide expressing nucleotide sequence isolated from the Sargasso Sea
tacatgaaatttgtgattgtttgcacgaatggactcccatcaaatattgcttcagaagcgatcaaagaagtaaaagcaaaggtcggtgatggcgaggtactcttgggcttgtcaggaggcgttgattcttcagtagttgcagcaattcttcataatgcaattggctcccagctaacatgcgtttttgtcgatcatggtcttttgagattcaatgagggcgaccaagtaatgaaaaccttcaaagaaaatctcggggtgaacgttattcgagtgaatgcggccgatcgtttttttgaagcattggaaggtattaaagatcctgaggaaaaaagaaaaataataggacgattgtttgttgaggtatttgatgaggaagcaaaaaaactcaatcatatagaatatcttgctcaaggaacgatttatccagatgtcattgaatctgctggagcttcgactggtaaagcgcatgtgatcaagtcacatcacaatgtgggaggattacctgagaatatgcgaatgaagctgatagagcctctcaaagagcttttcaaagatgaggtgaggaaaattggcatagagcttgggttaccagaaaagatggtctatagacatccatttcctgggccaggattgggtgtccgtgttcttggggaggttcttcctgagtacgtaaaacttcttcagttagctgatgacatatttataagtgaactgattgataatgatttgtatggttctaccagtcaggcatttgcagtatttcttcctgtgaaatcggttggtgtgatgggtgatggcagaagatacgattatgttgttgctctaagagcggttgaaacagtggattttatgaccgctagatgggcgcgtcttccttatgaatttttggagagagtctcgcttagaatcattaatgaggtagagggaatatccagagtaacctatgacatatcaggaaaacctccatcaaca

SEQ ID NO: 317441 - DNA, 819 bp, Unknown
  Bacterial polypeptide expressing nucleotide sequence isolated from the Sargasso Sea
caaattcagtaaaagataaaaaatctcctaaattagatggtaaaattatagctctaggtgtgcctatattaggtatttgctatggaatgcagttagtttgtaatgagtttggtggaaagattggtaagtcaaaattaagagaatatggacactctatcattacacttaagcataaatctgtattgtttgaaaaaattaaaataaaaaatcaagtatggatgtctcatggtgatcatgttgaaaaaaagccagatgaattttttattacgtctttatcaaacaataagatcatatcatcaattgaacataagaataaaaaaatttttggattacaatttcatccagaagtatatcattcgttgcaaggtaaaaaaatattatcaaattttctttttaaaatttgcaaaataaaaaacaaatttaagttagaaaatttcttaagtcataaaattaaaaatttaagagataatttaaaaaaaacaaaagtaatctgtggtttgtcaggtggtgtagactctacagttacatcttttttattacataaagctataaaaaataatttattttgtatttttgttgaccatggtatgctaaggttaaatgagtcaaatgaagttgaaagtatttttaaaaaaaaatttggtaagaattttataaaagttaatgcatccagcatttttttaaaaaaattaaaaaatatcaaagatccagaaaagaaaagaaaaataattggtaaaacttttattgaagtttttgaaaaagaggcaaaaaaaattaaaggagtgcagtatttagctcaaaggaactctttatcctgat

SEQ ID NO: 317442 - DNA, 217 bp, Unknown
  Bacterial polypeptide expressing nucleotide sequence isolated from the Sargasso Sea
aatgagtcttgatcaaaatctggataaagttgtaatcatagattttggttctcagtttactcaattaatcgcaagaagaattagagaactaggtgttttttcagaaattgtaagtcataaaaaaattaaaactagtgatattaaccagagtgtaagaggaattattttgtctggtggtcctttaaatgtttatcaaatcaataaatattcgttttga

SEQ ID NO: 317443 - DNA, 758 bp, Unknown
  Bacterial polypeptide expressing nucleotide sequence isolated from the Sargasso Sea
tgctatggtatgcaattattatgttaccaacttggtgggaaagtaaaaatttcaaaaaaaagagaatttggtaaaacacttataaagccatcaaaaaaaagtgttttattctcaggatttagaaatggaaagagctcgaattatgtctggatgagccatggcgataaggttattagtctaccaagagattttaaaagtattgcatcaagttcaaatactaagtttgcagcagtcgagaataaaaaaaaatcttattacggtctacaatttcatcctgaagttgtgcatacacccaatggccataagataatcgaaaattttatatttaaaatttgtaagataaaaagaaactggagcatgaaaaatcatttaagaaatcagattactgagattaaatattcagttcataaggatcaggtaatttgtggattgtcgggtggtgtggatagtactgttactgcagctataatttcaaaagccataaataagcaattaacatgtatttatgttgatacaggtttaatgagactaaatgaaacaaaagaggtagtaaaaatgtttaaaaaacattttaaatctcgattaatagtcaaagactcaagaaatacatttataaaagccctaaagggcgccacagatccagaaaaaaagagaaaaataataggtaatctttttattaaaatatttaaccaagaggcaaacaaaataaaacgtgccaaatatttagctcaaggaactatttatcctgatgtaatcga

SEQ ID NO: 317444 - DNA, 376 bp, Unknown
  Bacterial polypeptide expressing nucleotide sequence isolated from the Sargasso Sea
aatgagtcttgataatagccttaacaaaatcttaattgtagattttggttcacaatttactcaattaatagcaagaagaattagagagcttggagttttttctgatattgtaagtcataaaaaaattaaacttaataaaattaatcaaagcataaaaggtataattttatcaggaggtcctttaaatgtttatcaaattaacaagtattcatttgataagaagattttagatttaaatatacctgttcttggaatttgttttggacatcaaatattatctaaacttaatggtggaagagttaggcaatcaaaacatcgtgaatttggattagcaaatgtaattaaaaaaaatagtagcctcttaacaaataatttt

SEQ ID NO: 317445 - DNA, 952 bp, Unknown
  Bacterial polypeptide expressing nucleotide sequence isolated from the Sargasso Sea
agttgcgtcaacacagactctaagttaactattattgaaaatactaaaactaagatatacggggtgcaatttcatccagaagtaacacatacagaaaatggaaaagaaatttttaaaaattttttattttctatatgtaaaatgaaaaaaaaatggcgagcagcctctgaagcaaatagattaattaatgatataagaaaaactgttaaaaaagataaagtaatttgcgcattatcaggaggcgtagatagtagcgtggttgctttattggttaataaagcgattaaaaagaaccttatttgtataatggtcgatacaggattaatgagaaagaacgaattcaaagactcatattatatatttaaaaaaaagcataagctaaatgtaaaattaattaatgcctctaaattgttcttaaaaaaactaaaaaatattcataatccagaaaagaaaagaaaaataataggaaatttatttatcaaaatttttgaaaaagagtctaaaaaatataaatctataaaataccttgctcaaggaactctttatcccgatattatagaaagcagatctgcaacaggaagccaatcttctaaaattaaatctcaccataatgtgggtggattaccaaaaaagatgaatctaaagttaatagagccacttaaagaattttttaaagatgaagttagagttttgggaaaatcattaggattaaaagatattataagaaataaacatccttttccaggcccgggattagcaattagaatcatagggaatatcacacctcaaaaaataagagtacttcaagaagctgaccatatttacattaatgaactaattaagcacggtctttataaaaagatttggcaagcttatgcaggattattatctatgaaaactgttggagtaatgggagatttcagaacttatgaatatacctgcttgttgaggg

SEQ ID NO: 317446 - DNA, 447 bp, Unknown
  Bacterial polypeptide expressing nucleotide sequence isolated from the Sargasso Sea
aactttttaaggatgaagtccgaaaagtgggagctgctttaggtttgccggatgaaattataaaaaggcatccattcccaggaccaggattagctataagaattttgggagaggtgaataatgaaaaacttgattgtttaagagatgcagactggatagtaagagatgaaattaaaaaagcagatctttacaatgatatttggcaagcttttgcggtattgctaccagtaaaaacagtaggagttatgggagataaaaggacttatgcctggccaatagttttgcgttgtgtatctagtgaagatggtatgactgcagattggtcaaaaattccttttcagattttggagaggattgcaaatagaatcgtaaacgaagtaagttcagttaatagagttgtttatgatattacaagcaaacctcctggaaccatcgagtgggagtaag

SEQ ID NO: 317447 - DNA, 713 bp, Unknown
  Bacterial polypeptide expressing nucleotide sequence isolated from the Sargasso Sea
gatatatgtaatatctcagataattggagcgctaaatattttataaataaatctattgaaaatattagaaaagagattggaaacagcaaagttatatgcggaatctcaggtggtgttgactcaagtataactgccactttaattcataaagccataggaaataatttgacgtctatatttgttgacaatgggttactaagaaaaggtgaatcagaagatgtaatgaattttcttcaaaaaggacttgggctaaacatcgttaaagtaaatgcaagtgaaaattttctatataaattaaggaacattattgacccagaagaaaagagaaaaataataggcaaagaattcattaatgtttttgaaaaagaagcaaaaaaaatcaaaaatgtaaaatacttagctcaaggtactctttattctgatgtagttgaatctgcggtcataaaatctgggcatcaagcagttattaagagccatcataacgtaggaggacttcctgacaaaatgaagctaaaacttatcgaacctcttaggttgcattttaaggatgaggttagagaaattggttatgaattaggaatcaacaaagaaataattgaaagacacccttttccaggaccaggattagctataagaataatgggtgaaataacagaagaaaaattaaatatattaagagaagctgatcatatttttatagatgaaattaagaa

SEQ ID NO: 317448 - DNA, 870 bp, Unknown
  Bacterial polypeptide expressing nucleotide sequence isolated from the Sargasso Sea
tataattttaacgccactagaagttaaaaaaataaaagattttaataatattaaaggaattattctttcaggcggaccatcatctgtaacaaatatcaaatatcagacaatacctaggcaaatttttaaaagaaaaattccagtacttggaatatgttatggattgcaacttatatctaaggtttttggtggaaaagtaaaatcatcaaaaaaaaaaagagaatttggaagagcatttatttttaaaaaaaaaaaatctcttttaacaaaaaatttttttaaaacaaaaatctctgtttggatgagtcatgaggacgctgtagtaagattaccaaaaaattttaaaaacattgcttatactcgtaattctagattaactattattgaaaatactcaagaaaaaatttatggtgttcaatttcatccagaagtaactcacacagataatggcaaaataatatttaaaaattttttattttcaatttgtaaaatcaaaaaaaattggaatcttacttctcaaaaaataaaactaataaaagaagtaaaaaaaatagttaaaaataaaaaagttttatgtgcgttatctggtggagtggatagtagtgtggttgcacttttaattaataaggcaattaaaaaaagattaatttgtataatggttgatacgggtttaatgagaaaaaatgaatttaagtatacttataaaatttttaagaataagtacaaattaaacgtaaaattattaaatgtatcaaacaaattctttaaaggtctgaaaaatgtgataaatcctgaaaagaaaagaaaaattatagggaaattatttattaaagtttttgaaaaagagtctaaaaagtataaaaatttaga

SEQ ID NO: 317449 - DNA, 826 bp, Unknown
  Bacterial polypeptide expressing nucleotide sequence isolated from the Sargasso Sea
attaagttaccaaaaaattttataaatattgcttctacaaataattccaaatttacagctattcaacataaaacaaaaaaaatttatggcattcaatttcatcctgaagttactcacactgaaaaaggaaaagaaattttgaataattttgtttataaaatctgtaaaatcaaaaaaaattggttgttaagtatagaaaaaaatagaattattaaagatttaaaagataaaattaaaaatgaaaaggttatatgtgctctttctggaggcgttgatagcagtgtagtagcagttttgattaataatgcaattaaaaaaaatctcaaatgtataatggttgataatggtttattaagaaaaaatgaatttaaatcttcatataaactttttaaaaaaaaatataaaatgaatgtaaaattgataaatgcaaaaaaaattttttatagaaaacttaaaaatatatctgatcctgaaaaaaaaagaaaaattataggaaatcagtttattaaaatatttgaaaaagaagctagaaaattcaagcaagtaaaatacctagcacaaggaactttatatcccgacattatcgaaagtaaatcttctactgggagcaaaacctccaaaatcaaatctcaccacaatgtaggaggtttaccaaagaaaatgaagttaagacttgtagagccactaaaagaattatttaaagatgaagtgaggagtttgggaaaaagtttagggttagataattctattttacaaaaacatccttttccaggaccgggattggcaatcagaatagtaggcacaattacagaaaaaaaaattaaaa

SEQ ID NO: 317450 - DNA, 928 bp, Unknown
  Bacterial polypeptide expressing nucleotide sequence isolated from the Sargasso Sea
gatgacggtaattaaaaattttgtttataaaatttcttgttgtgcggctgattggacaaccgaaacctacatagaggaaactattcccaggataagagagcaagttggcaataaaaaagttttgcttgccttatctggaggagttgattcctcaactcttgcttttcttctcaataaagctattggaaatcagcttacatgcatgtttatagaccaaggtttcatgagaaaaggtgaaccagaatttttaatgaatttttttgataagaaatttcatataaaagttgaatatattaatgcaagggaaaggtttattgccaaattgaaaggtattactgatccagaacaaaaaagaaaaattataggtgaagaatttattagagtatttgaggaagaaagcaatagattgggaccttttcagtatttagcccaaggtactctttatcctgatgttatcgaaagtgctgggactaatattgatcctaaaacaggagaaagaatagcagtaaaaataaagagtcatcataatgtgggtggattgccaaaagatttacaatttaaattagttgagccattaagaaaactttttaaggatgaagtccgaaaagtgggagctgctttaggtttgccggatgaaatcataaaaaggcatccatttccaggaccaggattagctataagaattttgggagaggtgaataatgaaaaacttgattgtttaagagatgcagactggatagtaagagacgaaattaaaaaagcaggtctttataatgatatttggcaagcttttgcagtattgttaccggttaaaactgtaggagttatgggtgataaaagaacttatgcatggccaatagttttacgctgtgtatctagtgaagatggtatgacagccgattggtcaaaaattccttttcagattttg

SEQ ID NO: 317451 - DNA, 578 bp, Unknown
  Bacterial polypeptide expressing nucleotide sequence isolated from the Sargasso Sea
aggaacactttatcctgacttaattgaaagtaaatcagtaactggaagtcaaacttcaaaaataaaatcccatcacaatgttgggggccttccaaaaaaaatgaaattaaagttagtagaaccattaaaatttttatttaaggatgaagttagaaaacttggtttagaattaaacttaagtaaagaaattatttctcgtcatccatttccaggcccaggcttagcaattagaatgccaggagttattacttctgaaaaaatcaaaattttaaaagaagcagattattattttattaaagcattgaaggaacatggtctttatcataaaatttggcaggcttatgcagctttacttccagtaaaaactgtaggagtaatgggtgataatcgaacttatgaatatttgtgtttactaagagctataacttctgaggacggtatgactgcagatttttttgaatttaaaaaatcattttctcaaatgatttcaaataaaattgtaaatagcattaggggaattaatagagtagtctatgatattacttcaaaacctccaagtactattgaattagaataaa

SEQ ID NO: 317452 - DNA, 898 bp, Unknown
  Bacterial polypeptide expressing nucleotide sequence isolated from the Sargasso Sea
aatcgtaaagagaaaattattattatagattttggatctcaagttacgaagttaattgcaagaagaataagagatcttggtgttttttcagaaataataactattaaagatttgtataaagtaaaagattttagtgaaataaagggaattattttatctggtggtccgtcaactgttacaaaaaaaaattttttaaaaatacctaaaaaaattcttctaaagaaaattccgatcctaggaatttgctatggacttcaattaatagctaaattgtttggaggaaccattaagtcattaaaaaaacaaagagaatttggtagagctagtttagtaaaaagacaaaattcagttttgattaaaaacttctttaaaggaaaaaagagcttagtgtggatgagtcaccaagatgcagtaaccaaattaccaaaaaattttaagatcatagcttcaactaaagagtcgaaattaacaatcatagaaaatactaaaaacaaaatttatggtatccaatttcatccagaggttacccatactcaaaatggaaaggagatatttaagaatttcttattttcaatttgcaatataaaaaaaaggtggcatgtatttaatgaaaaaaaaagattaatagaggaaatcaaaacaatagtaaaaaaagataaagtaatttgcgcgctttcaggaggagtagacagcagtgttgtcgctttattggttcataaagctataaaaacaagattagtttgtattatggttgacactggattaatgagaaaaaatgaatttaaacattcttacaatttatttaaaaaaaaatataaattaaatgtaaagctaattaatgcttcaaaattatattttaaaaatttaaaaaacatatctaatccggaaaaaaaaagaa

SEQ ID NO: 317453 - DNA, 373 bp, Unknown
  Bacterial polypeptide expressing nucleotide sequence isolated from the Sargasso Sea
cgtgcgcattctgggcgaggtgaagaaggactacgccgacctgctgcgccgcgccgacgcgatcttcatcgaagagctgcgcaacttccgtgatgaggccaccggcaagacctggtacgacctgaccagccaggccttcaccgtcttcctgccggtcaagagcgtgggcgtgatgggcgacggccgcacctacgactacgtggtcgccctgcgcgccgtgcagaccagcgacttcatgaccgccgactgggccgagctgccttacgcgctgctcaaaaaggtttcgggccgcatcatcaacgaagtgcgtggcatcaaccgagtgacatatgacgtgagcagcaagccaccagcgacgatcgagtgggagtga

SEQ ID NO: 317454 - DNA, 872 bp, Unknown
  Bacterial polypeptide expressing nucleotide sequence isolated from the Sargasso Sea
aggtgtcgattcttctgtcactgctgcacttttacataaagctattggtaaaaaattagtatgtgtttttgttgataatggacttttaagaaagggagaagcagagcaagtaatgcaaacatttaaagaaaatatgcaattaaatgtagttaaatctgatagtcaagacactttcctgagacatttaaaagaaattgaagatcctgaacagaaaagaaaaattattggaagaacttttattgatgtttttgatgctgaagcaatgaagctcaaagacataagatttttagcacaaggaacaatttatcctgatgtcatagagtcttcaggctcagagtcaaaagaagctcgagtgattaaatctcatcataatgttgggggtcttccagatgatatgaagctagatttggtagagccattaagagatttatttaaggatgaagtaagaaaaatgggaattgagcttggaatacctaaagagatgatagaaaggcatccttttcctggtccaggtttgggagtaaggatacttggcgaagttactaaagaaaaaaccaaaattcttcaaaatgctgatcatatttttatcgaagaattaattagagctgatttgtataactcagttagtcaagcctttgcagttttgttgcctgtaaaatctgtgggtgtagttggtgatgaaagaagatatgcagaggttattgcattaagagctgttgaaacagtagatttcatgacagctagatgggcgcaactaccatacgagtttctagaacatgtttcaaatagaattgttaatgaaattgaggcagtaagcagagttgtttatgatatatctagcaaaccaccagcaactattgagtgggagtaat

SEQ ID NO: 317455 - DNA, 918 bp, Unknown
  Bacterial polypeptide expressing nucleotide sequence isolated from the Sargasso Sea
catgggagataaagtagaaacattaccaaacgattttaaattaattgcttccacagaatcggcccccatagctgcaatggaacattcttcaaaacctatttacgcacttcagttccatccagaagttactcatacaaaaggtggcaagctaattttagataattttatctttgaaatttgctcatgcaaaccagattggaagcttgatgatctaatttctagcaggattcaagaaattaaagatataacaaatggagaaaaagtacttcttgggctatctggaggtgttgattcttcagtaacagccgcacttttatctaaagcaataggagaaaatcttgtgtgcgtttttgttgataacggactattaagaaaaaatgaagcagaggaggtagttcaaacattcaaaaatgaaatggatctaaatcttattaaaattgatgcacaaaaaatatttttaagacatttaaatggcatagaggacccagaacagaaaagaaaaattatcggtagaactttcatcgatgtttttgatgctgaggctgcaaagcttgagaacatagactttttagcacaaggaacaatttatccagatgtaattgagtcctcagaatctgaatcaaaggaagccagagttattaagtctcatcataatgttgggggcttacctgaggagatgaagctcaaacttgttgaacctttaagagatctttttaaagatgaagtcagaagattaggttcccaattagatttgcctgagataatcttaaatagacatccttttccaggtcctggtttaggtgtgagaattcttggagcagtaaatgaaaagaagataaagattcttcaagaagcagattttatttttatagaagagctcagaaaagctaacctgtatgactcagtcagccaagcatt

SEQ ID NO: 317456 - DNA, 553 bp, Unknown
  Bacterial polypeptide expressing nucleotide sequence isolated from the Sargasso Sea
gagtcagcaggatccaaaacaggaaaagctcatgtaattaagtcacatcataacgttggcggtctccctgaggatatgaaattaaaactggtagagccactcagggatttattcaaagacgaggtaagaaaaattggcaaagaacttggactgacgtcaaagttggttgatcgacatcctttcccaggtcctggcttgggagtgagaatcttaggagaagttaaaaaagagtacgctgatctattgaggttggccgacgatatttttattgaggaactacataaagagaatctatacgacaaagtaagtcaggcatttgcagtttttctaccagtcaaatctgttggcgtcatgggcgatgggagaaaatatgaatatgtcattgctttaagagcagtggagacaactgattttatgacggcaaattcggctaaattgccttatgaatttttggatcatgtatcaacacgaatcatcaatgaagtctctggtatttcaagagtcacgttagatatatcctcaaaaccaccatcaactattgagtgggaatgaa

SEQ ID NO: 317457 - DNA, 868 bp, Unknown
  Bacterial polypeptide expressing nucleotide sequence isolated from the Sargasso Sea
aaaaaaaacagtcaagtttggatgtcacatggtgatcatattgaaaaagtgcctagcaagttcattataacttcattatctaatgatagaataatagcttctattgaagataaaaaatgcaaaatatacggattacaatttcatcctgaagtatatcattctttagaaggaaaaaaaatattatcaaattttttacttaaaatttgtaaaattaaaaaaaaatttaaacttgatgattttcttaaaaataaaattaatgaacttaaaaatgttttaaaaaataaaaaagtaatttgtggtctttcaggcggggttgactcaactgtcacttcatttttgctgcacaaagctataaaaaataatttatactgtatttttattgatcatggtttattaagatttaatgagtccaatgaagtagtatctattttcaaaaaaaaatttggaaaaaatttcataagaattgatgcttctagtatttttttatcaaatctaaaaaatataaaagacccagaaaagaaaagaaaaattattggaaaaacatttattaaagtatttgaaaaagaggcaaaaaaaataaaaaaagttgaatatttagcccaaggaactttatatcctgatattatagagagcatacccttctttggaggtccaactgctaaaattaaaagtcatcataatgttggaggtctgcctaaaaaaatgaatttaaaaataatagaacctttaaaagagttatttaaagatgaggttagatttttaggaaaaaaacttaaaattaattcagaattactaaacagacatccatttcccggccctggactttcaattcgtattccaggtgtaatcgataaaaaaaaaataaata

SEQ ID NO: 317458 - DNA, 493 bp, Unknown
  Bacterial polypeptide expressing nucleotide sequence isolated from the Sargasso Sea
aatgagtaaaaataagtttatagaaaaaataataatcattgattatggctctcaatttactcaacttatagcaagaaaaattagagaacttggcgtttattctgaaattattaatttcaatcaaataaaaaatttaaaaaaaaatcatttgatcaaaggtattattttatctggaggtccattaactataacaaacaaaaactcctcttcattaaacaactatataataaagttaaacattcctattcttggtatttgctatggccaccaaatcttggcaaaaaaatttggtggtaaagtaaaaatatcaaaaaaaagagaatttggtcacgctattgttaaaagtagatccaaaagtactatcacaaaaagcttctttaaaaaaaagaacaacacagtatggatgagtcatcaggatattgtatctaaactgcctaatggttttaaaaaggttgcttcaagtaataattctaaatatgcaattattgcaaat

SEQ ID NO: 317459 - DNA, 859 bp, Unknown
  Bacterial polypeptide expressing nucleotide sequence isolated from the Sargasso Sea
aaaaatattaaattcagaaactacagttcattttttttggaggcattagaaggtcagtttaaccctcagattaaaagacaaattattggatcaacttttataagaatgcgtgagaaattcctgaatgaactgaacctagacccacaagattggatgcttgggcaagggactctttatcctgatattattgaatctggaggcactgaaaatgctgaaattataaaatttcaccacaatcgtgtacaggaagttttagatctagaaagtgcaggtcatgtagttgaaccgctcaaagacctttataaagatgaggtcaggcaggtaggaactttattaggactgcctgaatcgattgtatggagacatccttttcctggacctggactagcaattaatattttgtgttcccgaggcaatgaatcatttcctcaaataaaaaaaactataaaagaagttgaaaattgccttcaagattgtgaatgcgaacacttgattctgccagtgagatcagtaggagttcaaggagataaaagaacatatacttctcctgttttgcttttaaatgctaagcgagattggaactggctcgaaagtaaggccactcaaatagtaaatgaagttagaacagttaatagggtagtatttttgttaggatcaaacacaaatttctccgatgacaaatttaatttacataaagcattttgcaacaaagatcgacttgatttgctcagagaggctgattacagaacaacaaaaattttgaaaaaacacgaatcgatgcaaagaatttttcaacttttggtaatattgctgcctatttcaaaaaatgggaaagaagaaagtttggttcttcgtcctg

SEQ ID NO: 317460 - DNA, 700 bp, Unknown
  Bacterial polypeptide expressing nucleotide sequence isolated from the Sargasso Sea
acaatttctttcaaaattaaaaggaataacagatccggaacaaaaaagaaaaattgttggagaagaatttattcaagtattcactgaatttgcaaaacaaaaggggccattcaaatggttagcacaaggtacgctttatccagatgtaattgaaagtggtgtatcaaaaggtcctgcagttgtaataaaatctcatcacaatgtaggaggattaccagaatggttgaatctgaaaatcttagaaccgttaagagaattgtataaagatgaagtaagagatgttgctagaattttgggtgtgccagaaaaattactaaagagacacccatttcctggaccaggattgtcagtacgaattatgggagaaattactccttcaaaattagcaatttgtagaaaagcaagtaaaattgttgaagaagaattgtgggatgcaggagtttatgataaggtatggcaagcctatgcagctgtaggagatgacaaggcggttggagtcgttggagatgaacgtaagtatggaagaattgtcacagtcagggttgtagattcaattgatgcaatgaccgctgactggactagacttccaaatggtgttttagagaaaatcagtaaccgaattactaatgagattgatgaagtaacatgggtttcttacgtaatttcaagtaaacctccagcaactattgaacctcaataa

SEQ ID NO: 317461 - DNA, 256 bp, Unknown
  Bacterial polypeptide expressing nucleotide sequence isolated from the Sargasso Sea
aatgatatttggcaagctttcgctgttttattacctgtcaaaactgtaggagttatgggagataaaagaacttatgcatggcccattgttttacgttgtgtttctagtgaagacggtatgactgcagactggtcaaaaattccttttcatattttagagagaatttctaataggattgtaaatgaagttgattcaattaatagagttgtttatgatattacgagcaaacctccagggactattgagtgggaataat

SEQ ID NO: 317462 - DNA, 895 bp, Unknown
  Bacterial polypeptide expressing nucleotide sequence isolated from the Sargasso Sea
tatggcccagctaatttattaattgataataattttgatttatttgaaggcttatggttagaaatgtccgtttggatgagtcatggtgactcagttattagaatgccagaaggttttcaacgaattggacatacagaaacctgtgatattgcagcaatgagtcatactaaacgtaaaattttcgggttacaatttcatccagaagtagctcatacaccaaaaggtaaagaaattttacaaaactttgtatttaatgcatgtggttgcaaagaaaattggacaccaacatcatttatcaaatcatcaattattgatataaataataaggtcaaaaacgaaaaagtcttatgtgcattatcaggtggagttgattcaaccgtagtagctgcattattaaaaaaggcaataggaaatagattaacgtgtatgtttatcgatcaaggatatatgagaaaagatgaaggccaacgcattaaaaaagtttttgctgaagaatttaatattaacttaatttatgtagatgcttcaaaacgctttgtagaaaaattaaaaggaatttcagatcctgaaacaaaaagaaaaaaaattggtgaagaattcatcagagtttttgaagaagaaagcaaaaagatttctggagaggtaaagtttttagctcaaggaacattatatccagacgttattgaatctgcagttggagatgtctctgaaacagcggtaacaattaaaagtcatcataatgttggtggtttaccagaagatattgatttcgaaatcattgaaccattacgattattatttaaagatgaagtaagaaaagttggaacagagctaggtttaccagacgaattagttcacagacacccgtttccaggtcctggtttagctattcgaa

SEQ ID NO: 317463 - DNA, 951 bp, Unknown
  Bacterial polypeptide expressing nucleotide sequence isolated from the Sargasso Sea
aagtatggatgagccatggcgatcgtgtagaagccctaccagatggatttaaacagatagcctcttcgaataatgctcccattgctggcatggcagatgtgcagaaccagatttatggtgtccagtttcaccctgaagtaactcatacagagaatggacaattaatcattgagcgctttgtgcatgaaatatgtggttgtccaggttattggacaccaaaaaatatcatcaatgaacatattgagcgtgtgcgtgacaaagtcggtacagaacatgttttgctaggtctttcaggaggcgtagattcatcagtagttgctgcgctgttacatgcagcaattggggatcaactgatctgtgtatttgtggataacggtctcttacgtttgaatgagggagatcaagttatggagacatttgctgagcatctaggtgtaaacgttatccgcgtcaatgcagaggataagtttctttcggctcttgatggtgaggaagaccctgagaaaaagagaaaaattattgggcgaaactttattgaggtatttgaggagcaggcaagtatcctgaatgatattcagtggcttgctcagggaactatctatcctgatgtcattgagtctgctggcgcatcgactggaaaggctcatgttattaagtcgcaccataatgtgggtgggttgccagagacaatgcacctgaaactaattgaacctcttcgtgatttgtttaaggatgaggtgagaaaaattggtgttgaacttggactttctcatcagctggttgaccgtcacccttttccaggtcctggtttaggagttcgtattcttggttcagttaaaaaggaatatgcggaccttttacgtagggcagacgatatttttataagcgaacttcgtgagcaaggcttgtacgataaggtaagtcaggcatttgccgttttttaccgataaa

SEQ ID NO: 317464 - DNA, 478 bp, Unknown
  Bacterial polypeptide expressing nucleotide sequence isolated from the Sargasso Sea
aatgtcacctcaaaaaaaggataagattttaattatagacttcggatctcaggtgacaaaattaattgcacgaagggttagagaattaggagtatactctgaagtaattacaccaaaagagctatctttcataaaagattacaaaagtattaaaggcatagtattatctggaggcccctctacagttactaaaaaaaaatttcagacaatacccaaaaaaattttgtttaaaggaattcctattcttggaatttgttacggtttacaattgatagctaaactttttggaggcaaaattaaatcctcatttaaaaaaagagaatttggacgagcttttattttaaaaaaaaaaaaatctgatctaattaaaaatttttttaaaaaaaaagagaaagcagtttggatgagccaccaggacgcggtagttaagttacctaaaggttttaaagcaatagcttcgactagcgagtcaaaatta

SEQ ID NO: 317465 - DNA, 353 bp, Unknown
  Bacterial polypeptide expressing nucleotide sequence isolated from the Sargasso Sea
aatgaatgacattgataaagaaaaaattattgtcgtagactttgggtctcaagtaactaaattaatcgcgagaagagtcagagaattaggtgttttttctgaagttttgacattaaatcaactaaagaaaattaagtcatttgaaaaaattaagggaataattttatctggaggccctgcaactgtaactaaaaagtcttctccaaaaattccaatgtatatcttctcaaaaaatattcctattctaggaatttgttatggtttacaactaatagcaaaaagttttgggggaaaagttaaatttgggaataaaaaaagagaattcggaagagctattttgaaaaagaataaaa

SEQ ID NO: 317466 - DNA, 810 bp, Unknown
  Bacterial polypeptide expressing nucleotide sequence isolated from the Sargasso Sea
ttctggtggagtagattcatcaactcttgcctttcttctcaataaagctattggtaatcagcttacatgtatgtttatagatcaaggttttatgagaaaaggtgaacctgaattcttaatggaattttttgacaaaaaatttaatataaaggttgaatatatcaatgctagggaaagatttattcacaaattaaatggagtaatagatccagaacaaaaacgtaagattattggaggagaattcattagagtgtttgaagaagagagtaacagattaggtccttttcaatatttggctcaagggactctctaccctgatgttattgaaagtgctggaactaatttagatccgaagaccggtgagcgaattgcagtaaaaataaaaagtcatcataatgtaggtggtttgccaaaagacctgcaatttaaattagttgagccattaagaaaactgtttaaggatgaagttagaaaacttggaaaggcacttggattacctgatgaaatcattaagagacatccatttccaggccctggcttggcaataagaattttaggtgaagtttctaatgaaaaattaaactgtttgagacatgcagactggatagtcagagatgaaataaaaaaagcaggtctttataataatatttggcaggcatttgctgtccttctacctgtaaaaactgttggggtaatgggcgataaaagaacttatgcttggccaattgttttacgatgtatctcaagtgaagatggcatgacagcagattggtcaagaattccttatgaaaccttagagaggatttctaa

SEQ ID NO: 317467 - DNA, 689 bp, Unknown
  Bacterial polypeptide expressing nucleotide sequence isolated from the Sargasso Sea
gctgaaaggtgttaatgacccagaggaaaagagaaaaataattggtagaacgtttatagaagtttttgaggacgaggcttcaaagttagaaaatgtgaaatggttggctcaaggaactatctatccagatgttattgagtctgcaggatcaaagaccggtaaggcgcatgtaatcaagtcgcatcataatgtcggaggactccctgaagacatgaagttaaagctgatcgaaccgctcagagatctatttaaagacgaggtgagaaaaattggtaaagagcttggtttaaactcaaagttggttgatcgacatccatttccaggacctggtctaggagtcagaatcttgggagcagttaaaaaagagtatgccgatttattgagattggctgatgatatttttatagaagaattacataaagagaatctatacgataaagtaagtcaggcgtttgcagtttttcttccagtaaaatctgtaggcgtcatgggtgatggaagaaaatatgaatatgtcattgctttaagggcagtagagacaaccgattttatgactgcaaattcagctaaattgccatacgaatttctagatcatgtatcaacacgaatcatcaatgaagtcccaggaatatcgagagttactttagatatatcctcaaaaccgccttcaactattgagtgggaataaa

SEQ ID NO: 317468 - DNA, 850 bp, Unknown
  Bacterial polypeptide expressing nucleotide sequence isolated from the Sargasso Sea
cttggttctagatttcggatctcaatatacccagttaatcgctagacgagtaagagaacttgatgtttattctgaaattcttccttgggatattgatgaagaaaaaataagtaaaattaatcctataggagtcattctttctggaggccctaattcggttacaaaaagctttaccccaagggtgccacaaaaaatctttgacttaaacgttccaatattaggcatttgttacggaatgcaaactttagcagagcaaatgggaggaaatgtcatatctgcagataaaaaagagtttggtcatgttgaactagaaattgttgcagattcaaaattatttaggaacttaaatagtaaaataaatgtatggatgagtcatggtgatcaagttcaagatttaccagatgattatgaattgacagcattgacctccacagcaccaattgctgcaatgcaacataaaaagttaccgatttatgctattcaatttcacccagaggttacacatactgaaaatggaatgacattattaagtaattttatttttgatgaatgtggagcgaacaatgattggaaaatggatgatctaatttcttcaagagttgaagaaataaagcaaaaggtaggaaataataaggttttacttggcttatctggaggagttgattcttctgtcacagccgctcttttaaatgaggctattggaaagaaattaacatgcgtctttgttgacaatggattactaagaaaaggtgaaaatcatcaagtaatgcaaacctttaaagaaaatatgaatcttaatgttatcaagtctgatagccaagacattttttttagacatcttgaaaatatt

SEQ ID NO: 317469 - DNA, 856 bp, Unknown
  Bacterial polypeptide expressing nucleotide sequence isolated from the Sargasso Sea
agaaagtctcaagacagaattaacaggtaaagcaataattgcggcctctggaggagttgattcaactgtcgcagcagttttagctgccaaagctgtaggagataatctccttgcgatttatgttgacacaggatatatgcgtcttgatgaatctaagtttgtttcttctatgttagaagacctaggtgttcagcataaagtaattgatgcatctgagcgattctatgaagggctaaagggtgttattgatccagaggaaaagcgtaaaattattggagaattattcataagagtctttgaggaagaatcgaagaaatatggtggtaaatttttagttcaaggaacaattgcacccgattggattgaatctggcggtggaatacgtgatacgatcaaatcccaccataatgtcggagggttgcctgatgatatggaaatggaattgtgtgagccaatacgtgagctctacaaagatgaggtgagaagtttagcagagtatctgaaagtatcagtggctcaaagacaacctttcccaggtccaggtttagcagttagagtaatgggagaagcaactccaaagaggacagaaatagttagacaagcttgtcatattgttgaagatgaattagagttagcagctagtgaaggaaaaatggaattaccttggcaatattttgcagtaattttacccgtgaaaacagtaggcgttcagggagatgttagagcttatggcaatactattgcagttcgtgccgttcaaagttatgatgcaatgacagcacaagccttagagattccctatccagttctaaagaaaatatcagaaagaatcactcgtgaattgaagtcggaaagt

SEQ ID NO: 317470 - DNA, 388 bp, Unknown
  Bacterial polypeptide expressing nucleotide sequence isolated from the Sargasso Sea
ggtctacagacatccatttcctggaccagggttgggtgtccgtgtttttggggaggttctacctgagtacgtaaaacttcttcagttggctgatgatatatttataaatgaactgattgaaaatgatttgtacaactcaacaagtcaggcatttgcagtatttcttcctgtgaaatcagttggtgtgatgggtgatggcagaagatatgattatgttgttgctctaagagcggttgaaacagtagattttatgactgctagatgggcacggcttccttatgaatttttagagagagtctcgttaagaatcattaatgaagtagagggaatatccagagtaacctatgatatatcaggaaaacctccatcaactattgagtgggagtga

SEQ ID NO: 317471 - DNA, 712 bp, Unknown
  Bacterial polypeptide expressing nucleotide sequence isolated from the Sargasso Sea
atgagtcattctgaccaagttacaaaattacctcaaagttttgaaactatagcatcgagtaccaattcaaagttttgcatcattcaaaataaatcaaaacatttttatggaatacaatttcacccagaggtaacacatacaaaaaatggtataagaattataaaaaattttttattttccatatgcaaagcaaaaaaaaattggtctccaaaaaaacaaaaagataaaataattgaggaaattaaattacaagtaggcagttcaaaagttatatgtgctttatctggtggcgtagacagtagtgtagtagctaaaataattcataaagcaattggcaaaaatttaatttgtatttttgttaacacaggacttttaagaaaaaatgaggaaaaacaagtcattcaaacattcaaaaagagactgaaaatgaaacttatatatattaatgccaaagatattttcattaaaaaattaaaattaattaatgatcctgaaaaaaaaagaaaaataattggaaatttatttataaaaatttttgaaaaatactccaaaacagtctctaaagttaaatttttggctcaaggaacattatacccagacttaattgaaagtagatcagtgaccggaagtcaaacctcaaaaataaagtcccatcataatgttgggggtcttcccaaaaaaatgaaactaaaattggtagagccagtaaagt

SEQ ID NO: 317472 - DNA, 289 bp, Unknown
  Bacterial polypeptide expressing nucleotide sequence isolated from the Sargasso Sea
aatgagtcttgaaaggagtttagataaaatcttaataatagattttggatcacaatttacccaattaattgcaagaaggataagagaactcggtgtattttcagcaattgtcagtcacaaaaagattaaagtcaaagatattaataattcaattaaaggaattattttatcaggaggtccacttaatgtttatgaaataaataaatattcttttgacaaaaaaatattggaaaagggacttcctgtattgggtatttgctttggtcatcaaataatttcaaaaataaat

SEQ ID NO: 317473 - DNA, 791 bp, Unknown
  Bacterial polypeptide expressing nucleotide sequence isolated from the Sargasso Sea
tggaggagttgacagtatggtgaccgcagcaataatttcaaaagcaattaacaagcaattaacatgtatttatgtcgatactggcttaatgaggttgaatgaaactgaggaagtccaaaatttgttcaaaaagcattttaaatcaaagcttattacagttaatgctaagaatagattcttcacttcccttaaaggagtatctgatccagaaaaaaaacgtaaaattattggcaatttgtttattaaaatttttaacgctgagtctagcaagatctctaaagcaaaatttttagctcaaggcacgatctacccagacataatagagagtcaaagttttcatggggggccaacttcagtaatcaagtcacatcacaatgttggaggcctgcctaaagaaatgaaactgggacttgtcgaacctttacaagaattgtttaaggatgaagttcgtaaactcggtaaagagctaaaattacctaaagaatttattcaaagacatccattcccaggtcctggattaggaattcgagtattaagtgacattacaatagataaagtgcgaatgttacaacatgcagataaaatttatattgatgagattaaagcagccaatttatacaatgaaatctggcaagcttttgcagttttattacctgttcgaactgttggcgtaatgggtgatcaaaggtcatacgagtttgtttgtggcttgagagctgtaacttctgtagatggcatgacggctgatttttatcctttcagtggtgaatttttaagcaaggtatcaacta

SEQ ID NO: 317474 - DNA, 423 bp, Unknown
  Bacterial polypeptide expressing nucleotide sequence isolated from the Sargasso Sea
atgtgggagcagctttaggtttgccggatgaaattataaagaggcatccattcccaggaccaggattagctataagaatcttgggcgaggtgaataatgaaaaacttgattgcttaagagatgcggactggatagtaagagacgaaattaaaaaagcaggtctttacaatgatatttggcaagcttttgcagtattgttacctgtaaaaactgtaggagttatgggtgataaaaggacttatgcatggccaatagttttacgttgtgtatctagtgaagatggtatgacagctgattggtcaaaaattccttttcagattttggagaggattgcaaatagaatcgtaaatgaagtaatttcagttaatagagttgtttatgatattacaagcaaacctcctggaactattgagtgggaataaa

SEQ ID NO: 317475 - DNA, 586 bp, Unknown
  Bacterial polypeptide expressing nucleotide sequence isolated from the Sargasso Sea
tttagctcaaggaactctttatccggatgttattgagagcgtttcttttacgggcggaccatctgtgacaattaaaagccatcacaatgtaggagggcttccagaacgaatgaatatggagctagttgagcctttgcgagaactttttaaagatgaggtcagagaactcggaaaagaactaggaattcccagtcactttattgagagacacccattcccaggtcctggacttgcaattcgtttacctggtgaaatttcttctgaaaaagccgatattttaaggaaagctgacactatttatattgaagagataagaaaagccggactttataatgaaatttggcaagcttttgctgtacttttacctgttcagacggttggtgtgatgggagacgagagaacatatgattttgtttgtgctttaagggctgtgacttcacttgatggtatgacagcggattattatccttttgaacaagagttcttagctaatgtaagtactcgtattattaatgaagtaaaaggaattaatagagtggtttacgatataacatcaaaaccacccggcactattgagtgggagtaa

SEQ ID NO: 317476 - DNA, 796 bp, Unknown
  Bacterial polypeptide expressing nucleotide sequence isolated from the Sargasso Sea
atgaccaacatccataacgacaagatcctgatcctcgatttcggcgcgcagtacacgcagctgatcgcccgccgcatccgcgagctgggcgtctactgcgaaatctgggcgtgggaccacaacccggccgagatcgccggctttggcgccaagggcatcatcctgtccggtggcccggaatcgaccacgctgccgggcgccccggccgcgccgcaggaagtgttcgacagcggcctgccgatcttcggcatctgctacggcatgcagaccctggccgcgcagttgggtggtgccaccgaagccgctgaccagcgcgaattcggccacgccgaagtgaacgtgatcaacccggatgcgctgttcaagggcctgagcgaccacggcggcgagccgaagctgaatgtctggatgagccacggcgaccacgtctccgttgcgccgccgggcttcaccataaccgccaccaccgaccgcattccggtggccgccatggccaacgaagaaaagcgctggtacggcgtgcaattccacccggaagtgacccacaccctgcagggccaggcgctgctgcgccgcttcgtggtggacgtgtgcggctgccagaccctgtggaccgccgccaacatcatcgacgaccagattgcccgcgtaagagatcaagtgggcgatgacgaagtgatcctgggcctgtccggcggcgtcgattcgtccgtcgttgctgcgctgctgcacaaggccatcggcgagaagctgacctgcgtgttcgtggataccggcctgctgcgctggcaggaag

SEQ ID NO: 317477 - DNA, 889 bp, Unknown
  Bacterial polypeptide expressing nucleotide sequence isolated from the Sargasso Sea
ttaaatgtttatgaggataaaaaaataaattttaataaaaaaattttaaacctaaaggttccaattttaggtgtttgctttggccatcagctaatttcaaaacattatggtggcaaagttataacagcaaaaaatagagagtttggcctggctattattaaaaaaagatcaaactctaaattaaccaaaaatttttttaataacctcaaacaaaggaatgtatggatgagccatgcggatcatgttaccagactaccaaaaggtttcaaagcaacagcatcaacaaagggttcaaaatttacaataattgaaaatgatgtaatcaagagatatggtgttcaatttcatcctgaagtaactcacacagaaaaaggaattctactactcaaaaattttgtttttggtatatgtaagtcaaaaaaaaactggtcaacagatcatcaaaagaaaacattaataaaaaatgtccaaaatcaaattggtgacaaaaaaataatctgcgcactttctgggggtgtagatagcagcgttgtagcacaattgttaaacaaagcagttggtaaacaactacactgtatatttgttaatacaggattgctaagacttaatgaagaaaaacaagtaataaatacttttaaaaaaaaactaaaaatgaatttgatatatgtaaatgcagcagatgaatttttaaaaaaattaaagaatattacagaacctgaaaaaaagagaaaaataattggaaatttatttattaaaatttttgaacgatatgcaaaaaaattaaaaaacgtaaaatttttagcccaaggaactttatatccagatttaattgaaagtaaatcggtgactggaagccaaacatctaaaattaaatcacatcataatgttg

SEQ ID NO: 317478 - DNA, 477 bp, Unknown
  Bacterial polypeptide expressing nucleotide sequence isolated from the Sargasso Sea
ttaattgcccggttatgagcccccttaaagatctatttaaagatgaagtaagaaagatagggttagagttaggattacctaaagaaattctctttaggcatccattcccaggccctggcttgggcgtaaggattttaggtgagataaaaagaccttatataaagacccttcaattagcggacgatatatttatcagtgaattaattaaagaaggttattacgacaaagtcagtcaggcctttgccgtcttccttcctgttaagtcagttggtgtagtaggggactctagaagatacgagtatgtgattaatctaagggctgtcgagacgattgattttatgaccgcaaagtcagcgaaacttcctcattctttcttagaaaaggtttctaatagaatcattaatgaaatccctgaagtttcgagggtaacttatgatatttctagtaaaccacctgctactattgagtgggagtgag

SEQ ID NO: 317479 - DNA, 842 bp, Unknown
  Bacterial polypeptide expressing nucleotide sequence isolated from the Sargasso Sea
tttggatagcggaaaaataatttttaattttgtaaataatatttgtaaatcaaaagcagaatggacaacaaaaaatattattgcacgtcaaataaatagtataaaagaaaaagtaaagactgatcatgtaatcttaggtttatcaggtggggtagattcatctgttgctgccgcaatcattcataaagcaatacaagatcaattaacatgtatttttattgataatggacttttgagactaaatgaaaaaataaaagtacaaaatagttttaagcattttaacatgaatattaaatatgttgattcatcagctatatttttagagagattgaaagggataactgatcctgaagaaaaaagaaaaattataggaaaaacattcattgatgtttttcagactgaagcaaaaaaaattaaaaatgttaagtggttagcacaaggaacaatatacccagatgttattgaatctgcagcttcatcagataatgctcacttaataaaatctcatcataacgttggtggcttgccaaaagatatggatttaaaattattagagcctcttagagaattatttaaagacgaagttaggaagttaggaattgatattggagttgaatcaagattaattaacagacatccctttccagggccaggtttggcagtacgaatattaggtgaagttaaggttgagtatgcaaatattcttagaaaagcagacgacatatttattgagatgctaaatgaaaaaaaactttataataatgtctcacaggcctttgcagtttttatgcccgtaaagtccgttggcgttacaggagacgggcgttcatatggaaatgtag

SEQ ID NO: 317480 - DNA, 685 bp, Unknown
  Bacterial polypeptide expressing nucleotide sequence isolated from the Sargasso Sea
gatcggtgttgatgatccggaggcaaagcgaaaaattattgggaatacttttattgaaatatttgatcgagaggcggaaaaattatccagcataaaatggttagctcaaggaacaatctacccggatgtaattgagtccgctggctcaaaaactggtaaagctcatgttataaaatcccatcataatgtgggaggtttacctgatgatatgaagctaagtttggtagagcctctcaaggaattgtttaaagacgaagttcgacgaattggcgttgagcttgggctagcctctgaaatggtttatcgacacccattccctggaccaggattaggggtacgaattctgggggaagttaaaaaagagttctgcgaaattttgagagaagccgacgcaatatttattgaagaattacatcggactgaatggtacaacaaggtgagccaagcctttgccgtatttttacccgttaaatcagttggtgtggtgggggatgccaggcgacactcttacgttattgcgcttagagctgttgaaacggttgattttatgactgccaaatgggcacgacttgaccctgctctactcgagctagtatccaacaggattatgaacgaaattcccgaagtttctcgtgttgcatacgatatttcgagcaaacctcctgcgacaattgagtgggagtaa

SEQ ID NO: 317481 - DNA, 304 bp, Unknown
  Bacterial polypeptide expressing nucleotide sequence isolated from the Sargasso Sea
gaagctgaccatatttttattgaagagcttattattgctgatttgtatgacaaagttagtcaggcattcgcagtattattgccagtaaagtcagttggggttgttggagatgaaagaagatatgctgaagttattggattaagagcagttgaaacagtagattttatgactgccagatgggcacatttaccatatgaatttttagaacatgtttccaatagaatagttaatgaaatagaagatgtaagtagggtggtttatgatatttcaagtaaaccgcctgcgaccattgagtgggaataat

SEQ ID NO: 317482 - DNA, 828 bp, Unknown
  Bacterial polypeptide expressing nucleotide sequence isolated from the Sargasso Sea
aaagactagagaatttggtccatcaaaacttaaaaaaatttcaaattcaaaactattaaaaaatattaaaaataatgaaatatcatggatgtctcacggcgatacaattgtcaaattgccaaataaaataaaagctatagctaagtcggagttcggatcaatttcattattctcatcaagtgattttatgatagttggaactcagtttcaccctgaagttgcccatactgcttttgggcaacaatttttaaaaaattttttagttgatattgttggatgtaaacaaaattggaaacctgaaaagctcgtaaatcaaaagataaaagaaattaaagagttggttggaaaggatatagctatttctgcgatttctggtggtgtcgactctagtgtttcttctgttcttgtaagtaaagcaataggaagaagactgaaatgttttatagttgatacaggcctaatgagatataatgaagtaaaagaaatacttcctgtattaaaaagtcttggggtaaaaccaaaagttataaatgctggaccccttttcctagcaagacttaaaggtatagttgacccggagaagaaaaggaaaattataggtaaaacatttattgaactatttgataaagaatctagaaaagtatcaaatgcaacatttttagtacaagggaccctgtatccagacgtaatagaaagtgttaatgtaagtgggccttccgctgtaattaagtctcatcataatgttggtggcttacctaagaatatgaaactctctttaattgagcctttaagagacttatttaaagatgaagttagggatttaggtaa

SEQ ID NO: 317483 - DNA, 883 bp, Unknown
  Bacterial polypeptide expressing nucleotide sequence isolated from the Sargasso Sea
aaaataagagaacaggttggcaatcaagaagtattgttaggtttatcaggaggtgtggattctgctgttgttgcagcattactcacgaaagcaataggcaagcagttaacctgtatctttgtagacaatggactccttagactcaatgaaggtgaccaagtcatggaaaccttcaaaggtaaattcggaatcaaagtaaaaagagctaacgcaggtaatcaattcctaaaagatttgaaaggaaaaaaagatcctgaactgaaacgcaaagctatcggtaaaacttttatagatgtctttcttaaagaggcaaaaagaaataaaaaaattcaatggttagctcaagggacaatttatcctgatgttattgaatcagctggcacaaagaatgggtcagcgcatgtaataaaatctcatcacaatgtaggagggctgccgagctatcttaatctccctgtgatagagcccttaaaggacctatttaaagatgaagtaagaaagattggtttagagcttggtttaccaaaagagatattatttagacacccttttccaggtccaggtttaggtgtccgaattcttggtgaaattaaaagaccttatattaaaacccttcaattagctgatgatatttttattagtgagttggttaaaggtggttactacgagaaagtaagtcaagcttttgcagtatttttaccggtcaaatccgttggagtagtaggggatgcaaggcgttatgaatatgtcattgctctaagagcagttgaaactatagattttatgactgctaaatcagccaaactccctcatactttcttagaaaaagtttcaaatagaatcatcaatgaaattcccgaagtatctccgggtgacttacgat

SEQ ID NO: 317484 - DNA, 568 bp, Unknown
  Bacterial polypeptide expressing nucleotide sequence isolated from the Sargasso Sea
atatccagatatcatagagagtagatcttccactggcagcaagacctctaagattaaatcacatcacaatgtaggtggtttaccaaaaaaaatgaaactaaaactagttgaacctttaaaagaattttttaaagacgaggtaagagctcttggaaaatctttgggtttatcagactcaataattaaaaaacatccttttccagggccgggactagcaataagaattattggaaaaattacacaagataagattaaaatattacaagaagcagatgatatatttatcaaagatttgattaaaaataatctatacgatgaaatttggcaagcatatgctgctttactgccagttaaaactgtaggagtaatgggtgatagcaggacttttgaatacacttgtttattaagagctgttacttcagaagatggtatgactgcagctaaatttaatttttcaaatgaatacctaactaatatctcaaataaaattataaatagagtttctggtataaatagagtagtttatgatgtaacctcaaaaccaccaagcactattgaactagaataa

SEQ ID NO: 317485 - DNA, 235 bp, Unknown
  Bacterial polypeptide expressing nucleotide sequence isolated from the Sargasso Sea
gctgtgctgcttcctgtaaaatcagttggtgttgtaggagatgaaagaagatacgctgaagttgttgctttaagagctgttgaaacagtagattttatgacagctagatgggctcatttaccatatgaatttcttgaaaatgtatcaaaccgtattgttaatgaaatagagcaagttagcagagttgtttatgatatttcaagtaaaccacccgcaactattgagtgggaatgaa

SEQ ID NO: 317486 - DNA, 831 bp, Unknown
  Bacterial polypeptide expressing nucleotide sequence isolated from the Sargasso Sea
cttgataatagattttggttcgcagttcacacaactaatagcaagaaaagtaagagaacttggggtttattgtgaaattattagccatcacaaatctaataatattaaaattttagataaaaatgttagtgggcttatattatcaggtggccctttaaatgtttatcaaagtaaaaaagtaaaatttaataaaaatttactaaattctaatattccagtgcttggaatatgttttggtcaccaaataatatcaaaagaattaggcggcaaggttaaacaatcaaaatcaagagaatttggtttagcaaaagttaaaaaagtaaaagagagcacacttacaaaagatttttttacaaataaagaaaataatgtttggatgagccatgcagatgaggttaccaaattaccaaaagattttaaggtaatagggaaaacaaataatgcaaaattttgtatagttgaaaattctaagaaaaaattatttggtattcagtttcatccagaggtaactcatacaaatagaggaaaaatcatattaagaaattttgtatttaaaatatgtaaaattaaaagaaactggtcttctaaagatcaaaaattaaagcttattgatcaagttaaaactcaggtcggtaattcaaaagtcatttgtgccctttcaggtggcgtagacagcagtgttgttgcaaaattattatctaatgcaataggtaaccgattaacttgcatatttgtaaatactggacttttaagaaaagatgaggaaaagcaagttattcatacatttaaaaaacgttttaaaattaatttagtttatgtgaatgctgaaaa

SEQ ID NO: 317487 - DNA, 919 bp, Unknown
  Bacterial polypeptide expressing nucleotide sequence isolated from the Sargasso Sea
tgtatggatgagccacgctgatcaagtaacaaaattacccaaaaaatttaaaattattgcacaaagtaaaaattctaagatgtgtgttattgaaaatgtagaaaaaaaaatttttggtattcaatttcacccagaagtaagccatactataaaaggaaagttaatacttaaaaattttatattttctatatgtaaattaactaaaaattggtcttcaagagaccagaaaaaaaaattaataaatgaagtaagaaatagtgtaggaaattcaaaggttatttgtgcattatccggaggtgttgatagcagcgtagttgctaaattactatcaactgctattggaaaaaaattaacatgtatctttgtcaatacagggctacttagaaaaaatgaagaaaagcaagttgtaaatacatttaaaaaaaaatttaaaataaaccttatttatgtgaatgctgaaaacttatttttgtcaaaattaaaaaatgttgttgatccagaaaaaaaaagaaaaataataggaaatctttttattaaaatttttgaaaaatattcaaataaaattaaaaatgtaaaatttttagcccaaggtactttatatcctgatttaattgaaagcaaatctgttacaggaagccaaacatctaaaattaaatcccatcataatgtagggggtttgccaaaaaaaatgaaacttaaattagttgagccgttaaaatatctttttaaggatgaggtaagaaaattaggattagaattaggattaagtaatgaaataatatcaaggcacccatttccaggaccaggacttgcaattcgaatgcctggcataattagtagagaaaaaataaaaattttaaaagaggcagattattactttatcaaatctctaaaagagaataatctatatgataaaatt

SEQ ID NO: 317488 - DNA, 577 bp, Unknown
  Bacterial polypeptide expressing nucleotide sequence isolated from the Sargasso Sea
aggtactctttatcctgatctaattgagagtaaatctgtgactggcagtcaaacttcaaaaattaaatctcaccataatgttggtggattaccaaaaaaaatgaatcttaaccttattgaaccacttaaatttttgtttaaagatgaagtgagaaaattaggattagaattaaaattaagtaaagaaattatttctagacatcctttccccggtccaggtttagctataagaatgccaggcttgataacaaaagaaaaaattaaaattttaaaagaggctgatcattactttattcaggctttaagaaaacacaatttatataataagatatggcaagcatatgcagctttacttccagttaaaacagttggtgtaatgggagataatcgaacatatgaatatttatgtttgttaagagctattacttctcaagatggtatgactgcagatttttatgaatttaaaaaatcatttattcaagagatctctaataaaattgtgaatagtattaggggaattaatagagtagtttatgatataacctcaaagcctcctagcactatagagctagaataa

SEQ ID NO: 317489 - DNA, 478 bp, Unknown
  Bacterial polypeptide expressing nucleotide sequence isolated from the Sargasso Sea
aatgaaactaaaaattatagaacctcttagagagctatttaaagatgaggttagaaacttaggaaaaaaacttaaaatatctaataatttactatttcgtcaccctttccctggacctggtttagctataagaattccaggagtaataaatgaagaaaaaataaaactgttacaaaatattgatgaaatctttattaattatttaaaggaaagaaaattatataataatatatggcaggcatttgccatattacttccagttagatcagtaggagtaatgggcgatgagagaacttataattattcttgttgtttaagagctgttacttctattgatggtatgactgctgatttttatatgttttctaagaatgattttaacaatatatctagtagaattatcaatgaaataaaaggtgttaatagagttttatatgattttacttctaaacctccgggaactatagagtgggaataa

SEQ ID NO: 317490 - DNA, 643 bp, Unknown
  Bacterial polypeptide expressing nucleotide sequence isolated from the Sargasso Sea
tcttcttttatcgatatttttgaagaagaggcaaaaaaaattggaggagctgattttttagctcaaggaactctttatccggatgttattgagagcgtttcttttacgggcggaccatctgtgacaattaaaagccatcacaatgtaggagggcttccagaacgaatgaatatggagctagttgagcctttgcgagaactttttaaagatgaagtaagagaactcggaaaagaactaggaattcccagtcactttattgagagacacccattcccaggtcctggacttgcaattcgtttacctggtgaaatttcttctgaaaaagccgatattttaaggaaagctgacactatttatattgaagagataagaaaagccggactttataatgagatttggcaagcttttgctgtacttttacctgttcagactgttggtgtgatgggagacgagagaacatatgattttgtttgtgctttaagggctgtgacttcacttgatggtatgacagcggattattatccttttgaacaagagttcttagctaatgtaagtactcgtattattaatgaagtaaaaggaattaatagagtggtttacgatataacatcaaaaccacccggcactattgagtgggaataaa

SEQ ID NO: 317491 - DNA, 733 bp, Unknown
  Bacterial polypeptide expressing nucleotide sequence isolated from the Sargasso Sea
atcaaagtaaaaagagctaacgcaggtaatcaatttcttaaagatttgaaaggaaaaaaagatccggagcagaaacgcaaagctataggtaaaacttttatagatgtctttcttaaagaggcaaaaagaaataaaaaaattcaatggttagctcaagggacaatttatcctgatgttattgaatcagctggtacaaagaatgggtcagcgcatgtaataaaatctcatcacaatgtaggagggctgccgagctatcttaatctccctgtgatagagcccttaaaggacctatttaaagatgaagtaagaaagattggtttagagcttggtttaccaaaagaaatattatttagacacccttttccgggtccaggtttaggtgtccgaattcttggtgaaattaaaaggccttatattaaaaccattcaattagctgatgatatttttattagtgagttggttaaaggtggttactacgagaaagtaagtcaagcttttgcagtatttttaccggttaaatccgttggagtagtaggggatgctaggcggtatgaatatgtcattgccctaagagcagttgaaactatagattttatgactgctaagtcagctaaactccctcatattttcttagaaaaggtttctaatagaatcatcaatgaaattcctgaagtatctcgggtaacctatgatatttctagtaaaccaccagctacaattgagtgggagtaat

SEQ ID NO: 317492 - DNA, 511 bp, Unknown
  Bacterial polypeptide expressing nucleotide sequence isolated from the Sargasso Sea
caaaaaagaaaagttattggttcaattttcatagatgtttttgaaaaccaatcacaaaaaattcaagatgcaaaatggatagctcagggtacaatctatccagatgtaatagaatcaatatctgtaaaaggtccatgttcaacaattaaatcacatcataacgttggtggtattcgtgaaaaaatgaatttaaagataattgagccattaaaaatgttatttaaagatgaagttagaagaattggagaatctttagatatagacaaaaatatattaaatagacatccatttcctggcccaggtcttggaataaggatacttggagaagttgacgaagaaagtataagattagttcaagaagcagataaaatatatattgattcattaaaaaaatgggatttgtatgataaaatatggcaagcaggttcaattctccttccagttagaagtgtaggtgtaatgggagatgagagaacttatgaaagatgtgtctcacttagggctgtggttt

SEQ ID NO: 317493 - DNA, 933 bp, Unknown
  Bacterial polypeptide expressing nucleotide sequence isolated from the Sargasso Sea
gattggaaataatgcgaatttatttggtattcaatttcatcctgaagtagttcacactccacagggcaaagaaattttagacaattttttgtttcaagtctgtggaatactaccagactggacacctggtaattttgttaatgaaactgtagaaaaaataagagaacaagtaggtgaaggtaaagttatttgtgctttgtctggaggtgtggattctgcagtggcagctacgttggttcataaagctgttggagatcaactgacatgtatttttgttaacaatggtctgatgcgtaaagaagaacctgaaagggtccaaataacttttgaaaaatatatgaaagtaaatttcatatttagtgagtcttctgaaagatttataagaaaattgaaagatgtgacggatccagaaagtaaaagaaaaataattggtgaagaatttattaatgtttttgacgaagaagctaatagattgggagaggttgattttttaactcaaggtactttgtatcctgacgtaattgaaagtagtgatagctcagtttcagcaacaattaaaactcaccataatgtgggcggtttaccagatcacatgaaacttaaattaattgaacctcttagatatttgttcaaagatgaagtaaggcaagtaggtttggagttagggttatctgaagagatggtatttaggcaaccttttccaggcccaggattagcgataagaattttaggcgaagttacagaagaaaaattggacattttgagagcggctgattggatagtgatggatgagattaaggcgaataatttatatcaggagttatggcaaacctttgcagttttaactggtgcaaaatcagtaggtgttactggggattttcgtacttatgggcatgtgatagctatcagagccgttactagtgatgatgctat

SEQ ID NO: 317494 - DNA, 685 bp, Unknown
  Bacterial polypeptide expressing nucleotide sequence isolated from the Sargasso Sea
aatgagcaaactatctgtaagcaataaaaagattgatacaattttagttttagattttggttcacaatacactcaattaattgcaagaagagtaagagaaagctttgtttattctgaaatattaccatgggatatatctgaagaaaaaattataaaacttaatcccaaagcagtaatactttcgggtggacctaactctgttactgagagttttacaccacgtatatcaaaatgtgtctttgatattaatgttcccattttaggaatttgctacggtatgcaaacacttgctgaacaaatgggtggtagcgtcatttcatctaatcaaaaagagtttgggcattcagaactagagattgtaaatgactcaactttatttaaaaatctgcctaaaaacttaaatgtatggatgagtcatggagatcaagttcaagatcttccagatgagtttaatcttattgcatcaactcaaacagccccagtagcagcaatgcaacacaaaagcttaccaatttacgctcttcagtttcatcccgaagttacacacactaaaaatggaaaggcaatattggagaacttcatttttgatatcgcaaaagtcaaaccagagtggatgatggatgatttaatttcatcaagaataaatgaaatcaaagatcaagttggcgacaaaaaagtcttttag

SEQ ID NO: 317495 - DNA, 469 bp, Unknown
  Bacterial polypeptide expressing nucleotide sequence isolated from the Sargasso Sea
aatttagttgaacccttaagagatctatttaaagatgaagtaagaaaaatgggggccgcaatgggtatatcttcatcaatgataaatagacatccttttcctggtccaggcttgggtgtaagaattttaggagaggtaacaaaagaaaaagtgaaagtattgcaagaagcagataatatttttatagaggagctcattaaagcagatcattacaataaagtcagtcaagctttcgcagttcttttaccaataaaatcagttggagttgttggagatgaaagaagatatgcagaagttataggattaagagcagttgagacagtcgactttatgacagctagatgggcacatttaccctatgaatttttagaacatgtttctaatagaatagttaatgaaatagaagatgtaagcagggtagtttacgatatttccagtaaaccgcctgcaactattgagtgggaatgaa

SEQ ID NO: 317496 - DNA, 682 bp, Unknown
  Bacterial polypeptide expressing nucleotide sequence isolated from the Sargasso Sea
gatgtcaactaagtacctttcagaacacaaaaacaaaataattattatagactttggttcccaagtaactaaacttatagctagaagaataagagaattagagatttactgtgaaattattaatcaaaacgaattaaaaaaaattacaaattttaataatataaaaggtattatcttatctggtggcccatctacagtaactaaaaatacttatccttctataccaaaagacgtatttaaaaaaaatatacccatcttgggcatttgttatggactacaactgatagccaaagtatttgggggaaaaattaaaaaatcaaaaaagaaaagagaattcggtgaagcaattctttttgaaaaatctaaatcagtgttgtttaaaaatttttttaccaataaaaaaacaagtgtttggatgagtcatcaagatgcagtttataaaattcccaagggtttcgaaaatttagcatctacagataattcaaaatacaccgccatccaaaataaagataaaaatatttatggtatacaatttcacccagaagtgactcacactaaaaagggttttaaagtgatcaaaaattttgttttaaatatttgtagagttaaaaaaaattggatgataggtattgaaaaaaatagaattatttctgatcttaaaaataaaattaaaggagataag

SEQ ID NO: 317497 - DNA, 790 bp, Unknown
  Bacterial polypeptide expressing nucleotide sequence isolated from the Sargasso Sea
tgagcgattgcttgagttagaaataccgatattaggtatttgttatggaatgcaggctctcgctgcgcagctgggaggtggggttaagagctctgcacacagggagttcggccatgctgagattgatttgcatggtggtagcgaattactggggactctagacccggacaggcatggaaaggcgcaagtttggatgagtcacggagacaaggtcaccgatttgccagaggggtttagtgttaccgctagcacggagagcgccccggttgcggcaatggagaatccgtcaaaacgaatttacgcggttcaatttcatccagaggttacgcataccccaaacggagatcatttgattgatcggtttacaaaggatatttgccagtgcgatggtgattggactattgaaaacatcgcggaagaggctattcggagaactaaagaacaggttggcgatgatgaggtggttttaggtttgtcgggtggagttgattcgtcggtggtcgcggcgatcctttctcgggctattggagatcaactaacctgtatttttgttgataatgggcttcttagaaaagatgagaccgaagaagttgaaaaggccttcggattagaggcaggtacaggaaacgtcttacccatcaaaatcaagacggttgacgctcgatccgagtttttgaataaacttgtcggcgtggtagatcctgaagacaagcgcaagatcatcggaaatacatttatcgatgtgtttgaacgagaagccgataagttgagtaatgtgaagtggctggcg

SEQ ID NO: 317498 - DNA, 751 bp, Unknown
  Bacterial polypeptide expressing nucleotide sequence isolated from the Sargasso Sea
tttgctaaacacatggggaataaatgttattcgcattgatgctgaatctcgtttcttaaaagttctaaaaggggttagtgaccctgaggagaaacgtaaaatcatcggtgttgaattcatcaagattttcgaagaacaggcaaaaagtcttgaggacacaaagtggctggcacaaggtactatttatcctgatgttattgaatcggcaggtgtcgagactggtaaggcgcatgtaataaaatcacaccacaatgtcggtggtttgccagataatatgaaaatggaattagttgaacccctgcgtgaattatttaaagatgaggttcgaaaaataggtatagaacttgggttacctaaatcacttgtgtatcgacacccgtttcctgggccgggactgggggttagaattttaggggaagtaaaaaaagaatacgccgatctattgcgtcttgcagataatatttatattgaagaactcagggaacatgacctgtacgatgatgttagtcaggctttttcggtgttcttacccgttaggtcggtcggtgtaatgggggatacccgtaaatatgattacgttatcgcacttcgagctgttgtgactgttgattttatgacggcacactgggcgcacttaccctatgaatttctagaaaaagtctctaatcgtattattaatgaggttgagggcatatcgagggtgacttatgatatttcaggtaaaccaccagcaacaatcgagtgggaataa

SEQ ID NO: 317499 - DNA, 872 bp, Unknown
  Bacterial polypeptide expressing nucleotide sequence isolated from the Sargasso Sea
aaactctttgaatcttcccgataacattttaaaattaaaaaaacctattcttggaatatgttatggacatcaaatattagcaaagaagtttgggggtagtgtaaaaatatcaaaaacaagggaatttgggtttgcacaaatcaaaagtgataaaagatgtcctttgacgaaaaatttcttcaataatgaaaaaaattcagtctggatgagccatcaagatattgtaactagaataccaagtggatttaaaaaaatagcttcaactcaaaactcaaaatttgcaattatagctaatgaaaagaaaaaattttatggagtacagtttcatcctgaagttactcatactaaaaacggaaaaataattttaaagaattttgtcttaaatatatgtcaaacaaaaagaatgtggagtctaaggaaacaaaaagacttaataattaatgatattaaaaaaagggtaaaaaatgaaaaagtaatatgtgctttatcaggaggtgttgatagtagtgtagtggcattcttattaaacaaagctatcggtaaaaaattgaaatgtgtttttataaatactggtctcttaagaaaaaacgaagaaaaagaagttataaaaaattttaaaaaaaaattaaaatctaatttaatttatttagatgcatccaaactttttttaaataaattgaaaaatgttacagatcctgaattaaaaagaaaagttattggtaaactttttataaaattgtttgaaaacaaggcaaagaaaattaaatttttagctcaaggaactttatatccagatttgatagagagtaggtcggttacaggaagtcctacttcaaagattaagtcacaccataatgtacgcgggttaccaa

SEQ ID NO: 317500 - DNA, 856 bp, Unknown
  Bacterial polypeptide expressing nucleotide sequence isolated from the Sargasso Sea
taatgctattttagaaaataaaagaaataatatttacacatgtcaattccacccagaggtatatcatacaaaaaatgggaaaatgatattaaaaaactttgttaaatttatttgcaaatgcaaaagtaattggagtaataaaaacaaaattaaacaaatatcttcatacataaaaaaacatgttggaaaacataaggtgttgtgcgctttgtcaggcggggttgatagtagtgtacttgcatttttgttaaataaaattattaaaaaaaatctgatctgcgtttatattgataccggttttatgagaaaaggtgaaacggaagagatttgtttcatttttaagaaaagctttagtaataatttttactatttaaacaaaaaaaaaatatttattaatgctttaaaaggtgtagttgatcctgaaaaaaaaagaaaaataattggcaaaacatttattaaagtttttgaaaactttactaaatctaaaaaaaatattaagtttcttgctcaaggaacgctctatcctgacttaatcgaaagcaaaagtttttcaggcagcaaaacgtctataataaaatctcatcacaatgtaggcggattgccaaataaaatgaaatttaaacttgtagaaccatttaaagaaatgtttaaagatgaagtaaggattttaggtaaacaactcggtataaacaaaaaaattttatcaagacacccctttcctggacctggcttagcaattcgaattcctggtgaaataaatgaaaaaaaaattaaaatattacaatacgccgactcaattttaattaatgaattaaaaaaaagaaatatttatgataaaatttggcaagcatttact

SEQ ID NO: 317501 - DNA, 853 bp, Unknown
  Bacterial polypeptide expressing nucleotide sequence isolated from the Sargasso Sea
agttgccaaattaattcataatgctataggaagaaagcttacttgtatctttgtaaatactggtttgttgagaaaaaatgaggaaattcaagttattaaaacctttaaaaaaaaatttaaaattaacttaatttatgtaaatgcaaaaaatttatttctaagaaatttaaaaaaagttgaagatcctgaaaagaaaagaaaaataattggtaatttattcataaaaatttttgaaaaatatgcaaaaaaaattagaaatgttaaatacttggcacaaggaacattatatccagatttaatagagagtaagtctgtgacaggcagtcaaacttcaaaaataaaatcacatcataatgttggtggattacccaaaaaaatgaaattaaaattggttgagcctttaagacttttattcaaagacgaagttagaaaactaggattggaacttaaattatcaaaagaaatagtacttagacatcctttcccaggcccaggtctagccataagaatgcctggagaaattacacaacaaaaaataaaaattttaaaagatgcggatgatatattcatcaaagctttgagagattatgatttatataacaagatatggcaggcatatgcagcattattgcctgtcaaaactgttggcgtgatgggagataatagaacatatgaatatatgtgcttgctaagagcaattacatcagaggatggcatgaccgctgacacttttaattttaataaagactttatgcaatttgtttcaaacaaaataattaataatataaaaggtatcaatagggtggtttatgacataacatctaaacctccaagcacgatagaattggaataa

SEQ ID NO: 317502 - DNA, 779 bp, Unknown
  Bacterial polypeptide expressing nucleotide sequence isolated from the Sargasso Sea
gaatgaagagcatgaagttataaaaaattttaaaaaaagattaaagttaagattaatatatattgatgcttcaagtatttttctaagtaaacttaaaaatgtcaataatccagaattaaaaagaaaaattattggaaaactttttattcaattatttgataaaattgcaaaaaaaatcaaaaatgtaaaatttttagctcaaggaactttgtatcccgatttaattgaaagtaaaacagtaactggaagtccatcttcaaaaattaaatctcatcataatgttggaggtttgccaaaaaaaatgaaacttaatttaattgaaccacttaatactttatttaaagatgaagtaagaaagcttggaaaagaattatcattgtcaaaagatctacttttaagacatccgtttcctggccctggtcttgctattagaattccaggtaaaattacgaaagaaaaaatttgtatattaaaagaagctgattatatttttattaatgaattaaaaaattcaaatctttataataaaatttggcaagcatatgctgcattgctgcctttaaaaactgttggagttatgggagataaaagaacttatgaatatacttgtttattaagagcagttacttctaaagatgggatgactgcagatttttttccttttaataaaaattttattcaaaaagtatctagtaaaattattaattctgtaagcggtattaatagagttgtctatgatataacctctaaacctccaagtacaatagagttagaataat

SEQ ID NO: 317503 - DNA, 228 bp, Unknown
  Bacterial polypeptide expressing nucleotide sequence isolated from the Sargasso Sea
ttttaccggtcaaatccgttggagtagtaggggatgcaaggcgttatgaatatgtcattgctctaagagcagtgaaaactatagattttatgactgctaaatcagctaaactccctcatactttcttagaaaaagtttctaatagaatcatcaatgaaattcccgaagtatctcgggtaacttacgatatttctagtaaaccaccagctactattgagtgggagtaaa

SEQ ID NO: 317504 - DNA, 711 bp, Unknown
  Bacterial polypeptide expressing nucleotide sequence isolated from the Sargasso Sea
caaaaaatatatttttatctaaacttaaaaatgtttcagatcctgaaaaaaaaaggaaaataattggaaatttatttattaaaatttttgaaaaaaatgctaaaaaattaaagaaaataaaatttttagcacaaggaaccctttaccctgatttaatagaaagcaaatctgttactggaagtcaaacttcaaaaataaagtctcaccataatgttggaggtttgcctaaaaaaatgaaactacaattagtagaaccattaaaatatttatttaaagacgaagtcagaaaacttggtttagaactaaaacttggaaaagaaattgttttaagacatccatttcctggaccaggacttgctataagaatgccaggaattattacaaataaaaaaataaaaattcttcaagaggcagatcatatttatataacagaattaaaaaagcataatttatataataaaatctggcaggcttatgcagctttattgccagttaaaacagttggtgtaatgggcgataacagaacttacgaatacatatgtttactaagggcaattacctcagaagatggaatgactgctgatttttttaattttaataaaaagtttatgcaacttgtatcaaataaaataattaataatataagaggcataaatagagtagtttacgatgtaacatcaaaaccaccgagcactattgaacttgaatgat

SEQ ID NO: 317505 - DNA, 740 bp, Unknown
  Bacterial polypeptide expressing nucleotide sequence isolated from the Sargasso Sea
catgcgaaaaggcgaatctgaacggattaaaaacctttttgcagataaattcgatgtcaatctcattcaaatcaatgcctctgaaaggttttataagaaaataaaaggcatcacagaccccgaagagaaaagaagacgtattggtgaagaatttattcgagtctttgaagaagaatctcaaaaactcaaaaaagactttatttacttagcacaaggaacgctataccctgatataatcgagtctgcgacaagagacacagcctctaccgcaaccaaaattaaaacccatcataatgtaggcggattaccagagaaaatgaaattcaaaatattagaacctctcaaaaggctctttaaagatgaagtgagaaaagtcgggctagagctaggcatccctgaagaaattgtcatgagacaaccctttcctggtcctggtcttgccattcgtatcttaggagaggtctcccaagaacgtgtagaaatcctccaaaatgcagatgtcattatcatggagatcatcaaaaaagaaggtctatacaaaaagctctggcaatcatttggtgtcttactaccaatccgcacagtaggtgtccaaggagatgcgagaacctatctcaacaccctcgccatccgagcagtaacatcagaagatgccatgactgccagttgggctaagttaccctatgatattttagaaatgataagctctcgaatcatcaatgaagtaccagaaatcaacc

SEQ ID NO: 317506 - DNA, 688 bp, Unknown
  Bacterial polypeptide expressing nucleotide sequence isolated from the Sargasso Sea
atgagtcttgatttaaacctagacaaaatcttgataatagattttggttcacagtttactcaattaatagtcagaagaataagagaacttggagtattctctgaattaatcagtcataaaaaaataaaaacctcccaaatcaaaaccaatgttaaaggaattattttatctggtggaccattaaatgtttatcaattaaatgataatttatttgatgataaaattttaaaacttggaatacctatacttggaatttgcttcggacatcaaattttatcaaaatttaatggtggaaaagttaaacaatcaaaacatagagagtttggcctaacaaatattcataaaagaaataacagcctattaataaaaaatttttttaataaaaaaacaaaaaaagtttggatgagtcatgcagaccaagtaactaaacttccaaaaaattttagagtagttgcctcgagcgaaaattccaaattttctattgtcgaaaacaaaataaaaaatttttttggtgtacaatttcaccctgaagttacccacactgaaaatggaaaaaaaataattagtaattttatttttttaatttgtaaaattaaacgaaattggtcttccaaagatcagaaaaagaaattaattaaagagataaagcaacaagtgggaactgataaggttatttgcgcgctttcgg

SEQ ID NO: 317507 - DNA, 639 bp, Unknown
  Bacterial polypeptide expressing nucleotide sequence isolated from the Sargasso Sea
cctttatcgatgtttttgatgctgaggcaataaaattaaaggatataaagtttttagcacagggtactatatatccagatgtaatagagtcttcaggttctgaatcgaatgaagctagagtaattaaatctcatcataatgtaggagggttacctgaagaaatggaattagatctagtagagcctttgagagatctttttaaagatgaggtcagaagaatggggctagaacttggaatacctaaagaaatgctagaaaggcatccttttcccggaccaggattgggcgtgagaattattggagaaattaccgttgagaaaacactaattttacaagaggcagataatattttcatagaagaactaataaaagcggatttatacgataaagtgagccaagcatttgctgttttgctacccgttaagtctgttggtgtagttggagatgagagaagatacgccgaagttattggtttaagggcagttgaaacggtagattttatgactgcaagatgggcccatctcccttatgaattcttggagcatgtctcaaacaggattgtaaatgaaatagaacaggtgagtagagttgtatatgatatctcaagtaaacctccagcaactatcgagtgggagtgac

SEQ ID NO: 317508 - DNA, 802 bp, Unknown
  Bacterial polypeptide expressing nucleotide sequence isolated from the Sargasso Sea
tcatttaatctgtagaagaattagagaattctcagtttatgcggagttagtcccatatgatataagtcctgaagaaataaagaaaatgaatccaaaaggaattattttttcaggaggaccatcaagcgtatataatgatgatgcaccaaaaccagatgaagaattatttaactttgacttgcctttactaggaatttgttatggacatcaattaattgtaaataagtttggaggaaaagtgaaacgtgcaaacaaagaatatggttcatctcttctttcaatgggtactaataattcaggattattagacggtattggagaatcgatacgtgcatggatgagtcatggggacgaagctgagcagattccatcagattttgaggttattggtcacacggagaattcacatgctgcagcaatagcaaatacaaatagaactgtatttggtattcaatttcatccagaagttgttcatacagaaagaggaacagatattttgaaaaattttgtcttgaatgtttgtaaagtaaaacaagaatggactatggagggttttgtagaaaaaacggtcgaagagatttcaaagattgaaggagatgttctatgcggagttagtggaggaattgattccacagttactgcattattaatacacaaagcaatagggaatagactaactggagtttttgtagataatggattattaagattgaaagaatctgaagaaattgaggatatgttcaagaataatttctcgttaaattttcatagaatagatgctagtgaacaatttcttacgaaa

SEQ ID NO: 317509 - DNA, 604 bp, Unknown
  Bacterial polypeptide expressing nucleotide sequence isolated from the Sargasso Sea
atgcaaacagtagtcattatggattttggctcccagtattcacgtctaatagcccgacggatacgtgaacttaatacctattgcgagatacttccacatgatgctggcagcgaaatactcgagacgcaagatgttatagggataatcctttcaggaggtcctaacagcgtctacgaatcaggagccccgatggcaccctcttgggtttatgaggctggtgttccattattgggtatctgttacggcatgcagctgatagctcaccaacttggcggtactgtcgaacctggcacacagcgtgaatacgggcacgccgtcattcacaaagatggtcaggacaatgtcctctttgagggcttagatacagaagtgcctgtgtggatgagtcatggtgaccgtattgaagaattgcctccaggttttcgggctatggcttattctgagaattctcctattgccgttatgggggacgacaagggaacatgttttggaattcagtttcatccggaagtggctcatactccacagggtgtcgagattctccgtaatttcatttctggtgtttgtaaaggctcgggtgattggacgcctgcgaattttgtat

SEQ ID NO: 317510 - DNA, 700 bp, Unknown
  Bacterial polypeptide expressing nucleotide sequence isolated from the Sargasso Sea
gtttttgagaaaattatcaaatatttcagatcctgaaaagaaaagaaagataataggaaacttgtttataaaaatatttgagctttatgccaaaaaaattaaaaatgtaaaatttttagctcaaggaactctttatcctgacttaatagaaagtaaatcagttactggtagccaaacatcgaaaataaagtctcaccataatgttggaggtctacccaaaaaaatgaaacttaaactagtagagccattaaaatttttattcaaagacgaggttagaaaacttggattagaactaaacttaagtagagaaattattactcgtcatccttttccaggacctggactagcaatacgaatgccaggaataataactaaagaaaaaattaatattttaaaagaagctgatcattattttattcaagctttaagagatcacaatctatatcataaaatttggcaagcttatgcagctttacttccagttaaaacagttggagtaatgggtgataatagaacttatgagtatttgtgtttgcttagagcaataacatctgaagatggtatgacagcagatttttatgaatttaaaaaatcatttatacaagaaatttcaaataaaatagtgaatagtattagagggattaatagagtagtttacgatataacctcgaaaccaccgagtacaatcgaattagagtaa

SEQ ID NO: 317511 - DNA, 896 bp, Unknown
  Bacterial polypeptide expressing nucleotide sequence isolated from the Sargasso Sea
tttgtcaggtggaccattaaatgtttatcaatcaaaaaaagtaaaatttagaaaagaaatatttaaatggaatgtaccaattcttggaatttgtttcggtcatcaggtaatttccaaggaattaggtggcagagttaaacaggctaaacaaagagaatttggttttgctaaacttacgagtttaagtaaaagcagacttactaaaaatttttttaataaaaaaggatctaatagtgtatggatgagccatgcagatgaagtaacaaaattagcaaaaggtttcaaagttattgcaaaaacagaaacatcaaagttttcaatagttgaaaattcttcaaaaaaattttatggaattcaatttcatccagaggtaactcatacggaaaagggcaagattatactaagaaattttgtttttgaaatttgtatgctaaaaaaaaattggtcaccaagtaaccaaaaaaaattactaatagaggatgtaaaaaaaatagttggaaattcgaaagtcatatgtgccctttctggaggggttgatagtagcgtagttgctaaattaattcataatgctataggaagaaagcttacttgtatctttgtaaatactggtttgttaagaaaaaacgaggaaattcaagttattaaaacctttagaaaaaaatttaaaattaacttaatttatgtaaatgcaaaaaatctatttctaaggaatttaaaaaaagttgaagatcctgaaaagaaaagaaaaataattggtaatttattcataaaaatttttgaaaaatatgcaaaaaaaattagaaatgttaaatacttggcacaaggaacattatatccagatttaatagagagtaagtctgtaactggcagccaaacttcaaaaataaaatctcatc

SEQ ID NO: 317512 - DNA, 772 bp, Unknown
  Bacterial polypeptide expressing nucleotide sequence isolated from the Sargasso Sea
tacaaaaaatggtaaaaagttaataaaaaattttatatttaatatatgtaaatcaaaaaaaaattggtcgcccaaaaaacaaaaagataaaataattaaagagattagagaacaggtaggaagctcaaaagttatatgcgctctatcaggcggagttgatagtagtgtagttgcaaaaataattcataatgcaataggaaaaaatttaacatgtatattcgtgaacacaggtttattgcgtaaaaatgaagaaacacaagttatagaaacttttaaaaaaagattaaaaattaaattaatttatattaatgcaaaagataaatttattaaaaaattaaaaaatataagtgatccagaaaaaaaaagaaaaataattggaaatttatttataaaaatatttgaaaagtattcaaaaaaaatttataaagcaaaatttttagctcagggaacactatatcccgatttaatagagagtaagtctgtgactggaagtcaaacttcaaaaattaaatctcatcataatgttggaggtttacctaaacaaatgaaattaaaattagttgagccagttaagtatttatttaaagatgaggtaagaaaattgggaaaagaattgaaattgaataatgaaattttaaatagacatccatttcctggtccaggtttagcaattagaatacctggagaaattgatgattataaaattaatattttaaaagaggcagatgatatttttataaaaagtttatttaaatataaaatttaccataaa

SEQ ID NO: 317513 - DNA, 860 bp, Unknown
  Bacterial polypeptide expressing nucleotide sequence isolated from the Sargasso Sea
aatgcaatttcacaatgttaaggaaaaagttttaattattgattttgggtcccaagtaactaaattaattgcaagaagagtaagagatctaggtattttttcagaaattattactcctaaagaaattaaaagagttaaagattttaattctattaaaggtatcatactttctggtggaccatcaacagtgactaaagaaaaatttgaaagagtgcctatagaaattttttcaaaaaaaataccgatacttggtatatgttatggcctacaattaatcgcaaaattatacggtggtaaaattaagtcctcgaaaagaaaaagagaatttggaagggcatttatatttaaaaaaagacattcagaattaacaaaaaatttccttaagagtaaaagctcagtttggatgagccatgaggatgcggttgtaaaattaccaaaaaattttcaagttattgcttatactaaagactctagattaacaattattgagaataaaaaaaaaaaaatctatggagttcagtttcatcctgaaataactcatacagataatggaaaacaaatatttaaaaattttttattttcaatttgcaaaattaaaaaaagatggaatgtagcatctcaaaaaactaaattaattaatgatgtaaaaaatattgttaaaaaagataaagttctttgcgcattatcaggcggagtagacagtagtgtcgtagcgcttttaataaataaggcaattaaaaaaaacttgatttgtattatggttgacacaggtttaatgcgtaaaaatgagtttaaatataattgcaaaatctttaggaaaaaatataaacttaacgtgaagttaattaatgcctctgaaa

SEQ ID NO: 317514 - DNA, 391 bp, Unknown
  Bacterial polypeptide expressing nucleotide sequence isolated from the Sargasso Sea
gttggttgatcgacatccatttccaggacctggtctaggagtcagaatcttgggagcagttaaaaaagagtatgccgatttattgagattggctgatgatatttttatagaagaattacataaagagaatctatacgataaagtaagtcaggcgtttgcagtttttcttccagtaaaatctgtaggcgtcatgggtgatggaagaaaatatgaatatgtcattgctttaagggcagtagagacaaccgattttatgactgcaaattcagctaaattgccatacgaatttctagatcatgtatcaacacgaatcatcaatgaagtcccaggaatatcgagagttactttagatatatcctcaaaaccgccttcaactattgagtgggaatga

SEQ ID NO: 317515 - DNA, 748 bp, Unknown
  Bacterial polypeptide expressing nucleotide sequence isolated from the Sargasso Sea
tacggcatgcagaccatggccgagcaactgggcggcaaggtagaaggctccgagctgcgtgaattcggttatgcccgtgtggacgtggtcggcaagagccgcctgctggacggcatcgaagaccacatcgacgccgacggcctgttcggcctcgacgtctggatgagccacggtgacaaggtcaccaaaatgccggaagacttccacatcctggccagcaccccgagctgcccgattgccggcatgttcagcgatgagcgtcgctactacggggtgcagttccacccggaagtgacccacaccaagcaaggcgggcgcatcctgtcgcgtttcatcctcgacatctgcgagtgtgaagccctgtggaccccgtcgaaaattgctgaagacgccatcgcccaagtgcgcgcccaggtcggcactgacaacgtattgcttggcctgtccggcggcgttgactcctcggttgtggccgccttgctgcacaaggccattggcgaccagctgacctgcgtattcgtcgacaacggcctgctgcgcctgcacgaaggtgagcaagtgatggccatgttcgccgagaacatgggcgtcaaggtgatccgcgccaacgctgaggaccagttcctcaacaacctggccggcgagtccgacccggagaagaagcgcaagatcatcggccgcaccttcatcgacgtgttcgatgccgagtccaacaaactggacaacatcaagtacctcgcccagggca

SEQ ID NO: 317516 - DNA, 468 bp, Unknown
  Bacterial polypeptide expressing nucleotide sequence isolated from the Sargasso Sea
aattagttgagccattaagaaaactttttaaagatgaagtccgaaaagttggtgctgctttaggtttgccggatgaaattataaaaaggcatccattcccaggccctggattagctataagaattttgggagaggtaaataatgaaaaacttgattgtttaagagatgcagactggatagtaagagacgaaattaaaaaagcagggctttacaatgatatttggcaagcttttgcagtattactaccggttaaaactgttggcgtgatgggagataaaaggacttatgcatggccaatagttttacgttgtgtatcaagtgaggatggcatgacagcggattggtcaaaaattccttttcagattttggaaaggattgcaaatagaatcgtaaacgaagtagattcagttaatagagttgtttatgatataacaagcaaacctcctggaacaatcgagtgggagtgat

SEQ ID NO: 317517 - DNA, 692 bp, Unknown
  Bacterial polypeptide expressing nucleotide sequence isolated from the Sargasso Sea
aatgatttacatagtcgattttggttctcaggttactcaattaatagcaagaagagtgagagagagcggtgtatattgtgagatagtttcaagtaaatctatattaaatcttgttaataagaataaaacctatggaataatattttctggcggtcctgcaagtgtccataggtctaacaccccaagcatagatagaaaaatttataagctgggcatacctatattaggtatttgttatggtatgcaactaatggtccatcagcttggtggcaaagttcaaatgtctaaaaaaagagaatttggaaaaacagcaataaactctagctataaaagtttaattcttagaggatttaataaaggaaaaaaatcttgtaatgtatggatgagtcatggtgataaggtcatatctatacctgaagggtttaaaagtattgcgtcaagtttaaatacaaaatttgccgccattgagagtaaaaaacttaatttttatggattacagtttcatcctgaagttgtccatacttcaaatggaaatcgaataattcaaaattttattttcaaaacatgtaaatgtaagaaaaattggagcatgaaaaatcatctcatagtacaaaaaaatcttatcaagaaaatagttagcaataatcatgttatatgtgggttatctggtggtgtggatagcacagttacag

SEQ ID NO: 317518 - DNA, 445 bp, Unknown
  Bacterial polypeptide expressing nucleotide sequence isolated from the Sargasso Sea
ttatttaaagacgaggtaagacgaattggaaaatctatcaatattccaaatgaaatacttggtagacatccatttccaggccctgggctcggaattcgaatcttgggagatattaccaaagaaaaagtcaaaattcttcaagatgtagacgatatctttataaaaggattaaaaaaccatggtttatatgatgaagtatggcaggctggagcgatgtttcttccggtgcaatctgtcggtgtaatgggggatgagagaacctatgaaaatgcggtggcacttagagcggtttcttcaacggatggcatgacagcagattggtgtcatttgccctacgattttttagcaaaagtatccaatgatataattaatcaagtcaagggaataaacagagtaacctatgatattagttcaaaaccaccagctacaattgaatgggaataat

SEQ ID NO: 317519 - DNA, 661 bp, Unknown
  Bacterial polypeptide expressing nucleotide sequence isolated from the Sargasso Sea
tatgaatattaaatcttatgattgcctactcattgtagattttggaagccaagttacgcaactgatagcacgcagattacgcgaaattaacgtttattgtgagatacacccatatcagaacttaaatgaatccttgctaagtcaactttcaccaaaagcaataattttatccggcggaccagacagcgttacaagagatggaagcccaagagctcactcagctatttttgatatcggggtgcccttgttgggtatttgctatggccagcaagtgatgatgcagcagcttggtggtgaagtaaaatctggagttggaactgctgaatttgggaaagcatttgttgaaaggaaaaattcgtcggaattactaaaaggatggtttcttgaccaaaaagaacaggtctggatgagtcacggagaccacgtaagtaaaatcgcacccggctttgaagtatttggttattctcccaatgctccatatgcaatcatcggcgacccaaagcgccattattatgctgttcaatttcacccggaggtttatcatactccaaatggtcaaactttatttgaaaattttatttcaatagcaggccttgatcgaaattggacgatggaggcatacagagaaacaataattagagaaattagagagaaagttggg

SEQ ID NO: 317520 - DNA, 760 bp, Unknown
  Bacterial polypeptide expressing nucleotide sequence isolated from the Sargasso Sea
aaagttatttgtgcattatctggaggtgtagatagtagcgtggttgcaaaaattatacataaagcaatcggtaaaaatctcacatgtatatttgttaatactggtttattaagaaaaaatgaggaaattcaagtaataaaaatatttaaacaaaaattaagaattaagcttatatacgtcaacgctaaaaatcttttcattaaaaaattaaaaaaagtaaatgatcctgaaaaaaaaagaaaaataattggaagtctatttattaaaatattcgaaaaatactcaaaaaaaattccaaatatcaaatatttagctcaaggcactttgtaccctgatttaatagaaagcagatcagttactggtagccaaacatctaaaattaaatcccaccacaatgttggcggtcttccaaaaaaaatgaaattgaaattagtggagccagtaaaatttttgtttaaagacgaagttagaaagctaggtaatgagcttggtttaagtaaagaaatattaaataggcatccatttcctggtcctggactcgcaattagaattcctggtaatgtagacgaaaataaaattaatatcttaaaagaggcagacaatatttttattaaaagtttatataaatataatctttatcataaaatttggcaggcttatgcagctcttttaccagtaaaaacggttggtgtaatgggagataacagaacatatgaatacatatgtttacttagagcaattacgtctgaagatggtatga

SEQ ID NO: 317521 - DNA, 945 bp, Unknown
  Bacterial polypeptide expressing nucleotide sequence isolated from the Sargasso Sea
gataattcacatgatatcttctataatgttcctagcgaaattaatacgtggatgagccacatggatcaagttacaaaaatacctttaaattggcgtattgttgctaggtcaacaaatgaaataatcgcagcagtatcaaatcatgattcaagtagaatagggcttcaatttcacccagaagtcatccattcagaatatggtaaaaatattctaagaaattttttaatcaatattgcgcactgttcaaatgattggaatgctaacaattatgtaaaagatcaaatattaaacataaaaaatgaggttggtaatgataagcttattattggagtaagtgggggagttgattccactgtagcggcagctctaattcataaagctataggaaatcaatccacagctattcttattgatcatggtttaatgagaaaaaatgaggcaaaaaaatgtgtttcagatttgaaaaaaagtttagatgttaatattcatagttttgatgaatctaatatttttttatctaggcttgaaggagtaaatgatcccgaagaaaaaagaaaaattattggaaatcagtttattaaatcttttgaaaaaatatccaaagaatttggagatataccttttttagctcaaggtactttataccctgatgtaattgaaagcgggttcggtataggaggtaaatctcaaattatcaaaagccatcataatgttggtggcttgcctaaagatatgaactttaaacttgtagagccccttagagacctttttaaagatgaggttcgaaaggttggtatagaattgggtttaccagctaaacttgttcaaagacatccatttccaggccctggtttaggcgttagaataataggggacatttctaaagaaagaattgaaatcttgcaagaagctgacaaaattttattgatattcttcatgaggata

SEQ ID NO: 317522 - DNA, 850 bp, Unknown
  Bacterial polypeptide expressing nucleotide sequence isolated from the Sargasso Sea
gcgacactacttcataaagctatgataaaaaatcttatatgtgtctttgtaaataatggattacttagaaaaggagaagctaactctgttatgaagacctttaaagataatatgaatttaaatgttattaaatctgagagtgctgatatttttttaagacatttaaaaggtgaaacagatcctgagcaaaaaagaaagattattggtagaacatttatagatgtttttgattctgaggcaacaaaactaaaagatattaaatatcttgctcagggaactatttatccagatgtaattgagtcatcagggtcagaatcaaatgagacaagagttattaaatcacatcataatgttggaggccttccagaagagatgaaattagacttagtagagccactaagagacttattcaaggatgaagttagaagaatgggtattgaattaggtttacctgaagaaatgataaacaggcatccttttccaggtccaggtcttggtgtaaggattttgggagaagttacaaaaaataaaactcttattcttcaagaagcagatcatatatttattgaagaactaatcaaggctgatttgtatgatcaagtctctcaagcttttgctgttcttcttccagttaagtctgttggtgttgtaggagatgaaagaagatacgcagaggtaattggtttgagggctgttgaaactgttgatttcatgactgcaagatgggcacatttaccatatgatttcttagaacatgtttccaataggatcgttaatgaaatacaagatgtcagtcgagttgtatacgatatttccagtaaaccaccagcgacaattgagtgggaatgaa

SEQ ID NO: 317523 - DNA, 866 bp, Unknown
  Bacterial polypeptide expressing nucleotide sequence isolated from the Sargasso Sea
catggtttctgatgtaaaaaacaaagtaaaaaatgagaaggttttattagggctttctggtggtgttgactcatcagtagtagctatgttattacagaaagctattggaaataatttaatttgtatatttgttaatcatggcttgctaaggctaggtgaagtagatgaggtgatgtcaacatttgaagctttagatattgatataagattagttgatgcctcagaactatttctttcaaaactcattggagtaacggatccagagcaaaaaagaaaaattattggaaatactttcattgatgtatttgaaaatgaagcaaaaaaaataaaggatgttgattggctggcacaaggaactatttatccagatgtgatcgagtcatcttctgatgaccataattcaagtgtaattaaatcacatcataatgttggaggtcttcctgaaaggatgaatctaaaattattagaaccaattagagagctttttaaagatgaagttaggaaaattggagctgaattaaatactcctcagcatattttacaaagacatccatttccaggacctggactgggtattagggtcatgggagagattacccaaaagagaattgatattttacaaaaagcagataaaatttttatcgatgaactaaaagcagaaaaactatatgattcattaagccaagcttttgttgtttatttaccaataaagtcagttggtgttgttggtgatgaaagaaggtatgaagatgttttagctttgagagcggttgagactgttgattttatgacagcaaattgggcgcatttaccctatgattttattggtaaagtttctaaccgaattgttaatgagattccacttg

SEQ ID NO: 317524 - DNA, 853 bp, Unknown
  Bacterial polypeptide expressing nucleotide sequence isolated from the Sargasso Sea
catgagtcaaacatcattaaaaaaagaacgagatccttcaatattaattttagattttggatctcaatattctgaattgattgcaagaagaattagagaaactaatgttttttctcttgtagtaagtaaccgtatttccgttgcggatattagtgatattaatcctaaagggataattttgagtggaggccctaattctgtatatgaacaaaatgctcctaaatgtgatgaaaaaatttttaatttaggaatacctattcttggtatatgctatggaatgcaattaatggtcaaagaacttggaggatctgtcatttcagcaactaaaaaagctgaatatggtagagcaccattaaatatagataaagaatctgacctcctttctgatgtagaagataaatctattatgtggatgagtcatggggattcaattaattgtttgcctgcaggatttaataaaattgctcataccgagaacacacttcatgcagcaatttcaaatgatagaaagaaattatttggtgtgcaatttcatcctgaagttattcattcagagtttggaatgacagtgattaaaaactttgtttataacatctcctgttgtgcaaaggattggacaacggaaaccttcttagaggagacaattccaagaataagggatcaagttggcaataagaaagttttgcttgccttgtcgggaggagttgactcctcaacccttgcttttctactcaacaaagcaattggaaatcagcttacatgcatgtttattgatcaaggatttatgcgtaaaggtgaaccagaatttttaatgaatttttttgataagaaatttcatattaaggttgaatat

SEQ ID NO: 317525 - DNA, 798 bp, Unknown
  Bacterial polypeptide expressing nucleotide sequence isolated from the Sargasso Sea
atgtttataaaaaaaaagaatagtcttttaaccaaaaacttttttaataataaaaaaatgaataaagtttggatgagtcatgctgatcaaatttcaaagttacctaaaaactttagtgtagttgcatcaagtcaaaattctagatttgcaattattgaaaacatacataaaaaattttatggagttcaatttcatccagaagttacacacactaaaaatggtaaaaaacttattagaaattttatttttttaatttgtggaatgaaaaaaaattggtcttctaaagaccaaaagataaaattaataaaagatattagacaccaagtgaaaaacaataaagttatttgcgcgctctctggtggagtagatagtagtgtagttgctcaattattaaataaagctattggaaaaaaattattttgcatatttgttaatacaggtcttcttaggaaaaatgaggaaaaacaggttattgatacgtttaaaaaaaaattaaaaataaatttaatttatataaatgctgaaaaagaatttcttaaaaaattacttaatatttctgacccagaaaaaaaaagaaaaataattggaaatttatttataaaaatttttgaacgctatgctaaaaagattaaaaatgtaaaatttttagctcaaggaactttgtaccctgatttaattgaaagtaaatctgtgacaggaagtaaaacctcaaaaattaaatcacatcataatgttgggggtttaccaaaaaaaatgaagctcgaattggttgaaccactaaaatttttatttaaagat

SEQ ID NO: 317526 - DNA, 961 bp, Unknown
  Bacterial polypeptide expressing nucleotide sequence isolated from the Sargasso Sea
ctcatacagaaatggaaaaaaactgattagtaattttgtttttctcatatgtaaaattaagaaaaattggtcttcaaaagatcaaaagagacaattaataaaagatgtaagagatcaagtaggagataataaagttatttgcgcgttatcaggtggtgtggatagtagtgttgtggctcagttattgaacaaagcaattggtaaaaaactatattgtatttttgtaaacactggattgttaagaaaaaatgaggaagttcaggtcgttcaaacttttaaaaaacgattaaaaatgaacttaatctatgtaaatgccgaaaaggaatttttaagtaaattaaaaaatgtacctgatccagagaaaaaaagaaaaattataggaaatctatttatcaaaatatttgaaaggtatgcaaagaaaattaaaaatgtacagtttttagcacaaggaactttgtatccagatttaattgaaagtaagtctgttaccggaagtcaaacttctaaaataaaatctcatcacaacgttggtggtttacctaaaaaaatgaatttaaagttagtagagccattaaaatttctatttaaggatgaagttagaaaattaggtctagagttaaatttaagtcatgagataatttctagacatccatttcctggcccaggtttagcaataagaatgccaggtgttattactaatgaaaaaataaaaattttaaaagaagctgatcattattttgttcaagctttaagagatcatggtctttaccacaagatttggcaagcttatgcagcattacttccagtaaaaacagttggagtaatgggtgataacagaacatatgaatatttatgtttacttagagcaattacctcagaagatggaatgactgcagacttttatgaatttaaaaaatcgtttatgcaaactatttccaacaaaattgttaatagcataaga

SEQ ID NO: 317527 - DNA, 894 bp, Unknown
  Bacterial polypeptide expressing nucleotide sequence isolated from the Sargasso Sea
aatttatccaaaatcataattattgattttggatctcaatttacacaattaatagcaaggcgaattagagaacttggggtttattgtgagctgataaatcataagcaaattaataaaattaatcactttggaaaaattaaaggtataattttatcaggaggaccacttaatgtttatgaaactaaaaaaattaaatttaatgccagtattttaaaaaaaaaaataccaatattaggcatatgttttggacaccaattaatttccaaaactctcggtggtaaagttaaaaaagcaaaacaaagggaatttggactggtaagaataaaaaaagtcagtaacagcccattaataataaatttttttaaaaaaaatcttaaaaataatgtttggatgagtcatgctgatgaagttataaaattagcaaagaactttaaagttatcgctaaaagtgaaaatgcaaagttttgtatgattgaaaactctaaagaaaaattctatggaatccaatttcatccagaggtaacccacacaaataatggcaaaattatcctaaaaaattttgtttatagaatctgtagaataaagaaaaattggtcatcaaaaaatcaaaaaatgattttaataaatgaagttaaaaagcaagttggtaattcaaaagtgatttgtgcactatcgggtggtgtagatagtagtgtggtggcaaaattactttcaaatgctattggaaaaaaattaacctgcatatttgtaaatactgggttattgagaaaaaatgaagaacagcaagtaattaatacattcaaaaaaaaatttaaaattaatttggtttatattaatgctgagaatttatttttaaaaaaattgaaaaaaatgtttctgatcctgaaaaaaaaa

SEQ ID NO: 317528 - DNA, 937 bp, Unknown
  Bacterial polypeptide expressing nucleotide sequence isolated from the Sargasso Sea
attagagagttaggctcttattcagaaataattaatttaaaaaatatttttaaattaagaaacgacacttctgtaaaaggtattatactttctggaggtcctttaagtattactactaataaaggtatcagtttagatagttttttaattaaaaaaaaaataccaattctaggtatatgttatggtcatcaaattcttgctaaaaagtttggtggaaaaataaaagtttcaaaacaccgagaatttggtaaagcaatattaaaagccaaatcaaattctattttaacaaaaaatttttttaaaagtaaaaaaagtttagtatggatgagtcatcaagatattgtccaaaaacttcccaaaggttttaaaactgtagcatctagtctaaattcaaaatttgctgttattgcgaatgaaaagtttaaatactacggtgttcaatttcatccagaagtaagtcatacagagaatggaaaaatattaattaaaaattttatctttaatatatgcaaaattaaaaaaaattggaattccaaaaatcaaaaaaaaatatttatcagtaatattaaagatactgttaaaaatgataaagtaatctgtgcattatctggaggtgtagatagtagtgttgttgctttacttttgaaaaaagctataggcaacaatcttacttgtatatttgtaaatactggccttttaagaaaaaatgaggcaagcgatattaaaaaaatctttagaaaaaaaattaagctaaatttggtttatgttgatgcatctaagacttttttaaaaaaattaataaatatcgataaccccgaaaagaaaaggaaaattataggaagtctatttataaaaatttttgaaaaatacgcaaaaaaagtaaaaaatgctaaatatttggccccaaggaaccttgtacccagacatgatgaaagca

SEQ ID NO: 317529 - DNA, 831 bp, Unknown
  Bacterial polypeptide expressing nucleotide sequence isolated from the Sargasso Sea
ggtggtgttgattctactgttactgctgttctagtacataaagctatagaagataaacttaaatgtgttttcgttgatactggtttaatgagaaaaaatgaagttgagataataaaaaatttatttataaaaaattacaatatttctttggatgtgatagatgcatcagagattttcttaaaaaaacttaaaggtatttcagatcctgaaaaaaaaagaaaaattataggaaagcaatttatcgaagtcttcgagcgatattctaaaaaaaaaagggatattaaatttcttgctcaaggaactttatatccagatataattgagtctttgtcacaagtaggaaactcaaaagttactattaaatctcatcataatgtagggggtcttccaaagaagataaattttaaattattggaacctctaagagaactttttaaggatgaggttagaaaacttggtaaggaattagcaatttcaaaagagttcgttgatagacatccttttcctggacctggtttaggcattcgaattttaggtgaaattagtaaaaaaaaaataaagatattacaagaagctgattcaatttatttaaatctaataaaaaagcatggtctttatgataagatttggcaagccttttgtgttttactcccaactaaaactgtaggtgtaatgggtgatggtcgttcctatgaacaaatctgtgtactaagagccgttacctcagtggatggaatgacagctgaggcatacaaattttctaataattttttggaaatttgttctaatgagattataaataaagttaagggcataaacagagtttgttat

SEQ ID NO: 317530 - DNA, 583 bp, Unknown
  Bacterial polypeptide expressing nucleotide sequence isolated from the Sargasso Sea
atgaatattaattcttatgattgcctactcattgtagattttggaagccaagttacgcaactgatagcacgcagattacgcgaaattaacgtttattgtgaaatacacccatatcagaacgtaaatgaatccttgctaagtcaactttcaccaaaagcaataattttatccggcggaccagacagcgttacaagagacggaagcccaagagctcacttagctatttttgatatcggggtgcctttgttggggatttgctatggccagcaagtgatgatgcagcagcttggtggtgaagtaaaatctggagttggaacggctcaatttgggaaagcatttgttgaaagaaaaaaatcgtcagatttaataaaaggatggtttgttgatcaaaaagaacaggtctggatgagtcacggagaccacgttagtaaaatcgcacccggctttgaagtattcggattttctcccaatgctccatatgcactcgtcggcgacacaaagcgccattattatgctgtccagtttcacccagaagtttatcatactccaaatggtcaaactttatttgaaaattttatctcaa

SEQ ID NO: 317531 - DNA, 751 bp, Unknown
  Bacterial polypeptide expressing nucleotide sequence isolated from the Sargasso Sea
tttaagaggaaattaaaaatgaaccttatctacgtaaatgcagaaaaggaatttttaggaaaattaaaaaatgtttctgatccagaaaaaaaaagaaaaataattggaaatttgtttataaaaatttttgaacgatatgccaaaaaaatcaaaaatgttaaatttttggctcaagggacactttatcctgacttgattgaaagcaaatctgtcaccggcagtcaaacctctaagataaaatctcatcataatgttggtggtttaccaaaaaaaatgaacttgaaacttgtcgagccattaaagtttttatttaaagatgaagttagaaaattaggtttagaattaaaattaagtaaagaaattatatcgagacaccctttccccggccctggtctagcaatcagaatgccaggaattattactaatcaaaaaattaaaattttaaaagaagctgattattattttatacaagcattaagggaacatggactatatcataaaatctggcaggcatatgctgctttgcttcctgttaaaacggttggagtgatgggtgataatcgtacttatgaatatttatgtcttttaagagcaattacatcagaggatggaatgacagcagatttttttgagtttagaaagtcctttatgcaaacaatttctaataaaatagttaatagcataagaggtataaatagagttgtttatgatgtcacttcaaaacctccaagcactattgaattagagtagt

SEQ ID NO: 317532 - DNA, 646 bp, Unknown
  Bacterial polypeptide expressing nucleotide sequence isolated from the Sargasso Sea
agaatttattcgtgtttttgaagaaaagtccgctgagattggtcaagattttccttttcttgctcaaggaaccctgtatcctgatgttattgagtccgcaacaattggggttgcaggaaccgctaaaacgattaagacacaccataatgtaggcggtctccctgaagatatgcaatttgatgtagttgagcctttacgaaagctcttcaaagacgaggtccgtcgtgtaggtcttgaattaggcttgcctgaagaagtagtcttccgtcagccctttcctggaccgggtcttgcgattcgtatcttaggtgaagtgacgaaagacagggtatcactcttacaagatgccgatgagatagtgcttgaggaagtgaaggctgctgggctttatcgtgaactctggcagtcgtttgcggtgcttttaccagtaaagtctgtgggtgtgatgggagacaaacgtacctatgaatacaccattgcgatacgggctgtgacctcagtggatgccatgacggcggactgggctagattaccctatgatgttattgataaaatatcctcacgtatcatgaacgaagtacacggcgtgaatcgcgttgtttatgacgtcacctcaaaacctcccgccactattgagtgggagtaa

SEQ ID NO: 317533 - DNA, 683 bp, Unknown
  Bacterial polypeptide expressing nucleotide sequence isolated from the Sargasso Sea
aaatgtttcagatcctgaaaaaaaaagaaaaataattggaaatttatttgttaaaatttttgaaaaacacgcgagaaaaataaaaaaaataaattttttagcacaaggaactctttaccctgacttaatagagagcaaatctgtaactggaagccaaacttcaaaaataaagtcacaccataatgttggaggtttgcctaaaaaaatgaaacttcagttagttgaaccattaaaatatttatttaaagatgaagttagaaaacttggtttagaattaaagctaggaaaagaaattatcttaagacatccatttcctggacctggacttgctattagaatgcctggagttattacagatgaaaaaataaaaattcttcaagaagcagaccatatttatatagaagaattaaaaaaacataatttgtataataaaatctggcaggcttacgcagctttattaccagttaaaacggtcggtgtgatgggtgataatagaacttatgaatatatatgcttgataagagcgattacctcagaagatggaatgactgctgatttttttaatttcagtaaaaagtttatgcaaattgtatcaaataaaataattaacaatataagaggtataaatagagtagtctacgatgtaacatcaaaaccaccaagcactattgaattagaatgat

SEQ ID NO: 317534 - DNA, 821 bp, Unknown
  Bacterial polypeptide expressing nucleotide sequence isolated from the Sargasso Sea
aatttataagcaaatacttaatagaggatgttcaggaatagttttctctgggggtccagcaagtgttcataagtcaaatactccaaaaattgacaaaagaatatttaatctaaatatcccaatattgggaatttgctatggtatgcaattactatgttatcaacttggtgggaaggttaaaatttcaaaaaaaagagaatttggtaaaactcttataaagccctcaaaaaaaagtgttttattctcaggatttagaaaaggaatgagctcgaattatgtctggatgagccatggtgacaaggttattagtctaccaaaagattttaaaagcattgcatcaagttcaaatactaagtttgcagcattcgagaatgaaaaaaagtctttttatggtttgcaatttcaccccgaagttgtccacacgcccaatggtcataagataatagaaaattttatatttaaaatttgcaaagtaaaaagaaactggagcatgaaaaatcatctaagaaatcagattactgagattaaacattcagttcataaggatcatgtaatttgtggattgtcgggtggagtggatagtactgtcactgcagccataatttcaaaagccataaataagcaattaacatgcatttatgttgatacaggcttaatgagactaaatgaaacaaaagaggtagtaaaaatgtttaaaaaacattttaaatctcgattaatagtaaaagattcaagaaagacatttataaaagccctaaagggagccacagatccagaaaaaaagagaaaaataataggtaatctttttatcaaaatattta

SEQ ID NO: 317535 - DNA, 971 bp, Unknown
  Bacterial polypeptide expressing nucleotide sequence isolated from the Sargasso Sea
aatcccacatgatactcccctatctgaaatcaataaaaaaggcgttataaaaggtataattttatcgggcggaccatcctctatttttaatgaaaatgctccgaaatgcgatccagaaatatttagaagtaacataccaaccttaggaatatgctacggtatgcaattaatggcgcatgaattaggaggagaagttgagcaaggcaaaacccatgaatatggaaaagctaatttatttattgataacaaccttgatctctttgaaggcctatggttagaaaccataatttggatgagtcatggagactcagttcttcgtatgcctgatggatttaatagaatcggtcatactgaaacagctagcatttcggcaatggctaacccatcaaaaaaacaatatggcgtacaatttcaccctgaggtatatcacacaacaaaagggactgaaattattcgtaactttgttcataacatatgtgattgtaaaccaaactggacacccgactcttttataaaaactactattgatgatataaaatctaaagtaaataatgataaagtactttgtgcattatcaggtggagtagactctactacagtagctgcacttcttaaaaaagccattggagataaattaacgtgtgtatatattgaccaaggtttcatgagaaaaggtgaatcagataggattaaagaattattttcaggtgattttaaaattaatttaatttatgttgatgctaaagaacgtttttttaaaaaagtaaaaggtgttacagatcctgaagaaaaacgaaaaaaaattggtgaagaatttattcgtgtttttgaagaaaaagcaaaagaattaaacagcgaatttccttatctagcccaaggaacactttatcctgatattattgaatctgctactgttggtgttaatgatacggctgttaaaataaaaacacaccataacgtaggtggattac

SEQ ID NO: 317536 - DNA, 884 bp, Unknown
  Bacterial polypeptide expressing nucleotide sequence isolated from the Sargasso Sea
aatggaaaaaataattgttttagattttggttctcagtatagtcatttaatctgtagaagaataagagaattttcagtatatgctgaattagttccatatgatatatctcctgaagaattaaagaagatgaatccaaaagggattattttttcaggaggtccatctagtgtctataatgatgatgcaccaaaaccagatgaagaattattcaactttgacttgccactattaggaatttgttatggacatcaattaattgtaaacaagtttgggggcaaagtaaaaagagcaaacaaagaatatggctcatcgcttctatctatggataagaattcagcacttttagatggaattggagaatctatacgtgcatggatgagtcatggtgatgaagcagaagagattccaactaattttgaagttattggacatacagaaaattcacatgcagctgcaatagcaaatacagatagaacagtttttgggattcagtttcatccagaagtagtacatactgagcgtggtacagatattttgaaaaattttgttctgaatgtttgtaaagcaaaacaagaatggactatggaaggatttgtagataagacagttaaagaaatctcagaaattgatggaaatgttctatgtggagtaagcggaggtattgattctacagttgcagcactgttaattcacaaagcagtaggcagtagactaacaggagtgtttgtagataatggtttgttgagattgaacgaatccgaggagattgaggacatgttcaagaataattttgaattaaattttcatagaatagatgcaagtgaacagttccttttcaaattaaaaggagttacagatcctgaacagaaaagaaaaattgtgg

SEQ ID NO: 317537 - DNA, 821 bp, Unknown
  Bacterial polypeptide expressing nucleotide sequence isolated from the Sargasso Sea
aatggaagatagtaatattactaataaatttaattctgacggcatattagttgttgattttggaagtcagtatactcaacttattgcaagaagagttagagaagagggtgttttttgccaaattataccttttaatagtgttgaaaattatctttcggaaaatgaacctaagggtattattttgtctggaggccctgcatctgttctagaagaagaaactcccaaagtgtcagaaaaaattataactttaaaaaaacctatattgggtatttgttatggtcagcaaacgttagttaaacaattaggcgggaaggttgtaaagacaggaaaaagtgaattcggcagagctaagattaaagtagttaaagactgcgcattaatttcaggtatatggaatatagatgaagaatatgatgtatggatgagtcatggagattcagtatcagaaatgccaataggttttgacgtaatagctcaaacagaaggtgctaattatgcaactattgctaatgaagatttgaggatttacggtgtacaatttcatccagaggtagttcatacagtagaaggaaaacaattaataagaaattttgtaaaagacattgctggttgcaaaaataattggagtatgaagtctttttcacaatataaaattaatatattaaaaaattatataggaaatggaaaagtattatgtggcttatctggaggagttgattcatctgttacagctgctttattggatgtagctattggaaatcaattaatctgtgtttttgttgatcatggacttttaagatataaagaatctgaggaaatat

SEQ ID NO: 317538 - DNA, 883 bp, Unknown
  Bacterial polypeptide expressing nucleotide sequence isolated from the Sargasso Sea
aagcgtaaaaatttcgataaaaatatcaagggcatcgttttgtctggtggtcctttaaatgtttatgaaaataaaaaagtaaaatttaataataatcttttaaaacttgaaatacctatattgggaatatgttttgggcaccaaattatttcaaaagtaatgggtggaaaagtaaaaagttctaaatttagagagtttggactagctgaagtaacagagataaaaaaaagcaaattaacaaaaaattttttttctaataaaaaaaataatgtttggatgagtcatgcagatcaagtaacaaaattaccaaaaaattttagtgtaattgcaaaaagtaataattctaaaatgtgtattattcaaaataataaaaaaaatatttttggaatccaatttcatccagaagtaagtcataccaacaaaggaaaagtaatacttagaaattttatattttctatatgtaaattaactaaaaattggtctgctagtgatcagaaaaaaaaattaattagtgaggtaaaagaagttgtgggaaattcaaaagtcatttgtgcattatctggcggtgtagatagtagtgtagttgcaaaattgttatcaaatgcaataggaaaaaagttgacatgtatttttgtaaatacaggcttactcagaaaagatgaggaaaaacaagttgttaatacatttaagaaacgttttaaaattaatttaatttatgtgaatgctgaaaacctatttttatcaaaattaaaaaatatttctgatccagaaagaaaaagaaaaattattggaaatttatttataaaaatatttgaaaaatacgcaaaaaaaattaaaaaagtaaaatttttagccccaaggaactctgtatccagattaatcg

SEQ ID NO: 317539 - DNA, 511 bp, Unknown
  Bacterial polypeptide expressing nucleotide sequence isolated from the Sargasso Sea
atctcatcataatgttggagggttgccgaaaaaattaaattttaaattaattgagcctttaaaagaactttttaaagatgaagtaaggattttaggtaaaaaattaaatgtacctgaatctattttaaaaagacatccgttcccaggtccaggattagctgtaagaatacctggaaatgtaactaaagaaaaaatcaaaattttacaagatgctgatttaatttttattaagcaattaaaagaaaaagatttatataataaaatttggcaagcatttactgttttacttccagttaaaacaatcggagttatgggagatcaaagatcttacgaatatacctgtgctttaagagctgtaacatcggttgacggtatgactgcagaaccatattattttaattcagaggatttagcgcagataagtaccaaaattgtgaatgaagtcaagggtgttaatagagttgtatatgattatacaagcaaacctcccggtactattgaatgggagtaa

SEQ ID NO: 317540 - DNA, 628 bp, Unknown
  Bacterial polypeptide expressing nucleotide sequence isolated from the Sargasso Sea
attctcaaaatatattagaaaattatcacaaaatgatttctatctcgcacaaggaactctatatacagatattatagaaagtcgctcttaccatggtggaaagagtgtgactataaaatcacatcataatgttggaggtttaccaaaagaccttaaatttgacgttatagagccttttaaagagttatttaaggacgaagttagaagattaggcctattctacaaattagatcagagatttgttaatcgacatccttttccaggaccaggactgggtattcgctgtattggaaaggtcaacagacaaagactagatactttaagagaagtagatgaaatttttattaattttttaatcgaaaagaatttatataacaaatcatggcaagcatttgctgtcttacttccagttaaatctgtgggtgtaatgggcgatgagagaacttatgaagaaacttgtgtcttaagatgtataaattcagttgatggtatgacagcagatgttacacaaattgatatagaaactttatctgaagtagcaactcacataattaataaagttcctagagtaaataaagtcctatatgacataactagtaagcccccatctaccattgagtgggaatga

SEQ ID NO: 317541 - DNA, 308 bp, Unknown
  Bacterial polypeptide expressing nucleotide sequence isolated from the Sargasso Sea
tcagagtgctgatgccatattcatagaggagctaaccaaagcaggcttgtatgatcaagttagccaagcattctgtgcatttcttccaataaaatcagtaggagttgttggagacgagagaagatatgcagatgtgatagcaataagagcagttgagacagtagattttatgactgctacttgggccaagcttcctcatgattttttggctcgtgtttctaatcgaattgtgaatgagctagaggacgtcagcagggtggtttatgacatttcaagtaaaccgccagctacaattgagtgggagtaat

SEQ ID NO: 317542 - DNA, 403 bp, Unknown
  Bacterial polypeptide expressing nucleotide sequence isolated from the Sargasso Sea
attgcctgaagaaattataaacaggcatccttttccaggacctggtcttggtgtaaggatattgggtgaagttacaaaagataaaactcttattcttcaagaagcagataatatatttattgaagaactaatcaaggctgatttgtatgatcaagtctctcaagcttttgctgttcttcttccagttaagtctgttggtgttgtaggagatgaaagacgatatgcagaattaataggattaagatcagtaaaaactgtagattttatgactgctaagtgggcgcatctaccatacgattttctagaacttgtatcgaatacaatagttaacgaaatacaaaatgttagtagggtagtctatgacatttcaagcaagcctcctgcaacaatagagtgggaataa

SEQ ID NO: 317543 - DNA, 649 bp, Unknown
  Bacterial polypeptide expressing nucleotide sequence isolated from the Sargasso Sea
attgggtcgaacattcatagaggtttttgaggacgaggcttcaaagttagaaaatgtgaaatggttggctcaaggaaccatttacccagatgttatagagtcagcaggatccaaaacaggaaaagcgcatgtaattaagtcacatcataacgttggcggtctccctgaggagatgaaattaaagctggttgagccgctcagggatttattcaaagacgaggtaagaaaaataggcaaagaacttggactgacctcaaagttggttgatcgacatcctttcccaggtcctggcttgggagtgagaatcttaggagaagttaaaaaagaatacgctgatctattgaggttggccgatgatatttttatcgaggaactacataaagagaatctatacgacaaaataagtcaggcatttgcagtttttctaccagtcaaatctgttggcgtcatgggcgatggaagaaaatatgaatacgttattgctctaagagcggttgagacagctgattttatgactgccaattcggctaaattgccctatgaatttttggatcgtgtatcaacacgaattatcaatgaagtctcaggtatttcaagagtcacgttagatatatcctcaaaaccaccatcaactattgagtgggaatga

SEQ ID NO: 317544 - DNA, 1555 bp, Unknown
  Bacterial polypeptide expressing nucleotide sequence isolated from the Sargasso Sea
atgaagagtagaatagaaactattttaattgtagattatggatcacaatatacacaattaattgcaagaagaatcagagagttagaagtcttctgtcttgtctatccttttaaaaaaattacaaaaaaaattttaaatgaaatccaaccatcggcatttatattatctggaggacctagatcagtacttgacaaaaatgctcctaaattaaatcaagaaattttaaaaatgaaaaaacctgttttagccatctgttatggcatgcaattagtaacaaaaaatttgaaaggtgtagtaaaacgttccacgcatagagaatatggtcacactattataaatattaagaaaaaatcaataatatttaaaggaattaataaacaaaaatttaaagtatggatgtctcatggagataatatcaataaaataccaaaacttttttcaataacatctttatcaaataataagattatttcttctattgaaaatattaaaaataaaatttattgcattcaatttcatccagaagtttatcatacagattttggctcaaaaataattaataattttgttttcaatattgttaatgtaaaaaatagattcaaaattcaaaaatttattgaaaacaaagtttcagaattaaaatattatataaaaaataaaaaaatcatttgtggtttatcaggtggtgtagattctacagttactgcttacttattaagtaaagctgttaataaaaatctttattgcatatttgttgatcacggccttttaagaaaaaatgaatcaaatgaagtatcagaaatattttcaaaaaaatttggaaataactttattaaaattaacgcttcgaatatttttttaaaaaatttaaaaaatgtatctgaccctgagaaaaaaaggaaaataattggaaaaacatttatagaagtttttgataaagcagctaaaaaaatatccaatgtagattatttaggacagggtactctttatcctgatattatagagagtattccattttttggcggtcctacagctaaaattaaaagtcatcataatgtaggaggattgccaaaaaaaatgaaacttaaagttatagagcctttaagggaattatttaaagatgaagtaagaaatgttggaagacaattaaaaatagatcaaaacctacttttgagacatccatttcctggaccaggattagcaatacgaataccaggagtaattgataaaaaaaagatcttaattctacaagaagcagattatatttttattcagtttcttaaggagaaaaaactttacaataaaatttggcaagcttttgttgttttgttaccagtaaaatcagttggtgtgatgggtgatgaaagaacatacaactactctgtttctttaagagctataacttcagtagatggaatgacagctgatttttatatgtttacaaataatcaactaaaagaaatatcttctcgtataattaataacgtcaaagggattaatagagtcttatatgactttacttcaaaaccaccgggaacaatcgagtgggaataat

SEQ ID NO: 317545 - DNA, 1015 bp, Unknown
  Bacterial polypeptide expressing nucleotide sequence isolated from the Sargasso Sea
aatgggaaagaaattaataagtaatttcatttttttaatttgtaaaattaaaaggaattggtcctctagggatcaaaaaaatcagcttattaaagatgttagaaaacaagttggaaataataaagttatttgcgctttatcaggaggtgtagatagtagtgtagttgctcaattactgaataaagctattggaaaaaaactttattgtatttttgtaaatactggtcttctaagaaaaaatgaggaagtacaagtagttcaaacttttaagaatcgtttaaaaatgaatttaatttatgtaaatgctgaaaaagaattcttaaaaaaattaaaaaatatttctgatccagagaaaaaaagaaaaataatcggtaatttatttatcaaaatatttgaacggtatgcaaagaaaatcaaaaatgttaaatttttagctcagggtactctttatccagacttaattgaaagtaaatcagttactggtagccaaacttctaaaattaaatcacatcataatgttggtggccttccaaaaaaaatgaatttaaaattagtagaaccactaaaattcttatttaaggatgaggtaagaaaattaggattagagttaaacttaagtaaagaaattatttcaagacatccttttcctggaccaggtctagccattagaatgccaggcataataactaatgataaaattaaaattttaaaagaagctgattattattttattcaagctttaaaagatcacggtctttatcacaagatttggcaagcatatgcagcattgctgccagttaaaactgtgggtgttatgggagacaatcgaacttatgaatatttatgtttgttaagagcaattacatctgaagacggaatgactgcagattattatgaatttaaaaagtcttttatgcaaactatttcaaataaaatagttaacggcataagaggcataaatagggtagtgtatgacgttacttcaaaaccaccaagcactattgaattagagtag

SEQ ID NO: 317546 - DNA, 883 bp, Unknown
  Bacterial polypeptide expressing nucleotide sequence isolated from the Sargasso Sea
gctgattgccagaaggataagagaaataggagttttatctgaaattgtctcgtgcgaaatatctccaaaagaacttttaaaattaaatccaagaggcattattttttctggcggtccagaatcggttaattccaagtttaaacctaaatttaattctaagattcttaaaataaaccaacctattttagggatttgctatggaatgcaattattagcgaaccaatataaaggaaaagtagatttgtcggcgaaaagagagttcggtcactcagaattagcatttaacaaaaatattcttttcaaaggagtaaatgggaaaaaaacaaaaattgatgtatggatgagtcatggcgataaagttgtaaagcttccgaaacaatttaaaaggattgcctcgtcgacaaattctaaaattgcagctttcgcttcgaatgacaaaaaacgctttggtgtgcaatttcaccccgaggtgtctcacaccgatcaagggcaaaaaatattaagtaactttgctttggatgtttgtggctgtaagaaaaattggacttcaaaaaatattattgatgatttggttcagaacattaaaaatcaggttggtaataaacatgttctcttaggaatttcgggcggtgtggattccagtgtcgtagctgctctgatttcaaaagctatcggtaaaagattgcattgtatttttgtcgataacggacttttaaggaaagatgaatctatccaagttaatcgtgatttaaaaaaaggtcttggcttgaagattgcgacggtaaatgccgaagatatattcctgaaaaaactcaaaggaatgacagatcctgaggaaaaaagaaaaataataggcagaactttcatagattattcaaaagag

SEQ ID NO: 317547 - DNA, 741 bp, Unknown
  Bacterial polypeptide expressing nucleotide sequence isolated from the Sargasso Sea
gatttaaaattaatctaatctacgtaaaagctaaaaaaatatttttaaaaaaacttaaaaatatctcagaccctgaaagaaaaagaaaaattattggaaatttatttgttcaaatttttgaaagacatgcaaaaaaaataaaaaatataaaatttttagcccaaggaactctttatcctgatttaattgagagtaaatctgtaactggtagtcaaacatcaaaaataaagtcacaccacaatgttggaggtttaccaaaaaaaatgaaacttaaactaatagagccattaaaatatttatttaaagatgaagttagaaaattaggcttagaattaaaattaaaaaaagaaattgttttaagacacccatttcctggacctggacttgccataagaattccaggcgttataacaaataaaaaaataaaaattcttcaggaagctgattttatttatattgaagaattaaaaaaacttagtttatacaataaaatttggcaagcctatgcagctttattgccagttaaaactgttggagtaatgggagataacagaacttacgaatatatatgtttgcttagagcaattacatcagaagatggtatgactgctgatttttataattttagtaaaaaatttatgcaaactgtatcaaacaaaataatcaataatgtacagggtataaatagagtagtttatgacataacatcaaaaccaccaagtactattgaactagaatgat

SEQ ID NO: 317548 - DNA, 913 bp, Unknown
  Bacterial polypeptide expressing nucleotide sequence isolated from the Sargasso Sea
attgaaatctgaaatattagatgaaaaagtaattttaggtctctcgggtggagtagactctagtgtagctgctattctacttgatagagcaataggtaagaatttacattgcatttttgtaaataatggtcttttaagaaaaaatgaatatgatgaagtattagaccaatatattggaatgggtttaaatgtcaaaggtgttgacgcatcggatcaatttataagtggtcttaaaggtgttattgatcctgagaggaaaagaaagataattggtaatacatttattgatgtttttgatgaagaatcaaaaaaaatatccaatgctaaatggcttgctcaaggaactatttatccagatgtaattgaatcaatctctgtaaaaggaccatctgcaactattaagtctcaccataatgttggaggacttccggaaaaaatgaatcttaaggtcattgagcctcttaaaatgttatttaaagatgaagtaagaaaaattggtaattctctaaaaatgcctcaagaaatactatctagacatccctttccaggcccaggtattggaataagaattcttggagaagttgactatgaaagtatagggcttattcaggaagctgataaaatttatattgatgctctaaaaaaatggaatctctacaataaaatttggcaagctggctctatactattacctgttaaaagtgtcggtgtaatgggggatgaaagaacttatgaaagatgtgttgcattaagggcagtagtctcaactgatggaatgactgcagattggtatgaattttcaaatgatttcttgaaagaggtttccaataacataattaataaagttaaaggaataaatagagttgtttatgatataagttctaaaccacctgccacaattgagtgggaataa

SEQ ID NO: 317549 - DNA, 1348 bp, Unknown
  Bacterial polypeptide expressing nucleotide sequence isolated from the Sargasso Sea
aatgcagtttaacgatgaaaaaaataaagttttaatcgttgattttggctcacaagtaacaaagttgataggtagaagaattcgggaacttggtgtttactcagagatcattactcctaatgatctattgaaaattaaaaaatttactaaaataaagggccttatattttctggagggccatccaccgtcacaagtaaaaaatttcaaagtgtgcctaaagagatatttcaaaaaaagatacctatattgggtatttgttatggcttgcaattaataacgaaaatatttggtggaaaaattaaatcctcaaaaaaaagaagagaatttggcagagctacattgtataaaaaaaaatcctctttattaacgcaaaattttttaaaatctaaaagttatgtttggatgagccatgaagatgcagtagtaaaattaccaaaaaattttaaaatagttgcatcaacaaaagattcaaaaatgaccataattgaaaataaaaaaaataaaatctatggagttcagtttcatccagaggtaactcatacaaataatggaaaacaaatatttaaaaactttttgttcttaatttgcaaattaaagaagaattggtctgtaatctctcaaaaaaaaatattaatagatcagataagagaaactgtaaaaaaagataaagtaatatgtgcattatcaggtggagtagatagtagcgtagttgcattattaataaataaagcaattaaaaaaaatcttatttgtataatggtagatacaggtttaatgcgtaaagatgagttcaaatttacctacaatatttttaaaaaaaaatataacttgaatgtcaaactaatcaatgcatcacagttttttttaaataaattaaaagatatctcagatccggaaaaaaagagaaaaataattggcaaactttttattaaaatttttgaaaaagagtcgaaaaaatataaaaatttaaaatttttagctcaaggaacactttatcctgatattattgaaagcagatcttctactggaagtaaaacatctaaaattaaatcccatcataacgttggaggtttaccgaaaaaaatgaatttaaaattaatcgaacctttaaaagagttttttaaagatgaggttagaattttgggcaagtctcttaaattaattaaaagtataaattttaaacatccatttcctggccccggcttaggtatcagaattgtaggaagcataaatagagaaagagttaatatattacaagaggtagattatatttatataaatgaactaaaaaaaagtaatctatatgataaaatatggcaagcttatgcagctttgctaccaaattaa

SEQ ID NO: 317550 - DNA, 547 bp, Unknown
  Bacterial polypeptide expressing nucleotide sequence isolated from the Sargasso Sea
tgtcagctttactggagggccctcagaaacgattaaatcacatcacaacgttggtggtttgccaaaaaaaatgaaactaaagcttgttgagccattacgtgagttatttaaagatgaagtgagacagcttggttttgagttaggattacctaaagaatttatagggcgccatccatttcctggtcccggacttgctataaggtgccctggtgaggttacatctcataaaatagctattttaagaaaagcagattcaattttcatagatcaaattaaaaaatataatctatatgataaaatttggcaggcatttgttgtgttgctccctgttagatctgtaggtgttatgggagatggaagaacatatgattttgtttgttctctgagagctgtaacttctgttgatggaatgacagcagatttttatccttttgataataattttttaggtgagacatcaaataaaattatcaatgaagttaaaggtatcaatagagttacttatgatattacatcaaagcctccaggaactattgaatgggagtga

SEQ ID NO: 317551 - DNA, 747 bp, Unknown
  Bacterial polypeptide expressing nucleotide sequence isolated from the Sargasso Sea
tatgaaattaaaatctattaaatataaaaataataaagcaaataataataacatacctgtgattgtagtagattttggaagtcaaactacccaacttatattaagaaggattagagaatttggtatatattgcgaagtagtatcatctaaagaagttttagataaagtaaaaaaatttaaaccgaaggctataatactttctggagggccgtcttcttcattcacaaggttttcacctaaagtaaataaaaatatatacaaactaaatatacctattcttggcatttgctatggaatgcaattaatatgttctcagcttggaggtaaagtcaagcaaacaaaaataagagagtttggaatagcgaagcttaatgttattaaaaatgataggctatttttaaatgcaattaaattaaataaaaccagccaggtatggatgagtcacggagacgaagttgtaaagttacccagaggctttaaatctttagctacaacaaatggtaaaaactacgcaagtatttccaacgttaaaaagaaaatctatggtttgcagtttcatcctgaagtagtacatactgtaaaaggaaaacaaatcttaggtaattttctaaaaaatatatctaaaataaaacctgaatggaaattagaaaactttttagatgaaaagttgatgcaaataaaaaagaaagtaggtaaagatgaggtaatttgcggtttgtctggaggcgttgactcgtccgtagttgc

SEQ ID NO: 317552 - DNA, 949 bp, Unknown
  Bacterial polypeptide expressing nucleotide sequence isolated from the Sargasso Sea
gacgacttgatatcttcaagattgaaagagattaaacaaaaggttaaagaggataaagtacttttaggattgtctggaggtgtagactcatcagtaacagctgtacttctctataaagctattggaaataatttgacatgtgtttttgttgataatggattattaagaaaaggcgagagcgatcaggtaatgcaaacttttaaagataatatgaaattaaatgtaattaaatcagaaagtcaggaaattttcttaagacatcttgagaatattgaagatcctgagcaaaaaagaaaagtgatcggaagaacctttatagatgtttttgatgcagaggctatcaaattgaaagatattaaatttttagcacaagggacaatatatccagatgttattgaatcttctggctctgaatcaaatgaggcaagagttattaagtctcatcataatgttggaggcttacctgaggaaatggagcttgatcttgtggagcccttgagagatctttttaaagacgaggtaagaagaatgggcactaaattaggaattccaaaggaaatgcttgaaaggcatccttttcctggacctggtttaggagtaaggattattggagagataacaaaagaaaaaacaataatacttcaagaagcagatcatatatttattgaagaactaattaaggcagatttgtatgacaaagtaagtcaagcatttgctgttttattgcctgttaagtcagttggtgttgttggagatgagaggagatatgccgaagtaataggattaagggcagttgaaactgtagacttcatgacggcgagatgggctcatcttccttataaatttttagagcatgtatcaaatagaatagtgaatgagatagaagaagtcagtagagtagtatacgatatatcaagtaaaccacctgctactattgagtgggagtaat

SEQ ID NO: 317553 - DNA, 1493 bp, Unknown
  Bacterial polypeptide expressing nucleotide sequence isolated from the Sargasso Sea
aatgaaaaaaaacaataattctaagaaaattcttatatttgattttggttctcaatatactcaattaattgcaagacgtgtaagagagcttggtgtattttctgaaatatcaaatcataaacaagttaaaaatgttaatgtaaaggaactatttggaattattttgtcaggcggtcctttaaacgtttatgaagataaaaaaataaattttgataaaaaaattttaaacctaaaggttccaattttaggagtttgctttggtcatcagttaatttcaagacgttatggtggcaaagttgtaacagcaaaaaacagagagtttggcttagcaactattaaaaaaaaattaaactctaaattaaccaaaaacttttttgataacaacaaacaaagggatgtatggatgagtcacgcggatcatgtagtaaaacttccaaaaggttttaaaagaattgcatcaacgagaggttcaaaatttacaataattgaaaatgatgcaatcaatagatacggtattcaatttcatcctgaggtaactcatacagaaaaaggaattttattacttaaaaattttgtttttggaatatgtaaatcaaaaaaaaattggtcaacagatcatcaaaaaaaaacattaataaaaaacgtccaaaatcaaattggtgacaaaaaaataatatgcgcactctctgggggtgtagatagcagcgttgtagcacaattgttaaataaagcagttggtaaacaattgcactgtatatttgttaatacaggattgttaagacttaatgaagaaaaacaagtagtaaatactttcaaaaaaaaactaagaatgaatttgatatatgtaaatgcagcagatgaatttttaaataaattaaagaatattacagaacctgaaaaaaagagaaaaataattggaaatttatttattaaaatttttgaacgatatgcaaaaaaattaaagaacgtgaaattcttagcccaaggaactttatatccagatttaattgaaagtaagtcagttactggaagtcaaacatctaaaattaaatcacatcacaatgttggcggattgccaaaaaaaatgaaattagaattgtgcgaaccactaagattactttttaaggatgaagtaagaaaacttggaataaaattaaatttatctaaaaatataattagtcgtcacccatttccagggcctggattagcaataagaatgccaggcaaagtatcaaaagataaaatagaaatattaaagcaggcagataatatttttatttctgaacttaaaaaagaaaaattatatgataaaatttggcaagcatatgccgctttgttaccggtaaaaactgttggtgttatgggtgataatagaacttatgagtatatttgcttgctaagagcaataacttctcaagatggtatgacagcagatttttttgattttcctaaaaatttcatacaaaatgtatctaataaaattattaacaaca

SEQ ID NO: 317554 - DNA, 979 bp, Unknown
  Bacterial polypeptide expressing nucleotide sequence isolated from the Sargasso Sea
cggcagggagttcctcggggagttgacaggactaaccgatccccaacagaaaaggcatcaggtaggtgccgtattcatccggatgcgcgaacagtttctcggagaacttcaattgaatcccgaagagtggatgctcgggcaggggacgctttatccggacattatcgaatccgggggaagcgaacatgcgaatgtcatcaaatcccaccacaaccgggtggatgaagtgatggaactgctcgaagccggtcaactggtcgaaccgctcaaagatctctacaaggatgaggtgcgggaacttggaagcctgctcggtctcccggattcgatcgtctggcgccatcctttcccgggtccaggactgtccgtgaatgttctctgttcggaaggcaggaatgatcagggaaccgacagcaagttggaacaacgggtcctcgaggcccttccagaaaatagctgcagcgcctcggtccttccggttcggtcggtgggcgttcagggagatcagcggacttataccccacccgccgtgctttggaaaacccccgaagactggaattggctcgaggagcagtcgatccgcatcaccaactccgtccgtgaaatcaaccgtgtggtgctcctcctcagcccagctgcactaacccccttgaaaatccgggaagcctactgcacccgggaaagacttgacctgctccgccaggcggatgccattgctaccaaaaccctgatggaacatgatctgatgcgggacattttccaactgctggtgatcctgctgccgatttcagaagacggacaaggggatagcatcgtcctcagaccggtctgttccgaagatgtgatgaccgcgcaattcgcccggctggattgggatctcctgaactctttgaaacaatccctatccaacctccccggagtcgatgctgtgttctatgacatcacccataaacccccggcaacttttgggtgggaatga

SEQ ID NO: 317555 - DNA, 460 bp, Unknown
  Bacterial polypeptide expressing nucleotide sequence isolated from the Sargasso Sea
catgagtcaaaaatctttcaaaaaagagcgagatccttcaatattaattttagatttcggatctcaatattctgaattgattgcaagacgaattagagaaactaatgttttttctcttgtagtaagtaattgtatttcaattgaggacattaatgatattaaccctaaagggatcattttgagtggcggtccaaattctgtatatgaacaaaatgctcctaaatgtgaagaaaaaatttttaatttaggaattcctattcttggcatatgctatggcatgcaattaatggtcaaagaacttggaggatctgtcatttcagcaaccaaaaaagctgaatatggtagagctcccataaatatagatcaagaatctgatctcctttttgatgtagaagataaatctataatgtggatgagtcatggtgattcaattaattgtttgcctgatggatttcaataa

SEQ ID NO: 317556 - DNA, 480 bp, Unknown
  Bacterial polypeptide expressing nucleotide sequence isolated from the Sargasso Sea
gttggtaagtaaaaaagttttgcttgccttgtcaggaggagttgattcctcaactcttgcttttcttctaaataaagcaattggaaatcagcttacatgcatgtttatagaccaaggtttcatgagaaaaggtgaaccagaatttttaatgaatttttttgataagaaatttcatattaaagttcaatatattaatgcaagagaaaggtttattaccaaattaaaagggattactgatccagaacaaaaaaggaaaattattggtgaagaatttattagagtatttgaagaagaaagcaatagattaggcccttttcagtatttggctcaaggtactctttatcctgatgttattgaaagtgctggtactaatgttgatcctaagactggtgaaagaatagctgtaaaaataaagagtcatcacaacgtgggtggattgccaaaagatttacaatttaaattagttgagccattaagaaa

SEQ ID NO: 317557 - DNA, 706 bp, Unknown
  Bacterial polypeptide expressing nucleotide sequence isolated from the Sargasso Sea
atcggccgcgaattcgtcgaggtgttccaggcggaagccaagaagctctccaacgccaagtggctggcgcagggcacgatctacccggacgtggtggaatcgggcggcaccaagaccaagaaggcgacgaccatcaagagccatcacaacgtgggcggcctgccggaaacgctgggcctgaagctgctcgaaccgctgcgcgacctgttcaaggatgaagtgcgcgaactgggcgtggcgctgggtctgccgcacgagatggtgtatcgccatccgttcccgggcccgggcctgggcgtgcgcattctgggcgaggtgaagcgcgaatacgccgacctgctgcgccgcgctgatgcgatctttatcgaggagctgcgcggcaccaaggcaacggcgcaggatgcggctgccggtctgtgcgccgaagccgatgtcggcaagagctggtacgacctgaccagccaggcatttgcagtgtttgtaccggtcaagtccgttggcgtgatgggcgatggccgaacgtatgactacgtgacggccatgcgcgcggtgcagaccaccgatttcatgaccgcccactgggcgcacctgccgtacgcgttgctcggccgtgtgtcgaatcgcgtcatcaatgaggtgcgtgggttgagccgggtcgtgtatgacatctcgggcaagccgcctgcgacgattgagtgggagtgag

SEQ ID NO: 317558 - DNA, 1135 bp, Unknown
  Bacterial polypeptide expressing nucleotide sequence isolated from the Sargasso Sea
tccctgccgccgtgctttcgcgtcatcgccgagacacccagtgcgcctcttgcgggtatggcagatgaggaacgtcgcttctatggattgcagttccaccctgaggtgacgcatacctctcagggccggcagattatcgagcgctttgtgcatgagatctgcggttgcgggaggcagtggacaccggatcggattatcgatgcggccattcaagatatccgccagaaagtgggatcggataacgtgctcttggggttgtcgggcggagtggactcctctgtcgccgcagcgttgcttcaccgtgctattggggatcagctgacctgcgtgtttgtagataccggcctgctgcgccttgatgaaggcgatgatgtcatgcgcacattttcaaagaatatgggcgtgaaggtcgtgcgggtaaacgctgaggaccgtttccttgaggatttaaaaggcgtgacggatccggaagaaaagcgcaagaaaattggtcacgcatttatcggtgtttttgaccaggaagccaggaagatctctgatgtgaagtggcttgcgcagggaaccatctatccggacgtcatcgaatctgctggcgactcctccggcaaggcaaaggtgattaaatcccatcataacgtcggcggtctcccggaggatatggcgctgagtctggtggagccgcttcgagatctttttaaggacgaggtgcggaaaatcggtctagagctgggattgcctgaagagatgattttccgtcatccgtttcccggaccggggttgggtgttcgcattcttgcagaggtcaagaaaccttacgcggatctattgcgacaagccgacgcgatctttatttcagagcttcggcgcgaggatctctacgacagagtcagccaggccttcgcggtcttccttccggttaagtcggtcggcgtggtgggagataaccgcgcctatgattatgttgttgcccttcgtgccgtggagacagtggacttcatgacggcgaagtgggcagaactgccttacggttttcttgaccgggtgagccgcaggatcattaacgaggtcaaaggcatctcgcgggtggtttacgatatttccggaaaacccccggcaacgatcgagtgggaatgag

SEQ ID NO: 317559 - DNA, 1000 bp, Unknown
  Bacterial polypeptide expressing nucleotide sequence isolated from the Sargasso Sea
gatgagtcttaaagatgatctgtctaaaatcttgattatagattttggctcacaatttacacaacttatagcaagacgagtaagagaatttggtgtttattctgaaattataagtcacaaaaaaataaattcaaaattagataaaaaaaatataaatggaataattctttctggaggtcctttaaatgtttatcaatcaaaaaaaataaaatttaataacgagatatttaaatggaacaccccaattcttggaatttgtttcggacatcaaattatttcaaaggagctaggtggtaaagtaaaacaagctaaatatagagaatttggtttagcaaaacttaaaagattaaaaaaaagtaaattaataaataatttttttaataaaaccagaataaataacgtctggatgagccatgctgatgaagtaacaaaattagcaaaaggatttaacgttattgcaaaaacaaatacctcaaatttttcaataatagaaaatagatcaaaaaatttttatggaattcaattccatccagaagtttcacatacagaaaatggaaaaataatcataaaaaattttattttttctatttgtaaaatgaaaaaaaattggtcatcaaaaaatcaaaaaaaagtattaattcaagaaatcaaaaaaaatgttggaaaatctaaagtaatctgtgctttgtcaggtggtgttgatagcagtgtagttgcaaagttaattcataaagctgtgggcaaacaactaatatgcatttttgtaaatactggattattgcgaaaaaatgaggaaactcaggttgttaaaactttcaagaaaaaatttaaaataaatcttatttacgttgatgctaaaaaaatatttttaactaaacttagaaatattaaaaatcctgaaaaaaaaagaaaaattattggaaatttatttattcaaatttttgaaaaatatgcaaaaaaaataaaaaacgtcaaatttttagcacaaggaactctttat

SEQ ID NO: 317560 - DNA, 1204 bp, Unknown
  Bacterial polypeptide expressing nucleotide sequence isolated from the Sargasso Sea
ttgttgacgaaaaatttattcaaaaataataaaaatatagtttggatgagtcatcaagatgtagttactaaaattccaaaaggatttagagtaattgcttcaacgaaagagtctaaatttactatgatagagaacacaaaaaaaagaatttatggcttacaattccaccccgaagtgacacatactattaacggcaaagagatctttaaaaattttttgtttgatatttgtaaaattaaagaaaagtggctcatcaattctgaaaagaacagattaattaacgaaataaaaaataaagttaaaaatgataaagtaatttgcgctttgtcaggtggagttgatagtagtgttgtagctttattagttcataaagcaataagaaaaaatttagtttgtgttatggtagatacagggctaatgagaaaagatgaatttaaattcacttatgaaaagttcaaaaaaaaatataaactgaatgtaaaattaataaatgcctcaaaattatactttacaaaacttaaaaatatttctaatcctgaaaaaaaaagaaaagtaattggtaatctttttattaaaatttttgaaaaagaagcaaaaaatcacagaaatttaaaatttcttgctcaaggaactctttaccctgatattattgaaagtcgttcagcaacaggtagtcaatcttcaaaaataaaatctcatcataatgttggaggtttgccaaaaaagatgaatttaaaattattagaacctttaaatgagtttttcaaagatgaagtaagagttttaggcaaatctttagggctcatagaccaaataagaaacaaacatcctttccctggccctggcctcgctattagaattattggaccagttgatccacaaaaggtaaaaattcttcaagaagctgattatatttttattaacgagctaataagaaataatctttacaataaaatatggcaggcttatgcagccttattaccttttaggacagtaggagtaatgggagactcaagaacttatgaatatacatgtttgctaagagctgttgtatcagaagatggaatgactgcagattattataatttgcctaaagaatttttagataacatagcaaataaaattataaatggagtacctggaataaatagggtagtatatgatattacctctaagccacctagtacaattgagttggaataat

SEQ ID NO: 317561 - DNA, 271 bp, Unknown
  Bacterial polypeptide expressing nucleotide sequence isolated from the Sargasso Sea
aaagcaggtctttacaatgatatttggcaagcttttgcggtattgctaccagtaaaaacagtaggagttatgggagataaaaggacttatgcctggccaatagttttgcgttgtgtatctagtgaagatggtatgactgcagattggtcaaaaattccttttcagattttggagaggattgcaaatagaatcgtaaacgaagtaagttcagttaatagagttgtttatgatattacaagcaaacctcctggaaccatcgagtgggagtgac

SEQ ID NO: 317562 - DNA, 1411 bp, Unknown
  Bacterial polypeptide expressing nucleotide sequence isolated from the Sargasso Sea
aatggagcttttaattaacgaattgcaaaaaaatggagttattatacttgattttggttctcaatatacgcaactaattgctagaagagtcagagagctgaatgtctattcagagattctttcatctaatactcatttaagtcaaattataggaagagatccttcagctataattttatctggtgggccatcaagtgtctttggagatgaggcaccaaactttgataagaaaatttttgatattgatgttcctattttaggtatttgctatggccttcagttattagcccatcatcatggtggccttgtagagtctaatggccagggcgaatatggttttgctgaaattgaaattgatgatgataaaaagctttttcaaaatgttccaaaattttcacaagtttggatgagtcatatggatcgagtaacaaaattgcctgatgaatggcatacattagcgcattcctctaatggtgttattgctgcaatggcaaataaagatcaaacaagagtagcaacccaatttcatcctgaagttattcattctaaagaaggaaaaaatattcttaaaaactttttgtttaatatttctaattgttatgctaattggacagctgaaaactttgttgagcaaaaagtaaaattgatcagagaagaagttggaaaatctaatgtccttgtaggtgtaagcggaggagtagattctacagttgttgcagctttgatgaacaaagcagttggtactcaatgtaatgcagttttaattgatcacggattattaagaaaagatgaggcagaaaattgtgttactgcactcaaagatgggcttggagttaatatacattgctataatgaatcaaaaatatttttatcaaagcttaaaggagttactgacccagaaaagaaaagaaaaattataggtaatcaatttatttttgcgtttgaaaaaatctcaaaggaatttggaagaattgattatttatgccaaggtacactttatccagatgtaattgagagcggtgtcagtaagggtaaagtagctcatgtaattaaaagccatcataatgttggtggtcttcctaaaaatatgaattttaaattaattgaacctctccgtgagttgtttaaagatgaagtacgtaaagttggtaaggaattaggtttgcctgattccttagtatttaggcatccattcccaggtcccggattgggagttaggattattggagagatttctgaagaaagaatcactatcttacaagatgcagataaaatctatattgataccttaattgaagatggcctttataataaaatttggcaagcatttgcaatattaattccaatcaaaacagttggcgtaatgggagatcagaggacttatgaaaatttagtaggcttcgagctgtaa

SEQ ID NO: 317563 - DNA, 1399 bp, Unknown
  Bacterial polypeptide expressing nucleotide sequence isolated from the Sargasso Sea
aatcctttctggaggtcctttaagtattactaatgataaaggtatcagtttagatagttttttaataaaaaaaaaaataccaattctaggtatatgttatggccatcaaattcttgctaaaaggttcggtggaaagattaaagtttcaaaacatcgcgaatttggcaaagcaatattaaaagcaaaatcaaattctattttaacaaaaaatttttttaaaagtaaaaaaaatgtagtatggatgagtcatcaagatattgttcaaaaacttcccaagggttttaaaactatagcatctagccaaaattcaaaatttgctgttattgctaatgacaagttaaaatattacggtgttcaatttcatccggaagtaagtcatacagagaatggaaaaacattaattaaaaattttatatttaatatatgcaaagtcaaaaaaaattggaattccaaaaatcaaaaaaaattatttattagtaatattgtagatattgttaaaaatgacaaagttatttgcgcattatcaggaggcgtagatagtagtgttgttgctttgcttttgaaaaaagctataggcaataatcttacttgtatatttgttaatacaggccttttgagaaaaaatgaggcaaatgatataaaaaaaatcttcagaaacaaaattaagctaaatttggtttatgttgatgcatctaagatttttttaaaaaaattaaaaaatattgaaaaccctgaaaagaaaaggaaaattataggaagtttatttataaaaatttttgaaaaatacgcaaaaaaagtaaaaaatgccaaatatttagctcaaggaactttatacccagatatgatcgaaagtaaatctgttacgggaagtccatcgtctaaaattaaatcacatcataatgtaggaggtttaccaaaaaatatgaaatttaaacttcttgaacctttaaaatatttgttcaaagatgaagttagaaagttaggatctgaactgtctcttgataaaaatatacttttgagacatccctttcctggacctggtcttgcgataagaatacctggaaaaatttcagcggaaaaaattaaaatattacaagaggcagattatatttttatgaatgaattaaaaaaagagaaactttataataaaatttggcaagcttatgcagcattacttcctgtaaaaaccgttggtgtcatgggagatagtagaacttacgagtatatttgcttaattagagctgtaacttctgtagatggaatgacagccgattttttttctttcaataaaaattttttaactaatatttcaaataaaattgttaattctgtaagaggtattaatagagttgtgttggacatctcttcaaaaccccctagcacaatcgaattagaatag

SEQ ID NO: 317564 - DNA, 1425 bp, Unknown
  Bacterial polypeptide expressing nucleotide sequence isolated from the Sargasso Sea
taagcaaaaatattgatggaataattttatctggatgtccattaagcgtttaccagaaaaataaagtaaagtttgacaaaaaaattttaaatttaggcattccaattcttgggatatgttttggtcatcaaataatttcaaaagaattaggcggaaaagtaaaacaagccaaacatagagaatttggtttggcgaaactaaaaagattaaaaaaaagcaaattaactaataatttttttaaaagaaatggattaaacaaagtatggatgagtcatgcagacgaagtaacaaaattagcaaatggatttaaagttattgcaaaaactaccacgtcaaagttttcaattgttgaaaatttatctaaaaaattttttggaattcaatttcaccctgaagtaacacatacagaaaatggaaaaatattattaaaaaattttgttttttcaatttgtaaaatgaaaaaaaactggtctgtgaaaaatcaaaaacaaatattaataaaagaagtaaaaactaatttaggaaatgccaaagtaatttgtgctctatctggtggagtggatagtagcgtagttgctaagctaattcataatgcaattggaaatcagctaacatgtatatttgttaatacaggtcttttaagaaaaaatgaagaaattcaagttttaaaaactttcaaaaagaaatttaaaattaatttaatttatgtggatgctaaaaaattatttttaaataagcttaaaaatatcaaagatcctgaaaagaagcgaaaaataattggaaacctatttataaaaatttttgaaaaatatgcaaaaaaaattaaaaacgttaagtttctggcacaaggaaccctttacccagacctaattgaaagtaagtcagtaacaggcagtcaaacatcaaaaataaaatcccatcataacgttggtggattgccaaaaaaaatgaatttaaaattaatcgagcccttgaaatttttatttaaagatgaagtaagaaaattaggcttggaacttaaattggcaaaagaaattgtgttaagacatccatttcctggacctggtttggcaataagaatgccaggaaaaattaatgaaaaaaaaataaaaattttaaaagaagctgatgaaatatttattaactccttgagagaatacaatttatatgacaagatatggcaggcttatgccgctttattacctgtaaaaactgttggagttatgggagacaaccgaacatacgaatatatgtgtttattaagagcaattacttctgaagatggcatgacagcagatttctttaacttttcaaaagattttaagcaacttgtttcaaataaaataattaataatataaaaggtataaatagagtggtttacgatataacttcgaagcctcctagtacgatagagttagaataat

SEQ ID NO: 317565 - DNA, 589 bp, Unknown
  Bacterial polypeptide expressing nucleotide sequence isolated from the Sargasso Sea
tctttatccagatgttattgaaagtgctggtactaatattgatcctaagactggtgaaagaatagctgtaaaaataaagagtcatcataacgttggtggcttgccaaaagatttacaatttaaattggttgagccattaagaaaactttttaaggatgaagttcgaaaagtgggagctgctttaggtttgccggatgaaattattaaaagacatccattccctggccctggattagctataagaattttgggagaggtaaacaatgaaaaacttgattgtttaagagatgcagactggatagtaagagatgaaattaaaaaagcagatctttacaatgatatttggcaagcttttgcagtattgctacctgttaaaactgttggagtgatgggagataaaaggacttatgcatggccaatagttttacgttgtgtatcaagtgaggatggtatgacagcggattggtcaaaaattccttttaagattttggagaggatagcaaatagaatcgtaaacgaagttgattcagttaatagagttgtttatgatataacaagcaaacctcctggaactattgagtgggagtaa

SEQ ID NO: 317566 - DNA, 1564 bp, Unknown
  Bacterial polypeptide expressing nucleotide sequence isolated from the Sargasso Sea
atgagtcttgaccgtattttaaataaaattttaataattgattttggttcacaattcactcaactaattgcgagaagaattagagaattaggtgtatattcagaaattatcagtcataaacaaattagaaatcgaaatattaataaatcaattaaaggtattatcttatctgggggaccactaaatgtttatcaaataaacaaatactcatttgataaaaatattattgaaaatggaataccagttttaggtatttgttttggtcatcaaattctatcaaaattgaatggaggtagagttagacaatctaagcacagagaatttggcttagcaaatatttataaaaaaagaaatagtcccttaaccaaaaatttatttaacaaaaaaaagataattaaagtttggatgagtcacgctgatcaggtatccaaactaccaaaaaaatttagtgtaattgcttcaagtcaaaattctaaatttgctatagttgagaacaaatccaaaaagttttatggagttcagtttcatccagaggtaacacatactgaaaatgggaaaaaactaattagcaatttcatttttgatatatgtggaattaaaaaaaattggtcgtctaaacatcaaaaaaagaaactaattaatgatgtaagatatcaagttggaaacaataaagtgatctgtgctttatctggaggtgtggacagtagcgtcgttgctcaattacttaataaagctatcggaaaaaaattatattgtatttttgtaaatactggcttgcttcgaaaaaatgaggaaaaacaggttgtaaaaacatttaagacaaaattaaaaattaatttaatttatgttaatgctgaaaaagaatttttaatgaaattgaaaaatgtttgtgatcctgaaaaaaaaagaaaaataattggaaatttatttatcaaaatctttgaacgttatgctaaaaaaataaaaaatgtgcaatttttagcacaaggcactctttatcctgatttaatagaaagtaaatcagtaactggtagtcaaacatcgaaaattaaatcacatcataatgttggaggactaccaaaaaaaatgaaattaaaactagtcgaaccacttaaattcttatttaaagatgaggttagaaaactgggattagaattgaatttaaataaggaaataatttctagacatccttttccaggccctggtcttgcaataagaatgcctggtcttattacaaaagaaaaaattaatattttaaaagaagctgatcattattttatccaagccttaaaagaacatgggctttatcataaaatttggcaagcttacgcagctttactaccagttaaaactgtaggggtgatgggtgataatagaacttacgaacatttatgtttactcagagcaattacctctgaggacggcatgactgcagatttttttgaatttaaaaaattatttatacaggagatctctaataaaattgtgaatagtattcggggaattaatagagtagtttatgatataacttcaaagcctccaagcaccattgagttagaataaa

SEQ ID NO: 317567 - DNA, 1621 bp, Unknown
  Bacterial polypeptide expressing nucleotide sequence isolated from the Sargasso Sea
catgcacgacaaaatcctgattctcgacttcggttcgcaagtcacccaactgattgcgcgacgcgtgcgcgaagcgcacgtctactgcgaaatccatccgaacgatgtgtccgacgacttcgtccgcgagttcgcgccgaaggcggtgatcctgtcgggcagccacgcgagcacgtacgaagaccatcagctgcgcgcgccgcaggccgtgtgggatctcggcgtgccggtgctcggcatttgctacggcatgcagacgatggccgtgcagctcggcggcaaggtcgagtggagcgaccaccgcgaattcggttacgcggaaatgcgcgcccacggccatacgcgcctgctcgacggcatcgaggacttcaagacggacgaaggccacgggatgctgaaggtctggatgagccacggcgacaaggttgccgagctgccgccgggcttcgcgctgatggcgtcgacgccgagctgcccgatcgccggcatggccgacgaggcgcgcggctactacgcggtgcagttccatccggaagtcacgcacacggtgaagggccgccagatcatcgagcgcttcgtgctgcagatcgccggcgcgaagcccgactggatcatgaagaaccacatcgaggaagccgtcgcgaagatccgcgagcaggtcggtgacgaggaagtgattctcggcctgtcgggtggtgtcgattcgagcgtcgcggctgcgctgatccatcgcgcgatcggcgaccagctcacctgtgtgttcgtcgaccacggcctgctgcgcctgaacgaaggcaagatggtgctcgacatgttcgagggccgcctgcatgcgaaggtcgtgcacgtcgacgcgtccgaccagttcctcggccacctggccggcgtgaccgatccggaagcgaagcgcaagatcatcggccgcgaattcgtcgaggtattccaggccgaggcgaagaagctgtcgaaggcgaagtggctcgcgcagggcacgatctatccggacgtggtggaatcgggcggtacgaagacgaagaaggcgacgacgatcaagagccaccacaacgtcggcggcctgccggaaacgctcggtctcaagctgctcgaaccgctgcgcgacctgttcaaggacgaagtgcgcgagctgggcgtcgcgctcggtctgccgccggagatggtgtaccgccatccgttcccgggcccgggcctcggcgtgcggattctcggcgaagtgaagcgcgagttcgcggacctgctgcgccgcgcggacgcgatcttcatcgaggagctgcgcaacacgaccgcgaccgcgcaggatgcggccgccggcctgtgcggcgaagccgatgtcggcaagagctggtacgacctgacgagccaggcgttcgcggtgttcctgccggtgaagtcggtgggcgtgatgggcgatggccgcacgtacgactacgtgacgtcgctgcgcgccgtgcagacgaccgatttcatgaccgcacactgggcgcacctgccgtacgcgctgctcggccgcgcgtcgaaccggatcatcaacgaggtgcgcgggatcaaccgtgtggtgtacgacatctcgggcaagccgccggcgacgatcgagtgggagtga

SEQ ID NO: 317568 - DNA, 1213 bp, Unknown
  Bacterial polypeptide expressing nucleotide sequence isolated from the Sargasso Sea
agagaactaggagtattctcagaaattattagtcataaaaagattaaaaataaaaatattgatattagtgttaaaggtatcattttatcaggaggtcctcttaatgtttatgagattaatagatattcttttgataaagaaatactcaaaaataatataccagtattaggtatttgttttggacatcaaatcttgtcaaaattaaatggtggaaaggtcaaacaatcaagacaccgagaatttggtttagctgatgtttataaaaaaaaagagagtcttttaataaaagatttttttaatcaaaaaaaaattcacaaagtatggatgagtcatgctgatcaagtttcaaaattacctaaaaattttagagtaattgcatcaagtcaaaattcaaagtttgcaatagttgaggataagataaatagattttatggtgttcagtttcatcctgaagttacacatacagaaaatggaaaaaaaattataagaaattttatttttttaatttgcaaaatcaaaagaaactggtcttcaaaagatcaaaagatgaaattaataaaagaagttaaaagtcaagttggtgaaaataaagttatttgtgctctctcaggaggagttgatagcagcgtagttgctcaattattaaataaagctattggtaaaaagttatattgtatttttgttaacactggtctccttagaaaaaatgaggaaaaacaagtagttaataccttcaagaaaagactcaagatgaatttaatatatgtaaatgcagaaaaagaatttttacaaaagttaaaaaatgtgtcagatccagaaaaaaaaagaaaaataattggaaatttatttattaaaatttttgagcgatatgcaaaaaaaattaagcatgtaaaatttttagctcaaggaacactttatcctgatcttatagaaagcaagtcagtaacaggaagccaaacatctaaaatcaaatcccatcataatgtaggcggattaccaaaaaaaatgaaattaaaattagttgaaccccttaagtacttatttaaagatgaagtaagaaaattaggtctagcgcttaatttgaataaagaaattatttcgagacacccatttccaggtccaggtttagcaattagaatgcctggtattataactaaagaaaaaattaaaattcttaaagaagctgattattattttatacaaggtcttaaag

SEQ ID NO: 317569 - DNA, 1450 bp, Unknown
  Bacterial polypeptide expressing nucleotide sequence isolated from the Sargasso Sea
gaagaaaagattttaatcctagatttcggatcacaatacactcagctaattgccagaagaattagagaacttaatatttattgtgaaatatttccatttaataagataccagaaattacatctgaatattttggaataatattgtcgggtagtccttattcggttcatgataaagattcacctaaaattgagtttgaaaagtttaatgatttaccagttcttggcatatgttatggtgctcaattaattgctaattttaataattctgttattgaaaaatctaaaataagagagtatggtagagctaaattgtcttatgtagattctgaaaatattttaatgaagggtgttaaatcaaattcggatgtatggatgagtcatggggattctataactgaaatttctaattcttttaaaatattagctagtactaaagatgtaaaggttacctcttactttttaaaaaataaaaattattatggtcttcaatttcatcctgaagtgacacatacagaatttgggaaaaaaatattgaaaaacttttcagttgacatttgcgattgttctcaatcgtggaattcagaaaaatttgtagaatatacagttaagcaaattagaaatatcgtaaaaaatgatagagtaattcttggtttatcgggtggtgttgattcatctgttgctgctatgttaatacataaagcaattggtgagaatttatattgtgtatttgttgataatggtttattaaggaaaaacgaattctcaaatgttttatcatcatataataatttaggtttaaatgttattggagtagatgctaaacagcttttttataatggattattaggtaaggttgatcctgaagataaaagaaaatctattggaaataactttattaaagtttttgagaaagaagcaaataaaattggagatataaaatggttagctcaaggaacaatatatccagatgttattgagtcagtatctgttaaaggtccttccgcaacaataaagtctcatcataatgttggtggattgccagaaaaaatgaatcttaaaattattgagcctttaaatttattatttaaagacgaggtaaggaaagttggtaatcaacttaatattcctaataatatacttaatagacatccttttcctggtccaggattaggtattagaatcttgggtgagattacaaaagaaaaagtagaattattacaaaatgcagatgatatctatatttcttcattaattagtgaaaatttatatgataaagtatggcaagctgctacaattttactcccagtgaagtcagttggtgtgatgggagatgaaagaacttacgagtacacaattgtacttagagcagttactagtttagatggaatgactgctgattggtcaagattaccaaatgagtttcttgctgaagtatcaaataaaataatta

SEQ ID NO: 317570 - DNA, 973 bp, Unknown
  Bacterial polypeptide expressing nucleotide sequence isolated from the Sargasso Sea
tatgttcggtgacattggtttagaagccattgaatcatttcagccatcgggtttaatactctcgggtggaccggaatctgcattcactgatgatgctatcaaaccatctcaaaagatttattcattgggtcttccaattttgggcatttgttatgggatgcaggtgatgtcagaacagctcggtggaaaagtttccccttcaagtcatagagaatttggccatgcagatataaagatagagtcaaatagtcgtcttttagagggcatcgaacactctgctgaacaaacagtttggatgagtcacggagatagagttgaatctttgcctgaggggtttcgaacaatttgtaccagtcaaaactcgccttcagcggcaatggcgagtgaggataaatcattttacgggcttcaatttcatcctgaagtgacacatacaatttgcggacaaagaatcatcgaaaactttttgcatcatatttgtgggtgcgcaagcgattggaatccaggaaacatcattgcgaaacacatcaaaaaagttcaggaggcggttggcaatgaccagattcttctgggattatcaggcggtgtggattcctcagtcgttgctgcccttttgcacaaagcgattggcgatcaattagtctgtatttttgtagacaacggacttcttcgtttgaatgaaggcgatcaggttatggaaacattttcagagcatatgaatctcaacgtcatcagagtcgatgccgaggaagctttcttagaaaggctcaaaggtgtcaatgacccagaggaaaagagaaaaataattggtagaacgtttatagaagtttttgaggacgaggcatcaaagttagaaaatgtgaaatggttggctcaaagaactatctatccagatgttattgagtctgcaggatcaaagaccggtaaggcgcatgtaatcaagtcgcatcataatgttggaggtctccctgaa

SEQ ID NO: 317571 - DNA, 1450 bp, Unknown
  Bacterial polypeptide expressing nucleotide sequence isolated from the Sargasso Sea
aatgagtcctgaagtaaatcttaagaaaattctaataatagactttggatcacaatttacccagttaatcgcaaggagagtaagggagttaggagtttattcacaaataatcagccataaaaaaattaataatcagcttttagaaacaccaaatattaatggtataatactatcggggggtcctttaaatgtttatgaggttaaaaaagtaaaatttaataaaaaaatattaaattctaaagtacctatattgggaatatgttttggtcatcaaattatagctaaagaatttggaggcaaggtaaataaatccaaaacaagagaatttggtttagcaaatataaaaaaaattaataatagcaaactcacaaaaaattttttcaataaaaaaggatttaataatgtttggatgagccactccgatgaagttacaaaaatacccaaaggttttaaggttgtagcatcaagtaccaactcaaaatttgcaattatagagagtatttcagagaatttttatggtattcaatttcatccagaagttacccatactcaaaatggtaaaaaactattgaaaaactttattttttcaatttgtaaatctaaaaaaaactggtcttcaaaattccaaaaaaaaattcttattaacaacgttaaaaattatgttggatcatccaaagttatttgcgcattatcaggaggtgttgatagcagtgtagtagcaaagcttcttaaaagtgctataggtaaaaatttaatttgtatttttgtaaatacaggtttgttaagaaaaaaggaagaatttgaaattttaaatacttttaaaaaacgttttaaatttaatttgatttatgtagatgcaaagaatttatttcttaataaattaaaaaatatttctgaccctgaaaaaaagaggaaaataataggaaatcaatttattaaagtttttgaaaaatattctaaaaaaattaaaaatgttgagtttttagctcaaggtactctttatccagatttaattgaaagtaaatcagcaacaggaagtcaatcttctaaaattaaatctcaccataatgtaggaggtttgccaaaaaaaatgaaacttaaactagttgagcccttaaagtatctatttaaagatgaagttagaaagttagggttagaattaaatttacctaaaaatgtaattttaagacacccatttcctggtccaggcttagctattcgaatgccagggattgttacaaaagaaaaattaaagattcttaaagaagctgatgcaatatttatacaaagtttaatttcaaataatttgtatagtaaaatatggcaagcctatgcagccttgcttccagttaaaacagtaggtgttatgggtgataatcgtacctatgagtatataaatttattaagagcaattacttctcaagatgggatgacagcgagacttttttac

SEQ ID NO: 317572 - DNA, 877 bp, Unknown
  Bacterial polypeptide expressing nucleotide sequence isolated from the Sargasso Sea
atgcgtcttgaagatagtcttcaaaaaattaaaataattgattttggatctcaatttactcagcttattgcaagaaaaataagagagataggagttttttgtgaaataattagtcataataaaattaacaaaaattataaattagaaagaaatgttaaaggtttgattttatctggaggacctctaaatgtatatcaaagcaataaagtaaaatttaataaaaatctgctatttgcaaagatcccagtacttggaatatgttttgggcatcaagttatttcaaaagaaatgggaggtaaagtaaaacaatcaaagtcaagagaatttggattagcaaaagttattaaaattaaaaatagtactttaactaaaaatttttttttaaataataaaaataatgtatggatgagccatgcggatgaggtaattaagctacccaagaattttaaagtaattgcaaaaacaaataactctaaattttgcattattgaaaattccaaagataaattatatgggattcaatttcaccccgaagtaactcatacaaatagaggcaaaataattctaaaaaattttgtatttgatatatgcaaaattaaaaaaaactggtcacctaaagatcagaaagtaaaattgatcaaagaaattagaaataaagttggaaattctaaagtaatttgcgccttatcgggtggggtcgatagtagcgtagtcgcaaagcttttatcaaatggtataggtaaaaacttgacttgtatttttgtcaataccggtttgttgagaaaagatgaagaaaagcaagtggtaagtactttcaagaataaatttaaaattaatttaatatatgtaaacgctgaaaagcaatttttatctaagc

SEQ ID NO: 317573 - DNA, 1193 bp, Unknown
  Bacterial polypeptide expressing nucleotide sequence isolated from the Sargasso Sea
tatggggggtggccatgttttatctgatggaaaaggagagtatggttttgcagatatagatattaaaattcagaaaggattattctcaggtatttcttcttccaaagtttggatgagccatggagatcatgtggaaaaattaccggatgggtggcagattttagcatattcttcaaacggtattgtggcggctatgtcaaatttagatcaaacccgcgtagcgactcagtttcaccctgaggtccatcatacagaggaaggtcttaaagtgttatctaactttttatttaatatcgctaaatgttccccaaattggacaccaattaattttatccaagaacaaatagaaaatattcaatcagtagttggtgaggataatgtacttataggtgtaagtggtggtgtagattctacagtagtggctgcattagtccataaggccataggtgaccgtgctaaagcagttattattgatcatggtctaatgcggaaaaatgaggtgagtgaatgcgttaccgcacttgaaagcggtttagggatcaacatcgaagctcatgatgaatcagaaatatttttatcaaaactagaaggagtttctgatccggaaaaaaaacgaaaaattataggaaatcaatttattttctcgtttgaacgaattgccagtgaaatgagtaaaatggattatttagctcaggggactttatacccagatgttatagaaagtggtatcagtaaaggtaagtcagcacatgttataaagagtcatcataatgttggcggtctgccagaaaatatgaaatttaaattaattgaaccattaagagatcttttcaaagatgaagttagggaagtaggtagagaacttggaatcccagataagttggttgaccgtcatccattcccaggccctggtttaggtgtaagggttattggggaaataacccgtgaacgtatcaatatacttcaagaagcagatcaaatttatattgatgtactacatgaggatgggatatataatgaaatatggcaagcattttgtgtcctcactacagttaaaactgttggtgttatgggtgaccaacgaacttatgaaaacctgctgggtataagagcagtgactagcacagatggcatgactgctgattggtttcgcataccaacaaagaccttgttaaaaatatcgaatagaatgt

SEQ ID NO: 317574 - DNA, 822 bp, Unknown
  Bacterial polypeptide expressing nucleotide sequence isolated from the Sargasso Sea
aatgatatttattgttgattttggatctcaagtaacacagttaatagcaagaagagtaagagaatccggagtctattgtgaaattgtgtccagcaaatcaatttataagcaaatacttcatagaggatgttcagggatagttttctctgggggtccagcaagtgttcataagtcaaatactccaaaaattgataaaagaatatttaatctaaatattccaatattaggaatttgctatggtatgcaattattatgttatcaacttggtgggaaggttaagatttcaaaaaaaagagagtttggtaaaactcatataaagccttcaaaaaaaagtgttttattctcaggatttagaaaaggaatgagctcgaattatgtctggatgagccatggtgacaaggttattagtctaccaagagattttaaaagcattgcatcaagttcaaatactaagtttgcagcagttgagaataaaaaaaaatcttattatggtttacaatttcatcctgaagttgttcatacacctaatggtcataagataatcgaaaactttatatttaaaatttgcaaggtaaaaagaaactggagcatgaaaaatcatttaagaaatcagattactgaaattaaacattttgttcataaggatcaggtaatttgtggattgtcgggtggagtggacagtactgtcactgcagctataatttcaaaagccataaataagcaattaacatgcatttatgttgatacaggtttaatgagactaaatgaaacaaaagaggtagtaaaaatgtttaaaaaacattttaaatctcgattaatagt

SEQ ID NO: 317575 - DNA, 1381 bp, Unknown
  Bacterial polypeptide expressing nucleotide sequence isolated from the Sargasso Sea
agtatatgctgaattagttccattcgatatatcaatagatgaattaaaaaagaaagaagcaaaaggaataattttttctggtggaccttcaagtgtttataattcagatgcaccatttccagagaacgaaatttttgagtttgaactaccaatacttggaatttgttatggtcaccaactaattgtcaataaatttggtggaaaggtcaaacgagcaaacaaagaatatggttcatcattactgatgatggatgataattctgaattattagatgggttgggtgaatcaattagagcatggatgagtcatggtgatgaggcagaaaagattcctgatgaatttgatattattggtcacactgataatgcacatgcagcagctatagctaataaagatagaactgtatttggcattcagtttcatcctgaggttatccatactgaacaaggaactgacattttgaagaattttgtcttgaaaatttgtaaagcaaaacaagattggacaatggaaggatttattgaaaaaaccgtaaatgaattaacaaaaattgatggaaatgtattgtgtggcgttagtggaggaatagattcaacggtggcagcgctactaattcataaagcaataggagagagattaacaggagtttttgttgataacggcttgttacgtctgaatgaatcagaagagattgaagaaatgtttatgaaaaatttttcattaaatttccataaaatagaggctcaagaaaaatttctttcaaaattaagaggggttttggatccggaacagaagagaaaaattgtaggtgaagagtttattagagtttttacagatttcgctgaaaaaaatggtccattcaaatggctagcacaaggaacattgtatccggatgtaattgagagtggagtttcaaaaggaccagcgtctgtaataaaatcacatcataacgttggtggtttgccagactggttgaatttagaaattttagaaccattaagggaattatacaaagatgaagttagagaagttgcaaaaattcttggtgttcctgaaaaattagtcaaaagacatccatttccaggacctggattgtccgtaagaatcatcggagaagtaaccccgacaaaactatcaatttcaagaaaagctagtaggatcatagaggaagaattatgggatgctggattatataatgaggtttggcaggcatttgctgctgtgggagatgataaagcagttggtgtagttggtgatgaaagaaaatatggacgcattgttactgtacgaattgttgattcaattgatgcaatgactgcagattggactagacttccacatggaattttagagaaaattagtaatagaattacaaatgaa

SEQ ID NO: 317576 - DNA, 1540 bp, Unknown
  Bacterial polypeptide expressing nucleotide sequence isolated from the Sargasso Sea
ttgatactaatattagactttggatcacaatatacccaattaattgcaagaagaataagagattgtgatatatattgtgaaataataccatttaataaatctattgaaaaaataaaaaaacaatcagtttctggtataattttatcagggggacctgcttcggtaattgaagaagattcaccggtagtttcgaaagaaatatttaaaattggtaagcccgttttaggtatatgttatggtcaacaattgatgtgtaaaattttaggaggtaaagtcgataattcatcaagtagagaatttggaagagcagccttaaaagttaaaaaaaattgtgatttatttaaaaatttttggtttgagggaaattcttataatgtatggatgagtcatggtgataaaattaaaaaaatacctgacggattttctaaagtaggtgagagtaagaatgcaccttttgcaattattgctgatgaaaaaagaaaattttatggtgttcaatttcatcctgaagtaatacatacagataatggaattaaactattagaaaatttttccaaaaaaatctgtaaaataaaaaataattggaatatgaaatcttataaggatcaagcgattgataagattaagggagttgttgggaataagcatgttatatgtggtctttctgggggtgttgattcaactgttacagcaattttactacataaggctataggaaaaaatctaacttgtgtgtttgttgataacggccttcttagattaaatgaagccaaacaagtagttaatttatttacaaaaaattatgatattaacctaatttttgtagatgcctcttcagattttttatcagctttacaaaatgtagaggatcctgaagataaaagaaaaattattggaagaaaatttattgaaatttttgaaaaagaagcaaaaaaattaaatgaagttgaattccttgctcaaggaacattatatccagatgtaatcgagtctatatccttttcaggagctcctagtgcaaaaatcaaatcccatcataatgtaggtggacttccagagaaaatgaaactttcactaattgaaccattaagagatttatttaaagatgaagtgagaaagcttggggaagaattagatattccaagaaattttatacaaagacaccctttcccaggaccaggtcttggaataagggttattggccctgttgacaaattaaaattagatatacttaggaaggctgatgaaatatatattaatgaaattaaaaaagtaggtctttatgatgaaatatggcaagcttttgcagtgcttctgccagttaaaactgttggtgtaatgggagatgaaagaacgtatgaatatgtctgttctttaagagcagtaacatctctagatggaatgactgctgacttctataagtttgatacaagttttttagggaatgtatcaactaaaattgttaatgaggttaaaggtataaatagagttgtttatgatattacctcaaaaccacctggaactatagagtgggaataat

SEQ ID NO: 317577 - DNA, 1349 bp, Unknown
  Bacterial polypeptide expressing nucleotide sequence isolated from the Sargasso Sea
aatggaaaagatagttgttttagattttggctctcagtacagtcatttaatttgtagaaggattagagaattctcagtttatgccgaattagtaccatatgatatatcacctgaagaattacagaaaatgaatccaaaaggaataattttttctggcggaccatcaagcgtctataatgaagatgcaccaaaaccagatgaagaattatttaattttgatttaccgttattaggaatttgttatggacatcaattaattgtaaataaatttggaggtaaagtaaaacgtgcaaacaaagaatatggttcatctcttctttcaatggataaaaattcaggattactggatggaataggagagtcaattcgtgcatggatgagccatggggatgaagcagaagagattccatccaattttgaggtgataggtcatactgaaaattcacacgcagctgcaatagcaaatacagatagaaccgtatttggaatacaatttcatccagaagtagtacatactgaacgtggaaccgatattttgaaaaattttgttttgaatgtttgtaaggctaaacaagaatggacaatggagggttttgtagaaaaaacggtaaaagagatttcagaaattgaaggaaatgtgttatgtggagtaagtggaggcatagattcaacagtagcagcattgctaatacacaaagcaataggagatagactaacaggggtttttgtagataatggattattgagattggatgaatctaaagaaattgaagatatgttcaaaaataatttttcattaaatttccatagaatagatgcaagtgaacaatttctttcaaaattaaaaggaataacagatccagaacaaaaaagaaaaattgttggagaagagtttattcaagtattcactgaatttgcaaaacaaaaggggccattcaaatggttagcgcaaggtacactttatccagatgtaattgaaagtggcgtatcaaaaggtcctgcagctgtaattaaatctcatcacaatgtaggaggattaccagaatggttgaacctcaaaatcttagaaccgttaagagaattgtataaagatgaagtaagagatgttgctagaattttaggcgttccagaaaaattactgaagagacacccatttcctggaccaggattatctgtacgaattatgggagagattactccttcaaagttagcaatctgtagaaaagcaagtaaaattgttgaagaggaactatgggatgcaggagtttatgataaggtatggcaagcatatgcatctgtaggagatgacaaggcagttggagttgtcggagatgaacgtaagtatggaa

SEQ ID NO: 317578 - DNA, 1564 bp, Unknown
  Bacterial polypeptide expressing nucleotide sequence isolated from the Sargasso Sea
atgagtcttgatcaaaatctggataaagttgtaatcatagattttggttctcagtttacccaattaatcgcaagaagaattagggagctaggtgtattttcagaaattgtaagtcataaaaaaattaaaattagtggtattaaccagagtgtaagaggaattattttgtctggtggtcctttaaatgtttatcaaatcaacaaatattcgtttgataaaaaaatattagaattaaacattccaattttaggaatttgctttggtcatcaaattttatcaaagttaaatggtggaagagtcagacaatcaaaacatcgtgaatttggattagccaatatttttaaaaaaagggacagcttactaactaaaaatttctatggtgttaaaaaaactaaagaggtttggatgagtcatgcagatcaagtgtctaaactacctaaaaattttcaggtcatcgcgtctagtacaaattctaaatatgctatagttgaaaataaacttaaaaaatattatggagtacaatttcatccagaagttactcatactgaaaatggaaaaaaactgatcagtaattttgtatttttaatctgtaaaattaaaaaaaattggtcttccaaagatcaaaaaataaaattaatcaacgaggtgagagatcaagtaggtagccataaagttatttgtgcattatctggaggtgtagatagtagtgtcgttgctcaattattaaataaagccataggaaaaaaattgtattgtatttttgttaatacagggcttttaagaaaagatgaagaaacacaggttgttcaaacttttaaaaaacggttaaaaatgaacctaatttatgtaaatgctgaaaatgagtttttaggaaagctaaagaatgttcctgatcctgaaaaaaaaagaaaaataattggaaatttatttataaaaattttcgagcgatatgcaaaaaaaattaaagatgttaaatttttagctcaaggaacgctttatcctgatttgattgaaagtaaatcagttactggtagtcaaacttctaaaattaaatcacatcataatgtcggtggtttacccaaaaaaatgaacctaaaacttgttgagcctctaaagtttttatttaaagatgaagttagaaaattaggtttagaattaaaattaagtaatgagatcatatcaaggcacccttttccaggccctggtttagcaattagaatgccaggaaatatcactaatgagaagataaaaattttaaaagaggcagattattatttcatacaagcattaaaagaccatggtctttatcataaaatttggcaagcgtatgctgctctgctacctgttaaaaccgtaggggtgatgggagacaaccgtacttatgaatatctttgtctcttaagagcaattacctctgaagatggaatgacagccgatttctttgaatttagaaaatctttcatgcaaactatttctaataaaatagttaatagcataagaggcataaatagagttgtttatgacgttacctcaaaacctccaagtactattgaattagagtagt

SEQ ID NO: 317579 - DNA, 1234 bp, Unknown
  Bacterial polypeptide expressing nucleotide sequence isolated from the Sargasso Sea
ttggtattagattttggttctcaatatacccaattaattgctagaagagtaagagaaagtgatgtttattctgagatacttccatgggatattgctgaagaaaagattgaaaacttaaaaccaaaggggatcattctttctggggggcctaattcagtaacagaaagttttacacccagaattcctaaatgtatttttgatatgggagtgcctattttaggaatttgttatgggatgcaaactcttgcagagcagatgggagggcatgttatctctgcagatcaaaaagaattcggtcattcagaattagaggtagtaaaagattcagatttatttaaagatttagatagaagaattaatgtttggatgagtcacggagatcaagttcaagatttaccagatgattttgatttagttgcatctacatcaacagcacctatagctgctatggagcacaaaagtttaccgatatacgctattcaatttcatccagaagtcacccatacagattacggtcataaattattagataattttattttgaacatatgtcatgctcatgctgactggacaatggatggtttaatttctcaaagaatagaagaaattaaatcaagggttaaaaaagacaaagttttgttaggattatctggtggcgtagattcttcagtaacagctgccttgcttaataaagctattggtaaaaaattaacatgtgtttttgtagataatggtttattgagaaaaggggaagcagattcagtcatgcaaacttttaaagaaaatatggatttaaatgttattaaatctgacagtgaagaaatatttttaaggcatcttaaaaatgttaaagatcctgaacaaaaaagaaagattattggtagaacctttgtagatatttttgatgcagaagcagtcaaacttaaagacattaaatttttagcacaaggaactatttatcctgatgtaatagagtcctcaggatcagaatcaaaagatgctagggttataaaatctcatcataatgtgggaggattgcctgatgaaatgaaattagacctggttgagccacttagagatctatttaaagatgaagtaagaagaatggggctagagctaaatatcccaaaagagatgatagatagacatccttttcctgggccaggattaggggtgcggataataggggaagtgacaaaagaaaaaaccaaagttcttcaagaagctgatcata

SEQ ID NO: 317580 - DNA, 1065 bp, Unknown
  Bacterial polypeptide expressing nucleotide sequence isolated from the Sargasso Sea
aattaaaaagatttggtgttcagtttcatccagaggtaactcatacaacaaagggaaagatcttgcttaaaaattttgtatttaaaatttgtaaagcaaaaaaaaattggtcctcaaaacatcaaaaaaacaatctaataaaaaaagttaaaaatcaggttggaaaagataaagttatatgcgctttgtctgggggagtagatagcagtgttgtagcacaactactaaatatgtctgttggtaaacaattaaaatgtatttttgtaaatactggacttttaagaaaaaatgaggagagacaagtagttgatacttttaagaaaaaattaaaaattgatttaatatatgtaaatgcagaaaaactatttttaagtaaactgagaaatattgaagatccagaaaagaaaagaaaaattattggtaatttatttattaaaatatttgaaaaatatgcaaaaaaaataaaaaatgttaaatttttagctcaaggaactttatatccggatctgattgaaagcaaatctgtaactggttcacaaacatcaaaaattaagtctcatcacaatgttggaggtttaccaaaaaaaatgaaattaaagttagttgaacctttaagacttttgtttaaagatgaagttagaaaattaggattagaacttaaactttctaaacaaataatttcacgtcatccttttcccggaccaggtctagcaatacgaatgccaggacagataacaaaagaaaaaattaagattttaaaagaagctgatcattatttcataaatgagttaaaaaaagaaaatttatacaataaaatttggcaggcctacgctgcattattgccagtaaaaactgttggcgttatgggtgataatagaacttacgattatatttgtcttttaagggcaataacttcatcagatggaatgacagcagactactttgatttttcaaaaaagtttatgcaaaatgtgtctaataaaataatcaataatattaaaggtataaacagggttgtttatgatgtaacctcaaaacctccaagcacaattgagttagagtaat

SEQ ID NO: 317581 - DNA, 695 bp, Unknown
  Bacterial polypeptide expressing nucleotide sequence isolated from the Sargasso Sea
aatgatatttattgttgatttcgggtctcaagtaacacaattaatagcaagaagagtgagagaagctggagtctattgtgaaattgtgtcaagcaaatcactttataggcaaatatttaacagaggatgttcaggaatagttttctctgggggtccagcaagtgttcataagtcaaatactccaaaaattgataaaagaatattcaatctaaatattccaatattaggaatttgctatggcatgcaattattgtgttaccaacttggtgggaaagttaaaatttcaaaaaaaagagaatttggtaaaactcttataaaaccatctaaaaaaagtattttattctcaggatttagaaagggaatgagctcgaattatgtatggatgagccatggtgataaggttattagtctaccaagagattttaaaagcattgcttcaagttcaaatactaagtttgcagcggttgagaacaaaaaaaaatcttattatggtttacaatttcatcctgaagttgtccatacacccaaaggtcataagataattgaaaattttatatttaaagtttgtaaggtaaaaagaaactggagcatgaaaaatcatttaagtaatcagattactgagattaaacattcaattcataaggatcaggtaatttgtggattgtcgggtggagtggatagtacggttactgcag

SEQ ID NO: 317582 - DNA, 1012 bp, Unknown
  Bacterial polypeptide expressing nucleotide sequence isolated from the Sargasso Sea
atgagtcaaacaattttaaaaaaagaacgagacccatcaatattaattttggatttcggatctcaatattctgaattgattgcaagaagaattagagaaactaatgttttttctcttgtagtaagcaattacatttcaattgaggaaattaaaagtattaaccctaaagggattattttgagtggaggcccaaattctgtatatgaacacaatgcgcctaattgtaatgaaaaaatttttcatttaggaattcctattcttggcatatgctatggaatgcaattaatggtcaaagaacttggaggatctgttatttcagcaaccaaaagagctgaatatggtagagcaccaataaatatagaccaagaatctgacctcctttctgatgtagaagataaatctattatgtggatgagtcatggcgattctattaattgtttgcctgatggatttaataaaattgctcataccgagaatacactccatgcagcaattgcaaatgatgtaaagaaattatttggcgtacaatttcatcctgaagttattcattcagagtttgggatgacggtaattaaaaatttcgtttataaaatttcttgttgtgcggctgattggacaactgaaacctatatagaggaaactattcccaggataagagagaaagttggtaataaaaaagttttgcttgccttatctggaggagttgattcttcaactcttgcatttcttctcaataaagctattggaaatcagcttacatgcatgtttatagaccaaggtttcatgagaaaaggtgaaccagaatttttaatgaatttttttgataagaaatttcacataaaagttgaatatattaatgcaagggagaggtttattgccaaattaaaagatattacggatccagaacaaaaaagaaaaattattggtgaagaatttattagagtatttgaggaagaaagcaatagattgggaccttttcagtatttagcaccaaggtactctttatcctgat

SEQ ID NO: 317583 - DNA, 664 bp, Unknown
  Bacterial polypeptide expressing nucleotide sequence isolated from the Sargasso Sea
aatgtcagttcagcctaagctcgacataaaaaataaaaatatcgatacgatcttagtattagattttggctctcaatatactcaattgatagctagaaggattagagaatcagatgtttattcagaaatcctgccttgggatgttgatataaaaaagattgaagacattaatcctaaaggaattatcctctcaggcgggcctgaatctgttaccgatttacatactccaagagctccaaagatagtcttcgatttaaaagttccaattcttggtatttgctatggaatgcagactttagcagagcagatgggaggtcaggtcacaatttctgaaaaaaaagaatttggattctctgaattaacaatcgaggacaaatcaaagcttttcacaggattgtcagaagattttcataatgtctggatgagtcatggagataaagttgaaactcttccaaaagaattcaaattaactgcttcaactaaatcagcgccaattgcagcaatggaacattcatctgattctatatttgccctgcaatttcatcctgaggtaactcatactgaaggaggtaagttaatcatagataattttatttttgatatttgttcatgcagacctgagtggaaacttgatgatttaattaccagtcgagtgaagaaataa

SEQ ID NO: 317584 - DNA, 993 bp, Unknown
  Bacterial polypeptide expressing nucleotide sequence isolated from the Sargasso Sea
aaattttattaatggtatgtggagttgaaaggaattggaatgctgatgacattctaaagaacattcataatcaagctaaaactgaggttggtgaaggtaaagtgcttttagctctaagtggaggcgttgattcaactgtactggcatctgttttacataaaactctggaagatagattagtttgtgtgatggttgatcatggtttgcttcgtaaagatgaggctaacaatgttgtgactaacctaaaagaaaaaattggacttgaagttaaccttgttaatgctcaagaaacctttttagaaaaattaaaaggcataaaagaccctgaagaaaaaagaaaaattattggtaatactttcatagaagtatttgaagcggaagcaaaaaaaattcagggcatagaatggttagcgcaaggaacaatttaccctgatgtgattgaatcagcaggcaattcaaaatcaaaagctaaagtcattaaatctcatcataatgttggtggtttaccagaaagaatgaatctaaaacttttagaaccatttcgtatgctttttaaagatgaggttagaaagataggaaaagccattaatctacctgatgagattataggtaggcatccttttccaggaccaggcttagggataagaataataggagaggttacaaaagagcgattagataaacttagagaagccgatcatattttcctctctgaaatgaagaaacataatctctacaatcaggctagccaagcttatgctttttatctgccgataaaatctgtaggagtggttggtgataatagaatttatgctgatgttatagggctaagatccgtagataccacagactttatgacagcaaacgtctcaaatcttcccaatgatttcattcaacatgtatcaacacgaatagtgaatgaagtggaaggcataagtagagtcgtgtatgacgtgacttctaaacctcccgcaaccatcgagtgggaataaa

SEQ ID NO: 317585 - DNA, 1075 bp, Unknown
  Bacterial polypeptide expressing nucleotide sequence isolated from the Sargasso Sea
gatgagtcatatggatcaggtgaccatggttccagatgattgggaggtggttgcatatagctcaaataatattatcgccgcaatagctagtaatgatgacttgagatttgctactcaattccatcctgaggtgtctcacacagaagagggtgacattttattaaataattttctttttcatatttctgattgtgaaaaaaattggacagcagggaattttgttaatgaagaaatcacttcattgaaaaataagattggtaaagatagaattttagtaggtgttagtggtggagttgactctactgtagttgccagtttaattaacaaagcggtagggcgtaaatgttttgctgtgctcatagatcatggtttaatgagaaaaaatgaatccatggactgtatgaatgctttaaaggaagggcttggaatgaatattcatgtgtacgatgaatcagagctgtttttctcaagactgaagggaattaaggatccagaaaaaaagcgaaagatcattggggatcagtttattcaatcatttgatcgaattgcatctgagattgggaaatttaaatttcttggtcaaggtacactatacccagatattatagagagcggtatcagtgctgggaaatctgcacatttaataaaaagtcatcataacgttggtggattaccagagaaaatgaattttgaattaattgaaccattaaaagatctgttcaaagatgaagttaggaaagtaggaagtgaattaaatatttcagataaattaactaaaagacatcctttcccgggtccaggtttaggtgtcaggatcattggtgaaatcacaaaggatcgtgtgtctatactccaagatgcggatgagatattcttaaatgtattaaaagaagaacaggagtatgataatatttggcaagcttttgcagttttaattccggtaaaaacagttggtgtaatgggtgaccaaaggacatatgaaaaccttattgctcttcgtgctgtaaccagcttagatggtatgacggcagactggtatcgaatgccgccagaagttttgtcaaaaatttcaaat

SEQ ID NO: 317586 - DNA, 820 bp, Unknown
  Bacterial polypeptide expressing nucleotide sequence isolated from the Sargasso Sea
attggattttggctctcaatatacacaattaattgcaagaagaataagagaaagtgatgtttattctgaaattttgccgtgggacatagatgaatcaaaaataattaaacttaaccccaaaggaataattctctcaggaggacctaattcagtcacagaaacctatactcctagagttcctcagtttgtatttgatttaggaatacctatccttggtatatgttatgggatgcaaactcttgctgaacaaatgggtggtcatgtcatatccgttgatcaaaaagaatttggccactctgaattagaggttgtaagcgactctgtaatatttaaaaacttagataaaaaaattaatgtttggatgagtcatggagatcaagtccaagacttgccagatgaattcaatctagtagcatcaactaaaacagctcctattgcagcaatggagcataaaagtttaccaatttacgctattcaatttcatccggaggtaacccatacagacaatggacagaaaattttagaaaattttatttttaatatttgcaatgcaaacactgattggaaaatggatgatttaatatcacaaagaatagaggaaattaagagaaaagttcaagataacaaggttttattaggtttatctggtggcgtggattcttctgtaacagcaattcttcttcataaagccattggtaaaaaattaacatgtgtttttgtagataatggtttgctcagaaagggtgaggcagatcaagtaatgcaaacctttaaagaaaacatgaacttaaatgttattaaatccgatagtaaggaagtt

SEQ ID NO: 317587 - DNA, 1324 bp, Unknown
  Bacterial polypeptide expressing nucleotide sequence isolated from the Sargasso Sea
gatgcgtcttgaggacactctcaataaaatactaattgtagactttggttcccaatttacacagctaattgcaagaaaaatcagagaactgggtatttattgtgagatagtaagtcacaaaaaaatagaaaaattcacaaagtttgaaaaaaatattaaaggaatagttttatctggcggtcctttaaatgtctatgagagtaaaaaagtaaaatttaataataaaattcttaaacttggagtacctctactaggcatatgttttggtcatcaaattatttcaaaagcaatgggaggaagtgtaagaacctctaaacatagagaatttggacttgctgaagtaaaagaaacaagaaaaagcaagttaactaaagattttttttctaagggaaaaaataatgtatggatgagccacgcagatcaagtaacaaaattaccaaaaaattttaaaataattgcacaaagtataaattctaagatgtgcattattgaaaatgaagaaaaaaaaatgtttggtattcaatttcacccagaagtaagccatactataaaaggaaagttaatacttaaaaattttatattttctatatgtaaattaactaaaaattggtcttcaagagaccagaaaaaaaaattaataaatgaagtaagaaatagcgtaggaaattcaaaggttatttgtgcactatctggaggtgttgatagcagtgtagttgctaaattactctcaaatgccatagggaaaaaattaacatgtatatttgttaatactggtttacttaggaaagatgaagaaaagcaagttgtaaacacatttaagaagagatttaaaattaatctaatctatgtaaatgcagaaaatttatttttatctaaattaaaaaatatttctgatccggaaaaaaaaagaaaaataataggaaatctttttattaaaatttttgaaaaatattcaaataaaattaaaaatgtaaaattcttagctcaaggaactttgtatcctgatttaattgaaagtaaatctgttacaggtagtcaaacatcgaaaattaaatcacatcataatgtaggtggtttaccaaaaaaaatgaaacttaaattagtagagccattgaaatatctttttaaagatgaagttagaaaattaggattagaacttggattaagtcatgaagttatatctagacacccatttccaggaccaggtcttgcaataagaatgcctggtataatcactaaagaaaaaataaaaattttaaaagaggcagataattactttatcaaatctttaaaagaaaataatctttatgataagatttggcag

SEQ ID NO: 317588 - DNA, 1159 bp, Unknown
  Bacterial polypeptide expressing nucleotide sequence isolated from the Sargasso Sea
gatgagtcatactgatcaagtttcaaaacttccaaagaattttaaagttgttgcttcaagcaccaattcaaaatttgcaattgttgaagataaaataaaaaaatattacggagtacaatttcatccagaggttacacatactgaaaacggaaaaaaattaataagtaattttatttttttaatttgtaaaattaaaaaaaattggtcttctaaggaccaaaaaaaccagttaattaaagatgttagaaaacaagttggaacacaaaaagtaatttgtgctttatcaggaggagtagacagtagcgtggttgctcaattactgaataaagctattggtaaaaaactttattgtatttttgtaaatacaggtcttttaaggaaaaatgaggaagttcaagtagttcaaacttttaaaaagcgtttaaaaatcaatttaatttatgtaaatgctgaaaaagaatttttgaagaagttaaaaaatgtttctgatccagaaagaaagagaaaaataataggtaatttatttattaaaatatttgaaagatattcaaagaaaattaaaaatgttaaattcttagctcaaggaactctttatccagatttaattgagagtaagtctgttaccggtagtaaaacctccaaaatcaaatctcatcataatgttggcggtttaccaaaaaaaatgaatttaaaattagtagaaccattaaaatttttatttaaagatgaggtaagaaaattaggattagagttaaaattaagtaaagaaattatctcaagacatccttttccaggaccaggtctagctattcgaatgccaggtataattacgaatgaaaaaataaaaattttaaaaaaagccgattattattttatccaagctttaaaagatcacggtctttatcacaaaatttggcaggcatatgcagcattgcttccagtaaaaacagtgggagtcatgggtgacaatcgaacgtatgaatatttatgtttattgagagctattacctctgaagatgggatgactgcagactattatgaatttaaaaagtcttttatgcaaaatatatcaaacaaaatagttaacagtataaggggtataaatagggtagtgtacgacgttacatctaaaccgcctagcactattgaattagagtag

SEQ ID NO: 317589 - DNA, 952 bp, Unknown
  Bacterial polypeptide expressing nucleotide sequence isolated from the Sargasso Sea
aatggatgatttaatttcttcaagaattaaagaaataaaagagcaagttcaagataacaaagtattgcttggtctttctggaggagtcgattcttctgtcactgctgcacttttacataaagctattggtaaaaaattagtatgtgtttttgttgataatggacttttaagaaagggagaagcagagcaagtaatgcaaacatttaaagaaaatatgcaattaaatgtagttaaatctgatagtcaagacacttttctgagacatttaaaagatattgaagatcctgaacagaaaagaaaaattattggaagaacttttattgatgtttttgatgctgaagcaatgaagcttaaagacataagatttttagcacaaggaacaatttatcctgatgtcatagagtcgtcaggctcagagtcaaaagaagctcgagtaattaaatctcatcataatgttgggggtcttccagaagatatgaagctagatttggtagagcctttaagagatttatttaaggatgaagtaagaaaaatgggaatcgagcttggaataccaaaagagatgatagaaaggcatccttttcctggcccaggtttaggagtaagaattcttggagaggttactaaagaaaaaactataattctccaacatgcggaccacatttttattgaagaattaattaaagcagatttgtataattcagttagtcaggcctttgcagttttattgcctattaagtcagtaggtgtagttggtgatgaaagaagatatgctgaagttattgcattaagagcggttgagacagtagactttatgacagctaggtgggcacagcttccgtatgattttctagagcatgtttcaaatagaatagttaatgaaatcgaggaagttagtagggttgtttatgatatttctagcaaaccaccagcaacaattgagtgggaatga

SEQ ID NO: 317590 - DNA, 945 bp, Unknown
  Bacterial polypeptide expressing nucleotide sequence isolated from the Sargasso Sea
tatggtaagtgaacagcacaacgattcaatcttaattatagattttggtagccaggttacgcagcttattgcaagaaggataagagagagtggaatttattctgagatttttcctttttcaaaagcagatgaagctattaaaaaattaaaacctaaaggcattatattatcaggaggtccttcatcagttaacagccaagatgcaccaacaattgatgataaaatatttgatttaaaaattcctatcttaggaatttgttatgggcaacaaatcatgtgctcattgcttggaggtgaagtagaaaaatcaaataaaagagagtttggtagagcaaatattaaattcctgaagtcttcacctttatttgaggggttcgatattaaagaaaatactgaacctgtttggatgagccatggcgataaagttactaaccttcctaagggatttgaagtaattgcagaaagtaaaaatgctccatttgctgcagtttctgacgaaattcgatcattttatggtgtacagtttcatccagaagtcgttcatactccaaaaggtgcaaaattactcaaaaattttactcataaaatttctggatgcagtggtaattggaccatggattcattcaaaaagaccgttattgataatatacgaactcaagttggaaagggaaaagtaatttgtggtctttcaggtggagtagattcatctgttgcagctgttcttattcataaagcaataggagaccaactaacatgtatttatgtggataccggtttaatgcgagagaatgaaacggatgaagtggtaaatctatttagagaaaattttaatattcctcttatagatgttaatgcaggtgatacttttttaactagattgactggagtaagtgatcctgaagaaaaaagaaaaattattggttcttcttttatcgatattttgaa

SEQ ID NO: 317591 - DNA, 1177 bp, Unknown
  Bacterial polypeptide expressing nucleotide sequence isolated from the Sargasso Sea
aaaatcaaaagaagtttggatgagccatgctgatcaagtatcaaaacttcctagaaattttaaagttattgcttcaagcacaaattctaaatttgccattgtagagaatagtaaaaaaaaattttatggagtacagtttcatcccgaggtaactcatactgaaaatggaaaaaaattattaagtaatttcatttttttaatttgtaaaataaaaaaaaattggtcttctaaagatcaaaaaataaaattgataaacgatgtgcaacatcaggttgggactaacaaagttatttgtgcattatctggaggtgtagatagtagtgtggttgctcagttattgaataaagctattggaaaaaagctatactgtatatttgtgaatacaggtcttttgaggaaaaatgaagaaactcaagtaatcaaaacttttaaaaaacgacttaaaatgaatttaatttatgtaaatgcagaaaaagaatttttaaataaattaaaaaatgtttctgatccagaaaaaaaaagaaaaattataggaaacctttttattaaaatctttgagcgatattcaaaaaaaatcaaagatgttaaatttttagctcaaggaacgctttatcctgatttaattgaaagtaaatcagttactggtagccaaacctctaaaattaaatcacatcataatgttggcggtttacctaaaaaaatgaacttaaaacttgttgagccattaaagtttttatttaaagatgaagttagaaaattgggtttagaattgaaattaagtaaagagattatatcaaggcacccattccctggaccaggtttagcaattagaatgccaggaattattactaatgagaaaataaaaattttaaaagaagctgattactatttcatccaagcattaagagatcatggactttatgataaaatttggcaagcctatgctgcgttacttcctgttaaaacagtaggtgtaatgggggataacagaacttatgaatatctatgtttattaagagcaattacatctgaagatggtatgacagctgatttttacgaattcaaaaagtcatttatgcaaattatatcaaataagattgttaatagtataagaggtataaatagggttgtttatgatattacctcaaaaccccccagcactattgaattagagtaa

SEQ ID NO: 317592 - DNA, 1579 bp, Unknown
  Bacterial polypeptide expressing nucleotide sequence isolated from the Sargasso Sea
aatgtcagtccaatcaaagctcgacataaaaagtaaaaatattgatactattctcgttttagattttggctctcaatatactcaattaattgcaagaagaataagagaatcagatgtctattctgaaattcttccttgggatgtagatattaagaaaatagaggatattaatccaaagggaataatcttatcaggcggaccagaatctgttactgacattcatacaccaagagcaccaaagatagtttttgacttgcaggttcctattcttggtatttgttacgggatgcagactttagctgagcaaatgggaggccaagttacaacttctgaaaaaaaagaatttggattctctgtcctaaatattgaagataactcaaaactatttaccggatcttcatctgaagcaattgatgtctggatgagtcatggagataaagtagaaactttaccaaacgattttaaattaattgcttccacagaatcggctccaatagctgcaatggaacattcttcaaaacctatttatgcacttcagttccatccagaagtgactcatacaaaaggtggcaagctaattttagataacttcatctttgaaatttgctcatgtaaaccagattggaagcttgatgatctaatttctagcaggattaaagaaatcaaagatataacaaatggagaaaaagtactacttggattatctggaggagttgattcttctgtaacagctgcgcttttatcaaaagcaataggagaaaatcttgtgtgcgtttttgttgataacggactattaagaaaaaatgaagcagaggaggtagttcaaacattcaaaaatgaaatggatctaaatctttttaaagttgatgcacaaaagatatttttaagacatttgaagggcatagaagacccagaacagaaaagaaaaattatcggtagaactttcatcgatgtttttgatgctgaggctgctaagcttgagaacatagattttttagctcaaggaacaatttatccagatgtaatagagtcttcagaatctgaatcaaaggaagccagagttattaagtctcatcacaatgttggaggcttgcctgaggagatgaagctcaagcttgttgaacctttgagagatctatttaaagatgaagtcaggagattgggttcccaacttgatttgcctgagataattttaaacagacatccatttccaggcccgggtttaggcgtgagaattcttggagaaataaatgaaaagaagataaagattcttcaagaagcagattttatttttatagaagagcttagagaagctgatttgtatgactcagtcagccaagcattcgctgtttttttaccaattaaatcagttggagtggttggtgatgagagaagatactccgaagtgattgctttaagagctgtggagacagttgatttcatgacggcaaactgggcttatcttccccacgaatttttagataaagtttcaagacggatcgtaaacgaaatagaggatgtaagtagggtcgtttatgatatttctggaaaaccaccagcaactattgagtgggaataa

SEQ ID NO: 317593 - DNA, 1051 bp, Unknown
  Bacterial polypeptide expressing nucleotide sequence isolated from the Sargasso Sea
aatgagtcttgatacaaatttagacaaaatcttaatcatagattttggttcacaatttacacaattaatagcaaggagaataagagagcttggagtattttcagaattagtaagtcacaaaaaaattacaagcaatcatattaacaacaatataaaagggataattctatcaggaggacctttgaatgtttatcaattaagtgaaaagacatttgataaaagaataataaatcttggtatacccatattaggcatatgttttggacaccaaatcttatctaaatttaatggtggcaaggttaaacaatctaaacatagagaatttggactggcaaaaatttataaaaaaaataatagtatattggtaaaaaatttttttaataaaaaaaaaacaaatttagtatggatgagccatgccgatcaggtttctaaattacctaaaaattttaatgtaatcgcttcaagtcaaaattcaaaatttgctgttgttgagaatagatctaaaaaattttatggggtacaatttcatccagaggtaactcacacaaaaaatggaaaaaaatttatcagtaattttatttttttaatatgtcgaattaagaaaaattggtcctccaaagatcaaaaaaagaaattaataaaagatgtaaaaaaacaagtagggggaaacaaagttatatgtgcactttctggaggagtagacagtagcgttgttgctcaactattaaataaggcgattggtaaaaagctatattgtatttttgtaaatactggtcttcttagaaaaaatgaggagaagcaagtaattgaaacttttaaaaaaagattaaagattaatttaatttatgtaaatgctgaaaagttattcattaaaagattaaataatatttctgatccagaaaaaaaaaggaagataattggaaatttgtttattgaaatttttgaaagatatgcaaaaaaaattaaaaatgttaaattcttagcacaaggaacactttatccagatctaatagaaagtaaatctgtcactggtagtcacacttcaaaaatt

SEQ ID NO: 317594 - DNA, 1561 bp, Unknown
  Bacterial polypeptide expressing nucleotide sequence isolated from the Sargasso Sea
tatgaatagtaatcttgaaaagttattaattattgattttggaagtcaatttacacaattaatcggaaggaagctgagagaattgaacgttttttcagagataattccatatcaaaatgtatctaataaaactttagaaaattataatcctaaagctgtaatattatctggtggtccttctagtgtagtaggaaaaaaatttcctttgccaccttcaaatctctttgatctaggcattcctgtacttggaatatgttatgggcttcaagtaatgatgaaactattgggaggcaaggttgatagtggtagtggtacatcagaatttggaagagcaatactcaaaaaaacagacagtaattcgaaaataattaatgatttatttattaaaggtaaagaacaagtatggatgtctcatggagatcacgtaagtgggttatcaaaaggatttgaggcaattgcttcttctgagggtgctccatttgctattatagctaatgataataataagttatatggggttcaatttcatcctgaagtttatcacacaacaaatggcttaaaacttcttaataatttcttattaatatctggatttagtaaaaattggtcaatgggttcttttaaggaagaaaaaataaatgaccttaaaaaccaaattggaaataaaaaagtcatatgtgcattatctggaggagttgattcttctgtaactgcaacacttattcataaagcaataggaaataaacttacatgtatatatgtagatcacggtttaatgcgattaaatgaaagtgaagaaattattcacatgtttaaaaataattttaaacttaatttgatccatgcaaatgaaagagattattttttaaaatcattaaagggtgtaagtgatccagaattaaaaagaaaaataattggtaatctttttatagaagtttttaataaatattcagaaaaatttggtgacatagaatacctagctcaaggcacgctttatccagatgtgattgaaagtgtcagctttactggggggccctcagaaacgattaaatcgcatcacaacgttggtggtttaccaaaaaaaatgaaactaaagcttgttgagccattacgtgagttatttaaagatgaagtgagacagcttggttttgagttaggattgccaaaagaatttattggccgacatccatttcctggtcctggattagcgataaggtgccctggagaagtaacatcttataaaatagatattttaagaaaagcagattcaatttttatagatcaaattaaaaagtataatctatatgataaaatttggcaggcatttgttgtattgctaccagtaagatctgtaggtgttatgggagatggaagaacgtacgattttgtttgttctttaagagctgtaacttctgttgatggaatgacagcagatttttatccttttaataatgattttttaggtgagacatcaaataaaattattaacgaagttaaaggtatcaatagagttacttatgatattacatcaaagcctccaggaactatagagtgggagtga

SEQ ID NO: 317595 - DNA, 1308 bp, Unknown
  Bacterial polypeptide expressing nucleotide sequence isolated from the Sargasso Sea
aatgcaagacagaattctcatacttgattttggttcacaatatacccagctgattgcaagaagagttcgggaggctggtgtttatagtgagatctatataggcgatattgatttcaacgccatcgaatcatttaagccatctggaataatactctcaggcggacccgaatctgcattcattgatgatgcacccaaaccatccaaagagatttactcaatgggtcttcccattctaggtatttgttacgggatgcaagtgatgacagaacaactcggaggaaaagtttcgccatcaaatgaaagagaatttggtcatgccgatgcaaaaatggaagcaaatagccgtcttttcgagggcattgagactgatgatgagcaaccagtttggatgagtcacggagacagagtcgaatctttgcctgagggattccaaaaaatatgtataagtgcaaactcaccttcagcagcaatggcaaatgaagatacctcattttatgggctccaattccatcctgaggtcactcatacaagttgcggacagagaatcattaaaaactttgttcacaatatttgtggttgtggaaatgattggaatccaggaaatatcattgaaaaagatatcaaagaagttcaggaagcggttggcgatgatcaggttcttctcggattatcaggtggtgttgattcctcagttgtagctgcccttttgcacaaagcgatcggtgatcaattggtctgtattttcgtagacaatggtcttcttcgtctaaatgaaggtgatcaggtcatggagacattctcagagcatatgaatctcaatgtcatcagagtcaatgctgaggatatttttttggagaggcttaaaggtattgatgatccagaggacaagagaaaaataattggtcgaacattcatagaggtttttgaggatgaagcttcaaagttagaaaatgtgaaatggttggctcaaggaaccatttacccagatgttatagagtcagcaggatcgaagacgggaaaagctcatgtaattaagtcacatcataacgttggcggtctccctgaggatatgaaattaaaactggtagagcctctcagggatttattcaaagacgaggtaagaaaaattggcaaagaacttggactgacgtcaaagttggttgatcgacatcctttcccaggtcctggcttgggagtgagaatcttaggagaagttaaaaaagagtacgctgatctattgaggttggccgatgatatttttattgaggaactacataaagagaatctatacgacaaagtaagtcaggc

SEQ ID NO: 317596 - DNA, 1561 bp, Unknown
  Bacterial polypeptide expressing nucleotide sequence isolated from the Sargasso Sea
gatgcgtcttgaaaataatctagataaaattttaataatcgattttgggtctcagtttacacaattaattgcaagaaaagtaagagaattaaatgttttttgtgaaattataagtcacaacaaacttaaaaactacaaaaatgaaaaaaatgtgaaaggcatcattttatcaggtggtcccttaaatgtttatcaaaataaaaaagttaaattcaatagaagtatattaagtttaaatattccaattttaggtatttgttttggccaccagataatctctaaagaattaggaggtaaagtaaaacgagcaaaatcaagagaatttgggttagcaaaagttacaaaattaaaaaaaagcgctttaaccgaaaatttcttttcaaaaaaatctaccaatgtatggatgagccatggagatgaggtaattaaattacctaaaggttttaaagttatagcaaaatcctcaaattcgaaattatgtatgatagaaaatgtaaaaaaaaaaatatatggcatacagtttcatccagaagtttcccatacagttaaaggcaaagtaatattaaaaaactttgtaattaaaatttgtaaaattaaaaaaaattggacatcaaaaaatcaaaaatccaaacttatgcaacaaattaaagaacaagttggaaattctaaagtaatttgtgcattatctggtggagtagatagtagtgtagtagcaaaattaattagtaatgcgattggaaaaaacctaacttgtatattcgttaatactggtctgctcagaaaaaatgaagaaaaacaagtagtaaatacttttagaaaaaaatttaaattgaatttaatttatgtaaatgctgaacaattatttataagcaaattaaaaaatgtaacagatccagaaaaaaaaagaaaaattattggaaatttatttatcaaactttttgaaaaatacgcaaaaaaaataaaaaatgtaaaatttttagctcaaggaactctataccctgatttaattgaaagtaaatctgtaacaggaagtcaaacgtcaaaaattaagtctcatcataatgttggtggtctgccaaaaagaatgaaattaaaattagttgagccattgaagtatttatttaaagatgaagttagaatgttaggtctagaattaaatttaagtaaagaaattatttctagacatccttttcctggtcctggtttagcaattagaatgcctggcacaattactaaagaaaaaataaaaattttaaaagaagcagacaattattttattaatgcattaagagaacacaatctatatcataagatatggcaggcttatgccgcattactacctgttaaaacagttggtgtaatgggagacaatagaacctatgaatatttatgtttactcagagcaataacatctgaagatggaatgactgcagattattttcaatttaataaatcatttatgcaaatggtatctaataaaatagttaataacattcgaggtataaatagagtagtttatgatgtgacctctaaaccaccgagcactattgaactagaataa

SEQ ID NO: 317597 - DNA, 1549 bp, Unknown
  Bacterial polypeptide expressing nucleotide sequence isolated from the Sargasso Sea
catgaaaaataaagacaaaatattaattttagattttggctctcaatatactcaacttattgctcgcagagttagagagataggtgttttttcagtagtaaaaccatcttctttgtctgttgataaaattatcgagatgaatccatctggtattatactttcaggaggacctgaaactgtaacaataagttcttcgcaaaaagttgataaatctttattagaagcaaacataccaattttaggaatatgttatggaatgcaaaccattgctaatgagcttagcggttcagtagttacatcaaacgtaagagaatttggtcatgctaaaatttcttgtgttaatcaatctgttttatttaataatataagcttcgattcaaacaaacttgatgtttggatgagtcatggtgataaggtagatttgcttcctgaaaattttgaaatcattgcttcttcaaaagattgtcaaatagctggatttcaaaatgaaaagctaaatatttttggcttacagtttcatcctgaagtaactcatactgatcaaggaaaaaagattctaaaaaactttatttttgaagtttgcaagtgcagaaaaaattggtctacttcagatattattgattctatggttaatagcgttcaagataaagttaaagatgaaaaagtcttattagggctttcaggtggtgttgattcatctgtagttgcaatgttattacataaagctataaaaaataatttaatttgtatttttgtagatcatggcttgctcagattaggagaagtagatgaggtaatgtcaacctttgaagctttagatattgatataagattagttgatgcatctgaattatttctttcaaaactttccggtgtaactgatccagaacaaaaaagaaaaattattggaaatactttcattgatgtttttgaaattgaagctaataaaataaaggatgtagattggttagctcaaggaactatctatcctgatgtaatagaatcttcttctgatgatcataattcaagcgtaattaaatcacatcataatgttggcggtcttcctgatcgaatgaacttaaagttgttagaacctatcagagagctttttaaagatgaggttagaaaaattggtgctgaactaaataccccagaacatattcttttgagacatccatttccaggtcctggtttaggcattagaattatgggggaaatcaataaagaaagaattgatattttacaaaaagcagataaaatttttattgatgagcttaaagctaataacttgtatgattcattgagtcaggcatttgtagtttatcttccagttaaatcagttggtgttgttggagatgaaagaaggtatgaagatgttttagcattgagagctgtagaaacagttgattttatgaccgcaaattgggcacaccttccatacgatttcattggaaaagtctctaatagaatcgttaatgagatttcttcgataagtagagttgtctatgactgtactggtaaacctcctgccactattgaatgggaatag

SEQ ID NO: 317598 - DNA, 1588 bp, Unknown
  Bacterial polypeptide expressing nucleotide sequence isolated from the Sargasso Sea
atgagtcaaacatctttaaaaaaagaacgagatccttcaatattaatattagatttcggatctcaatattctgaattgattgcaagaagaattagagaaactaatgtgttttctcttgtagtaagtaatcacatttcaattgaagaaattaaaaatattaatcctaaagggatcattttgagtggaggcccaaattctgtatatgaacaaaatgctcctaattgtgatgaaaaaatttttaaccttggaatccctgttcttggtatatgctatggaatgcaattaatggtcaaagaacttggaggatctgttatttcagctaccaaaaaagctgaatatggtagagcaccaataaatatagataaagaatctgccctccttactgatgtagaagataaatcagttatgtggatgagtcatggagattctattaattgtttgcctgatggatttaataaaattgctcataccgaaaacacattccatgcagcaattgcaaatgatgtaaagaaattatttggcgtacaatttcatcctgaagttattcattcagaatttgggatgacggtaattaaaaattttgtttataaaatttcttgttgtgcggctgattggacaaccgaaacctacatagaggaaactattcctaggataagagagcaagttggtaataaaaaagttttacttgccttgtctggaggagttgattcctcaactcttgcttttcttctcaataaagcaattggaaatcagcttacatgtatgtttatagatcaaggtttcatgagaaaaggtgaaccagaatttttaatgaatttttttgataagaaatttcacataaaagttgaatatattaatgcaagggaaaggtttattgccaaattaaaagggattactgatccagaacaaaaaaggaaaattataggtgaagaatttattagagtatttgaggaggaaagcaatagattgggaccttttcagtatttagctcaaggtactctttatcctgatgttattgaaagtgctggtactaatattgatccaaagactggggagagaatagctgtaaagataaagagtcatcataacgtgggtggattgccaaaagatttacaatttaaattagttgagccattaagaaaactttttaaggatgaagtccgaaaagtgggagctgctttaggtttgcctgatgaaataataaaaaggcatccgttcccaggccctggactagctataagaattttgggagaggtcaataatgaaaaacttgattgtttaagagatgcagactggatagtaagagacgaaattaaaaaagcaggtctttacaatgatatttggcaagcatttgcagtattgctacctgttaaaactgtaggagttatgggagataaaaggacttatgcatggccaatagttttacgttgtgtatctagtgaagatggcatgacggcagattggtcaaaaattccttttcagattttggagagaattgcaaatagaatcgtaaacgaagtaagttcagttaatagagttgtttatgatattacaagcaaacctcctggaaccattgagtgggagtgac

SEQ ID NO: 317599 - DNA, 986 bp, Unknown
  Bacterial polypeptide expressing nucleotide sequence isolated from the Sargasso Sea
aatgcaatttcatagtaataaagataaggtaattattgtagattttggatctcaagttactaagttaatagcaagaagagtaagagaatttggtatttattctgaaatatttacaccattacaaataaaaaaattagaaaattttaactttataaaaggtataattttatctggtggaccttcaacagttaccaaaaaaaaatttcaaacaattccaataaaaatttttgaaaaaaaaataccaatacttggaatctgttatggtttacaacttattgcaaaactatttggaggcaaaatcaagtcttcaagaagaagaagagagtttggtagagctttaatttacaaaaaaaaaaaatcaattttaactaaaaatttttttaataaaaaaagttctgtttggatgagtcatgaagatgcagtagtaaaattgccaaaaaactttaaagttgttgcatctactaaagattcgaaattaacaattatagaaaataatagagaaaagatttatggtgttcaattccatccagaagttactcatacagataacggaaaatatatttttaaaaattttttgttttcaatttgtaaattaaaaaaaaagtggagtgctccctcacaaaaaaaaagacttattcaagaaataaaaaaaacagtaaaaaaagataaggtattatgtgctctttctggaggtgtagatagtagtgtagccgctttattaatcaataaagcaattaaaaaaaatctaatttgtattatggtcgatactggactaatgagaaaaaatgaattcaaatatactttcaaattattcaaaaatagatataaattaaatgttaaattaataaatgcttcaggcatttttataaaaaaattgaaaaatgtctacgacccagaaaaaaaaagaataataataggtaatttatttataaaaatattcgaaaaggaggcaaaaaaactaaaaaatgtaaaatttttagcacaag

SEQ ID NO: 317600 - DNA, 754 bp, Unknown
  Bacterial polypeptide expressing nucleotide sequence isolated from the Sargasso Sea
tcttttcagagtcattttaaatccaagttgattgttgtagatgcaagaaataaattttttaatgcattaagaaacatctctgatcctgaaaagaaaagaaaaataattggaaatatgtttattaaaatcttcaaccaagaggcaaaaaaaatatctaaagcaaaatttttagctcaaggaaccatttatcctgatgttatagaaagtcagagttttcatggaggaccaacatctgtaataaaatctcaccataatgttggaggattgccaaaatcaatgaaattaagattagtagaacctttaagagagttatttaaagatgaggttcgaaagttaggggcaaaacttaaacttcctaaaagctttattcaaagacatccatttcctggtccaggattggggattagaattttaagcgatgttacaaaagacaaagtattaatgcttcagaaagcagacaaaatatatattgatgaaataaaatctgcaggactttataatgaaatttggcaagcatttgctgtactcctaccagtcaaaactgtcggcgttatgggagatcagagatcttacgagtgtgtttgtggattaagggctgtgacgtctgttgatggaatgacggctgatttttatccttttagtggagaatttttaagtaaagtatcaactcgaataattaatgaagtaaagggtatcaacagagttgtatacgatacaacatctaagccacctggaactattgagtgggaataag

SEQ ID NO: 317601 - DNA, 1579 bp, Unknown
  Bacterial polypeptide expressing nucleotide sequence isolated from the Sargasso Sea
atgtcagtccaatcaaagctcgacataaaaagtaaaaatattgatactattctcgttttagattttggctctcaatatactcaattaatcgcaagaagaataagagaatcagatgtttattctgagattcttccttgggatgtagatattaagaaaatagaggatattaatccgaagggaatcatcttatcaggtggaccagaatctgttactaacattcatacaccaagagtgccaaaaatagtttttgacttgcaggttcctattcttggcatttgttacgggatgcagactctagctgagcaaatgggaggtcaggttacaacttctgaaaaaaaagaatttggattctctgttttagatattgaagatgactcaaaactatttattgggtcttcatctaaaacagttgatgtttggatgagccatggagataaagtagaaacattaccaaacgattttaaattaattgcttctacagaatcagctccaatagctgcaatggaacattcttctaaacctatttacgcacttcagttccatccagaagttactcatacaaaaggtggcaagctaattttagataactttatctttgaaatttgctcatgcaaaccagactggaagcttgatgatctgatttccagcaggattgaagaaatcaaagacataacaaatggagaaaaagtacttcttggattatctggaggagttgattcttctgtaacagctgcacttttatctaaagcaataggagaaaatcttgtatgcgtttttgttgataatggactattaagaaaaaatgaagcagaggaggtagttcaaacattcaaaaatgaaatggatctaaatctcattaaagttgatgcacaaaagatatttttaagacatttaaatgacatagaagacccagaacagaaaagaaaaattattggtagaactttcatcgatgtttttgatgctgaagctgccaagcttgaaaacatagattttttagcacagggaacaatttatccagatgtaatagagtcttcagaatctgaatcaaaggaagccagagttattaagtctcatcacaatgttggaggcttgcctgaggaaatgaagctcaagcttgttgaacctttgagagatctatttaaagatgaagtcaggaggttgggctcccaactcgatttgcctgagataattttaaatagacatccctttccaggccccggtttaggcgtgagaatacttggagaagtaaatgaaaagaaaataaagattcttcaagaagcggattttatttttatagaagagcttagaaaagctgatttgtataactcagtcagccaagcatttgcagtttttttaccaattaaatcagttggagtggttggtgatgagagaagatactcggaagtgattgctttaagagctgtagagacagttgatttcatgacggcaaactgggcttatcttcctcatgattttttagataaagtttcaagacggattgtaaacgaaatagaggatgtaagtagagtcgtttatgatatttctggaaaaccaccagcaactattgagtgggaataaa

SEQ ID NO: 317602 - DNA, 843 bp, Unknown
  Bacterial polypeptide expressing nucleotide sequence isolated from the Sargasso Sea
aatgagtcttgataatagtcttaacaaaatcttaattgtagattttggttcacaatttactcaattaatagcaagaagaataagagaattaggcgttttctcagatattgtaagtcacaaaaaaattaaacttaatcaaattaaccaaagtgtaaaaggcataattttatcaggtggtcctttaaacgtttatcaaatcaataagtattcgtttgataaaaaaattttgggattagatattcctgttcttggtatttgttttggacatcaaatattatctaaacttaatgggggtagagttaaacaatcaaaacatcgtgaatttggtttagcaaatgtaataaaaaaaaataatagtcttttaactagtaatttttttggtgaaaaaaagtctaaagtggtttggatgagtcatgctgatcaagtatcaaaactaccaaagaattttaaagtaattgcatcaagctcaaattcaaaatttgcaattgttgaaaataaaaaaaaaaatttttatggtgtacagtttcacccggaggtaactcatacagaaaatggaaaaaaactaattagtaattttatttttcttatatgtaaaattaggagaaattggtcttcaaaagatcaaaagaaaaaattaataaaagatgtcagggcccaagttggagataataaagtaatttgtgcgttatcaggtggtgtagatagtagtgtggtcgctcagttattgaacaaagcaataggtaaaaaactttattgtatttttgtaaacacaggattgcttagaaaaaatgaagaagttcaggtagttcaaacatttaaaaaacgattaaatatgaacttaat

SEQ ID NO: 317603 - DNA, 1399 bp, Unknown
  Bacterial polypeptide expressing nucleotide sequence isolated from the Sargasso Sea
ttgtctggtggtcctttaaatgtttatcaaatcaataaatattcgtttgataaaaaaatattagaattaaacattcctattttaggaatttgcttcggtcatcaaattttatcaaagttaaatggtggaagagtaagacaatcaaaacatcgtgaatttggattagctaatatttttaaaaaaagggacagcttactaactaaaaatttttatggtgttaaaaaaactaaagaggtttggatgagtcatgcagatcaggtgtctaaactaccgaaaaattttcaggtcatcgcgtctagtacaaattctaaatatgccatagttgaaaataaacttaaaaaatattatggagtacaatttcatccagaagttactcatactgaaaatggaaaaaaattgatcagtaattttgtatttttaatctgtaaaattaaaaaaaactggtcttccaaagatcaaaaaataaaattaatcaacgaggtgagagatcaagtaggtagccataaagttatttgtgcattatctggaggtgtagatagtagtgtcgttgctcaattattaaataaagccataggaaaaaaattgtattgtatttttgttaatacagggcttttaagaaaagatgaagaaacacaggttgttcaaacttttaaaaaacgattaaaaatgaacctaatttatgtaaatgctgaaaatgagtttttaggaaagctaaagaatgtttctgatcctgaaaaaaaaagaaaaataattggaaatttatttataaaaattttcgaacgatatgcaaaaaaaattaaagatgttaaatttttagctcaaggaacgctctatcctgatttaattgaaagtaaatcagttactggtagtcaaacttctaaaattaaatcgcatcataatgtcggtggtttacctaaaaaaatgaacctaaaacttgttgagccactaaagtttttatttaaagatgaagttagaaaattaggtttagaattaaaattaagtaaagagatcatatcaaggcacccttttccaggccctggtttagcaattagaatgccaggaaatatcactaatgagaaaataaaaattttaaaagaggctgattattattttatacaagcattaaaagatcatggtctttatcataaaatttggcaagcgtatgctgctctgctacctgtcaaaactgtaggggtgatgggagacaaccgtacttatgaatatctctgtctcttaagagcaattacttctgaagatggaatgacagccgatttctttgaatttagaaaatctttcatgcaaactatttctaataaaatagttaatagcataagaggcataaatagagttgtttatgacgttacctcaaaacctccaagtactattgaattagagtaaa

SEQ ID NO: 317604 - DNA, 1017 bp, Unknown
  Bacterial polypeptide expressing nucleotide sequence isolated from the Sargasso Sea
catgcaaaatcaccaacgcttacttatcatagatttcggtagccaagttactcaactaatcgccaggcgtttaagagaactgtcgatatattgtgaaatacacccatttcaaaatgttactgaaaaatttctacaagagtttaaggctgaagccattattttatcaggtggaccatctagtatcactgacgaaaattcgccgagaccacctaatttagttttcgaactagatataccagtccttggtatttgttatggacaacaggtaatgatggcgatgctaggaggtcacgtagataaaggggtcggaactgccgaatttggtagagctattttgcataagacagatcgtgaaacgccattacttgaggggtggttttcaacaaatcaagaacaagtttggatgagccacggtgatcatgtgagtaagattgcgccaggttttgaagtattttctacttctcaaaatgcaccttttgcaatcatagcaaatcatgagcgaaagctttatgcagttcaatttcaccctgaagttcatcatactcccaagggctcaacacttttggaaaacttttgccgcatagccggcttttccggagattggacaataaaaggctatcgagagcaagctatcgcaaaaatacgtgaggaagttggtgataagcaggtaatttgtggtctttctggtggtgtagatagttctgttacagctgttttaattcacgaggcaattggtgaacaattgaactgtgtttttgtagatcacggcttgttgcgcaaaaatgaagcacaagaagtaatcaaaatgttccgagataattacaatatgtctctgatccatgcggaagaacaggaattgtttttaaataagttggacggtcaagacgatccagaaaccaaaagaaaaataattggcggcctatttattgaagtttttcaaaaatatgcaaaaaatataaaagatgcagaattcttggctcaaggaactctctatccagacgtaattgagtcaatcag

SEQ ID NO: 317605 - DNA, 307 bp, Unknown
  Bacterial polypeptide expressing nucleotide sequence isolated from the Sargasso Sea
aatgaacaagttatcagtcaataataaaaaaattgatactatattagttttagattttggctctcaatatacacaattaatagctagaagagttagggaaattgatgtttattcagaaatacttccatgggatatagatgaagaaaagattaaagaattaaatcctaaaggaattatattatccggaggaccaaattctgtgactaaaagttttactcctagagcacctcaaattatatttgacttagatgttccaattttaggtatttgttatgggatgcagacactagctgaacaaatgggcgga

SEQ ID NO: 317606 - DNA, 1555 bp, Unknown
  Bacterial polypeptide expressing nucleotide sequence isolated from the Sargasso Sea
catgaagagtaaattagaaactattttaattgtagattatggatctcaatatacacaattaatagcaagaagaataagagagttagaagtcttttgtcttgtctatccttttaataaaattacaaaaaaaattttaaatgaaatcaaaccatcggcatttatattatctggaggacctagatcagtactagacaaaaatgctcctaaattaaatcaagaaattttaaaaatgaaaaaaccagttttagcaatttgttatggtatgcaattagtaacaaaaaatttgaaaggtgtagtaaaacgttccacgcatagagagtatggtcacactattataaatattaagaaaaaatcacttttatttaaaggaattaataaacagaaaatcaaagtatggatgtctcatggagataatatcaataaaataccaaaacttttttcaataacatctttatcaaataataaaattatttcatctattgaaaattataaaaataaaatttattgccttcaatttcatcctgaggtctatcatacagattttggttcaaaaataattaataattttgttttcaatattgtaaatataaaaaataaattcaaaattcaaaaatttattgaaaataaagtatcagaattaaaaaatgaaattaagaataaaaaaataatctgtggtttatctggaggtgtagattccacagttactgcatatttattaagcaaagccgttaacaaaaatctttattgtatttttgttgatcacggtcttttaagaaaaaatgaagctaacgaagtgtcaaaaatattttccaaaaaatttggcaaaaactttactaaaataaatgcttctaatatttttttaaaaaatttaaaaaatgtttctgatcctgagaaaaaaagaaaaattattggcaaaacatttatagaagtttttgataaagcagctaaaaaaatatcaaatgtagattatttagggcaggggactctttatccagatattatagaaagtattccattttttggtggtccaacagctaaaatcaaaagtcaccataatgttgggggtttaccaaaaaaaatgaaattaaaaattgtggagcctttaagagaattatttaaagatgaggtaagaaatgttggaaagcaattaaaaatagataaacatttacttttaagacatcctttcccaggtccaggtttagcaatccgaatacctggagtaattgataaaaaaaagatcttaattcttcaagaggcagatcatatttttatagagtatctaaaagagaaaaatctttataataaaatttggcaagcttttgttgttcttttaccagtaaaatcagtaggtgttatgggggatgaaagaacatacaattactctgtttcacttagagctattacttcagtggatggaatgacagcggatttttatatgtttacaaataatcaattaaaagaaatatcatctcgtataattaataatgttaaaggtattaacagagtattatatgactttacatctaaacctcctggaaccattgagtgggaataa

SEQ ID NO: 317607 - DNA, 478 bp, Unknown
  Bacterial polypeptide expressing nucleotide sequence isolated from the Sargasso Sea
atgaagctagatttggtagagcctttaagagatttatttaaggatgaagtaagaaaaatgggaattgagcttggaatacctaaagagatgatagaaaggcacccttttcctggtccaggtttgggagttaggatacttggcgaagttactaaagaaaaaatcaaaattcttcaaaatgctgaccacatttttatcgaagaattaattagagctgatttatataactcagtcagtcaagcctttgcagttttgttgcctgtaaaatctgtgggtgtggttggtgatgaaagaagatatgcagaggttattgcattaagagctgttgaaacagtagatttcatgacagctaggtgggcacaactaccatatgagtttctagaacatgtttcaaatagaattgttaatgaaattgaggcagtaagcagagttgtttttgatatttctagcaaaccgccagcaactattgagtgggaataaa

SEQ ID NO: 317608 - DNA, 855 bp, Unknown
  Bacterial polypeptide expressing nucleotide sequence isolated from the Sargasso Sea
aatgcttaataaagtattgattgtcgatttcggctctcaagttacccaacttatagcaagaagtgttaggagccgaaaagtatattgcgaagtagttccatttaataaaatttcattaaattatattaaaaaagaaaaacctttagggataattttatctggcagtccattatctgttacaaaaaaaggatttcctaaaattaaaaaagatattttttttttaggaattcctattttaggaatctgttatggaatgcaattaatatcttccactcttggaggaaaaataaaaaaaatttcaggcagagaatatggagatacttctatcaaagttcttaaaaaatcatctatcagccctaataactggaaggtaggcactaaaaataatgtttggatgtcccatggcgatagtgtgaaaaaattaccaaaaaattttactagttttgctaaaagcaacaatgaaaactatgttggaatagcaaatgaaaaaatgaaaatatttggtcttcaatttcacccagaagtcacacacacaaaagatggaaaatccataataaaaaacttcctatttaaagtatgtaaatgcaagcccaattggaatatgaaaaaatttaaaaaagaaaatattaaattattgaagaaaaaattatttaataaaaaagttttatgtgctttatctggtggagttgactcaaatgtaaccgctctacttttaaacaaagctattggtaaaagattattgtgtatttttgtagaccatggattgttaagaatgggagaaaaaaaagaaattaataatttctttaaaagaaaaaataactttaaatttgtttcagtagatgcatcaaagcagtt

SEQ ID NO: 317609 - DNA, 1021 bp, Unknown
  Bacterial polypeptide expressing nucleotide sequence isolated from the Sargasso Sea
tatggcacagaatattcttgccgataaaattttaataattgacttcggttcacaatacacacagctcattgccagaagagtaagagaacttggagtttattgtgaaatatataaccaccgagcctctctcaaggctattaaagatttcaatgctaatggcattattctctcgggtggaccggaaacagtaaaacaaaaaggctcccctaaggtacacgataaagtttttgagctcggtattccgcttcttgggatctgttatgggatgcaatctatagctaagcaactgaaaggaaaggttgaattagcctataaaagagaatttggccatgcggatttatctctcaagagccaaggttcaggactttttaaaggtatcaataaaaagaaaatgagtgtttggatgagtcatggagaccatgtttccaaacttcctaaagattttaaggtttgcgcaacaacctacaacagtcctatagcagcctttcatcatccaacaaaaaagatattcggtcttcagtttcatcctgaagtaacgcacacacctcaaggtaagaagatattgaaaaattttgttagagatatatcaggatgcaaaggtttgtggaattctaaaaatataattgatcgagcggtaagtgaaataagagagcaggtaggtgatcaagaagttttattgggtttatcgggaggggtggattctgctgttgttgcagcattactctcaaaagcaataggtaatcagttaacctgtatctttgtagacaatggactccttcggcttaatgaaggcgaccaagtcatggaaactttcaaaggtaaatttggaatcaaagtaaaaagagctaatgctggtaatcaattccttagagatttgaaaggaaaaaaagatccggaactgaaacgcaaagctattggaaaaacttttatagatgtctttcttaaagaggctaaaagaaatacaaaaattcaatggttagcacaggggacaattaatcctgatgttatcgaatctgctggg

SEQ ID NO: 317610 - DNA, 1564 bp, Unknown
  Bacterial polypeptide expressing nucleotide sequence isolated from the Sargasso Sea
tatgacagatggtactagcaatgaatcgattttaattttagattttggaagccaagtcacacaacttatcgcacgaagaataagagagagtggtgtttactctgaaatatttcctttttcacaattaaatgaagcattggaaaaaatgcaacctaaaggaattattctttcaggcggcccttcatctgtaacagattctgatgctccaacaattgatagcgacatatttaatctcgatattcctattttagggatatgttatggccaacaaattatgtgctctttacttggaggtaaggttgaaagctccaaggagagggaatttggtcgtgcaaatattaagttattaaaatcttctccattatttaatgattttgagattaataatgacccagagccagtttggatgagccatggtgataaggtaacaaatcttccaaatggttttgatgttattgccgagagtgagaatgctccttttgctgctatctcagatgaagatcgttctttttatggggttcaattccatcctgaagttgtgcacacacccaatggatcaaaaatactcaaaaatttcacccatcaaatatctggctgtaaaggtaattggacaatggactcctttaagaaggtagctatagaaaatataagatcacaagtcggaaaaggaaaagttatttgtggtctttctggaggagttgattcatctgttgcagctgttctcattcatgaagcaataggggatcaactgacttgtatttatgttgatacaggtttaatgcgcgagaatgaaacaaatgaagttgtaaatctttttaaggaaaattttaatattcctctcataaatgtggatgcaggagatactttcttatcgagattgtccggtatcagtgatcctgaagaaaaaagaaaaattattggttcttcttttatcgatatctttgaagaagaggcaaacaaaattggtggagccgattttcttgctcaaggaactctctatccggatgttattgagagcgtttctttcaccggtggaccgtctgttacaataaaaagccatcataatgttggaggacttcctgaaagaatgaatatggagttagttgagcctttaagagaactttttaaagatgaggtaagagagcttggtaaagaattagggattccagatcactttattgagagacatccttttccaggtcctggccttgcaattcgtttgccaggtgagatttctcctgaaaaggctgatattttaaggaaagctgatacaatttatattgaagagattagaaaagcaggactttataatgagatttggcaagctttcgccgtacttttgcctgttcagacggttggtgtaatgggggatgaaagaacatatgattttgtctgtgctttaagggctgtgacttcacttgacggtatgacagctgattactacccatttgagcaagaatttttagctaatgtgagcactcgtatcattaatgaggttaaaggaattaatagagtagtttatgatataacatcaaaaccaccaggtaccatagagtgggaataa

SEQ ID NO: 317611 - DNA, 830 bp, Unknown
  Bacterial polypeptide expressing nucleotide sequence isolated from the Sargasso Sea
aatgcaaaagatccttgtagttgattttggttcacaatacacacaacttattgctcgaaggcttcgagagcttaatgtctattctgaagtttatccatgggatgaaatacctgtcctagaatctgttgatggttttgttttatcaggtggtcctgaatcatcaaacatagaaggcaacccaaatattttcaatgaaatatttgaatccaataaacctattcttggtatttgttatggaatgcaagttttagcttttcaagaaggtggagaaatacagaatgaaggaaaaaaagaatttggttacgcaaagatagacttaaataatcaaacttctttatttgctgacacctcagactcaattgatgtgtggatgtcgcatggagataaagtaatttcacttccagaaggttatgaaactttagctagttctgataattcaccaattgctgcttaccagaatttagaaaagaactattttggattgcaatttcatcctgaggtgactcatacagattttggtctaaaaattattgaaaattttattaatgtatgtggagttgaaaggaattggaatgctgatgacattctaaagaacattcataatcaagctaaaactgaggttggtgaaggtaaagtgcttttagctctaagtggaggcgttgattcaactgtactggcatctgttttacataaaactctggaagatagattagtttgtgtgatggttgatcatggtttgcttcgtaaagatgaggctaacaatgttgtgactaacctaaaagaaaaaattggacttgaagttaaccttgttaatgctcaaagaaaccttt

SEQ ID NO: 317612 - DNA, 867 bp, Unknown
  Bacterial polypeptide expressing nucleotide sequence isolated from the Sargasso Sea
tagattcaactgttacagcggtactagttcatcaagctattggaaacagattaaaatgtttatttgttgatacaggtctgatgagattgaatgaagtaaaactaataaaaaaaatatttacggaaaactttaaaattaagcttgttgtagttaatagttcaaaaggttttatggaaaaactaaaagatgttaaaaaccctgagaaaaaaagaaaaattataggtaaacagtttattgatgtttttaaagcatattcaaaaaaacaaaaaaatattaaatttttagctcaaggaactctttatcctgatgtaattgaatcatcttcaaatatgggtaaaaaatctgttactattaaatctcatcacaatgtaggtggactcccaaaaaatattgaattcaaacttttagaacctcttagagaattatttaaagatgaggttagagatttgggtaagacattaaaaattccaaaagatttcattaatagacatccttttccaggacctggtttaggaataagaatattaggtaaaattactaaaaaaaatgctgatatcttgagaaaagctgatgatatttttattcgaaagattaaagataaaggtttgtatgacaatatttggcaagcattttgtgttttattacctgtaaaaactgttggcgtgatgggagataatagaacatatgaaaggatttgtgttttgagggcagttacttcggttgatggaatgactgctgaggcatttagttttcctgataattttttagaagattgtgccaatgaaattattaataatgttaaggggatcaatagagtttgttatgatttaacatcaaagccaccagggacaattgaatatgagtaaa

SEQ ID NO: 317613 - DNA, 1078 bp, Unknown
  Bacterial polypeptide expressing nucleotide sequence isolated from the Sargasso Sea
atgttgcccaaaaacaattcaaaaaaaaaaataattattattgattttggttcacaagtgaccaaacttattgctagacgtataagagatctaagagtttattgcgagattataaatttaaaagaattaggaaaaattcaaaattttgataatattaaaggtataattttatctggtggaccttcaacagtaactaagagattttatccaaaaatacctaaaaatatattcaaaaaagaaatcccgatattaggtatttgctatggtttacaattaatagcaaaagtttttggtggaaaaataaaaaaatcctcaaaaaaaagagagtttggagaagcaatcctgtttgaaaaatcaaagtcaatattacttaagaatttttttaacaacaaaaaagcaagtgtatggatgagtcatcaagatgcagtttttaaaattcctaagaattttaaaaatttagcttctacggatagttcaaaatatactgcaattcaaaatatagataaaaaaatttatggtatacagtttcatcccgaagttacacatactaaaaaaggatttaaaattttaaaaaattttgttttagatatctgtaaaattaaaaaaaattggttaataggtattgaaaaaaatagaataatttcagatttaaaaaataagataaaaaacgataaagttatttgtgctctatcgggaggtgtagatagcagtgttgttgcattgcttgtaaataaagcaattaaaaaaaatttaaagtgtataatggttgatacaggtctcttaagaaaaaatgaattcaaaaaatcttataatctttttaaatataagtataaacttaatatcaaagttataaaatctaaaaatcttttttttaaaaaacttaaaaatgtgaccgaccctgaacaaaaaagaaaaattattggaaatttgtttattaaaatttttgaaaaagaggcgaaaaaatttaaaaatgttaagtatttggcacaaggaactctctatcctgacattatagagagtaaatcatccacaggaagcaaaacctcaaaaattaaatctcaccataatgttggaggac

SEQ ID NO: 317614 - DNA, 1552 bp, Unknown
  Bacterial polypeptide expressing nucleotide sequence isolated from the Sargasso Sea
atgagtggttataaaaatggaggagtaatcatcctcgattttggatcacagtatacccaattaatagcaagaaaaattcgagagttaaatgtcttctctcatattttacctcatgatattcccttagatgatatcatggtttatgaaccaaaggggataattttatctgggggtccatcaagtgtgtatgagaaaaatgctccaagttataataaagaaatactcaatatagatttacctattcttggtatatgttatgggttacatattttggctcagcataatggaggctctgtaaaatctacaggtcaaggtgaatatggatttgctaaaatttcaattactaaagatacagatttcttagatccagaattaaatggatcacaagtttggatgtctcatatggaccaagtaactaaagttcccgaatcatggtctgttattgcagaatcatcaaacggtgtagttgctgctatggctagtactgatttgaaacgtttagctacacagtttcatcctgaagtttcacacactgagtttggaaaagatatgctagagaatttcttattcaagattgctttatgtaattcaaattggacaccaggtaattttattgaagagcaagtaaatatgattcgaaacgaggtcggtgataataatgtacttattggagttagtggaggggtagattcatcagtcgttgctgctataatgaataaagcaataggagataacgctaaagcagtattaatagatcatggattattgcgaaaaaatgaagcctcagattgtataaatgctttaaaaaatggcttaggtgtaaatatttatttagaagatgaatcagaaattttttttgagaaactatctggagttactgaccccgaacaaaaacgcaagattattggtaatcagtttatttattcttttgaatctgtatcctctagatttgaaaacatgaattatttagcacagggaacactatatcctgatgtaattgaaagtggcgttagtcatggaaaagctgcgcatgtgattaaaagtcatcataatgtaggtggattacctgaagatatgaaattcaaattaattgaacctttaagagagttgtttaaagacgaagttagaactgttggtaaagaattaggcttaccagataaattaattaaaagacacccattcccagggccaggtcttggggtaagaattattggagaaataacaaaagaaagagtttatatcttacaggaggctgataaaatttatattgatatattagaagaagagggcctatatgatgaaatttggcaggcatttgcagttcttatccctgtaaaaacagttggtgtaatgggagatcaaagaacctacgaaaatttattgggtttgagagcagttacaagtacagacggtatgacagctgattggtacagaatgcctccagaagttttatcaaaaatatcaaatcatattgtgaattcagttaaaggtgtaaatcgagttacctatgatgttacgtccaagccgcctggcacaattgaatgggaataat

SEQ ID NO: 317615 - DNA, 1579 bp, Unknown
  Bacterial polypeptide expressing nucleotide sequence isolated from the Sargasso Sea
atgagcgatattcatgagcataagatactgatcctcgattttggatctcagtacacccaactgattgcccgtcgtatccgtgaaattggtgtttactgtgagttatgggcatgggatgtgaccgaagcccaaattcgtgagtttgccccgaacggcattatcctcgcgggcggcccagaaagcgtgactgcggataactctccccgcgcacctgaatatgtgttcaatgctggcgtacctgttcttggtatttgctatggcatgcaaaccatgtctgaacagcttggcggtaaagtgatccaaggcgtgggtgaaggcgaatttggttatgcccagattgaaatgcttgccgaatctgccctgtttaaaggtattgaagatgccgttagcagcgatggcaagtctctgctggatgtatggatgagccatggcgataaagtgtcggcgatcccagaaggctttgtggccgtagctaaaaccgatacttgcccatttgcggccatgtcttgtgaggaaaaacgtttctacggcgtacagttccaccctgaagtaacccatacccgtcaaggtatgcgtatgctgtcgcactttgccttagatatctgtggttgtgccgcaaactggaagccgtcatccattatcgaagacgccatcgagcgcttgaaaaagcaagtgggtgacgatgaagtgattttaggtctgtctggtggtgtggattcatctgtcgtggccatgctgctgcaccgcgcaattggtaagaagctgacctgcgtatttgttgataacggcttactgcgtttaaacgaagccaagcaagtgatggaaatgtttggcgaccattttggtctgaacattgttcacgtcgatgcggaaaaccgcttccttgacgcgctgaaaggcgaagccgatccagaagcgaaacgtaaaatcatcggccgtgtattcgttgaaattttcgacgaagaagccaagaaatgcgttaacgctaaatggttagcccaaggcactatctatccagacgtgattgaatctgcaggtagcgccactggtaaagcacatgtaattaagtcgcaccataacgttggcggtttgccagatgatatggagctaggtctagttgagccactgcgtgaactctttaaagatgaagtgcgtaagattggtctcgagttaggtctgccatacaacatgctttatcgccatccgttcccaggcccaggcttaggtgtacgagtacttggcgaagtgaagaaagaatactgtgatttgctgcgccgcgctgatgcgattttcatcgaagaactgcacaaagctgatctttataacaaagtcagccaagcatttactgtgttcttaccggttcgctctgtgggtgtgatgggcgatggccgtaaatacgattgggtggtgtcactgcgcgccgttgaaaccatcgactttatgaccgcgcattgggcacatttgccatatgatttccttggccgcgtatcaaaccgcatcatcaacgaaatcgacggtatttcccgcgtagtttacgatatttcaggtaagccacctgcaaccatcgaatgggaataat

SEQ ID NO: 317616 - DNA, 409 bp, Unknown
  Bacterial polypeptide expressing nucleotide sequence isolated from the Sargasso Sea
atgagtataataaatgaaacaattttaatcattgattatggttctcaatacactcaattaattgccagaagaataagagagcaaaatatttattgtttagttcatccctataataaaattaactcagaaattttaaataataaatgtttgtctggtataatattatctggtggccctaattctgtaagagataaaaaatctcctaaattaaataaaaaaatactagtattaaaaataccaatactaggtatttgttatggtctgcaattactatgtaaagagtttggtggaaatattggtcaatcaaactcaagagagtatgggcattctttaattactccaaaaaataaatccaaactactagatggtgtaaagaagaatagtcaagtttggatgtctcaatggtgat

SEQ ID NO: 317617 - DNA, 1549 bp, Unknown
  Bacterial polypeptide expressing nucleotide sequence isolated from the Sargasso Sea
aatggatcaagagaatttagaaaaaataattattgtagattatggctcacaagttacacagttaattgcaagaaaagtcagagagattggtgtttactctgaaataataaattttaataaatcaaaaaaaatcaaacaaaataaatttattaaaggaataattctatccggagggcctttaactataactaaatcaaattctttaaatcttactgagaatattttaaatttaaaaaaacctattcttggaatttgctatggacatcaaatattagcaaagaaatttggaggcaaggtaaaaatatcaaaaacaagagaatttggatttgcacaaattaaaagtgacaaaagatgtcctttaactcaaaattttttcaaaaataaaaataactctgtctggatgagccatcaagatatcgtaacaaaaatacccggtggatttaaaagaatagcttcaacgcaaaactcaaaatttgcaattatatcaaatgaaaagagaaagctttacggagtacagtttcatcctgaagttactcatactgaaaatggaaaaattcttttaagtaattttgtattgaacatatgccacacaaaaaaaatgtggagtcttagaaaacaaaaagatttaataattaatgatatcaaaaacaaagtaaaaaatgaaaaagtcatatgtgctttatcaggaggtgttgatagtagtgtggttgcattcttattaaataaagcaatcggcaaaaaattaaaatgtgtctttataaatactggtcttctaagaaaaaacgaggaaaaagaagttgttaaaacttttaaaaaaaaactgaaatctaatctagtttatgttgatgcttctaaactttttttaagtaaattaaaaaatgttactgatcctgaattaaaaagaaaaattattggtaaactttttataaagttgtttgaaagaaaggcaaaaaaaattaagtttttagctcaaggtactttatatccagatttgatagaaagtaggtctgttactggaagtcctacttcaaaaattaagtcacaccataatgtaggagggctaccaaaaaatttgaaattttcattagtagaacctttgcaaacactatttaaagatgaagtaagaaaattaggcaaagaattatcagttccaaaagctatacttcaaagacatcctttcccaggacccggtcttgctataagaataccaggcaaaatttcaaaatataaaattaaaatattacaggaagcagattttatatttattgatgaattaaaaaaatcaaatctttatcacaagatttggcaggcttatgcagctctacttcctttgaaaactgttggtgttatgggagacagtagaacttatgaatatacatgtatgttaagagcagttacttcacacgatggtatgaccgcagacttttataattttgataaaacttttatacagaaggtatctaatagaattataaactctgtaaatggaataaatagagttctttacgacgtgacttctaaacctccaagcactattgaattggaataa

SEQ ID NO: 317618 - DNA, 749 bp, Unknown
  Bacterial polypeptide expressing nucleotide sequence isolated from the Sargasso Sea
aatgaaaaaaaacagtagagctaagaaaattcttataattgattttggttctcaatatactcaattaattgcaagacgtgttagggagcttggtgtattttctgaaatatcaaatcataaacaagttaaaaaagttaatgtggaggaactgtttggaattattttatcaggtggtcctttaaatgtttatgaagataaaaaaataaattttaataaaaagattttagacttgaaggttcctattttaggtctttgctttggccatcagttaatctcaagacattatggtggcaaagttataacagcaaaaaatagagagttcggtttagcaactataaaaaaaaaacttaactccaaattaacaaaaaacttttttgataaccgcaaacaaaggaatgtatggatgagtcatgcagatcacgtaactagactaccaaaaggttttaaagcaacagcatcaacaaaaggttcaaaatttacaataattgaaaatgatttaatcaagagatatggtgttcaatttcatcctgaagtaactcatacagaaaaaggaattttattacttaaaaattttgtgtttggtatatgtaaatcaaaaaaaaattggtcaacagatcatcaaaaaaaaacattaataaaagatgtccaaaatcaaattggtaataaaaaaataatatgcgcactctctggaggtgtagatagcagcgttgtagcacaattattaaataaagcggttggtaaacaattac

SEQ ID NO: 317619 - DNA, 1540 bp, Unknown
  Bacterial polypeptide expressing nucleotide sequence isolated from the Sargasso Sea
aatgatatttattgttgattttggatctcaagtcactcagttaatagcaagaagagtaagagaagctgaagtttattgtgaaattgtgtcaagcaaatcactttacaatcaaataataaatagaggttgttcggggataattttctcagggggtccagcaagtgttcataagtcaaatactccaaaaattgataaaagaatattcaatttaaatattccaatattgggaatttgttatggtatgcagttattatgttaccaacttggtgggaaagtaaaaatttcaaaaaaaagagaatttggcaaaacccttataaagccatcaaaaaaaagtgttttattctcaggatttagaaaaggaaagagctcgaattatgtctggatgagccatggtgataaggttattagtcttccaagagattttaaaagtattgcatcaagttcaaatactaagtttgcagcagttgaaaataaaaaacaatcttattatggtctacaatttcatcctgaagtagtccatacacccaatggtcataagataatcgaaaattttatattcaaaatttgtaaggtaaaaagaaactggagcatgaaaaatcatttaagaaatcagattactgagattaaacattcagttcataaggatcaggtaatttgtggattgtcgggtggagtggatagtactgttactgcagctataatttcaaaagccataaataagcaattaacatgcatttatgttgatacaggtttaatgagactaaatgaaacaaaagaggtagtaaaaatgtttaaaaaacattttaaatctcgattaatagtcaaagactcaagaaagatatttataaaagccctaaagggtgccacagatccagaaaaaaagagaaaaataataggtagtctttttattaaaatatttaatcaagaggcaaataaaataaaacgtgcaaaatatttagctcaaggaactatttaccccgatgtaattgagagtcagagttttcacggcggtccgacatcagtcattaaatctcatcataatgtcggcgggttaccaaaaagaatgaaacttagacttgttgaacctttaagagaactttttaaggatgaagttagaaaattggggctggagatgagactcccaaaaaaattcattaacagacatccatttccaggccccggattgggaataagaatattaggtgaggtaacagcagatagagtaaaaattttacaagaagcagataatatatatatcgaagaaattaaagaagcaggtttgtacgataaaatttggcaagcatttgcagtcttgatgccaattaaaactgttggcgttatgggtgatcatagatcatatgagcaagtctgcggattaagagccgttacgtctgtagatggaatgactgcagatttttatcattttaagggtgaatttttgagtaaagtttcaacaagaataataaatgaggttaagggcataaatagagtggtatacgatactacttcaaaaccaccaggaactattgagtgggagtaa

SEQ ID NO: 317620 - DNA, 946 bp, Unknown
  Bacterial polypeptide expressing nucleotide sequence isolated from the Sargasso Sea
gatgcagacacagatgctggtcgatgaggccatcggggagctgaaatcccgtatagacgacactgccatcattgcctgctcaggtgggatagacagcacagtggcagccgtgctcgcccacaaggcggtaggcagcctcctccactgcgtctacgtcgataccggcctgatgaggaagggcgaaacgtcggaggtgtccgagatgttctccgaaatgggcataaaactccaggtcgtagacgcgtcagccagattcttcgagagtctctccggagtaacagatcctgaggagaagcgtaagataatcggagagcagttcatcagggtgttcgaggaggagaagggaacctgcgctgccaagttcctagttcagggaaccatcgcccccgactggattgagtcaggcggaggagatagggacgtaatcaagtcgcaccacaacgtcgggggactccccgaggacgtcgacatgacaatcgtagagccactaagggagttctacaaagacgaggtcagggagattgcgaggtccctcggtataaaatccagcgagaggcaaccattccccggcccgggtctagccgtcagagtacttggggaagtcactccagaacgtgtagattcatgcagggaagcatgccacatagtggagagtcgcatcagagagtcagcggccaggggagaatgcgatttgccatggcagtacttcgcgacactgctgccggtcaggagtgtaggagtccatggggacgtaagggtccacggtgagactgtcgtcgtcagggcagtggcaagcctagatgggatgagcgcccgctactccccgctcccgcacggccttctagccgagattagcactgagattacaaattcactgaagggtcatgtaaaccgtgttgtgtacgatatcactcacaaaccaccgggcacgatagagtgggagtaa

SEQ ID NO: 317621 - DNA, 428 bp, Unknown
  Bacterial polypeptide expressing nucleotide sequence isolated from the Sargasso Sea
aatgaataaaaataattttatagaaaaaataacaattatcgattatggctctcaatttactcaacttatagcgagaaaaattagagaacttggtgtttattctgaaataattaacttcaatcaaataaaaaacttaaaaaaaaatcattcagttaaaggtattattttgtctggtggaccattaacgataacagataaaaactcctcttctttagacgatcacatactaaaattaaacattcctattcttggtatttgctatggtcaccaaatcctagcaaaaaagcttggtggtaaagtaaaaatatcaaaaaaaagagaatttggtcacgctattgttaaaagtaaatccaaaagcattatcacaaaaaatttctttaaaaaaaaaaacaacgctgtttggatgagtcacccaggatgttgtttct

SEQ ID NO: 317622 - DNA, 1270 bp, Unknown
  Bacterial polypeptide expressing nucleotide sequence isolated from the Sargasso Sea
gtttggagggcatgtctcttccgctgctgagcgtgaatacggttcagcgatattcagccaatctaggccacagcatccgctgttcgacggactacctagttcattcgaggtttgggcgtcacatggagacaacgtactgaaactaccggacgggttcagggtattggcagaatcagaaaatgctcctatcgtcgcgttcacagatgatacaaaccgttttgggatacagttccatcctgaagtcgttcatacaacaggtggcacacaactattacacaacttcctttttgaaatagtgaaatgtcgcggcacatgggaccctgaatcgttcattgacgaaactatccagcaggtaagagagctggtaggaaatgctgaggtcatttgtggactttctggtggcgtggactcagccgttgctgcggcacttgttcacgaggcaatcggcgatcagcttacctgcatattcgtggacaacggtctcctgcgacagaacgaagcggaacaagtcgtccaaacattcagagaacatatggggataaaacttcgtcatgttgatgctcgagaacagttccttgaaaaactaaaagatattgacgaccccgaaacaaagcgtattgtcatcggcgaaacattcatacgagtgtttgaacgagaaacgagtcagtccgaaggtgcggaatttctggtccaagggacactctatccggacgtaatcgaatctgcgggaactggtaacgatgcaaccgtaaaaatcaaaagccaccataatgtaggagggctccccgatgacatgcaattacgtttgattgaaccgctcagaaatttattcaaagacgaagttcgtaatgtaggtcgagcaatgggtatcagccctgaaatcatcgatcgccagccgttccctgggccgggattagcgatcagagtgatcggtgatataacagaagagaagctcgatatattaagacgagccgacagcatactccaagatgagttgatccgatccggatcaacttcagaactatggcaatcttttgcggtcctcactaatacaagatctgtaggggtacagggtgatttccgaacatacggaaatgtgatcgcgctccggtgtataaccgccgaggatgctatgacagctgactgggctaaattgccgtacgagctcctgactgccatcagtaacagaattacaaatgaggtacccgaagtgaatagagtcgtgtacgacataacttcaaaacctccaggcacgatcgagtgggaataa

SEQ ID NO: 317623 - DNA, 1567 bp, Unknown
  Bacterial polypeptide expressing nucleotide sequence isolated from the Sargasso Sea
atgaacaagttatccgtcaataacaaaaaaattgatacgatattagttttagattttggatctcagtacactcaactgattgcaagaagagtaagagaacttgatgtgtattctgaaattcttccatgggatatcgatgaggataaaataaaaaaacttaatcctaagggagtcattctatcaggaggcccaaattcagttacaaagagctttactccaagggcacctcaaataatttttgatttaaatatacctattttaggtatttgttatggaatgcaaactttggcagagcaaatgggaggcaatgtaatatcttcagataaaaaagagtttggtcatgctgagcttgatattgttgcagactcagttttatttaacaatttagataaaaaaatcaatgtgtggatgagtcacggtgatcaggttcaggacttaccagatgattatgaattactagctctaactaatacagcaccaattgcagcaatgcatcacaaaaacttaccaatatatgctattcagtttcatccagaggtcacacataccaaaaacggaatcacaattctagagaattttatttttgacatatgtcatgctcaaaatgattggaaaatggatgatttgatatcttcaagaatcgaggaaattaaacagaaggtcgaaaatcataaggtattgcttggcttatctggcggtgttgattcatcagtaacagctgtacttcttaacaaggcaattggaaaaaaattaacatgcgtatttgtagataatggattattaagaaaaggtgaaagtgaccaagtaatgcaaacttttaaagagaatatgaatctaaatgtcattaaatcagatagtcaagacattttcatgagacatcttgaaaatattgatgatccagaacaaaaaagaaaaattattggaagaacctttatcgatgtttttgatgctgaggcaataaaattaaaggatataaagtttttagcacagggtactatatatccagatgtaatagagtcttcaggttctgaatcgaatgaagctagagtaattaaatctcatcacaatgtaggagggttacctgaagaaatggaattagatctagtagagcctttgagagatctttttaaagatgaggtaagaagaatggggctagaacttggaataccaaaagaaatgctagaaaggcatccttttcctggaccaggattgggagtgagaattattggagaaattaccgttgagaaaacaataattttacaagaggcagataatatttttatagaagaactaataaaagcggatttatacgataaagtaagccaagcatttgctgttttgctacccgttaagtctgttggggtagttggagatgagagaagatacgccgaagttattggtttaagggcagttgaaacggtagattttatgaccgcaagatgggcccatcttccttatgaattcttggagcatgtctcaaacaggatagtaaatgaaatagaacaggtgagtagagttgtatatgatatctcaagcaaacctccagcaactatcgagtgggaataaa

SEQ ID NO: 317624 - DNA, 784 bp, Unknown
  Bacterial polypeptide expressing nucleotide sequence isolated from the Sargasso Sea
ttgagattggatgaatctaaagaaattgaagatatgttcaaaaataatttttcattaaatttccatagaatagacgcaagcgagcaatttctttcaaaattaaaaggaataacggatccggaacagaaaagaaaaattgttggggaagaatttattcaagtattcactgaatttgcaaaacaaaagggaccattcaaatggttagcacaaggtacactttatccagatgtaattgaaagtggcgtatcaaaaggtcctgcagctgtaattaaatcgcatcataatgtaggaggattgccagaatggttgaatctcaaaatcttagaaccattaagagaattgtataaagatgaagtaagagatgttgctagaattttgggcgttccagaaaaattactgaagagacacccatttcctggaccaggattatctgtacgaattatgggagagattactccttcaaagttagcaatctgtagaaaagcaagtaaaattgttgaagaggaactatgggatgcaggagtttatgataaggtatggcaagcatatgcagctgtaggagatgacaaggcagttggagttgtcggagatgaacgaaagtatggaagaattgttacagtcagagttgtagactcaattgatgcaatgactgccgactggactagacttccaaatggtgttttagaaaaaatcagtaatagaattactaatgaaattgatgaagttacatgggtttcttatgtaatttcgagtaaaccgcctgctaccattgagcctcaataaa

SEQ ID NO: 317625 - DNA, 1207 bp, Unknown
  Bacterial polypeptide expressing nucleotide sequence isolated from the Sargasso Sea
tttgagtggaggcccaaattctgtatatgaacacaatgcgcctaattgtaatgaaaaaatttttcatttaggaattcctattcttggcatatgctatggaatgcaattaatggtcaaagaacttggaggatctgttatttcagcaaccaaaagagctgaatatggtagagcaccaataaatatagaccaagaatctgacctcctttctgatgtagaagataaatctattatgtggatgagtcatggcgattctattaattgtttgcctgatggatttaataaaattgctcataccgagaatacactccatgcagcaattgcaaatgatgtaaagaaattatttggcgtacaatttcatcctgaagttattcattcagagtttgggatgacggtaattaaaaatttcgtttataaaatttcttgttgtgcggctgattggacaactgaaacctatatagaggaaactattcccaggataagagagaaagttggtaataaaaaagttttgcttgccttatctggaggagttgattcttcaactcttgcatttcttctcaataaagctattggaaatcagcttacatgcatgtttatagaccaaggtttcatgagaaaaggtgaaccagaatttttaatggatttttttgataagaaatttcagataaaagttgaatatattaatgcaagggaaaggtttattgccaaattaaaagatattactgatccagaacaaaaaagaaaaattataggtgaagaatttattagagtatttgaggaagagagcaatagattgggaccttttcagtatttagcccaaggtactctttatcctgatgttattgaaagtgctgggactaatattgatcctaaaactggagaaagaatagctgtaaaaataaagagtcatcataatgtgggtggtttgccaaaagatttacaatttaaattagttgagccattaagaaaactttttaaggatgaagtccgaaaagtgggagctgctttaggtttgccggatgaaattataaaaaggcatccattcccaggaccaggattagctataagaattttgggagaggtgaataatgaaaaacttgattgtttaagagatgcagactggatagtaagagatgaaattaaaaaagcaggtctttacaatgatatttggcaagcttttgcggtattgctaccaagtaaaaaccagtag

SEQ ID NO: 317626 - DNA, 630 bp, Unknown
  Bacterial polypeptide expressing nucleotide sequence isolated from the Sargasso Sea
aatggaaaaaatcttagttgttgattttggctcccaatacactcaactcatcgcacgcagacttagagaattaaaagtttactcagaagtgtgcccttgggatgagcttcctgcactagatgaagtacaaggtttcatcttatctggaggcccggaaacatcaaatatagagggaaatccaactattaatgaatctatttttaatttgaataaaccaatcttaggaatctgttatggaatgcaggttctagcttttcaggaaggggggagtgttgagaatgaagggaagaaagagtttggttatgcacaggtctctcttcaaaataaatcatctttattttctaatttagataagaatttagatgtttggatgtctcatggcgacaaagtgacttctttaccagatggttacgagactgtggcggtatctgataattcaccaatagcagcatttgaaaacagtgaaaaaaaatatttcggccttcagttccatcctgaagtaacacatacaaaaaaaggtttagaaattatagataactttattaaagaatgtgatgtagagagaagatggactgaagaggatattttaaaaactgttgctgatgaagtagatacaaaagtacaagatgg

SEQ ID NO: 317627 - DNA, 913 bp, Unknown
  Bacterial polypeptide expressing nucleotide sequence isolated from the Sargasso Sea
ttgagtaaatcagtattaattatagattttggatctcaatacacacacttaattggaaggaaaattcgtgagctaggagtttatgcagagatttatcctccaaagtatctcaacaatgtaactaatattttaaaccattcagttttaatattatcagggggaccagactctgttttaaataaaaatgcacctaaaattgacattcctttagatcaaatacctattccaattttaggtatttgttatggctttcaatatatctcaaaagaatttgacggtgttatagaaaaaagtaaccaaagagaatatggaaaaacaattataaagatatcaaagtgtgatttatttaagaacactaactccgagcaacaagtatggatgtctcatggagatagtttatctaaaattccaaaaggttttaaaattcttgctaaaactaaaaataaaataccagcagctatttataaaaaaaatatttatgcaatacaatttcattgtgaggttacgcactctgaatttggcaatcaaatcttaaaaaattttttatttaatatttgtaacttaaaagaaaattggaaaaataatgatttacaccaaactataggtagatatctaagaattaatgttaaagaaaaaaaaccaaatatagtgtgtgctgtatcaggtggggttgactctacagttttggcatttgctatatcaaaatatctgaaattagataacgttcattttatatttgtaaataatggattgcttagaaagtatgatattaaaaatataaaatctgtatttaaatccttcaatttaaaattaaatataatcaatgcagaacatatctttttaaaaaaactaaaaaatgttactgatccagaacttaaaagaaagataattgggggtttatttatagaggtat

SEQ ID NO: 317628 - DNA, 1258 bp, Unknown
  Bacterial polypeptide expressing nucleotide sequence isolated from the Sargasso Sea
catgaatagtaacgataaaatactaattttagattttggttctcaatatactcagctaattgctagaagagttagagagattggcgttttttcggaagtaaaaccatcctcaatatcaacggaagaaataattaaaatgaatccgtcaggcattattctttctggaggacctgaaactgttactataagttcttcgcagaaagtacataaatcattattggaagcaaaaataccaattttgggtatatgttatggcatgcaaactattgctaaagaacttggaggttcagttgttaattcagatgtaagggaatttggtcatgctaatatctctgatgttaataattctattttatttgataatgtaaattttgattcaaataatcttgatgtttggatgagccatggagataaagtagataaaattccagaaaactttgagattattgcttcatcaaaggattgtgcggttgctggatttcaaaatttggattctaacatttttggattacaatttcatccagaagtaactcatactaatcaaggtgagaaaattttatcaaacttcatttttaaagtttgtggttgcagtaaaaattggtcaacatccgatatcataaattcaatggtttctgatgtaaaaaataaagtaaaaaatgagaaggttttattaggactttctggtggtgttgattcatctgtagtagccatgttattgcacaaagctattggaaataatttaatttgtatttttgttgatcatggtttgctgaggcttggtgaagttgatgaagtaatgtcaacatttgaggccttagacattgatattagattagtaaatgcctcagaattatttatttctaatctctcaggagtaacgaatccggagaagaaaagaaaaattattggaaatacttttattgaagtatttgaaaatgaagcaaataaaataaaggatgttgattggctagctcaaggtacaatttatccagatgtgatagagtcttcttctgatgaccataattcaagtgtaattaaatcacaccataatgttggtggtcttcctgaaagaatgaatctgaaattattagagcctatcagagagctttttaaagacgaagttagaaaaattggagctgaactagatactcccaaacatattttacaaagacatccatttccaggtcctggacttggtattagggttatgggagagattaccagagacaaaattaatattttacaaaaagcagataaa

SEQ ID NO: 317629 - DNA, 622 bp, Unknown
  Bacterial polypeptide expressing nucleotide sequence isolated from the Sargasso Sea
gatggctgaggcaattaaattaaaagatattaattttttagcacaaggaacaatttatccagatgtaattgaatcatctggttcagaatcaagtgaagcaagagtaataaagtctcatcacaatgtaggcggattacccgaagagatgaaattagatttggttgaacctctaagagatcttttcaaggatgaggttagaagaatgggagtagagcttggaattcccaaagaaatgttagaaagacatccattccctggtccaggcttaggtgtaagaattattggagagattacaaaagaaaaaacaaaagttctccaagaggctgaccatatctttattcaagaacttattaaagcagatttatacgacaaggtaagtcaggcatttgcagtacttcttccagttaaatcagttggtgttgtaggagatgaaagaagatatgcagaagttgttgctttaagagctgttgaaacagtagattttatgacagctagatgggcacatttaccatatgaatttcttgaaggtgtttcaaaccgtattgttaatgaaatagaggaagttagcagagttgtttatgatatttcaagtaaaccacctgcaactattgagtgggagtaa

SEQ ID NO: 317630 - DNA, 640 bp, Unknown
  Bacterial polypeptide expressing nucleotide sequence isolated from the Sargasso Sea
aacgtttatagaagtttttgaggacgaggcatcaaagttagaaaatgtgaaatggttggctcaaggaactatctatccagatgttattgagtctgcaggatcaaagaccggtaaggcgcatgtaatcaagtcgcatcataatgttggaggtcttcctgaagacatgaagttaaagctgatcgaaccgctgagagatctatttaaagacgaggtgagaaaaattggtaaagagcttggtttaacctcaaagttggttgatcgacatccatttccaggacctggtctaggagtcagaatattgggagcagttaaaaaagagtatgccgatttattgagattggctgatgatatttttatagaagaattacataaagagaatctatacgataaagtaagtcaggcgtttgcagtttttcttccagtaaaatctgtaggcgtcatgggtgatggaagaaaatatgaatatgtcattgctttaagggcagtagagacaaccgattttatgactgcaaattcagctaaattgccatacgaatttctagatcatgtatcaacacgaatcatcaatgaagtcccaggaatatcgagagttactttagatatatcctcaaaaccgccttcaactattgagtgggaatga

SEQ ID NO: 317631 - DNA, 217 bp, Unknown
  Bacterial polypeptide expressing nucleotide sequence isolated from the Sargasso Sea
atgtatcagactgtcgtgatagttgactttggctcccaagtaacccagttaattgcgagaagggtccgggaactgggagtttactcggagataattccgtgtactacagcaaaccccgattcaataggtaaaatggctccaaaaggaatcatattgtcaggaggcccggcatccgtaacagaaaataatgcgccaaaagtaaacgccccgagctatt

SEQ ID NO: 317632 - DNA, 1255 bp, Unknown
  Bacterial polypeptide expressing nucleotide sequence isolated from the Sargasso Sea
atgaccacaaatatccacgaccaacgcatacttattttggattttggctcgcaatacacgcagttgatagcacgtcgtgttcgcgaaataggcgtttactgtgagctttgggcttgggatgtgaccgaagagcaaatccgcgaatttaatcctcaagggattattctgtcaggtggcccagagtcagtaaccgaagaaggctcaccacgcgcgcccgagtacgtatttgaagccggcgtgccagtgctaggcgtgtgctatggcatgcaaaccatggcacaacagctaggtggtggcgtactgggttcagacaagcgtgaatttggttatgcgcaagtagaagtgattaagccaagcccgctgctggataaaattgaagatgcgataggcgataacggcgcggcgctgcttgatgtatggatgagccacggcgataaagtggcagctattcccgaaggttttgaaaccatcgcgcaaaccgcttcatgcccacatgctgcaatgtataacgcagagaagcaattctatggcgtgcagttccaccctgaagtgactcacactcgccaaggcatgcgtctattaactcactttgtgatggacatctgtaagtgtgaaaagctctggacagctggcgcaattattgacgatgccattgagcgtataaaagaaaaggtgggcgatgaagaagttattcttggcctttcaggcggcgtagattcttcagtaacagccatgctgcttcaccgcgcgataggtgacaaacttacttgtgtgtttgtagacaatggcctgcttcgcttaaatgaagctgatcaggtaatggaaatgtttggtgaccatttcggccttaacattatccgtgtagacgctgaagagcgtttccttgatcgcctaaaaggcattgaagatcctgagcttaaacgtaaagctatcggtaatgagtttgttcgtgtatttgacgaagaagcgggtaagcgtgaaaacgcgaagtggttagcgcaaggtactatttacccagacgttattgaatcagcgggttctgcaacgggtaaagcgcacgtaatcaaatcgcaccacaacgtgggtggtcttccagaagatatggagctaggtcttgttgagccactgcgtgaactctttaaagacgaagtacgcaaaatcggccttgagctaggtttaccgtacgacatgctttaccgtcacccgttccctggtccgggtctaggtgttcgtgtacttggtgaaataagaaaaa

SEQ ID NO: 317633 - DNA, 745 bp, Unknown
  Bacterial polypeptide expressing nucleotide sequence isolated from the Sargasso Sea
caaattaaatcttgaagttgttgatgcaaaaaaaactttctatagacacttaaacggagtaaaagatcctgaacaaaaaagaaaaattataggaagaacatttattgatatttttgataatgagtctgtcaacatgaaaacaaaagaagaaataaaatttcttgcccaaggcacgatataccctgatgtaattgaatcgtccgaatcagaatcaaatgaggcaagaataataaaatctcaccataatgttggaggtcttcctgatgaaatgaaaatggaattggtggagcccttaagagatctttttaaagatgaagtaaggaaactaggagctaaacttgatctcccaagcgatattttaaatagacatccatttcctgggcctggccttggcgttaggattatgggtgaaattaatcctgagcgaataagaattctccaagaagccgattcaatctttatcaatgagctaataaaggcagatttgtacaatgatgtaagccaagcattttgtgtatatttgccaataaaaacggttggtgttgttggagatgagagaagatatgctgatgttattgcactacgtgcagtagaaaccgtagactttatgactgcaaaatgggcagatttgccatatgaatttgttagcaaagtttcaaacagaattgtgaacgagatagctgatattagtagggtcgtgtatgatgtaactggcaaaccacctgcgactattgagtgggagtag

SEQ ID NO: 317634 - DNA, 1603 bp, Unknown
  Bacterial polypeptide expressing nucleotide sequence isolated from the Sargasso Sea
ttgactccgtccgctgccatgcatgacaagatcctgatcctcgacttcggttcgcaagtcacccaactgattgcacgtcgcgttcgcgaagccaacgtgtactcggaaattcatccgtacgacgtcgatgcgtcgttcattcgcgatttcgcgccgaagggcgtgattctctccggcggcccgagctcggtcaccgaagcggatacgccacgcgtgccgcaagtggtgttcgaactcggcgtgcccgtgctgggcatttgctacggcatgcaggcgatggccgagcagctcggcggcaaggtcgatatcggccacctgcgtgagttcggctatgccgaggtgcgcgcgcgcaaccatacgagcctgctcgaaggcatcagcgacttcaccacgccggaaggtcacggcatgctgaaggtgtggatgagccacggcgacaaggtgctggaaatgccgcagggcttcaagttgatggcgtcgacggaatcgtgcccgattgcggcgatggctgacgaagcgcgtcatttctacggtttgcaatggcatcccgaagtgacgcacaccgtgcagggccgcgcgatgctcgaacgcttcgtgctgcagatttgcggcgcgaaccctgactgggaaatgggtcattacatcgacgaagccgtcgcgaagattcgcgagcaggtgggtaacgagcacgtgattctgggtttgtcgggcggcgtggattcgtcggtggcggcggcgctgttgcatcgcgcgattggcgatcagctgacctgcgtgttcgtcgatcacggcctgctgcgtttgaacgaagccgagcaggtgatggcaacgttcgctgagaaccttggcgtcaaggtgatccacgtcgacgcgagcgaagtgtttctgtcgaaactggccggcgtgaccgatccggaagcgaagcgcaagatcatcggcgcggaattcgtcgaggtattccagactgaagccaacaagctgaccgacgcgaagtggctcgcgcaaggcacgatctatccggacgtgatcgaatcggccggcaagggcaagaaggccacgcagaccatcaagagccaccacaacgtgggcggcctgcctgagacgctgaatctgaagctgctcgaaccgctgcgtgaactgttcaaggacgaggtgcgcgaactgggcgtgaagctcggtttgccgccggccatggtgtatcgtcatccgttcccgggcccgggtctgggtgtgcggattctcggcgaagtgcgccgcgatttcgccgatctgctgcgtcgtgcggacgcgattttcatcgagacgctgcgtacctttatcgacaaggaaaccggcaagtcctggtatgacctgacgagccaggcgttcgcggtgtttctgccggtgaagagcgtcggcgtgatgggcgacggacggacttatgagtatgtcgtggcgctgcgcgctgtgcagacgctggacttcatgaccgcgcattgggcacatctgccgcacgagttgctggggcatgtgtcgaaccgcatcatcaatgaagttcgtgggattaaccgggtggtttatgacatctcggggaagccgccggcgacgattgagtgggagtgat

SEQ ID NO: 317635 - DNA, 473 bp, Unknown
  Bacterial polypeptide expressing nucleotide sequence isolated from the Sargasso Sea
aatgcagagtaaattagaaaccattttaattgtagattatggatctcaatacacacaattaatagcaagaagaataagagagttagaagttttttgtcttgtctatccttttaataaaattacgaaaaaaattttgaatgaactcaaaccatcggcatttatattatctggaggacctagatcagtactagacaaaaatgctcctaaattaaatcaagaaattttaaaaatgaaaaaaccagttttagcaatttgctatggaatgcaattagtaacaaaaaatttgaaaggtgtagtaaaacgttccacgcatagagagtatggtcacaccattataaatattaaaaaaaaatcacttttatttaaaggaattattaaaaagaaaattaaagtatggatgtctcacggagataatatcaataaaataccgaaacttttttcaataacatctttatctaataataaaattattt

SEQ ID NO: 317636 - DNA, 1159 bp, Unknown
  Bacterial polypeptide expressing nucleotide sequence isolated from the Sargasso Sea
gatgagccatgctgatcaagtttcaaaactgcctaagaattttaaagttgttgcatcaagcattaattcaaaatttgcaattgttgaaaataaaataaaaaaatattatggagtgcaattccacccagaggtaactcatacagagaatggaaagaaattaataagtaattttatttttttaatttgtaaaattaaaaggaattggtcctctaaggatcaaaaaaatcagttaattaaagatgttagaaaacaagttggaaataacaaagtaatttgtgcattatcaggaggcgttgatagcagtgtagttgctcaattacttaataaagctattggcaaaaaactttattgtatttttgtaaacactggccttttaagaaaaaatgaggaattacaagtagttcaaacttttaaaaagcttttaaaaatgaatttaatttatgtaaatgctgaaaaggaattcttaaaaaaattaaaaaatgtttctgatccagaaaaaaaaagaaaaataattggtaatttatttattaaaatatttgaacggtatgccaagaaaattaaaaatgttaaatttttagctcagggcactctttatccagatttaattgagagcaaatctgttactggtagccaaacttctaaaattaaatcacatcataatgtcggtggcctacccaaaaaaatgaatttaaaattagtagaaccactaaaatttttatttaaggatgaggtaagaaaattaggtttagagttaaatttaagtaaagaaattatttcaagacatccttttcctggacctggcttagctattcgaatgccaggaataataactaatgataaaattaaaattttaaaagaagctgattattattttattcaagctttaaaagatcacggtctttatcataagatctggcaagcatatgcagcattgctgccagttaaaactgtgggcgttatgggagacaatcgaacttatgaatatttatgtttgttaagagcaattacatctgaagatggaatgactgcagattattatgaatttaaaaagtcttttatgcaaactatttcaaataaaatagttaacagcataagaggcataaatagggtagtgtatgatgttacttcaaaaccaccaagcactattgaattagagtag

SEQ ID NO: 317637 - DNA, 1031 bp, Unknown
  Bacterial polypeptide expressing nucleotide sequence isolated from the Sargasso Sea
agtaactcacacacctcaaggcaagaggatattgaaaaactttgttagagatatttctggctgtaaaggtttatggaattctaaaaatataattgatcgagcagttagtgaaataaaagaccaagtaggagatcaagaagtgctattgggtttatctggaggtgttgattctgctgttgtagcagcactactctcaaaggctataggcagtcagttaacttgtatctttgtggacaatggactccttaggctgaatgaaggcgaccaagtgatggaaactttcaagggtaaatttggaatcaaagtaaaaagagctaacgcaggtaatcaatttcttaaagatttgaaaggaaaaaaagatccggagcagaaacgcaaagctataggtaaaacttttatagatgtctttcttaaagaggcaaaaagaaataaaaaaattcaatggttagctcaagggacaatttatcctgatgttattgaatcagctggcacaaagaatggttcagcgcatgtaataaaatctcatcacaatgtaggagggctgccgagctatcttaatctacccgtgatagagcccttaaaggacctatttaaagatgaagtcagaaagattggtttagagcttggtttaccaaaagagatattatttagacacccttttccaggtccaggtttgggtgtccgaattcttggggaaatcaaaagaccttatattaaaacccttcaattagctgatgatatttttattagtgagttggttaaaggtggttactacgagaaagtaagtcaagcttttgcagtatttttaccggttaaatccgttggagtagtaggggatgcaaggcgttatgaatatgtcattgctctaagagcagttgaaactattgattttatgactgcgaagtcagctaaacttccacatactttcttagaaaaagtttccaacagaatcatcaatgaaattcctgaagtatctcgtgtaacttacgatatttccagtaaaccaccagctactattgagtgggaatgag

SEQ ID NO: 317638 - DNA, 1753 bp, Unknown
  Bacterial polypeptide expressing nucleotide sequence isolated from the Sargasso Sea
atgtcgaatgactgcctcgccgttctagattttggaagccaatacgctcacctgattgcgaaaagacttcgtcgaaagggattctacacggaaatccacactcctgccagtcccgcgtcaaaacttgcccatgcccggggactgattctctccggaggaccggcttcggtttacgaggaacagaccccagatttcaattcaaaactgctggaactcgagcttccgattctcggtttgtgttatggtcatcaactgacggcactccattttggaggctcgattgaaaacaccggcagcggagaattcggcaaggcgcatctgcagcaaacgcagccatcgaccctttggaaagggattgattttccaacccaggtctggatgagccatcaggacagcgtcactgatttgcctctggatttcgagatcatcgcacagaccaatggctgcccttccgcggcacttcagcaccggcagaaaccaatatacaccctccaatttcatccagaggtcaaggacaccctctgcggttcagaaatccttgcaaattttgcagagatttgtggggtgcccaagaattggagcatgcagaatttcatcagccttgccaaagaacagattcgaaaggaagtggcttcacggaaggtcctgatgtttctcagcggcggggtcgattcttccgttgccttcgccctgctcaacgaggccctgggtacggatcgggtgcttggactctacatggacaacgggttcatgcgccaaggagaatcagagcagatcatgcagcgttaccgggatctgggttatacgaacatcgtagcccgggatttcagcaaagagttcctcgaggccctggcgggactcaccgatccccaacagaaaaggcatcaggtgggcgcggtattcatccggatgcgcgaacggtttctcagagaacttcaattaaacccggaagagtggatgctcgggcaggggacgctctacccggacattatcgaatccgggggaagcgaacacgcgaatgtcatcaaatcccaccacaaccgggtggatgaggtgatggaactgctcgaagccggtcaactggtcgaaccgcttaaagatctctacaaggacgaggtaagggaactcggaagcctgctcgggctcccggattcgatcgtctggcgtcatcctttcccgggtcctggactatgcgtaaatgttctctgttcggaaggcaggaatgatctgggaaccgacaataggcttgaaaaacgggtcctcgaggcccttccggaaaatagctgcagcgcctcggtccttccggttcggtcggtgggcgtccagggagaccagcggacttatacccctcccgccgtgctttggaaaacccccgaagactggaattggcttgaggaacagtcgatccgcatcaccaactccgtccgtgaaatcaaccgtgtggtgttcctcctcagccctgcagcactaacccccttgaagatccgggaagcctactgcacccaggaaagacttgacctgctccgccaggccgatgccattgctaccaatatcctgatggaacatgatctgatgcaggacattttccaactgctggtgatcctgctgccgatttcagaagacggacaaggggacagcatcgtcctcagaccggtctgttccgaagatgtgatgaccgcacaattcgcccagctgggttgggacctcctgaactccttgaaacaatccctatccaacctgcctggaatcgatg

SEQ ID NO: 317639 - DNA, 1531 bp, Unknown
  Bacterial polypeptide expressing nucleotide sequence isolated from the Sargasso Sea
gatgccaaacaaagtattaattcttgattttggatcacaatacactcaattgattgctaggagggtaagagagttaaatattttttgtgaaatttatccgtacaatagttccaaatttatattaaacgattattcagcagtcattctttctggatcaccatactctgtaagatccaaagatgcattaaaaattaatcttgataaaattaaaggtgccataccacttttaggaatatgctatggggctcaataccttgcccataattacggtggtctagtagatttatctaattccagagaatatggtagagctaatttagtctctatatcttccgaatctaatttattggatggtattaatcaaggatctcaagtttggatgagtcatgctgatacaattgttaaattacctaaaaattctgttaaaattggaagtacttcggatgttgaaaatgctgcattcagtttccaaaatgaacaaacctatggcattcaatttcatcctgaggtttatcacagtactgatggcaagttgattcttgaaaatttccttaagaaaatttcaaaaattgaagccagttggacacctgcatcttttgttgactctgcaataaatagtataagagaagaaattaataatgataatgtaatactaggactatctggaggcgttgactcatctgtagctgcagtattattgaataaggcaattggagatcaattgacttgtatttttattgataatggtttgctgagaaaaaacgaatttttctctgttttagaacagtacaaggggatgggattaaatgttataggaatcgatgcaaagaaaaaattttatcatgcgttgtcaggaattgttgatcctgagaaaaagagaaaatgtattggaaaagtttttatagatgtcttcgatgaggaatcaaaaaaaattgagaatgctaagtggttggctcaaggtaccatataccctgatgttattgaatcagtctcggttaagggtccttcagctactataaaatctcatcataatgtaggtggattacctgactttatgaatctatctgttatagagccattaaagatgttatttaaagatgaggttagaaaagttggtaaagagttaaaagtaaaagatgaaattttaaaaagacatccatttccaggtccaggattgggtataagaattttaggtgaaatcactcctgagaaggttaatatgttacaggaagctgataatatttatattgaatccctaaaatccaaagacttgtatgataaaatatggcaggctggagtgattttgcttcctgttaagtctgtaggtgtaatgggtgatgaaagaacatatgagaattgtgttgtgcttagggcagtaacatcaactgatggtatgacagctgattgggttgatttaccatacaaattcttacaagatgtttccaataaaattattaataatgttaaaggtattaatagggttgtttatgacattagttcaaaaccaccctcaaccattgaatgggaatga

SEQ ID NO: 317640 - DNA, 353 bp, Unknown
  Bacterial polypeptide expressing nucleotide sequence isolated from the Sargasso Sea
aatgatacttagcaataatttaaataaaattttaattattgattttggttctcagtttacacaattaatagctagaagaattagggaaattggaattttttctgaaattataagtcataaaaaagctaaagatctaaatttatttaatgaaaaaataaaaggaataattttatcaggtggcccacttaatgtttatgatggaaataaatttaaatttgataaaaaaatattaaatttaaaaatacctattcttggaatatgttttggacaccaaataatttctaaattgcttggcggaaaggttaaaaaatcaaaatatagagaatttggttccgctaaagtaaaaaaaaaaa

SEQ ID NO: 317641 - DNA, 1564 bp, Unknown
  Bacterial polypeptide expressing nucleotide sequence isolated from the Sargasso Sea
aatgagtcttgatcaaaatcttaataaaatcttaataatagattttggttctcaatttactcaattaattgcaagaagagtaagagaattaggtgtgttttcagaaatagttagtcacaaaaaaataaaactaaaagacataaatcacagcattaagggaatagtattatctggcggtccattaaatgtttatcaaataaataaatattcatttgataaaaaaattttacaacttgatgtaccagttcttggaatatgttttgggcatcaaattttatcaaaacttaacggtggaagggtaaaacaatcaaaacatagagaatttggtttagctaatgtttataaaaagaataacagtcttttaacaactaatttttttggaaacaaaaaatccaaacaagtttggatgagccatgctgatcaagtttcaaaacttcctaaaaattttaaagttgtagcatcaagcactaattcaaaatttgcaattgttgaaaataaaataaaaaaatattatggggtacaatttcacccagaggtaactcatacagagaatggaaagaaattaataagtaatttcatttttttaatttgtaaaatcaaaaaaaattggtcttctagggatcaaaaaaatcagcttgttaaagatgttagaaaacaagttggaaacaataaagttatttgcgctttatcaggaggtgtagatagtagtgtagttgctcaattacttaacaaagctattggtaaaaaactttattgtatttttgtaaatacaggccttttaagaaaaaatgaagaagtacaggtagttcaaacttttaaaaagcgtttaaaaatgaatttaatttatgtaaatgctgaaaaggaattcttaaaaaaattaaaaaatgtttctgatccagaaaaaaaaagaaaaataattggtaatttatttatcaaaatatttgagaggtatgctaagaaaatcaaaaatgttaaatttttagctcaaggaactctctatccagacttaatcgaaagtaaatcagttacaggtagtcaaacttctaaaattaaatcacatcataatgttggtggcctaccaaaaaaaatgaatttaaagttagtagaaccacttaaattattatttaaggatgaagtaagaaaattaggattagagttaaatttaagtaaagaaattatttcaagacatccttttcctggaccaggcttagcaattcgaatgccaggtattataactaatgaaaaaattaaaattttaaaggaagcagattattattttattcaagctttaagagataatggtctttatcataaaatttggcaagcttacgcagcattgctaccagttaaaactgtgggtgttatgggagacaatcgtacttatgaatatttatgtttgttaagagcaattacatctgaagatggaatgactgcagattattatgaatttaaaaagtcttttatgcaaactatttcaaataaaatagttaacagcataagaggcataaatagggtagtgtatgacgttacttcaaaaccaccaagcactattgaattagagtag

SEQ ID NO: 317642 - DNA, 1135 bp, Unknown
  Bacterial polypeptide expressing nucleotide sequence isolated from the Sargasso Sea
gtggtcccagatgattgggaggtagttgcatacagctcaaataatattgtcgccgcattagctagcaatgatcacatgaggtttgcaactcaatttcaccctgaggtatcacatactgaagagggtgacatcttattaaataattttctttttcatatttctgggtgtgaaaaaaattggacagcaggcaattttattaatgaacagattgagtcactgaaaaataagattggtaatgaaagaattttagttggtgttagtggaggggttgactctactgtagttgctagtttaattaacaaagcggtggggagtaagtgttttgctgttatcatagaccatggtttactaagaaaaaatgaagcaatagattgtgtaaatgctttaaaacaagggcttggaatgaatattcacctgtatgatgaatcagaggtgtttttctcaagactaaggggagtaaaagacccagaacaaaagcgaaagatcattggggatcagtttatccaatcattcgatcgaattgcgtcagagatcggaaaatttaaatttcttggtcaaggcacattatatccagatattattgagagcggtgtaagtaaagggaaatctgcacacgtaattaaaagccatcataacgttggtgggttaccagataaaatgaattttgatttaattgaaccattaaaagatttgtttaaggatgaagttaggaaagcagggaatgaattaaatattacagatgaattagttaaaagacacccttttccagggccaggtttaggtgttaggatcattggggaaatcacaaaggagcgtgtttacattctccaagaggcagatgagattttcataaatgttttaaaagaagaacaagagtatgataatatttggcaagctttcgcggtactaattccagtaaaaactgttggtgtaatgggggaccaaaggacttatgaaaaccttattgcccttcgtgcagtaacaagcttagatggcatgacggcagactggtaccgaatgccagcagaggtattgtcaaaaatttcaaataaaattgtgaataatgtgagtggagtgaaccgggtagtatatgatattacctcaaaaccacctggcactattgagtgggaataaa

SEQ ID NO: 317643 - DNA, 397 bp, Unknown
  Bacterial polypeptide expressing nucleotide sequence isolated from the Sargasso Sea
aaagaaatgctagaaaggcatccttttcccggaccaggattgggcgtgagaattattggagaaattaccgttgagaaaacactaattttacaagaggcagataatattttcatagaagaactaataaaagcggatttatacgataaagtgagccaagcatttgccgttttgctacccgttaagtctgttggtgtagttggagatgagagaagatacgccgaagttattggtttaagggcagttgaaacggtagattttatgactgcaagatgggcccatctcccttatgaattcttggagcatgtctcaaacaggattgtaaatgaaatagaacaggtgagtagagttgtatatgatatctcaagtaaacctccagcaactatcgagtgggagtaat

SEQ ID NO: 317644 - DNA, 1166 bp, Unknown
  Bacterial polypeptide expressing nucleotide sequence isolated from the Sargasso Sea
tgtttggatgagtcatggagataaagttgaaactcttccaacagaattcaaattaactgcttcaaccaaatcagcaccaattgcagcaatggagcattcctctgattctatatttgccctgcaatttcatcctgaagtaactcatactgagggaggtaagttaatcttagataattttatttttgatatttgttcatgcaaacctgaatggaaactagatgatttaattactagtcgagttgaagaaataatcaaagtcacaaatggagaaaaagttcttttaggtctttcagggggagtggattcatcagttacagctgcactattatcaagggcaattggagataatctgatatgcgtatttgttgataatggactgctaagaaagaatgaggcagaggaagtgatacaaacatttaaaaatgaaatggatttaaatctaataaaggttgatgcacagaaaatatttttaagacacttaaaaggtgttgaagatcctgagcaaaaaagaaagataattggaagaacatttattgatgtatttgatgctgaggcagcaaagcttgaagatattgatttcttagcacagggaactatttatccagatgtaatagaatcatcagaatctgaatcaaaagaagcaagagtaataaaatctcatcacaatgttggtggattgccagaggagatgaagctaaaacttgtagagccattgagagacctatttaaagatgaagttagaagattaggttcacaacttaacttgcctgaaattattctaaacagacacccatttccaggacctggtttaggcgtaaggattcttggtgaagtgaatgaaagaaagataaagattcttcaagaagctgattcaatctttatagaagagttaagaaaagcaaatctgtataattcagtaagtcaagcttttgcagtattccttccagtgaaatccgttggagtcgtaggtgatgaaagaagatattcagaggtaatagctcttcgcgcagtcgaaacagtggattttatgactgctaactgggcatttttacctcacgaatttctagatgaagtttctagaaggattgttaatgaaatacaggatgtaagtagagtagtttatgacatttcaggtaaaccacctgcaactattgagtgggagtgaa

SEQ ID NO: 317645 - DNA, 1564 bp, Unknown
  Bacterial polypeptide expressing nucleotide sequence isolated from the Sargasso Sea
atgaatcttgagaaaaaccttaacaagattttaatcatagactacggatcacagtttactcagcttatagctagaagaattagagagcttggagtttattcaaaaataattagtcataataaaattaaattgagcgatataaaaaataataaagtaggtggcttaatcttgtccggtggtccacttaatgtttatcaatccagtaaaataaaatttgataaaagaattttagatttagagattccaatacttggtatttgttttggacatcaaatattatctaaaaatctaggtggaaaagttaaaaaatctaaatttagagagtttggtttggccaatcttaaaaagaaaaataaaagtttactaactagagatttttttaataataataaatgcaatgtttggatgagtcattctgatgaagtttctaagcttccaaagggtttttcagttataggttcaacaaaaaattcaaaatttgcaatgattgaaaactttaagaaaaaattatttgggattcaatttcatccagaagttacacatactaaaaatggaaaaaaaatattaaaaaattttgttttttccatttgtaaattaaaaagaaattggtcatctaagtttcaaaaatcaaaattaattgaccaggttaaaaaacaagtaaaaaattctaaagttatttgtgctttatcaggtggagttgacagtagcgtggttgcaaaattattaaaagaagcaataggaaaaaatttagtatgtatatttgttaatacaggtttactgagaaaaaatgaagaaaaacaggtaattaatacttttaagaagaaatttaaaattaatcttatttatgtaaatgcacaaaaattattcttgtccaaacttaaaaatgtctcagatcctgaaaaaaagagaaaaataattggaaatttatttattaaaatttttgaaaagaaagccaaaaaaataaaaaaaataaaatttttggcacaaggaactctttacccagacttgattgagagtaaatcagttactggtagccaaacatcaaaaataaagtctcaccataatgttggaggtttacccaaaaaaatgaaattacaattggtagaaccattaaaacatttatttaaagatgaagtcagaaaattaggtatagaattaaaactgggaaaagaaattgttttaagacatccatttcctgggccaggacttgctataaggatgcctggatttattacagaaaaaaaaatcaaaattcttcaagaggcagattatatttatgtagaagaactaaaaaaacataatttatataataaaatctggcaggcttatgcagctttactaccagtgaaaaccgttggtgtaatgggagataatagaacttatgaatatatatgtttgttaagagcaattacatcagaagatggcatgaccgctgacttttataattttaataaagaatttatgcaacgtgtatcaaataaaataattaacaatataagaggcataaatagagtggtctatgatgtaacatcaaagccaccaagcactatagaacttgaatgat

SEQ ID NO: 317646 - DNA, 1390 bp, Unknown
  Bacterial polypeptide expressing nucleotide sequence isolated from the Sargasso Sea
tatggtaagcgatcaacacaacgattcaatcttaattttagattttggtagccaagttacacagcttattgcaagaagggtaagagagagtggaatttattctgagatttttcctttttcaaaagcagatgaggctattaaaaaattaaaaccaaaaggcattatattatcaggtggtcctgcatcagttaacaaccaagatgcgccaacaattgatgataaaatatttgatttaaaaattcctatcttaggaatttgttatggacaacaaatcatgtgttcattgcttggaggcgaagtagaaaaatcaaatgaaagagagtttggtagagcaaatattaaattcctgaagtcttcacctttatttgaggggttcgatattaaaggaaatactgaacctgtttggatgagccacggtgataaagttacgagccttcctaagggatttgaagttattgcagaaagtaaaaacgctccatttgctgcggtttctgacgaagtcagatcattttatggtgtacagtttcatccagaagttgttcatactccaaatggtgcaaaattactaaaaaatttcactaataaaatttctgaatgcaggagcaattggacaatggattcatttaaaaaggttgctattgagaatatacgaactcaagtcggaaaaggaaaagtaatttgtggtctttcaggaggggtagattcatctgttgcagctgttcttattcatgaagcaatcggagaccaattgacatgcatttatgtggataccggtttaatgcgagagaatgaaacggatgaagtggtaaatttatttagagaaaattttaatattcctcttatagatgttgatgcaggcgatacttttttaactagattgactggagtaagtgatcctgaagaaaaaagaaaaattattggctcttcttttatcgatatttttgaagaagaggcaaaaaaaattggcggagctgattttttagctcaaggaactctttatcctgatgttattgagagcgtttcttttacgggcggaccatctgtgacaattaaaagccatcacaatgtaggagggcttccagaacgaatgaatatggagctagttgagcctttgcgagaactttttaaagatgaagtcagagaactcggaaaagaactaggaattcccagtcactttattgagagacacccattcccaggtcctggacttgcaattcgtttacctggtgaaatttcttctgaaaaagccgatattttaaggaaagctgacactatttatattgaagagataagaaaagccggactttataatgagatttggcaagcttttgctgtacttttacctgttcagactgttggtgtgatgggagacgagagaacatatgatttt

SEQ ID NO: 317647 - DNA, 502 bp, Unknown
  Bacterial polypeptide expressing nucleotide sequence isolated from the Sargasso Sea
atgagtcttgataaaaaccttgaaaggattcagattattgattttggctcacagtttacccaattaattgcaagaagaattagagagctaggggcatattcagaaattgtaagtcataaaaaatcaaaatcaattaaaaacattagtaaaatcaagggcattatactttcgggtggtccaatgagtgtctatggaattaaacaaccgtcatataataaaaaaatactaaacatgaatatacctgttcttggaatttgttttgggcaccaaataatttcaaagcaattaggaggtagtgttaaaaaatctaaatccagggaatacggtttagcaaaagttaaaaaattaaataaaagtttattgaccgaaggtttttttaataaaaataaaacttctgatgtttggatgagccattctgacgaagttactaaaattccaaaaaattttaaagtaattggttcaagcaacagctctaaaaattgtttaattgagaaccagtgat

SEQ ID NO: 317648 - DNA, 1085 bp, Unknown
  Bacterial polypeptide expressing nucleotide sequence isolated from the Sargasso Sea
aatgaaaaaaccaattcttgccatatgttatggaatgcaattagtaactaaaaacctaaaaggaaaagtaaagcgttcaactcatagagaatatggtcatacaattattaatattaaaaaaaaatctttaatattcaaaggtattaataaaagtaaatttaaagtatggatgtctcatggagacaatattaataaaactcccaaatcattttcagttacgtcattatctgataatctaattacatcctctattgaaaatattaaaaataaaatttattgccttcaatttcacccagaggtttatcatactgattttggtttaaaaattattaataattttgtttttaaaattgttaaaattaaaattaaatttaaaattaaaaaatttattgaaaataaaattttagaattaaaaaatgaaattaaaaataaaaaaataatatgtggtctatctggtggtgttgactctacagtgactgcatatttattaaataaatcagtaaataaaaatctattttgtatatttgttgatcatgggcttttaagaaaaaatgaagctaaagaagtttcaataatatttaaaaaaaaatttggaaataattttattaaaattgatgcttccaaaatttttattaaaaatttaaaaaatgtatctgatccggaggaaaaaagaaaaattatcggcaaaacttttatagaaatttttgaaaaaactgcaaaaaaaatatctaatgttcattatttagctcaaggaactctttatcctgatataatagaaagcatccctttttttggaggccctactgcaaaaattaaaagtcatcataatgttggaggtttaccaaaaaaaatgaaacttaagattatagagccattaagagaattatttaaagatgaggtaagaaatgttggtaaaaatttaaaaattaataaaaatctattattaagacatcctttccccggaccaggtttagcaataagaataccaggcgagattgatagaaaaaaaataaaaattttacaggaagctgatcatatatttattaaatacttgaaagaaaaaaaaatctataatcaaattggca

SEQ ID NO: 317649 - DNA, 1542 bp, Unknown
  Bacterial polypeptide expressing nucleotide sequence isolated from the Sargasso Sea
aatgagtcttgatcaaaatttgaataagattttaattgttgattttggttcgcaatttacacagttaatagcaagacgagttagagaattaggaattttttctgagatagtaagtcacaaaaaaattaaaagtaaaaatatcaatcacacgatcaaaggtattattctatctggtggtcctttaaatgtttatcaaattaataaatactccttcgataaaaagataattcaaaaaggcgttccagttttaggtatttgttttgggcatcaaataatatctaaattaaatggtggaaaagtgaaacaatctaaacatagagagtttggtttagctaatattacgaaaaaaaataatagtcttttaattaaaaatttatttaagaaaaaaaagtcaattaaagtttggatgagtcacgctgatcaagtttcaaaattacccaaaaattttaaggtaattgcctcaagccagaattccaaatttgcagtagttgaaaataaatttaaaaattattatggagtccaatttcatccagaggtgacccacacagaaaatggaaaaaaactaataagtaattttatattcttaatatgtaaaatgagaaaaaattggtcttctaaagatcaaaaaataaaattgataaaagatgcaagacaaatggtaggaaataataaagtcatttgtgctttatccggtggagtagatagtagtgtagttgctcaattattaaataaagccattggtaaaaatttacactgtatttttgttaacacagggctcttaagaaagaatgaggaaaaacaagttgttgcaacgtttaaaaaaaaattaaagatcaatcttacatacgtgaatgctgagaaagagtttttaagaaaattatcaaatatttcagatcctgaaaagaaaagaaagataataggaaacttatttataaaaatatttgagcgttatgccaaaaaaattaaaaatgtaaaatttttggctcaaggaactctttaccctgacttaatagaaagtaaatcagttactggtagtcaaacatcgaaaattaaatctcaccataatgttggaggtctacccaaaaaaatgaaacttaaactagtagagccattaaaatttttattcaaggacgaggttaggaaacttggattagaactcaatttaagcagagaaattatttctcgtcatccttttccagggcctggactagcaatacgaatgccaggaataataactaaagaaaaaattaatattttaaaagaagctgatcattattttattcaagctttgagagatcacaatctatatcataaaatttggcaagcttatgcagctttactcccagttaaaacagttggcgtaatgggtgataatagaacttatgaatatttgtgtttgcttagagccataacatctgaagatggtatgacagcagatttttatgaatttaaaaaatcatttatacaagaaatttcaaataaaatagtgaatagtattagagggattaatagagtagtttacgatatacttcaaaaccaccg

SEQ ID NO: 317650 - DNA, 924 bp, Unknown
  Bacterial polypeptide expressing nucleotide sequence isolated from the Sargasso Sea
aatgaataaggaaaaatttttagaaaaaattattataattgattatggatctcaatttacccaacttattgcaagaaaagttagagaatgtggggtttattcagaaattattaattttaataaaattaaaaatttaataaatgaaaaaaaaataaaaggtataattttatctggaggaccattaactataacaaaaagaaaatcggaaaatcttaataatgatattttaaatttaaatttacctattcttggtatctgttatggacaccaaattttagcaaaaaaatttaatgggaaaataaaaaagtcaaaaacaagagaatttggccatgcgattgttaaaagttattcaaaaagttcaattacaaaaaatttttttaataaaaataaatcattagtttggatgagtcaccaagatattgtttacaaattaccacatgggtttaaaaaggtagcatttaccaataattcaaaatatgcgattatcacaaatgaaaagaaaaaatattatggagttcaatttcatccagaagtcagccatactcaaaatggaaaaattataattaaaaattttttatttaatatttgtaaaattaaaaaaacttggaatttaaaaaaacaaaaagaaattttaatttcggatatcagagaaaaagttaaaaataataaggtgatttgcgctttatcgggtggggtagatagtagtgtggtagctttattattaaaaaaagcaattggaaagaaattaacttgcatttttattaatacaggattgctgagaaaaaatgaagagtatgaagttttaaataattttaaaaaaaaattaaaactaaaattaatatatattgatgcatctaaaacttttttaagcagtctaaaaaatgttgataatccagagaccaaaagaaaaattattggaaaact

SEQ ID NO: 317651 - DNA, 643 bp, Unknown
  Bacterial polypeptide expressing nucleotide sequence isolated from the Sargasso Sea
atgcaaaagatccttgtagttgattttggttcacaatacacacagcttattgctcgaaggcttcgagagcttaatgtttattctgaagtctacccatgggatgaaatacctaacttagaatctgttgatggttttgttttatcaggtggccctgaatcatcaaacatagaaggtaatccaaatatttccaatgaaatacttgaatccaataaacctattcttggtatttgttatggaatgcaagttttagcttttcaagagggtggagaaatacagaatgaaggaaaaaaagaatttggttacgcaaagatagacttaaataatcaaacttctttatttgctgatacctcagactcaattgatgtgtggatgtcgcatggagataaagtaatttcacttccagaaggttatgaaactttagctagttctgataattcaccaattgctgcttaccagaatttagaaaagaactattttggattgcaatttcatcctgaggtgactcatacagattttggtctaaaaattattgaaaattttattaatgtatgtggagttgaaaggaattggaatgctgatgacattctaaaaaacattcataatcaagctaaaacagaggttggtgaaggtaaagtgctttagc

SEQ ID NO: 317652 - DNA, 355 bp, Unknown
  Bacterial polypeptide expressing nucleotide sequence isolated from the Sargasso Sea
atgagtcttaaaaaaataataataatagactttggctcacagtttacacaattgattgcaagaagagttcgtgaacttggagtttattctgaaattataagtcacaaaaaaaaaattaattttagtaacaaagatgtaatagggataattttgtcgggtggtcccttaaacgtataccaaacaaaaaaagtaagttttgacaaaaagatattaaatcaagatataccagttttaggaatttgctttggtcaccaaataatatcaaaagaattaggtggtaaagtaaagcagtctaaatttagagaatttggtttagtaaatataaaaaaaaataaagaaagtgttcttactagaa

SEQ ID NO: 317653 - DNA, 583 bp, Unknown
  Bacterial polypeptide expressing nucleotide sequence isolated from the Sargasso Sea
agctcaaggaactctttatcctgacttaattgaaagtaaatctgtaactggaagccaaacatcaaaaataaaatctcatcataatgttggtggattgccaaaaaaaatgaaacttaaattaatagagcctttaagacttctttttaaagatgaggtaagaaaactgggtttagaacttaaattatcagaagaaattgttctaagacacccatttccaggcccaggtctagcaattagaatgcctggaaaaataacagaaaataaaatcaaaattttaaaacatgcagatgatatttttataaaatctttagtagagcataatttgtataataaaatctggcaagcctatgcagcgttacttccagtaaaaactgtcggtgttatgggcgataatagaacttatgaatatatatgtttacttagggcaattacatctgaagacggtatgacagcagatttctttagtttttcaaaagagtttatgcagcttgtttcaaataaaataataaataatattaaaggtattaatagagtagtttacgatataacatctaaaccaccaagtaccattgagcttgaatga

SEQ ID NO: 317654 - DNA, 1159 bp, Unknown
  Bacterial polypeptide expressing nucleotide sequence isolated from the Sargasso Sea
gatgagccacggcgataaagtaatggaagtaccagcaagctttagcactacagctaaaacaccaacgtgtccgcatgctgctatgtctaacgaagaaaaacgtttttacggcgtacagtttcacccagaagtaacgcacactcaccaaggtcagcgtttattagagcgctttgctattgatatttgtggttgtgaaaaactgtggactccagcaaaaattattgatgatgccattgagcgcattaaagaaaccgttggcgacgacgaagttattttaggcctatcaggcggtgttgattcatcggttgtagctatgcttattcatcgtgccattggtgatagattaacatgtgtatttgttgataacggtttacttcgtttaaacgaaggtcagcaagtaatggacatgtttggcaacaagtttggtttaaacattgttaaggttgatgctgaagatcaatttttagctgaccttgccggtaagtcagatccagaagataagcgtaaagctattggccacactttcattaatgtatttgacgagcaagctaaaaaacttaagaatgctaaatggttaggccaaggtactatttacccagacgttattgagtcagcagcatctgctacaggtaaagcacacgttatcaaatctcaccacaatgtgggcggattaccagatgacatgaaaatgggtctagttgagccacttcgtgagttatttaaagatgaagtacgtaaaattggtttagagctaggtttaccgtacgacatgctttaccgccacccattccctggtcctggtttaggtgtacgtgtacttggtgaaattaaaaaagagtactgtgatttacttcgccgtgcagatgctattttcattgaagagctacacaaagccgagctttatcataaagtaagccaagcgtttactgtgttcttaccggttaaatcggtaggagttatgggtgatgcacgtaaatacgattgggttgtgtcactgcgctgtgttgaaactatcgactttatgactgcgcgttggtcacatttaccgtatgagtttttgggtgtggtttctaaccgtatcattaacgaaattgatggtatttcacgcgttgtttacgatatttctggtaagccaccggcaactattgagtgggaataa

SEQ ID NO: 317655 - DNA, 1012 bp, Unknown
  Bacterial polypeptide expressing nucleotide sequence isolated from the Sargasso Sea
tttggatcacagtttacacaattaattgcaagaagaataagagaacttggagtatattcagaaatattaaatcataagaaaatcaaatacttcaaacaatttgatagtaacgttaaagggataattttgtccggaggtccattaaatgtatatgaaacatcaaaaataaaatttaattctaaaattttaaaactaaaaattccagtacttggagtatgttttggacatcagattataagcaaaacatttggaggggtagttaaaaaatcaaaaaaaagagaatttggactaaccttaataaaaaagataaaaaagagcaagctcaccaataatttttttaataatagaggaacaagtaaagtttggatgagccattcagatcaggtttttaaattaccaaaaaaatttaaagcaattgcttatagtgagaactcaaaattttgcataatagagaataaagttgataatttttttggtatccaatttcatccagaagttactcacacgacaagaggtaatataatttttaaaaactttgtttattcaatatgtaaaataaaaaaaaattggtcatcaaaaaagcaaaaagaaagattaataaaagaaataagacaaaaaataggaagatcaaaagtactttgcgctttatcaggaggagtagatagtagcgttgtatctaagcttttatataatgcagtaggaaaaaatttagtatgcatatttgtaaatacaggtttacttagaaagaatgaagaaactgaagttataaatacatttaagaaaaaacataatatgaatcttatttatgttaatgcaaaaaacctatttataaataagttaaaaaatgtctcagaccctgaaacaaaaagaaaaataattggaaatttatttgttaaagtttttgaaaagtacgcaaaaaaaataaaaaaagtagaattcttagcacagggaactttatatccagatttaattgagagcaagtcagttactggtagccaaacatctaaaatta

SEQ ID NO: 317656 - DNA, 394 bp, Unknown
  Bacterial polypeptide expressing nucleotide sequence isolated from the Sargasso Sea
atggcaaagaatatccttgccgataaaattttaattattgatttcggttctcaatacactcagcttatcgctagaagggttagagagttaggagtttattgcgaaatctataatcaccgcgcttctcttaaatcaattaaagactttaatgctaaaggaatcattctttccggaggtccagaaacagttaaacaaaagggctctcctaaaatccctgagaaggtgtttgatttaggcaccccacttcttggcatttgctatggcatgcaatccatagccaagcaactgaaaggaaaagttgaattagcagaaaagcgagaatttggacatgcagatttattattgaaaaataaagcgtcagggctttttaaagggataaatgcaaacaaaataa

SEQ ID NO: 317657 - DNA, 1531 bp, Unknown
  Bacterial polypeptide expressing nucleotide sequence isolated from the Sargasso Sea
catggaaaataaagtgctaattgttgattttggatcacaatatactcagcttatagccagaagaattagagagctatttattttctgtgagatatatccatataataatttaccaaaaaaccttttagactataaagcagtagttttctcaggttctccatattcagtttatcaagaagactctccaaatattgatctagaaaagtttatagggaaaataccagttctggcaatttgttatggagcacaatttattgcaaataacaaaaaaggaaaagttgagaattctaattcaagagaatatggtagagctagattaacttatatagataatgaatcaattctttttaatgggatttctaaagataatcaagtttggatgagtcatggagatacgatagtcgaattgcccgaagatgctaaattaattgcaagtaccgaatcagttgaaaatgcagcatattcattaaatgaagaaaaagtatttggtcttcaatttcatccagaagtttttcatactgataatggtttgaaaatttttgaaaatttctttttacatattttaaaatttaatcaaaattggactccaaaattatttgtccaagattctgtaaaagagataaagactatagttggtaatgctaaagtaatacttggaatttcaggtggagttgattctacagttgcagcagtattgcttaataaggcaattggggataatcttaactgtgtatttgttaacaatggcttgctaagaaaagatgagtttgcagaagtacttacccaatacgaaaatatgggtcttaatgtagttggggttgatgcatcgaatgaatttataactgggcttagaggtataacagatcctgaacaaaaaagaaaagttattggctcaacttttatagatgtctttgaaaggcaatcgaaaaaaattcaagatgcaaaatggttagctcagggtacaatttatccagatgtaatagagtcaatatctgtaaaaggtccatcttcaacaattaaatcacatcataacgttggtggtattcctgataaaatgaatttgaaaataattgagccactaaaaatgctatttaaagacgaggttagaagaattggcgagtctttagaaatagattcaaatatattaaatagacatccatttcctggcccaggtcttggaataaggatactaggagaagttgacgaggaaagtataagattagttcaagaagcagataaaatatatattgattcattaaaaaaatgggatttgtatgataaaatatggcaagcaggttcaattctccttccagttagaagtgtaggtgtaatgggagatgagagaacttatgaaagatgtgtctcacttagggctgtggtttcaactgatggaatgactgcagattggtatgaatttccaaacgactttcttaaagaagtatcaaacaaaataattaataaagtatctggaattaatagggttgtttatgatataagttcaaaaccaccagctacaattgagtgggaataa

SEQ ID NO: 317658 - DNA, 546 bp, Unknown
  Bacterial polypeptide expressing nucleotide sequence isolated from the Sargasso Sea
gggcacaaaaaatggcacagcccatgttattaaatctcatcataacgttttgtggtttaccgagttatcttaatttgccagttattgagccccttaaagatctttttaaagacgaagtaagaaagataggtttagagctaggattacctaaagaaattctctttaggcatccattccctggccctggcttgggggtaaggattctaggtgagataaaaagaccttacataaagacccttcaattagcagatgacatatttatcagtgaattaattaaagaaggttattacgacaaagtcagtcaggcctttgctgtcttccttcctgttaagtcagttggtgtagtaggggactctagaagatatgagtacgtaatttcattaagagcagtagagacgattgatttcatgactgctaaatcagcgaaacttcctcattctttcttagaaaaagtttctaatagaatcattaacgaaattcctgaagtatctagggtgacttatgatatttccagcaaaccacctgctactattgagtgggaataaa

SEQ ID NO: 317659 - DNA, 513 bp, Unknown
  Bacterial polypeptide expressing nucleotide sequence isolated from the Sargasso Sea
gatgcagacacagatgctggtcgatgaggccatcggggagctgaaatcccgtatagacgacactgccatcattgcctgctcaggtggtatagacagcacagtggcagccgtgctcgcccacaaggcggtaggcagcctcctccactgcgtctacgtcgataccggcctgatgaggaagggcgaaacgtcggaggtgtccgagatgttctccgaaatgggcataaaactccaggtcgtagacgcgtcagccagattcttcgagagcctctccggagtaacagatcctgaggagaagcgcaagataatcggagagcagttcatcagggtgttcgaggaggagaagggaacctgcgctgccaagtacctagttcagggaaccatcgcccccgactggattgagtcaggcggaggagatagggacgtaatcaagtcgcaccacaacgtcggggggctccccgaggacgtcgacatgacaatcgtagagccactaagggagttctacaaagacgaggt

SEQ ID NO: 317660 - DNA, 1552 bp, Unknown
  Bacterial polypeptide expressing nucleotide sequence isolated from the Sargasso Sea
gttgattagagaatgtgacacaatactcataattgattttggatcacagtatacacagctaattgcgagaagaataagagaaaacaatatctttagcttagtaaaacctcacactcttacattaaaagagtttaatgaaataaaacccaaaggagttattctctcggggggacctgattcggttactaacttaaaaaagattaaaatgttaatagatattagaaaattatcaataccaattcttgggatttgttacgggatgcaatatattgcagatatctatggtggtaaagtctcaaaatcaaagaaaagagaatttggtcattcaatttttatggctaaaaaaatatcaaaaatatttccaaaaaaaatcattaataaaaacataaacgtctggatgagtcactcagataaagtaactaaaatccctaagggttttgtaattacaggtaaatcaactaatagctctatttcctctttttctctagaagagaagaatatttatgcattacaatttcatccggaggttacaaatacccagtttggtattaatattatcaagacatttattataaatgtttgtaaatgcaggaagagctggacaacaaagaatataattcaagaaaaagtatcggaaattaaaaaaattgttaaaaatgaaaaggttttattagcactttcaggcggcgttgattcaactgtagtggctgctttattgaagaaatcaataaaaagtaatttaatttgtatgtttattgatactggccttttgagaaaaaatgagagggaggaagtaaaagaaaacattcaaaagaaattaaaacttaatcttaaagttataaatgccaaatcaatttttatgaaaaaactacaaggcgtaactaaccccgagtctaagagaaagataattggcgaaacctttataaggatattcgaaaaagaatcaaaaaaatttaaaaatgtgaaatatctagcacagggaacaatatatccggatgttattgagtcatcttctgctagtaaaaattcagatgttattaaatcacatcataatgtaggagggctccctaaaaaatttaattttttattggttgagccaataagaaacctctttaaggatgaagtaaggagtattggaaaagaactctctataccaggcaaattattgaatagacacccatttccaggacctggattggctgtaagaataattggagatatttccaaagacaagatatctattcttcaagatgttgataacatattcattgaagaattaatatcctctggtttttatgacaaaattagccaagctcttgcagtttttttgccaatcaaatctgtgggagtcatgggtgatcagagacaatataattatgtagttgctctaaggtcagtgaagacatcagattttatgactgcctcagtttcaacattaccatttgaacttttaaataaaatatctaccagaattattaatgaagtacctaaagtttcaagagtagtttatgacataactagtaagcccccaggaacaatcgagtgggaataa

SEQ ID NO: 317661 - DNA, 1312 bp, Unknown
  Bacterial polypeptide expressing nucleotide sequence isolated from the Sargasso Sea
tttgggttctcaatttactcaattaattgcaagaagagtaagagaattaggtgtgttttctgaaatagttagtcacaaaaaaataaaactaaaagacataaataacaatattaaaggaatagtattatctggcggtccattaaacgtttatcaaataaataagtattcatttgataaaaaaattctacaacttgatgtgccagttcttggaatatgttttgggcatcaaattttatcaaaacttaatggtggaaaggtaaaacaatcaaaacatagagaatttggtctagctaatgtttataaaaaaaataacagtcttttaacaactaatttttttggaaataaaaaatccaaacaagtttggatgagccatgctgatcaagtttcaaaactgcctaaaaattttaaaattgttgcatcgagtactaattcaaaatttgcaattgttgaaaataaaattaaaaaatattatggggtacaatttcatccagaggtgactcacacagagaatggaaaaaaattaataagtaattttatttttttaatttgtaaaataaaaagaaattggtcctctaaggatcaaaaaaatcaacttattaaagatgtaagaaaacaacttggaaataacaaagttatttgtgcattatcaggaggtgtagacagtagtgtggtcgctcaattactgaataaagctattggtaaaaaactttattgtatttttgtaaacactggccttttaagaaaaaatgaggaagtacaagtagttcaaacttttaagaagcgtttaaaaatgaatttaatttatgtaaatgctgaaaaggaattcttaaaaaaattaaaaaatgtttctgatccagaaaaaaaaagaaaaataattggtaatttatttattaaaatatttgagcggtatgctaagaaaattaaaaatgttaaatttttagctcagggcactctttatccagatttaattgagagcaaatctgttactggaagccaaacttctaaaattaaatcacaccataatgtcggtggcttacccaaaaaaatgaatttaaaattagtagaaccactaaaattcttatttaaggacgaggtaagaaaattaggattagagttaaatttaagtaaagaaattatttcaaggcatccttttcctggaccaggtttagctattcgaatgccaggcataataactaatgaaaaaattaaaattttaaaagaggctgattattactttattcaagctttaaaagatcacggtctttatcataagatttggcaagcttatgcagcattacttccagtaaaaaca

SEQ ID NO: 317662 - DNA, 1079 bp, Unknown
  Bacterial polypeptide expressing nucleotide sequence isolated from the Sargasso Sea
tatgagcaaaaacattcacttccatcgaattctgatcctcgacttcggttcgcaatacactcagctgatcgcccgtcgtgtgcgtgaaattggcgtttattgtgagctgtgggcatgggacgttactgctgaacaaatcgctgaatttgctccaaccggtattattttatctggtggtccggaaagtgtgactgaagctggttcacctcgtgcccctgcttatgtgtttgaagctggcgtgcctgtactgggtgtgtgctacggcatgcagaccatggctgaacaactgggcggtaaagtgtccagttctgagcaccgtgaatttggttatgctcaggttgaactgattgcagagaatgccatgttcaccggtattgaagatcatctgaacgaacaaggccgtggcttattggatgtctggatgagtcatggcgataaagtagtgcaaatccctgaaggttttgtgacgactgcgcaaacgccaacttgccctcatgcggctatggctgatgaagcccgtcagttctacggcgtacaattccaccctgaagtgactcacacccgtcagggcctgcgcatgttagagcagtttgtggtcgatatctgtggttgtgaaaaactctggactccggccaccattattgatgacgctattgccaacattaaaaagcaggttggtgatgatcaggtcattttaggtttatcaggtggtgtcgactcctccgtagtggcgatgttattacaccgcgctatcggtaaaaacctgacgtgcgtattcgtcgataacggcttattgcgtttaaacgaaggcgctcaggtgatggacatgtttggtgaccattttggtctgaacattatccatgttaaagctgaaaaccgtttcctcgacgccttaaaaggtgaagctgaacctgaagccaaacgtaaaattatcggtcgtgtatttgttgaagtatttgacgaagaagcgaaaaaactaagcaatgccaaatggttagctcagggcactatttaccctgacgtgattgaatgtgcggcttctaaaaccggtaaagctcatgtaattaagtcgcatcaca

SEQ ID NO: 317663 - DNA, 1564 bp, Unknown
  Bacterial polypeptide expressing nucleotide sequence isolated from the Sargasso Sea
atgcgtcttgaggacactctcaataagatactcattgtagactttggttctcaatttacacaattaatcgcaagaaaaataagggaactgggagtttattgtgaaattataagtcacaaaaaaatagaaaagttccaaaattttgaaaaaaatatcaaaggtattgttttatctggcggcccattgaatgtttatgaaagcaaaaaagtaaagtttaatagtaaacttcttaaattagggactcctgtactaggtatttgttttggacatcaaataatttcaaaaacaatgggtggaagtgtaagaaactctaaacatagagaatttgggctagcagaggtaaaagaaattaaaaaaagcaagttaacaaaaaattttttttctaaaggaaaaaataatgtttggatgagtcatgctgatcaagtaacaaaattaccaaaaaatttcaaaataattgcacaaagtaacaattctaagatgtgcataattgaaaatatagaaaaaaaaatgtttggcattcaatttcacccagaggtaagtcatacaattaaaggaaaattaatactaaaaaattttttattttctatttgtaaattaaataaaaattggtcagcaaaagatcagaaaacaaagttaataaatgaagtaagaaatagtgtaggaaattctaaggttatttgtgcattatctggtggtgtagatagtagtgtagtcgctaaattattatcaaatgcaataggaaaaaaattaacatgcatctttgttaatactggtctacttagaaaaaatgaagaaaagcaagttgtaaatacattcaaaaagaaatttaaaattaatctaatttatgtgaatgctgaaaatttatttttatcaaaattaaaaaatatatctgatccagaaaaaaaaagaaaaataataggaaatctttttattaaaatatttgaaaaatatgcaaataaaattaaaaatgtaaaatttttagctcaaggaactttgtatcccgatttaattgaaagtaaatctgtgactggaagtcaaacttcaaaaattaaatcacatcataatgtaggcggtttgccaaaaaaaatgaaacttcaattagtagaaccactaaaatacctttttaaagatgaggttagaaagttaggatcagaactaggattgagtaatgaaataatttctagacatccatttccaggaccaggccttgcaataagaatgcctggcataataactaaagaaaaaataaacattttaaaagaggctgataattattttatcaattctttaaaagaaaataacctatataacaagatttggcaggcttatgctgcattacttcctgtaaaaacagtcggtgtaatgggagataatagaacttatgagtttctttgtcttttaagggcaattacatcagaagatggaatgacagctgatttctttcaatttaataaatcttttatgcaaacagtatctaatcaaattgtaaataatataagaggtattaatagagtagtttatgatattacttctaagccaccgagtactattgaattggaataat

SEQ ID NO: 317664 - DNA, 1579 bp, Unknown
  Bacterial polypeptide expressing nucleotide sequence isolated from the Sargasso Sea
catgagcgatattcatgagcataagatactgatcctcgactttggatctcagtacacccagctgattgcccgtcgtatccgtgaaattggtgtttactgtgagttatgggcgtgggatgtgaccgaagcccaaatccgcgagtttgcccctaacgggattatcctcgctggcggccctgaaagtgtgaccgccgacaattctccccgcgcacctgaatatgtgtttaatgctggtgtgcctgttctagggatctgctacggcatgcaaaccatgtctgagcagctcggcggtaaagtaattcaaggcgtaggcgaaggcgagttcggctacgctcaaatcgaaatgctagcgcaatcggccctgtttaaagatatcgaagatgcagtgagtagcgatggcaaatctctgctcgatgtgtggatgagccatggcgataaagtttcggctatcccagaaggtttcgtggccgttgctaaaactgacacttgcccatttgcggccatgtctaacgaatccaaacgtttctacggcgtgcagttccaccctgaagtcactcatacccgccaaggcatgcgtatgctgtcgcactttgccttagatatctgcggctgtgcggccaactggaaaccttcttcaatcatcgaagacgctatcgaacgcttgaaaaagcaagtgggcgacgatgaagtgattttaggtctgtctggtggtgtggattcatcggttgtggccatgctgctgcaccgcgccattggcaaaaaactgacctgcgtattcgttgataacggcttactgcgtttaaacgaagcgaagcaagtcatggaaatgtttggtgatcatttcggtctgaacattgttcacgtcgatgcggaaaaccgcttcctcgacgcgctgaaaggcgaagccgatccagaagctaagcgtaaaatcatcggccgtgtattcgttgagatcttcgacgaagaagccaagaaatgcgttaacgctaaatggttagcccaaggcaccatctaccctgacgtgattgaatccgctggcagcgccacaggtaaagcccatgtgattaagtcgcaccataacgttggcggtctgccggacgatatggagttaggtctggttgagccactgcgcgaactctttaaagacgaagtgcgtaagattggccttgagctcggtctgccatacaacatgctttaccgccacccgttcccaggccctggcttaggcgtgcgtgtactgggcgaagtgaagaaagaatactgtgatttgctgcgccgcgccgatgccattttcatcgaagagctgcacaaagctgatctttataacaaagtcagccaagcctttaccgtgttcttacctgttcgctctgtcggtgtgatgggtgatggccgtaaatacgattgggtggtgtcactgcgcgccgttgaaaccatcgactttatgaccgcgcactgggcacatctgccatacgatttcttaggccgtgtgtctaaccgtatcatcaacgaaatcgacggtatctcccgtgtggtttacgatatttcaggtaagccacctgcaaccatcgagtgggaataa

SEQ ID NO: 317665 - DNA, 1090 bp, Unknown
  Bacterial polypeptide expressing nucleotide sequence isolated from the Sargasso Sea
ccaatagctgcaatgcaacatacaacaaagccgatttatgcgcttcaatttcatcctgaagttactcatactgaggatggcaaaactatcttagataattttatattcaaagtgtgtaaagcaaattcagattggaggatggatgatttaattaatcaaagaatccaagaaataaagggtaaagtagaaaataataaagttttgctcggtctttcaggtggagttgattcgtcagtaacggcagctcttcttaacaaagctattggaaagaagctcatttgtgtatttgttgataatggactactaagaaaaggtgagccagacgaggtaatgaatacatttaaagaaaatatgaatttaaatgttattaaatctaatagtgaagagctttttctaagacatttagaaggtatagaagatcctgagcaaaaaagaaaagtaattggaaggactttcatagatgtttttgatgctgaagcaaataaattaaaggaaattaaatttttagctcaaggaacaatctatccagatgtaattgagtcttcagactcagaatctaaggaggcacgagtaattaaatctcatcataatgtaggcggacttccagatgaaatgaatatggaactagttgagccattaagagacttatttaaggatgaagttagaaagttaggtgtcgaactcggcctaccttcagaaatgcttaacaggcatccttttccaggtcctggactaggtgtgagaattttgggagaagtaacaaaagaaaaaaccaccatccttaaagaagccgatcatatttttattgaagaactaattaaagctgatttatataagatggttagtcaagcttttgctgtatttcttccaattaaatcagtcggtgttgttggagatgaaagaagatatgcagaagttattggactaagagcagttgaaactgtagatttcatgacagcgagatgggctcatcttccctatgattttctagaacatgtatctagcagaatagttaatgaaatagaggatgttagtagggtagtgtatgatatttcaagcaaaccacctgcaactattgagtgggagtgaa

SEQ ID NO: 317666 - DNA, 1555 bp, Unknown
  Bacterial polypeptide expressing nucleotide sequence isolated from the Sargasso Sea
tatggataaaaaattagaaaatattttaattatagattatgggtcacagtacacccaacttattgctagaagaattagagaattggaagttttttgttcaatatatccatataataaaattacaaataaattaataagtgaattaaatccctcagctattattttatctggaggaccaaaatctgtacttgataaaaattctccaaaattagcttcaaatattttaaatttacaaaaaccaattcttggtatttgttatggaatgcaattattgactaaaaccttaagtgggaaagttaaacgttcaactaagagagaatatggacatactttaattaatattaaaaaaaaatctttaatttttaaaggaataaaaaaaaataaaattaaggtttggatgtctcacggagataatattcaaaaaatacccaattccttttctatatcatctgtttcagataataatataatttcttcaattgaaaataaaaaaaataaaatttattgcttacaatttcatccagaagtattccatacagataatggattaaaaataatttataattttcttttcaatatatcaaaaataaagaataaatttaaaattaaaaattttattgataataaaattctagaattaaaaaatgaaattaaagataaaaatgttatttgtggtgtatctggaggagttgactctaccgttactgcttatttattaaataaagcagttaaaaagaatttattttgcatatttgtagatcatggtcttttaagaaaaaatgaatcaaatcaagttgaaaaaatttttagagaaaaatttggaagaaaatttattaaaattaatgcatcaaatatttttttaaaaaaattaaagaatatttctgatcctgaacaaaaaagaaaaattattggaaaaacatttattaaagtatttgaaaaagctgcaaaaaagatatctaatgtacattttttgggacaaggaactctttatcccgatatcgttgaaagcgttcctttttttggaggtcccacagctaaaatcaaaagtcaccataatgttggcggtttaccaaagagaatgaaacttaaagttattgagccattaagagaattatttaaagatgaagtaaggactgttggtaaaaaattaaatatagataatcatcttcttcttagacatccatttcctggacctggattagcaattagaataccaggaacaataaacaaaacaaaaattaaaattcttcaagaggctgactttatatttgttaattatttaaaagaaaaaaaaatttataataatatctggcaagcatttgtagttttattacctattaaatcagtaggggttatgggagataaaagaacttataattattgctgttcaattagagcagttacttctgttgatggcatgactgctgatttttatatgtttacaaaagatcaaatacaagagctgacaagtaaaattattaataatgtattaggaattaatagagtattatttgattttacctcaaaacctcctggaacaattgaatgggaataa

SEQ ID NO: 317667 - DNA, 1531 bp, Unknown
  Bacterial polypeptide expressing nucleotide sequence isolated from the Sargasso Sea
atgcaaaataaagtcttaattgttgattttggctctcagtatactcaattaattgcaagaagaattagagagctttttatttactgtgagatttcaccatttaacaacctccctgaagatttaaaccaatataaggctattgtgctttctggttctcctttttcagttaatcaagaaaatgctcctgaaattaatcttaaaagtattttaggtaataaacctgtaatcgcaatttgttacggagcacaactaattgcaaaaacccttaatggaaaagttgagaactcaaactcaagagaatatggaagagctaatctgtcatttattgaaaaagattgtaagcttttcaataatataaaaatcaataatcaagtatggatgagtcatggagatacaattacagctttacccgatggtgcaacagttattgctagtacagactctgtaaaaaatgctgcttactcaatcgactctcttaatttatatgctctacaatttcatcctgaggtttttcatacagataatggtctaaaaatatttgaaaactttttcatagaggaattaaaatttattaaagagtggaatcctgaatcttttattgacaggacagttaaagagttgaaatctgaagtattagatgaaaaagtaattttaggactctcaggtggagtagactctagtgtagctgctgttctacttgatagagcaataggtaagaatttacattgcatttttgtaaataatggtcttttaagaaaaaatgaatatgatgaagtattagatcaatatattggaatgggcctaaatgtcaaaggtgttgacgcatcagatcaatttattaatggtcttaaaggtgtgactgatcctgagaggaaaagaaagataattggtaatacatttattgatgtttttgatgaagaatcaaaaaaaatatccaatgcaaaatggcttgcacaaggaactatctatccagatgtaattgaatcaatatcagtaaaggggccctctgcaactattaaatctcatcataacgttggaggacttcctcaaaaaatgaatcttaaagttattgagcctcttaagatgttatttaaagatgaagtaagaaaaattggcacctctctaaaaatgcctcaagagatactatctagacatccttttccaggtccaggtcttggaataagaattcttggcgaagttgactatgaaagtatagggcttattcaggaagctgataaaatatatattgatgctttaaaaaaatggagtctctacaataaaatttggcaagctggatctatactcttgccagttaaaagtgttggtgtgatgggtgacgaaaggacttatgaaagatgtgtcgcattaagagccgtagtttcaactgatggaatgacagcggattggtatgaatttccaaatgatttcttgaaagaggtttccaataatattattaataaagttaaaggaataaatagagttgtttacgacataagttctaaacctcctgccacaattgagtgggaataaa

SEQ ID NO: 317668 - DNA, 355 bp, Unknown
  Bacterial polypeptide expressing nucleotide sequence isolated from the Sargasso Sea
ggcgtaagaattttaggtgaaataaaaagaccttatataaagacccttcaattagcagacgacatatttatcagtgaattaattaaagaaggttattacgacaaagtaagtcaggcctttgctgtcttccttcctgttaagtcagttggtgtagtaggggattctagaagatatgagtacgtaatttcattaagagcagttgagacgattgatttcatgactgctaagtcagcgaaacttcctcattctttcttagaacaagtttctaatagaatcattaatgaaatccctgaagtatctagggttacttatgatatttctagtaaaccacctgctactattgagtgggagtaaa

SEQ ID NO: 317669 - DNA, 1000 bp, Unknown
  Bacterial polypeptide expressing nucleotide sequence isolated from the Sargasso Sea
gttgtcagtcaataaaaaacatattgatactatattagtattagactttggttctcaatatactcaattaatagcaagaagaatacgagaaagtgatgtatattctgaaatccttccatgggatattgatgaaaaaaaaatactagacttgaatccaaaaggtattgttctatctggtggaccaaactcagtaaccgactcttatacaccaagagttccacaatgtatttttgaattgaatgttccaatattaggtatttgctatggcatgcagaccctagcagaacaaatgggtggccaagtagcatctgttgacaaaaaggaatttggtcatacaaatttagatattgaaagtaattcagttcttttcaagaacataaataaaacaacaagtgtttggatgagtcatggtgatcaagttcaagatttacctgatgaatttgagttaattgcctccactaagactgcaccaattgcagctatgcagcataaaaatttacctatttatgcaatacagtttcatcctgaagtgacacacacacaagatggtcatgttttgctagataactttctttttgagatttgtcatgctcgttcggactggaaaatggatgatttaatttcttcaagaattaaagaaataaaagagcaagttcaagataacaaagtattgcttggtctttctggaggagtcgactcttctgtcactgctacacttttacataaagctattggtaaaaaattagtatgtgtttttgttgataatggacttttaagaaagggagaagcagagcaagtaatgcaaacatttaaaaaaaatatgcaattaaatgtagttaaatctgatagtcaagacactttcctgagacatttaaaagaaattgaagatcctgaacagaaaagaaaaattattggaagaacttttattgatgtttttgatgctgaagcaatgaagctaaaagacataagatttttagcacaaggaacaatttatcctgat

SEQ ID NO: 317670 - DNA, 542 bp, Unknown
  Bacterial polypeptide expressing nucleotide sequence isolated from the Sargasso Sea
gatgagcaatttaaataagggaggagttgcaattatagattttgggtcccaatatacccaattaattgctcgaagagtaagagagcaatttgttttttcagaaatttatttacctgaaacaccgtttgaagaaattataaaatcagaacctaatgcaatcatcttatctggcgggccaagcagtgtctataaagaaaacgctccaaaaattgacaaattattattagaaagcaatctaccaacgttgggaatttgttatggacttcatttactttcccatcattacggaggtagtgtagtttcaaaacgagagggtgaatttggctttgcaaaaatagatatacaaaacagttctgggattttttctgacatttctaatccctctaaagtttggatgagtcatggagaccaagttgtcaaaattcctgatggttggcaagttttagctaattctacaaatggtattgttgctgctattggtaataaaaatcaaaatttggttgcaactcagtttcaccctgaggtttaccatactgtagaag

SEQ ID NO: 317671 - DNA, 175 bp, Unknown
  Bacterial polypeptide expressing nucleotide sequence isolated from the Sargasso Sea
tctggtattggattttggttctcaatacacacaattaattgcaagaagaataagagagagtaatgtctattctgaaattttgccgtgggacatagatgaatcaaagatagctgaactacaccctaaaggaataattctctctggaggacctaattcagtcacagaaacctataca

SEQ ID NO: 317672 - DNA, 1567 bp, Unknown
  Bacterial polypeptide expressing nucleotide sequence isolated from the Sargasso Sea
aatgagtcttgaagataatttaaataaaattttaataatagattttggctcacaattcacacagcttattgcaagacgtattagagagcttggggtttattcacaaataattagtcataaaaaaataaataatcacattctaaaaacaaaaaatataattggtattattttgtcagggggaccactcaatgtttatgaggtaaaaaaagtaaaatttaataaaaaaatacttaattcaaaagttcctatattaggtatatgttttggtcaccaaattatagccaaggagtttggaggaagtgttaataaatctaaagtaagagaatttggtctagctaatataaaaagaattaaaaaaagtatactaacaagaaacttttttaatagaaatggcttgaataatgtttggatgagccattctgatgaggttacaaaaattccaaaaggatttaaggtcattgcatcaagtaaaaactctaaatttgcagctatagagaataaatcaaagaatttttatggtatccaatttcatccagaggtaacccatactcacaatggaaaaaaattgattaaaaacttcattttctcaatttgtaaagcacgaagaaactggtcatctaaaattcaaaaaaaaatactaataaataatgtaaaaaattctgttggtacatcaaaagtaatctgtgctctatcaggaggagtagatagtagtgtagtagctaaattattaaaaaatgctataggaaagaatttaatttgtatttttgtaaatactggattgttgaggaaaaatgaggagaaagaaattgtaaatacatttaaaaaacgttttaaatttaatcttatttatgtagatgcaaagaatttattcctcaataaattaaaaaatgtttctgatcctgaaagaaagagaaaaataataggaaaacaatttataaaggtttttgaaaaatattctaaaaaagtcaaaaatgcaaaattcttagcacaaggtactctctatccagatttaattgaaagtaaatctgcgacaggtagccaatcctctaaaatcaaatcacatcacaatgttggtggtttgccaaaaaaaatgaaacttaaattggttgagcctttaaaatatttatttaaagatgaagtaagaaaactaggattagaattaaatttgccaaaaaaagtaatttttagacatccatttccagggcctggcttagctataagaatgcctggtataataactaaagataaaataaagattcttaaggatgctgatgaaatatttatcaaaagtttaattacaaatgatttatatgataaaatctggcaagcttatgctgcattacttcctgttaaaacagttggtgtgatgggtgacaaccgtacttacgaatatatatgcttgttaagagcaataacttctgaggatggtatgactgctgatttttttacatttaaaaaagattttattcagtctgtttcaaataagataataaatagtatcaagggtattaatcgagttgtatatgatgttacatcgaaaccaccaagtactattgagttagaataa

SEQ ID NO: 317673 - DNA, 1282 bp, Unknown
  Bacterial polypeptide expressing nucleotide sequence isolated from the Sargasso Sea
tttcataggtaaaattccacttttaggtatctgttatgctgcccaatatttggcacataaaaatggtggagaggtctctccgtcaagcaaaagagaatacggcagggcaaggttaatatcaataaataaaaactccaaattattaaagggtattgataatggttctcaagtttggatgagccatgcagatacaataactaaattaccagcaaaatcaaaaaaaattgggagtactgaggatgttgaaaatgcttgttttgagtttgatgatcaactcacttatggaattcaatttcaccctgaagtctaccattcgagcgatggtaaaactttattaaagaattttataatcgatatttctaaagtaaatccaaattggacaccattatcttttgtagaaaaaactgtacttgatatcaaatcaaagatcaaaaatgatagggttattttgggtctttctggaggtgtagattcgtcagttgctgcagttctattgaataaatctattggaaataatttaacctgtttatttattgataatggccttttgagaaaaaatgaatttgatgaagttttggaaaactataagggaatgggattaaatgttgttggtattgatgcaaaagaaaaattttactctgccttaagtggcgttaccgacccagaaaagaagagaaaagttattggaaaagtgtttgttgatgtttttgagtcagaatctaagaaaataaccaatgtcaaatggcttgcccaaggaaccatatatcccgatgtaatagagtctatctctgttaaaggcccttccgccacaataaaatcacatcacaatgttggtggtttgccaaaaaaaatgtctttgtctattatcgagcctttaaaaatgctttttaaggacgaagttagaaaggttggcgttgaactggcgatcaaaaatgaaatcctcagtcgacatccatttccagggccaggtcttggtattagaatacttggtgaaataaatgcagaaaatgtaggaattctacaagaagctgatcatatattaatcgaatcacttaaacaaaaaaacctttacaatcaaatatggcaagccggggttattttattacctgtaaagtcagtaggggttatgggagatgaaagaacttatgaaaattgtgttgcgttgagagctgtaatatcaactgatggaatgacggctgattggttcgattttcctcacagcttccttcaagatgtctcaaataaaatcattaataatgttaaaggaataaacagagttgtt

SEQ ID NO: 317674 - DNA, 1561 bp, Unknown
  Bacterial polypeptide expressing nucleotide sequence isolated from the Sargasso Sea
atggcaaagaatatacttgccgataagattcttataattgatttcggttctcaatacactcaactcattgcaagaagagtaagggaactcggggtgtattgtgagatataccatcaccaaagttccataaaatctataaaagattttgaccctaaaggtgttattctttctggaggacctgagacagtaaaacaaaaaggatcaccaaaagttcctgttcaactatttgatcttggaataccggtgctaggtatttgttatggtatgcaatcaattgctaagcaattaggtggcaaggttgagttggctgataaaagagaatttggtcatgccgatttgaaaataaaaaaccaagcttctggtttatttaagaaaattaaggctaaaaagatcaatgtatggatgagtcacggtgatcatgtctctaagttgcccaaaggctttaaatcttgcgggaccacctcgaacagtcctatagctgctttgtatcatcctactaagaagatatttgggcttcaatttcatcccgaggtaactcacacgccacaaggcaagcaaatactaaagaatttcgtaagagatatatcaaattgtaaaggtctctggaattctaagaatattattacgaaagcagtcgaagagatcaaaagagaggtaggtgaccaggaagtgttactcggtttgtcagggggagtagactctgcagttgttgccgctctattatctgaagcgatagacgatcaactcacttgtatttttgttgataatggccttttacgattgaacgaaggagatcaggtgatgaataccttcaaagatagatttggtattaaagtaaagagagcaaatgctggtaatcaattcttaaaagatcttaaaggaaaaaaagaccctgaacataaacgtaaagccattggtaaaacttttattgatgtttttctcaaagaagccaagaagaacaagagaataaagtggttggctcaaggaactatctatccagacgtcattgaatcagcgggcacaaaaaatggcacagcccatgttattaaatctcatcataacgtaggtggtttaccgagttatcttaatttgccagttattgagccccttaaagatctttttaaagacgaagtaagaaagataggtttagagctaggattacctaaagaaattctctttaggcatccattccctggccctggcttgggggtaaggattctaggtgagataaaaagaccttacataaagacccttcaattagcagatgacatatttatcagtgaattaattaaagaaggttattacgacaaagtcagtcaggcctttgctgtcttccttcctgttaagtcagttggtgttgtaggggactctagaagatatgagtacgtaatttcattaagagcagtagagacgattgatttcatgactgctaaatcagcgaaacttcctcattctttcttagaaaaagtttctaatagaatcattaatgaaattcctgaagtatctagggtgacttatgatatttccagcaaaccacctgctactattgagtgggagtagt

SEQ ID NO: 317675 - DNA, 743 bp, Unknown
  Bacterial polypeptide expressing nucleotide sequence isolated from the Sargasso Sea
tggtttgggtgtaaatatctattcttatgacgaatcaaaagtttttttatcaaagctgaaaggtatttctgatccggaggagaaacgaaaaatcattggaaatcaatttatttattcctttgagcgtattgctagtgaaataggtaagatggattatttagctcaaggaacgttatatccagatgtcattgaaagtggtatcagtaaaggtaaatctgcacacgtgattaaaagtcatcataatgttggcggactgcctgacgatatggcattacaattaatagaacctcttagagatctatttaaagatgaggtaagaaaagtaggtaaagaacttggtttgcctgatctattgattgatcgccacccatttcctgggccaggtttaggtgtcagaattattggtgaagttacgatcgaaaagattaaaattcttcaagaagcagataagatctatattgatatccttcacgaggacggattatacaatgaaatatggcaagctttttctgtgcttattccagtaaaaacagttggtgtaatgggtgaccaaagaacttatgaaaatcttttgggtttaagggcagttactagtacagacggtatgacagcagattggtttcgcatgccaaaagagactttatcaaaaatatcaaatagaattgtaaactccgtacgtggaattaatcgagtggtatatgatattacatctaagcctcctgggaccatagaatgggagtaga

SEQ ID NO: 317676 - DNA, 1522 bp, Unknown
  Bacterial polypeptide expressing nucleotide sequence isolated from the Sargasso Sea
gatgaatgatatttataaaaatggtgttgtgattcttgactttgggtcccaatacacacagcttattgctcgaagggtaagggaaaataatgtattctcagaaattttatcaccaaatgcaaaattaaaagaaatagaagaacgccaacctgctgcaattattttgtctggcggaccgagcagtgtttacgaagaaaatgctcctgattttgatcatgaaatattaaatagtgacctgcctattttaggtatttgttatggacttcacatacttgctcaacatggtggtgggcacgtagtatctgatgggaagggtgaatatggttttgcagatatagatattcaaattgatactggtatattctctgcggtttcttcttctagtgtatggatgagccatggagaccttgtagaaaaaattccagatggctggcatgtattagcctactcgtcaaatggtgtgatagcggctatggcaaatgaggatcaaacacgagttgcaacacaattccacccagaggtgcatcatacaaaggaaggtcaaaaaatattatccaattttctttttaatattgcaaaatgttcaaaaaattggaccccagggaactttatacaagaacaaatagaagaaattcaaagaattgcaggccaagggaatgtgcttataggtgtaagcggtggggtggattcgacagtagtagccgcattagttcacaaggcaataggtaaccgctgcaatgcagtaataattgaccatggtcttatgagaaaaaatgaggttcgagagtgcttggaagctcttagaaatggtttgggtgtaaatatctattcttatgacgaatcaaaagtttttttatcaaagctgaaaggtatttctgatccggaggagaaacgaaaaatcattggaaatcaatttatttattcctttgagcgtattgctagtgaaataggcaagatggattatttagctcaaggaacgttatatccagatgtcattgaaagtggtatcagtaaaggtaaatctgcacatgtgattaaaagtcatcataatgttggcggactgcctgacgatatggcattacaattaatagagcctcttagagatctatttaaagatgaggtaagaaaagtaggtaaagaacttggtttgcctgatctattaattgatcgccacccatttcctgggccaggtttaggtgtcagaattattggtgaagttacaatcgaaaagatcaaaattcttcaagaagcagataagatctatattgatatccttcacgaggacggattatacaatgaaatatggcaagctttttctgtgcttattccagtaaaaacagttggtgtaatgggtgaccaaagaacttatgaaaatcttttgggtataagggcagttactagtacagacggtatgacagcagattggtttcgtatgccaaaagagactttatcaaaaatatcaaatagaattgtcaactccgtacgtggaattaatcgagtggtatatgatattacatctaag

SEQ ID NO: 317677 - DNA, 1207 bp, Unknown
  Bacterial polypeptide expressing nucleotide sequence isolated from the Sargasso Sea
gtacataaaaaaaagcaaaattttaaaaaatattaaattagattcaactgtatggatgagtcatggggatagtattactaatatttcaagtaatttagaaattatttctagcactaatgatgttaatgttgcagcttatgaagtgaaaaatcataaaatatatggattacaatttcatcctgaagttacacatactactaatggatctaaaatcttaaaaaactttatttctgatatttgtggatgtaaagggtcctggaccccaaagaaatttattgattcctcaataatagaaattaaaaataaacttaaaaatgatagggtattattaggtttgtctggaggtgttgactcatcagtagtagcttttttgataaatagagctgtaggaaataatttagtttgtgtatttgttgataatggtttattgagaaaaaatgaatttgaaaatgttttaaaatcatatcaaaatctaggtttaaatgtaatcggagttaatgcaaaaaaaaagttttatgcctcattaaaaggaaaggttgatcctgaggataaaagaaaagctattggtaaaacctttattgatgtttttgaagaagagtctaaaaaaattaaaaatgtaaaatggttagctcaaggtactatatatccagatataattgaatcagtatctgtcaaaggtccatctgtaactattaaatcacatcataatgttggaggtttaccaaaaaaaatgaatctaaagattattgaacctttaaatacattatttaaagatgaggttaggaaaattggtctttctttaaaaataccaaaaaatatattgtatagacatccttttcctggaccaggtttagctataaggattttgggagaggttattgaaaaaagaattaatatacttcaagaagccgatcatatttttatttcttcattaattaaagaaaatctttatcacaatatttggcaagcaggagcaatatttttaccaataaagtcagttggtgttatgggtgatgaaagaacctatgaaaatgttattgtattaagagcggtaaatagtttagatggtatgacagcagattggtcaaaattatcttcagattttttatcaaaaatatcaaatgaaataattaataaagtaaaaggggtaaatagagttgttttagatatttcctcaaaacctcctgcaacaatagaatgggaataa

SEQ ID NO: 317678 - DNA, 916 bp, Unknown
  Bacterial polypeptide expressing nucleotide sequence isolated from the Sargasso Sea
aagaacaacgttggaaattctaaagtaatttgtgcattatctggtggtgtagatagcagtgtagtagcaaaattaattagtaatgcgattggaaaaaacctaacttgtatattcgtaaatactggcctgctcagaaaaaacgaagaaaaacaagtagtaaatacttttagaaaaaaatttaaatttaatttaatttatataaatgctgaacaattatttataagcaaattaaaaaatgtaacagatccagaaaaaaaaagaaaaattattggaaatttatttatcaaactttttgaaaaatacgcaaaaaaaataaaaaatgtaaaatttttagctcaaggaactctataccctgatttaattgaaagtaaatctgtaacaggaagtcaaacgtcaaaaattaagtctcatcataatgtaggtggtctgccgaaaaggatgaaattaaaattggttgagccattgaagtatttatttaaagatgaagttagaatgttaggtctagaattaaatttaagtaaagaaattatttctagacatccttttcctggtcctggtttagcaattagaatgccaggcataattactaaagaaaaaataaaaattttaaaagaagcagataattattttgtaaatgcattaagagaaaacaatctatatcataagatatggcaggcttatgctgcattactgcctgttaaaactgttggtgtcatgggagacaatagaacctatgaatatttatgcttgcttagagcaataacatctgaagatgggatgacagcggattattttcaatttaataaatcatttatgcaaatggtatcgaataaaatagttaataatattcgaggtataaatagagtagtttatgatgtgacttctaaaccaccaagtactattgaactagaataga

SEQ ID NO: 317679 - DNA, 603 bp, Unknown
  Bacterial polypeptide expressing nucleotide sequence isolated from the Sargasso Sea
gatggataaaactgatagcgctttatccaaaatattaattattgattttggatctcaatttactcaattaatagcaagaaaaatacgagaactaggagtttattcagagattttaagtcacaataactcaaataatataaatcttgaaaatgtaaaaggtataattctttctggaggaccattaaacgtatatcaagataaaaaaataaaatttgataatacaattttgaagaaaaatattccaattcttggaatttgttttgggcatcagataatttcaaaagaatttggtggtaaagttaaacagtcaaaatttagagagtttggtttagctgaagtcacaaaaataaaaaaaagtttattattaaaaaatttttttgataaaaaaaataaaagtaaagtttggatgagccattctgatcaagttactaaactacctaggggatttaagacagtagcatacagtagaaattctaaacttgctattatagagaattcctcaaaaaaaatttatggtgttcaattccatcctgaggttacgcacacaacaaaaggaaaacatattttaaaaaattttttatttgtaatttgcaaaataaataa

SEQ ID NO: 317680 - DNA, 1564 bp, Unknown
  Bacterial polypeptide expressing nucleotide sequence isolated from the Sargasso Sea
atgcgtcttgagaataatctcaacaaaatacttattgtagattttggttctcaatttacacaattaattgctcgaaaaattagagaactgggcatttattgcgaaattgtaagtcacaaaaaaatagaaaaattcaaaaattttgaaaataatattaaaggtattgtattatctggcggacctttgaatgtttatgaaagtaaaaaagtaaaatttaataataaaattctaaaggtaggtattcccgtactaggtatatgttttggccatcaaatcatctcaaaagctatgggtggaagtgtaagaagctctaagcatagagaatttggactagctgaagtaaaagaaataaaaacaagtaaattaacaaaaaattttttttctaaaggaaaaaataatgtatggatgagccatgcagatcaagtaacaaaattaccaaaaaactttaaaataattgcacaaagcataaattctaagatgtgtattatcgaaaacgtaaaaaaaaaaatgtttggtatccaatttcacccggaggtaagtcatacaattaaaggaaaggtaatattaaaaaattttatattttctatatgtaaattaactaaaaactggtcctcaagagatcagaaaaaaaaattaataaatgaagtaagaaacagtgtaggaaattcaaaggttatttgtgcattatctggaggtgttgatagtagtgtagttgctaaattactatcaaatgctattggaaaaaaattaacatgcatttttgtaaataccggactccttagaaaaaatgaagaaaagcaagttgtaaatacatttaaaaagagatttaaaataaatttgatctatgtaaatgctgaaaagttatttttgtcaaaattaaaaaatgtttctgatccagaaaaaaagagaaaaatcataggaaatctatttattaaaatattcgagaaatactcaaataaaattaaaaatgtaaaatttttagctcagggaactttgtaccctgatttaattgaaagtaaatctgttacagggagtcaaacatcaaaaattaaatcacatcataatgtaggtggtttgccagaaaaaatgaaacttaaattagtagaaccacttaagtatctttttaaagatgaagttagaaaactaggattagaacttggactaagtaacgaaataatatctaggcatccatttccaggacctggtcttgcaataagaatgcctggtataataactaaagaaaaaataaaaattttaaaagaggctgacaattattttatcaaatccctaaaagataataatttatatgacaaaatttggcaagcatatgccgccttacttcctgtaaaaacagttggagtaatgggtgataatagaacttacgaatatctttgcttgttaagagctattacttcagaggatggaatgaccgcagattttttccaatttaataaatctttcatgcaatcaatatctaatcaaattgtaaataacataagaggaataaatagggttgtttatgatattacttctaagccaccaagtactattgaattggaataat

SEQ ID NO: 317681 - DNA, 718 bp, Unknown
  Bacterial polypeptide expressing nucleotide sequence isolated from the Sargasso Sea
atggcaaagaatatccttgccgataagattttaataattgacttcggttcacagtacacgcaactcattgccagaagagtaagagaattgggtgtttactgcgagatatacaaccatcgtgcttctcttaaatctattaaagactttaacgccaaaggcatcatcctgtctggaggtccagaaaccgtaaagcaaaaaggttctcctaaaataccggacaaagtattcgatttaggcatcccacttcttggtatttgctatggcatgcaatccatagccaagcaactcaaaggaaaagttgaattgggggataaaagagaatttggacatgctgatctattattgaaaaataaagggtctggactttttaaagggataaacaataacaaaatcagtgtttggatgagtcatggagatcatgtttccaaacttcctagagatttcaaagtttgcgcaacaacaagcaacagtcctatagcagcctttcatcatccaacaaaaaagatattcggtcttcagtttcatcctgaagtaacgcacacacctcaaggcaagaagatattgaaaaactttgttagagatatatcaggttgcaaaggtttgtggaattctaaaaatataattgatcgagcggttagtgaaataagagagcaggttggcaattcaagaagtattattaggtttatcaggaggtgtggattctgctgttgttgcagca

SEQ ID NO: 317682 - DNA, 548 bp, Unknown
  Bacterial polypeptide expressing nucleotide sequence isolated from the Sargasso Sea
tatggcacaggatattcttgccgataaaattttaataattgacttcggttcacaatacacacagctcattgccagaagagtaagagaatttggagtttattgcgaaatatatagtcaccgagcctctttcaaggctattaaagattttaatgccaatggcattattctgtcgggtggaccggaaacagtaaaacaaaaaggctcccctaaggtacacgataaagtttttgagcttggtattccacttcttgggatctgttacgggatgcaatctatagctaagcaactgaaaggaaaggttgaattagccaataaaagagaatttggtcatgcggatttatctctcaagagccaaggttcaggactttttaaaggtatcaataaaaagaaaatgagtgtttggatgagccatggagaccatgtttccaaacttcctaaaaattttaaggtttgcgcaacaaccaataatagtccaatagcagcctttcatcatccaacaaaaaagatattcggtcttcagtttcatcctgaagtaacgcacacacctc

SEQ ID NO: 317683 - DNA, 930 bp, Unknown
  Bacterial polypeptide expressing nucleotide sequence isolated from the Sargasso Sea
ttattaaagatgttagaaaacaagttggaaatagcaaagttatttgtgctttatcaggaggcgtagatagtggtgttgtcgctcaattactgaataaagctattagaaaaaaactttattgtatttttgtaaacacaggccttttaagaaaaaatgaggaaatacaagtagttcaaacttttaaaaagcgtttaaaaatgaatttaatttatgtaaatgctgaaaaggaattcttaaaaaaattaaaaaatgtttctgatccagagaaaaaaagaaaaataattggtaatttatttatcaaaatatttgaacggtatgctaagaaaatcaaagatgttaaatttttagctcaaggaactctttatccagacttaattgaaagtaaatcagttacaggtagtcaaacatctaaaattaaatcacatcataatgtaggtggcttaccaaaaaaaatgaatttaaaattagtagagccattaaaatttttgtttaaagatgaggtaagaaaattaggattagagttaaatcttagtaaagaaattatttcaagacatccttttcctggaccaggcttagcaattcgaatgccaggtattataactactgaaaaaattaaaattttaaaagatgctgattattactttattcaagctttaaaagatcatggtcattatcataagatttggcaagcatatgcagctttgctgccagtgaaaactgttggtgtaatgggagataatcgtacttatgaatatttatgtttgctaagagcaattacctctgaagatggaatgacagctgattattatgaatttaaaaaatcttttatgcaaactatttcaaataaaatagttaacagtataagaggtataaatagggtagtgtatgacgttacttcaaaaccaccaagcacaattgaacttgagtaaa

SEQ ID NO: 317684 - DNA, 334 bp, Unknown
  Bacterial polypeptide expressing nucleotide sequence isolated from the Sargasso Sea
atgacgactcaggagcacgatcgcgttcttatcctagattttgggtcgcagtttacgcagctgattgcccgtcgtattcgtgaggagagtgtttacagcgaaatacaccctcctactcggtcactcgactggattcgagaatggaaccccgcagcggtgattctctctggtgggccaaattccgtatacgatgacggagtgccgaaggtagatccagaactattggcactgggatttccgattcttgggatatgctatggcatgcagctcatagctcaaatcgaaggtgcggaggtgtcccatgggcaccgagaatatggtagggctgagctca

SEQ ID NO: 317685 - DNA, 1141 bp, Unknown
  Bacterial polypeptide expressing nucleotide sequence isolated from the Sargasso Sea
ctggattttggttcccaatacactcagctgatcgcgagaagagtaagagaatgcggagtgtactgcgaaattcagccgtttgatgttgaaaaatcgtattttgacgaacgacaacctaggggcgttattttgtctggtggacctgagacggtcacctcaggcgatacgccaagaattcctgagcgattgcttgagttagaaataccgatattaggtatttgttatggaatgcaggctctcgctgcgcagctgggaggtggggttaagagctctgcacacagggagttcggccatgctgagattgatttgcatggtggtagcgaattactggggactctagacccggacagccatggaaaggcgcaagtttggatgagtcacggagacaaggtcaccgatttgccagagggctttagcgttaccgctagcacggagagcgccccggttgcggcaatggagaatccgtcaaaacgaatttacgcggttcaatttcatccagaggttacgcataccccaaacggagatcatttgattgatcggttcgcaaaggatatttgccggtgcgacggtgattggactattgaaaacatcgcggaagaggctattcggagaactaaagaacaggttggcgatgatgaggtggttttaggtttgtcgggtggagttgattcgtcggtggtcgcggcgatcctttctcgggctatcggagatcaactaacctgtatttttgttgataatgggcttcttaggaaaaatgagaccgaagaagtcgaaaaggcctttggattggaggcaggaacaggaaacgtcttacccatcaacatcaagacgattgacgctcgatctgagtttttgactaaacttgtcggcgtggtggaccctgaagacaagcgcaagatcatcggaaatacatttattgatgtgtttgaacgagaagccgataagttgagaaatgtgaaatggctggcgcagggcaccatctatcctgacgtcattgaatccgccgcttcaaagtacgggaaagcgcacgtcattaaatctcaccataacgtgggcggtctacccgaaagaatgtctctacaactagtcgagcctctcagagaactatttaaagatgaggtgcggaacctcggaatttatt

SEQ ID NO: 317686 - DNA, 1435 bp, Unknown
  Bacterial polypeptide expressing nucleotide sequence isolated from the Sargasso Sea
ggtgtagaagccattgaatcatttcagccatcgggtttaatactctcgggtggaccggaatctgcattcactgatgatgctatcaaaccatctcaagagatttattcattgggtcttccgattttaggcatttgttacgggatgcaggtgatgtcagaacagctcggtggaaaagtttccccttcaagtcatagagaatttggccatgcagatataaagatagaatcaaatagtcgtcttttagagggcatcgagaattctgctgaacaaacagtttggatgagtcacggagatagagttgaatcattgcctgaggggtttcgaacaatttgtaccagtcaaaactcgccttcagcggcaatggcgagtgaggaaaaatcattttacgggcttcaatttcatcctgaagtgacgcatacaatttgcgggcaaagaatcatcgaaaactttttgtatcatatttgtgggtgcgcaagcgattggaatccaggaaacatcattgcgaaacacatcaaaaaagttcaggaggcggttggcaatgaccagattcttctgggattatcaggcggtgtggattcctcagtcgttgctgcccttttgcacaaagcgattggcgatcaattggtctgtatttttgtagacaacggacttcttcgtttgaatgaaggtgatcaggttatggaaacattttcagagcatatgaatctcaacgtcatcagagtcgatgccgaggaagctttcttaaaaaggctcaaaggtgttaatgacccagaggaaaagagaaaaataattggtagaacgtttatagaagtttttgaggacgaggcatcaaagttagaaaatgtgaaatggttggctcaaggaactatctatccagatgttattgagtctgcaggatcaaagaccggtaaggcgcatgtaatcaagtcgcatcataatgttggaggtctccctgaagacatgaagttaaagctgatcgaaccgctgagagatctatttaaagacgaggtgagaaaaattggtaaagagcttggtttaacctcaaagttggttgatcgacatccatttccaggacctggtctaggagtcagaatcttgggagcagttaaaaaagagtatgccgatttattgagattggctgatgatatttttatagaagaattacataaagagaatctatacgataaagtaagtcaggcgtttgcagtttttcttccagtaaaatctgtaggcgtcatgggtgatggaagaaaatatgaatatgtcattgctttaagggcagtagagacaaccgattttatgactgcaaattcagctaaattgccatacgaatttctagatcatgtatcaacacgaatcatcaatgaagtcccaggaatatcgagagttactttagatatatcctcaaaaccgccttcaactattgagtgggaat

SEQ ID NO: 317687 - DNA, 606 bp, Unknown
  Bacterial polypeptide expressing nucleotide sequence isolated from the Sargasso Sea
aacaaaaaggtccattcaaatggctagcacaaggtacgctttatccagatgtgattgaaagtggagtgtcaaaaggtcctgcagctgtaataaaatctcatcacaatgtaggaggattgccggaatggttgaatctcaaaatcttagaaccactaagagaattgtacaaagatgaagtgagagatgttgctagaattttaggcgttccagaaaaactactaaaacgacacccatttccaggaccaggattatctgtacgaattatgggagagattactccttcaaaattagtaatatgtagaaaagcaagtaaaattgttgaagatgaattatgggatgcaggagtttatgataaagtttggcaagcatatgcagctgtaggagatgataaggcagtaggagttgtaggagatgaacgaaaatatggtagaattgttacagttagagttgtagattcaattgatgcaatgactgccgattggaccagacttccaaatggagttttagaaaagatcagcaatagaataactaatgagattgaggaagtaacttgggtttcttatgtaatttcaagtaaaccacctgctacaattgaacctcaataga

SEQ ID NO: 317688 - DNA, 511 bp, Unknown
  Bacterial polypeptide expressing nucleotide sequence isolated from the Sargasso Sea
atggaaccaagtaacttacaaaaaattattatagttgactttggttcccaatttacacaacttgtagcaagaaaaattagagagttagggtcttattctgaaataatcaactttaaaaatatttttaaattaaaaaatgacagttccgtaaaaggcataatcctttctggaggtcctttaagtattactgataataaaggtatcagtttagatagttttttaattaaaaaaaaaataccaattcttggtatatgttatggtcatcaaattcttgctaaaaagttcggaggaaagataaaagtctcaaaacaccgagaatttggtaaagcaatattaaaagtaaaatcaaattctattttaacaaaaaatttttttaaaagtaaaaaaagtttagtatggatgagtcatcaagacactgttcaaaaacttcccaagggctttaaaactatagcatctagccaaaattcaaaatttgctgttattgcaaatgaaaagttaaaatactacggcg

SEQ ID NO: 317689 - DNA, 1525 bp, Unknown
  Bacterial polypeptide expressing nucleotide sequence isolated from the Sargasso Sea
atggaaaagatagttgttttagattttggctctcagtatagtcatttaatctgtagaagaattagagaattctcagtttatgcagagttagtaccatatgatatatctcctgaagaattacagaaaatgaatccaaaaggaataattttttctggcggaccgtcaagcgtctataatgaagatgcaccaaaaccagatgaagaattatttaattttgatttgccgttattaggaatttgttatggacatcaattaattgtaaataaatttggaggcaaagtaaaacgtgcaaacaaagaatacggttcatcacttctttcaatggataaaaattcaggattactggatggaataggagaatcaattcgtgcatggatgagtcatggggatgaagcagaagaaattccatctaattttgaagttataggtcatactgaaaattcacatgcagctgcaatagcaaatacagatagaaccgtatttggaatacaatttcatccagaagtagttcatactgaacgcggaaccgatattttgaaaaattttgttttgaatgtttgtaaggcaaaacaagaatggacaatggaaggttttgtggaaaaaacggtaaaagaaatttcagaaattgaaggaaatgtgttatgcggggttagtggaggtatagattcaacagtggcagcattactaatacataaagcaataggggataggcaaacaggagtttttgtagataatggattattgagattggatgaatctaaagaaattgaagatatgttcaaaaataatttttcattaaatttccacagagtagatgcaagcgaacaatttctttcaaaattaaaaggaataacagatccggaacagaaaagaaaaattgttggggaagaatttattcaagtatttacggaatttgcaaaacagaaaggaccattcaaatggttagcgcaaggtacgctttatccagatgtaattgaaagtggcgtatcaaaaggtcctgcagctgtaataaaatctcatcacaatgtaggaggattaccagaatggttgaacctcaaaatcttagaaccattaagagagttgtataaagatgaagtaagagatgttgctagaattttgggtgttccagaaaaattactgaagagacacccatttcccggaccaggattatcggtacgaattatgggagagattactccttcaaaattagcaatctgtagaaaagcaagtaaaattgtcgaagaggaactatgggatgcaggagtttatgataaggtatggcaagcatatgcagctgtaggagatgacaaggcagttggagttgtaggagatgaacgtaagtatggcagaattgttacagtcagagttgtagactcgattgatgcgatgactgctgactggactagacttccaaatggtgttttagaaaaaatcagtaacagaattactaatgaaattgacgaagttacatgggtttcttatgtgatttcaagcaagccacctgccaccatcgaacctcaataaa

SEQ ID NO: 317690 - DNA, 1018 bp, Unknown
  Bacterial polypeptide expressing nucleotide sequence isolated from the Sargasso Sea
atgcctcttgaagacaatcttcaaaaaatcataattattgattttggatcacaatttacacagcttattgcaagaaaaataagggagctaggaatttattgtgaaataatcagtcataataagattaataaaaaatacaaattagaaaaaaatgtaaaaggcctcgttttatctggcggacctcttaatgtttatcaaagtaagaaagttaaattaaacaaaaatatattattgtcaaaaatacctgttttaggcatttgttttggccatcaaattatatctaaagaaatgggcggaaaagtaaaacaatcaagagccagagaatttggtttagcaacagttgaaaaagtaaaaaatagtattttaactaaaaatttttttgtaaataataaaaataatgtttggatgagtcatgcagacgaagtaactaaattacctaaaaattttaaagtaattgcaaaaacaaataattctaaactatgtattatcgaaagtactaaagataagctgtatggtatacaatttcatcccgaagtaactcataccaataaaggaaaaataatactcaaaaattttgtttttgatatatgtaagataaaaaaaaattggtctcctaaatatcaaaaaacaaatttaattaaagaggtaaaaaaaaaagtaggcaactccagagtaatttgtgctttatctggaggagtagatagtagtgtagttgcaaaactgttagcaaacgctataggtaaaaatttaacttgtatctttgtaaacactggattgttaagaaaagatgaggaaaaacaagtagtaaatacatttaaaaaaaaatttaagataaatttgatatatgtaaatgctgaaaatcagtttttatcaaaattaaaaaatgtctctgatcccgaaaaaaaaagaaaaattataggtagtttatttattaaaatttttgaaaagtatgcaaaaaaaataaaaaatgtaaaatttcttgctcaaggaacactataccctgaccttatgaaagtaa

SEQ ID NO: 317691 - DNA, 987 bp, Unknown
  Bacterial polypeptide expressing nucleotide sequence isolated from the Sargasso Sea
tttattcaatttgtaaagcaaagaaaagttggaaaatgaattatgaaaaagacagaattatcaaaggaattaaagaaaaagtaaaaaaacaaaaagtcatctgtgctctctcaggaggtgttgatagtagtgtagttgcgattctagttcataaagcaattaaaaaaaatcttaggtgtattatggttgacacggggcttttgagaaaaaatgaatttagatacacatataaagttttaaaaaacaaatataaattaaatattaaactagtaaaagcttctaatttatattttaaaaaattaaataatgtttatgatccagaaaagaaaagaaaaattattggaaatttattcattaaaatctttgagaaagaggcaaaaaagttcaaaaaagtgaagtttcttgctcaaggcactctttatcctgatattattgagagcagatctgcaacaggtagtaaaacttctaaaattaaatctcatcataacgttggaggtcttccaaaaaatatgagactaaatttaatcgagccattaaaagaactttttaaagatgaagtaagaaaattaggaaaatcattaggcttaatagaccccattcttaataaacatccttttccaggcccaggtttagcaattagaattttaggcaagataagtccaatgaaagtaaaaattcttcaagaggcagataatatatttataaatgaattaattaaaaaaaatttatataacaaaatttggcaagcttatgccgcactacttcctataaaaactgtgggtgttatgggcgattcaagaacttatgaatatacatgtcttttaagagctgtaacctcaaaagatggtatgacagctgattattttaacctaccaaaagactttttagatgaaatatctaataaaattattaatggtgtaagaggtataaatagagttgtttatgatataacctctaaaccaccaagtacgatagaattagaataat

SEQ ID NO: 317692 - DNA, 349 bp, Unknown
  Bacterial polypeptide expressing nucleotide sequence isolated from the Sargasso Sea
aatgagtcctgatataaatttagacaaaatcttgatcatagattttggttcacaatttacacaattaattgcaaggagaataagagagcttggagtattttcagaattagtaagtcacaaaaaaattaaaagcaatcatattaataataatattaaagggataattctatcaggaggacctttaaatgtttatcaattaaataaaaagacatttgataaaagaataataaatcttggtatacctatattaggcatatgttttggacaccaaatcttatctaaatttaatggtggcaaggtaaaacaatctaaacatagagaatttggattggtaaaaatttttaaaaaa

SEQ ID NO: 317693 - DNA, 856 bp, Unknown
  Bacterial polypeptide expressing nucleotide sequence isolated from the Sargasso Sea
tatgagtaaaaaattagaaaatattttaattatagattatgggtcacagtacactcaacttattgctagaagaattagagaattagaagttttttgctcaatttatccatataataaaattacaaataaattaataaatgaattaaatccctcagctattattttatctggaggacctaaatctgtacttgataaaaattctccaaaattaacttcaaatattttaaatttacaaaaaccaattcttggcatttgttatggaatgcaattattgactaaaaccttaagtgggaaagttaaacgttctactaagagagaatatggatatactttaattaatattaaaaaaaaatctttaatttttaagggaataaaaaaaaataaaattaaggtctggatgtctcatggagataatattaaaaaaatacctaattctttttctatatcgtctatttcagataacaatataatttcttcaattgaaagtaaaaaaagtaagatttattgcttacagtttcatccagaagtattccatacagataatggattaaaaataatttataattttcttttcaatatatcaaaaataaagaataaatttaaaattaaaaattttattgatgataaaattctagaattaaaaaataaaattaaagataaaaatattatatgtggtatttctggaggagttgactctactgttactgcttatttattaagcaaagctgtaaataaaaatttattttgcatatttgtagatcatggtcttttaagaaaaaatgaatcaaatcaagttgaaaaaatttttagagaaaaatttggaagaaaatttattaagattaatgcatcaaatatt

SEQ ID NO: 317694 - DNA, 1525 bp, Unknown
  Bacterial polypeptide expressing nucleotide sequence isolated from the Sargasso Sea
attggtattagattttggttcccaatacactcaactgatagcgcgaagagtaagggaaagcaatgtatattctgaaatatttccgtgggatataaatgaaaaaagaatattagatttgaacccaaagggagttattctttctggtggaccaaactcagtaactgattcatttacaccaagaatacctcaatgtatttttgaattaaatgttccaattttagggatttgttatggtatgcagactttagctgaacaaatgggaggccaggtagtatctgcagataaaaaggaatttggtcatacaaacttagaaattgaaaatgaatcaattctctttaagggcattgataaaaaaataaatgtttggatgagtcacggcgatcaagttcaagatttgcctgatgaatttgaattaattgcttcgacaaacacagcaccagttgctgctatggaacataaaaatttacccatatatgcaatacaatttcatcctgaagtaacacacacaaacgatggccatgttttactagataattttctttttgagatatgttccgcaaaaagagactggaaaattaatgatttaatttcatcaagaattgaagagattaaagaacaagtaaaaagtgacaaagtattgctcggtttatctggaggggttgattcttccgttacagctgctctcctgcataaagctattggaaaaaaattaatatgtgtttttgttgataatggacttttaagaaaaggagaaccagagcaagtaatgcaaacattcaaagaaaacatgcaattaaatgttattaaatctgatagccaagaaacctttcttagacatttaaaggatatcgaagaccctgagcaaaaaagaaaaattattggaagaactttcatagatgtatttgatgcagaagcaatgaaacttaaagatataaaattcttagcccaaggcacaatatatccagacgtaatagagtcttctggctcagagtcaaaagaagctagagttataaaatctcatcataatgttggcggactgccagatgaaatgaaacttgacctagttgagcctttaagagatctatttaaagatgaagtaagaaaaatgggaattgagctgggaatacctaaagaaatgatagaaagacatccgtttcctggacctggtttaggggttagaattcttggagaagtaaccaaagaaaaaactcaaattcttcagaatgctgaccatatttttatcgaagagttgattaaagctgatttatataattcagttagccaagcttttgcagttttattgcctgttaaatcagttggtgtagtcggtgatgagagaagatacgcagaagttattgcattgagggcggttgagacagtagattttatgacagctagatgggcgcaactaccttatgagtttctagagcatgtctcaaatagaattgttaatgaaattgaggcagttagtagggttgtttatgatatttctagcaaaccacctgcaacgattgagtgggaatga

SEQ ID NO: 317695 - DNA, 556 bp, Unknown
  Bacterial polypeptide expressing nucleotide sequence isolated from the Sargasso Sea
atcgaatccgctgccagcaagaccggcaaggctcacgtcatcaagtctcaccacaacgtcggcggcctgccggaagagatgaagatgggtctggtcgagccgctgcgcgagctgttcaaagacgaagtgcgccgcgttggcctcgagctgggtctgccctacgacatgctctaccgtcacccgttcccgggcccgggtctgggcgtgcgggtgcttggcgaagtgaagaaagagtactgcgatctgctgcgcaaggccgatgcggtctttatcgaagagctacgcaaggccgacctctacaaccaggtcagccaggcgttcgccgtgttcctgccggtgcgctccgttggcgtgatgggcgatggtcgcaaatatgactgggtcattgccctgcgagccgtcgaaaccatcgacttcatgaccgcccactgggcccatctgccgtacgacttcctcggtcacgtgtcgaaccgcatcatcaacgagatcaacggtatctcccgcgtggtgtacgacgtctccggcaagccgcccgcaaccatcgaatgggaataag

SEQ ID NO: 317696 - DNA, 625 bp, Unknown
  Bacterial polypeptide expressing nucleotide sequence isolated from the Sargasso Sea
atggaaccaaataaaattgaaaaaatagccattatagattttggttcacaatttactcaattagttgcgagaaaaataagagaacttggagtttattctgatattataaattctaaaaatattagaaaaatatttaataacaaatctataaaaggcgtcatactctcaggcggacccttaagcgcaacaaaaagaaaaagtctaaagctagataaatcaataattaatcttaaagttcctatattgggaatctgttatggacatcagattttagctaaaaaatttggtggaaaaattaaaaattctaaatttcgagaatttggaaaagcaattgttatgagcaaaaataaatctatattgacaaaaaattttttcaataacggaaaaaatgttgtttggatgagccaccaagatgttgtacaaaaattaccattagatttcaaaccaattggatcaactagtaattcaaaatttgcaataattgctaacgaaaaattaaattattatggtgttcagtttcatcccgaggttagtcatacttcaaatggtaagattttaattaaaaactttctatttaatatatgtaaaataactaaaaaattggagcaccaaaaaccaaaaaaaa

SEQ ID NO: 317697 - DNA, 1567 bp, Unknown
  Bacterial polypeptide expressing nucleotide sequence isolated from the Sargasso Sea
aatgaataaactatcagttaataataaaggtattgataccattttagttcttgattttggatctcaatatactcaattaattgcaagaagagtaagagaaagtaacgtttattcagaaattcttccttgggatattaatgaacaaaaaattaggaagctaaatccaaaaggtgttattttatctggaggccctaattcagttactgagagttttacaccaagagttccacaagttatttttgatctatcagttccagttcttggaatctgttacggtatgcaaactctagctgaacaaatgggaggacacgttgtgtctgtagatcaaaaggagtttggacattcatctcttgatgttgtttcaaattcaaaaatatttgaaggcattaataaaaaattaaatgtttggatgagtcatggtgatcaagtacaagatttaccagataattttaatcttatagcatcaacctcgactgccccaattgctgttatggaacacgaatctttgccaatatatggaattcaatttcaccctgaggtaactcacactgagcagggtaaaaaaatattggataattttattttgaatatatgtcatgctaaaactgaatggaatattgatgacgtaatttcacaaagaattcatgacataaaagaaaaagttaaaaatgataaggttcttcttggtttatctggtggagttgattcttctgtaacagcaacattacttcataaagcaataggcaagaatctaacttgtgtttttgtagataatggacttttaagaaaaggtgaagcagaagatgtaatgcaaaccttcaaagaaaacatgagtctaaatgttattaaatcagatagtgaggagatttttctcaggcatctaaaaaatattgaagatcctgaacaaaaaagaaaaattattggcagaactttcatagatgtttttgacgcagaagctataaaattgaaagatattaaatttcttgctcaaggaacaatttatccagatgtaattgaatcatctggaagcgaatcaaaagaagcacgaactataaaatcacatcataatgttggaggccttccagatgaaatgaagctggatttagttgagcccttaagagatctctttaaagacgaggtgagaaaaatgggtaaagagcttggattgcctcaagaaatgttagacagacatccatttcctggtcctggtctgggtgtaagaataataggtgagataacaaaagaaaaaacaaaaattctaaaagaggcagatcatatttttatacaggagcttattaaggctgatttgtatgatcaagtctctcaagcatttgcagttcttttgccagtgaaatctgttggagttgttggcgatgagaggcgatatgcagaagtaattggtttaagggccgttgaaactgtagatttcatgactgctaagtgggcgcatttaccttatgattttcttgaacttgtatcaaatagaatagttaatgagatagaagatgtcagtagagtggtttatgacatatcaagcaaacctcctgcaaccatagagtgggaatga

SEQ ID NO: 317698 - DNA, 1390 bp, Unknown
  Bacterial polypeptide expressing nucleotide sequence isolated from the Sargasso Sea
attctttcaggtggtcctatgagtgtatatgatgaagaagcacccactgtgccatcatgggttttcgagtgcggactccccatcctcggtatatgctacggaatgcaggctatagtgcatcaacttgggggtaaagtggagccgggtgaagctagagaatatggcctcgcaagtctaatcattgaagatgctactgaaacaatattttcccagattcctagtcagtcatctgtatggatgagtcatggtgataaagttgtgaaactacctccgcagtttaaatctttagcccagactgataatactgaatattgcgtcatatcatcgggtaaccaaatgtacggtattcagtttcatccggaagtgcatcacacttcttacggggagacattcatcactaattttttggttcaagtttgtaagttttctcaaaattgggattcaggtcgatttatcgaatccagtatggtgagcctcaaagaacaattgggggcctcaaaggtcgtatgtgcgctgtctggaggggttgattctgcagtgacagcagcgttattgcatcatgcagtgggagatcagcttaaatgtatttttgtgaataacggcctgttaagacttgatgaagaaaatgaagttagggaaatattcagagatgttttgaatgtcgatatcaattacttggatgcatcaaaaaggttcattgataaattagaaggggttgtagatcctgaaatcaaaagaaaaactatagggtatgaatttattaaatgctttgaagaagaaactgacaaattagggggagtagagttcttggcgcaaggcaccttatatcctgacgtgattgaaagcgttagtaccgtagggaaagccgctgtgattaaaacccatcataatgttgggggtctcccagagaatatgcaactgaaactagtagaacctctcagatatttgttcaaggatgaagttagaaaagttggactagaattagggctgcctcctaacattattcataggcaaccatttccaggtccaggattggctatccggattattggtgagattacccaagaaaagctagatatacttaagctttgtgacagaatagtgactgatgagcttgctaaatcagactgttatgaagaaatttggcaaggatttgcagtccttactgacagccacacagttggtgttatgggcgattttagaacctacggatacgtatgtgcgcttaggatcgtgtctagtgaagacgctatgactgccaactgggtaaaagtaccctatgaagtactagaaactatttcctccagaattgttaatgaagtatcaggtgtaaatagagtggtgtacgacataacaaacaaacctcctggcacgatcgaatgggaataag

SEQ ID NO: 317699 - DNA, 661 bp, Unknown
  Bacterial polypeptide expressing nucleotide sequence isolated from the Sargasso Sea
aatgcaagacagaattctcatactcgattttggttcacaatatacccagctgattgcaagacgagttcgagaggcgggtgtttatagcgagatttatgtcggtgacattggtgtagaagccattgaatcatttcagccatcgggtttaatactctcgggtggaccggaatctgcattcactgatgatgctatcaaaccatctcaagagatttattcattgggtcttccgattttgggcatttgttacgggatgcaggtgatgtcagaacagctcggtggaaaagtttccccttcaagtcatagagaatttggccatgcagatataaagatagagtcaaatagtcgtcttttagagggcatcgagaactctgctgaacaaacagtttggatgagtcacggagacagagttgaatctttgcctgaggggtttcgaacaatttgtaccagtcaaaactcgccttcagcggcaatggcgagtgaggataaatcattttacgggcttcaatttcatcctgaagtgacgcatacaatttgcggtcaaagaatcatcgaaaactttttgcatcatatttgtgggtgcgcaagcgattggaatccaggaaacatcattgcgaaacacatcaaaaaagttcaggaggcggttggtaatgaccagattctt

SEQ ID NO: 317700 - DNA, 228 bp, Unknown
  Bacterial polypeptide expressing nucleotide sequence isolated from the Sargasso Sea
aatgagtcttgatcaaaatctggataaagttgtaatcatagattttggttcacagttcacacaattaattgcaagaagaattagagaattaggtattttttctgaaattgtaagtcataaaaaaataagaactatcgatattaaccataatgtaagagggattatcttatctggtggtcctttaaatgtttaccaaatcaacaaatattcatttgataaaaaaatatt

SEQ ID NO: 317701 - DNA, 1153 bp, Unknown
  Bacterial polypeptide expressing nucleotide sequence isolated from the Sargasso Sea
aatgagtcttgatcaaaatcttgataaaattttaattatagattttggttctcagtttacacagcttatagcaagaagaataagagaattaggcgttttctcagaaattgtaagtcataaaaaaattaaaattaaagatgtcaatcagagtatcaaaggaataattttatctggaggaccattaaatgtatatcaaattaataaatattcgtttgataaaaaaattttagaaaaaaatattccagtacttggaatttgctttggtcatcaaatattatccaaaattaatggaggaagagttaaacaatcaaaaagtcgagaatttggattagctaatgtttataaaaaaaataatagtcttataactagtaatttctttattaataaaaagcctaagaaagtttggatgagtcatgcagatcaagtttcaaaacttccaaaaaattttaaagtagtcgcatcaagtactagttccagatttgcaatagttgaaaataaatcaaaaaaattttttggcgttcaatttcaccctgaggtaactcacactcaagatggaaaaaaaataattagtaatttcatttttttaatttgtaaaattaagaaaaattggtcatctaaagatcaaaaacaacaacttatcaatgaaataaaaactcaagtaggttcaaataaagttatttgtgcattatctggaggagtagatagcagtgtcgttgctcaattacttaataaagcaattcgaaaaaaactgtattgtatttttgtgaacacaggtcttttaagaaagaatgaagagattcaagtagttcaaacttttaaaaaacgtcttaaaatgaatttaatttatgtaaatgctgaaaagcaatttttaaaaaaattaaaaaatgtttctgatccagaaaaaaaaagaaaaataattggtaatctttttgttaaaatatttgaaaaatatgcgctaaaaatcaaaaatgtaaaatttttagcacaaggtacgctttaccctgatttgatagaaagtaaatcagtaactggtagtcaaacatcaaaaattaaatctcatcacaatgttggtggattgcctaaaaaaatgaatttaaaattgttagaacctctaaaatatttatttaaagatgaagtaagaaaattaggacta

SEQ ID NO: 317702 - DNA, 1159 bp, Unknown
  Bacterial polypeptide expressing nucleotide sequence isolated from the Sargasso Sea
gatgagtcatggtgatcaagttcaagacttacctgacgaatatgaattaacagcattaacctccactgcaccaattgcagcaatgcagcataaaaatttaccaatttatgctattcaatttcacccagaagttacgcacacagaaaatggattattgatactcaagaattttatcttcaatatttgtgccgcatgtaacgattggaaaatggataatttaatatcttcaagaattgaagatattaaatttaaagtaggcaataataaagttctgcttggactttctggcggagttgattcctcagtgaccgctgtgttgttacacaaagctattggaaaaaatttaacatgtgtttttgttgataacggattattaagaaagggtgaaagcgagcaagttatgcatacttttaaagaaaatatgaatctaaatgttatcaaatctgttagcaaagatttatttttaagacaccttgaaaatattgatgatcctgagcaaaaaagaaaaattatagggagaactttcatagatgtttttgatgcagaagcaataaaattaaaagatataaagtttttagctcaaggaactatttatccagacgttatagagtcatctggctctgaatcaaatgaagcaagagttattaagtctcatcataatgttggcggacttcctgaagaaatggaattagatctaattgaacccctaagagatttatttaaagatgaagtaagaagactgggaattgagctaggaattccaaaagaaatgctggatagacatccttttcctggacctggattaggtgtaagaattattggtgagattacaaaggaaaagatatcaatcttacaacaagcagataaaatttatattgaggagcttattaaagcaggattatatgaaaaagttagtcaagcatttgcagtcttacttcctgtcaaatctgttggtgtagttggagatgaaagaagatatgctgaagtcattgctctaagagctgttgaaactgtagactttatgacagcaaaatgggctcatctaccttatgatttcttggaacatgtatcgaatcgaattgtaaatgagatagatgaggttagtagggttgtgtatgatatttcaagcaaacctcccgcaactattgagtgggaataa

SEQ ID NO: 317703 - DNA, 1564 bp, Unknown
  Bacterial polypeptide expressing nucleotide sequence isolated from the Sargasso Sea
atgcctcttgatggcaatctcaaaaaaatattaatagtagattttggctcacaatttactcaattaatagcacgcaaaataagagaattaggcgtttattgtgaaataataagtcacaataaattaaaaaaaattaaaaattttgaaacaaatataaaaggtttagttttttctggaggacccttaaatgtttacgaaaacaaaaaggtaaaatttaacaataagcttttaaaattaggtgtccctgttttgggtatttgctttgggcatcaaattatctcaaaagaattaggtggtagagttaaaagctcaaaatatcgagagtttggccttgcagaagtacaagagattaaaaaaagtaaactcacgaaaaatttcttttccaaaggtaaaaacaatgtatggatgagtcatgcagatcaagtaattaaattgcctaaaaattttcaagcaatagcaaaaagtgaaaattctaaattatgcataatagaaaatttagaaaagaaaatgtatggtattcagtttcatccagaggttagtcatacgaataaaggaaatcaaatacttaaaaattttgtattttctatatgtaaaatcaaaagaaattggtcctcgagtgaccaaaaaataaaattaataaatgaagttaaacaattagtaggaaactccaaagttatatgtgcactatccggaggtgtcgacagcagtgtagtcacaaaattattatcaaatgctattggaaaaaaattgatttgtatatttgttaatactggccttttgagaaaaaatgaagaaacgcaagtaattaatacatttaaaaaaagatttaaaattaacctaatttatgtgaatgcagaaaacatatttatatctaaattaaaaaatataaccgatccagaaaaaaaaagacggataattggtaatctttttataaaaatttttgaaaagtatgctaagaaaattaaaaatgtgaaattcttagcacaaggtactttatatcctgatataatagagagcaaatctgtaactggtagccaaacttcaaaaattaaatcacatcataatgtaggtggtttaccaaaaaaaatgaatttaaagttagtcgaacctcttaaatatctttttaaagatgaagtaagaaaattaggattaaaacttggattaaatagagaaattatttctagacatccttttccaggacctggtcttgctattaggatgcctggcaaaataactaaagaaaaaattaaaattctaaaggaggctgataactattttattcagtctttaaaagataacaatttatacgataaaatatggcaagcatatgctgctttactaccagtaaagacggttggtgtgatgggtgataacagaacttatgaatatttatgtcttctaagagctataacatctgaagatgggatgacagccgatttctatcaattcaaaaagtcatacattcaatcaatatctaataccattgtaaataatataaaaggtattaatagagttgtttatgatgtaacttctaaaccaccaagtactattgaattggaataat

SEQ ID NO: 317704 - DNA, 699 bp, Unknown
  Bacterial polypeptide expressing nucleotide sequence isolated from the Sargasso Sea
ttttaggcgaattagaagggcaatccgaccccgaaactaaacgtaaagcaattgggggattgttcatcgatgtatttcaaaagtacgcaaatagaattgaaaatgctgagtttttagcacaggggacactatatccggacgtgatagaaagtgtgtctttcaagggtggtccttcagttacaataaaatcgcatcataatgtcggtggtttgccagagaaaatgggtttaaaactactcgaaccattgagagaactttttaaagatgaagtccgggcattaggcagagagttaaaattacctgaaaattttattagtcggcatccttttcccggtccaggtttagcaattagatgtccaggtaatataacaagagacaaacttgaaattttgcgtaaggcagatgcagtttatattgatcaaatacgcaaacacgggctctataatgatatctggcaggcatttgtagcaatattgcccgttcggactgtaggagttatgggagatggcagaacttacgattacgcgtgcacgctaagagcggtaacttcagtagacgggatgacagctgattattatccttttagtcatgaatttttaagcgaaacagcaacccgattaatcaatgaagttggcggcataaatcgagttacatacgatataacttccaaaccacctggcactatagagtgggaataga

SEQ ID NO: 317705 - DNA, 1480 bp, Unknown
  Bacterial polypeptide expressing nucleotide sequence isolated from the Sargasso Sea
catgagtcaaataactttaaacaaagaacgagatccatcaatattaattttggatttcggatctcaatattctgaattgattgcaagaagaattagagaaactaatgttttttctcttgtagttagtaattacatttcaattgaggaaataaaaaatattaaccctaaagggattattttgagtggaggcccaaattctgtatatgaacaaaatgctcctaagtgcgatgaaaaaatttttaatttaggaattcctattcttggtatatgctatggaatgcaattaatggtcaaagagctcggcggatctgttatttcagcaaccaaaagagctgaatatggtagagcaccaataagtattgacaaagaatctgatctcctttctgatgtagaagataaatctattatgtggatgagtcatggcgactctattaattgtttgcctgatggatttaataaaattgctcataccgagaacacactccatgcagcaatttcaaatgattttaagaaattatttggcgtacaatttcatcctgaagttattcattcagagtttgggatgacggtaattaaaaattttgtttataaaatttcttgttgtgcggctgattggacaacagaaacctatatagaggaaactattcccagaataagagagcaagttggcaataaaaaagttttgcttgccttatctggaggagttgattcctcaacgcttgcttttcttctcaataaagctattggaaatcagcttacatgcatgtttatagaccaaggtttcatgagaaaaggtgaaccagaatttttaatgaatttttttgacaagaaatttcacataaaagttgaatatattaatgcaagggaaaggtttattgccaaattaaaaggtattactgatcctgaacaaaaaagaaaaattataggtgaagaatttatcagagtattcgaggaagaaagcaatagattggggccttttcagtatttagcccaaggtactctttatccagatgttattgaaagtgctggtactaatattgatcctaagactggtgaaagaatagctgtaaaaataaagagtcatcataacgtgggtggattgccaaaagatttacaatttaaattagttgagccattaagaaaactttttaaggatgaagtccgaaaagtaggagctgctttaggtttgccggatgaaattattaaaagacatccatttccaggccctggattagctataagaattttgggagaggtaaataatgaaaaacttgattgtttaagagatgcagactggatagtaagagatgaaattaaaaaagcagatctttacaatgatatttggcaagcttttgcagtattgctacctgttaaaactgttggagtaatgggagataaaaggacttatgcatggccaatagttttacgttgtgtatcaagtgaggatggtatgacagcggattggtcaaaaaaattcctt

SEQ ID NO: 317706 - DNA, 890 bp, Unknown
  Bacterial polypeptide expressing nucleotide sequence isolated from the Sargasso Sea
catgagtcaaatacctttaaaaaaagaacgagatccttcaatattgattttagatttcggatctcaatattctgaattgatcgcaagaagaattagagaaacgaatgttttttctcttgtagtcagtaactttatttcaattgaggatattaatgaaattaatcctaaggggatcattttgagtggaggcccaaattctgtatatgaacaaaatgctcctaaatgtgatgaaaaaatttttaatttaggaattcctattcttggcatatgctatggaatgcaattaatggtcaaagaacttggaggatctgttatttcagcctctaaaaaagctgaatatggtagagcgccaattaatatagatctaaaatctgacctcctttctgatgtagaagataaatctattatgtggatgagtcatggcgattcaattaattgtttgcctgatggatttaataaaattgctcatactgagaacacacttcatgcagcaatttcaaatgatgtaaagaaattatatggcgtacaatttcatcctgaagttattcattcagaatttgggatgacggtaattaaaaattttgtttatagaattgctagttgtgcggctgattggacaaccgaaacgtatatagaagaaactattcctcggataagagagcaagttggcaataaaaaagttttgcttgccttgtctggtggagttgactcttcaactcttgcttttcttctcaataaagcaataggaaaccagcttacatgcatgtttatagatcaaggattcatgagaaaaggtgaaccagaatttttaatgaatttttttgataagaaatttcacataaaagttgaatatataaatgcaagggaaagatttattgctaaattaaaag

SEQ ID NO: 317707 - DNA, 1027 bp, Unknown
  Bacterial polypeptide expressing nucleotide sequence isolated from the Sargasso Sea
aactcacacagaagaaggaattttattactcaaaaattttgtgtttggtatatgtaaatcgaaaaaaaattggtcaacagatcatcaaaaaaaaacattaataaaaaatgtccaaaatcaaattggtaataaaaaaataatatgcgcactctctgggggtgtagatagcagcgttgtagcacaattgttaaataaagcggttggtaaacaactacactgtatatttgttaatacaggattattaagacttaatgaggaaaaacaagtagtggatacttttaaaaaaaaattaaaaatgaatttaatatacgtaaatgcagcagatgaatttttaaagaaattaaacaatattacggaccctgagaagaaaagaaagataattggaaatctatttatcaaaatttttgaacgctatgcaaaaaaacttaaaaatgtgaaatttttagcccaagggaccttatacccagatttaattgaaagtaagtcagtgactggaagtcaaacatctaaaattaaatcacatcataatgttggtgggttaccaaaaaaaatgaaattggaattgtgcgaaccattaaggttgctttttaaggatgaagtaagaaaacttggaataaaattaaatttatctaaggacataattagtcgtcacccatttccagggccaggattggcaataagaatgccaggtaaagtttcaaaagataaaatagaaatattaaaacaggcagataatatttttatttctgaacttaaaaaagaaaaattatacgacaaaatttggcaggcatatgctgccttgttgccagtaaaaacagttggtgttatgggtgacaatagaacttatgagtatatttgcttgttaagagcaataacttctcaagatggtatgacagcagatttttttgattttcctaaaaatttcatacaaaatgtgtccaataaaattattaataatattagaggaataaacagagtagtttatgatgttacttcaaaaccaccaagcactattgaattagagtaa

SEQ ID NO: 317708 - DNA, 1462 bp, Unknown
  Bacterial polypeptide expressing nucleotide sequence isolated from the Sargasso Sea
ttggttctagattttggttctcaatatacacaacttattgcaagaagagttcgagagagtaatgtttattcagaaattctcccttgggatattgatgaagaaaaaataaaattagtaaaccctaaaggtattatcttatctggtggtccagactctgttactaatagttataccccaagagttcctcaaatagtgttcgaattaaatattcctatattgggtatatgctatggaatgcagacacttgctgagcagcttggaggacaggttatatcatctgaacaaaaagaattcggatattcagagcttactatcaaagcagattgcatattattttctgacttaggtaaaacgctaaatgtatggatgagtcacggagatcaggtacaagaccttcctgataattttgagctagtagctaagactgctaccgctccaatagctgtgatgcagcacttaacaaagcctatatatgctctgcaatttcatcctgaggttactcatacagaacatggtaaaaccatactagataattatatttttaaggtatgcaaagcaaatgcagactggaagatggacaatttaatagaacaaagaattcaagaaattaaaaatcaagttcaagataataaagttctgcttggtctttctggtggagttgactcttcagtaacagcagcacttttacatgaagcaataggtaaaaaacttgtttgtgtatttgttgataatggtcttctcagaaaaggtgaagctgaagaagttatgaatacatttaaagaaaacatgaatctaaatgttattaaatctgacagcgaagaagcttttttaagacatctaaaaggtgttgaagatccagaacaaaaaagaaaaattattggcaggacttttatagatgtttttgattctgaggcagccaaactaaaggatgtagactttttagctcaaggaacgatatatccagatgtgattgagtcctctggctcagaatcaaaagaagcacgagttataaaatctcatcataatgttggcgggcttcctgaggaaatgaaaatgaaactagtagaaccattaagggacttatttaaagatgaagttaggaaaatgggagttgagcttggcttatcatcagaaatactaaataggcatccattcccaggtccaggacttggagtgagaattttaggtgatattactaaggagaaaacatcaattctaaaagaagctgatcatatttttattgaagagcttataaaagcaggtttatataaaacggttagccaagcttttgcagtttatttaccaataaaatcagttggcgtggttggtgatgaaagaaggtatgcagaagttattggacttagagcagttgagacagtagatttcatgacggcgagatgggctcatctcccctatgattttcttgaacatgtatcaaacaggatagttaatgaaatagaac

SEQ ID NO: 317709 - DNA, 535 bp, Unknown
  Bacterial polypeptide expressing nucleotide sequence isolated from the Sargasso Sea
ggtaagccaaacatcgaagataatatcacatcataatgttggtgggctaccaaaaaaaatgaaacttaaattaattgagcctttaaaatatttatttaaagacgaggtcagaaagttaggatttgaattaaagttatctaaagaaattatttcaagacatccatttcctggtcctggacttgcaatcagaatgcctggaaaaataacggacgaaaaaataaaaattctgaaagaagctgattattattttattaatggtcttaaaaaacataatttatataataaaatatggcaagcttatgcagcattgcttccagttaaaaccgtcggtgttatgggagataacagaacctacgaatatatttgtttgcttcgaacaatcacttcagatgatggtatgactgctgatttctatgacttcgataaaaattttatgcaagaaatttcaaataatataattaataacattaaaggtataaatagagttgtttatgatattacctctaaaccaccaagtacaattgagttagaatga

SEQ ID NO: 317710 - DNA, 1015 bp, Unknown
  Bacterial polypeptide expressing nucleotide sequence isolated from the Sargasso Sea
cataccgaaaatggaaaaataattttaaagaattttgtattgaatatatgccgcacaaaaaaaatgtggagtcttagaaaacaaaaagatttaataattaatgatatcaaaaacaaagtgaaaaatgaaaaagttatatgcgctttatctggaggcgttgatagtagtgtggttgcattcttattaaacaaagcaatcggtaaaaaattaaaatgtgtttttataaacactggtcttctaagaaaaaacgaggaaaaagaagttgtaaaaacttttaaaaaaaaattaaaatctaatttaatttatgttgatgcttctaaactttttttaaataaattaaaaaatgttactgatcctgaattgaaaagaaaaattattggtaaactttttataaagctttttgaaagaaaggcaaaaaaaattaagtttttagcccaaggtactttatatccagatttgatagaaagcaggtccgtcactggaagtcctacctcaaaaattaagtcacaccacaatgtaggaggattaccaaaaaatttgaaattttcattagtagaacctttgcaaacactatttaaagatgaagtaagaaaattaggaaaagaattatcagttccaaaagccatacttcaaagacatccttttccaggacccggtcttgctataagaataccaggaaaaatttcaaaatataaaattaaagtgttacaggaagcagatttcatatttattgatgaattaaaaaaatcaaatctttatcataagatctggcaggcttatgcagctcttcttcctttaaaaaccgttggtgtcatgggagacagcagaacctatgaatatacatgtatgttaagagcagttacctcactcgatggaatgaccgcagacttttataattttgataaaacttttatacagagggtatctaatagaattatcaactctgtaaatggaataaacagagttctttacgacgtgacctctaaacctccaagcactattgaattggaataaa

SEQ ID NO: 317711 - DNA, 313 bp, Unknown
  Bacterial polypeptide expressing nucleotide sequence isolated from the Sargasso Sea
cttggtattagattttggctcacaatatactcaattaatcgctagaagaataagggaaagtgatgtttattctgagatacttccatgggatatttccaaggaaaagattttaagtttaaaaccaaaaggcataattctttcaggaggtcctaattctgtaactgaaagttttactccaagagtaccaaagtgtgttttcgatatggaagttccaatcttgggtatatgttatggaatgcaaactcttgcagaacaaatgggcggacatgtaatatctgcagataaaaaaagaatttggtcacactgtgcttaa

SEQ ID NO: 317712 - DNA, 724 bp, Unknown
  Bacterial polypeptide expressing nucleotide sequence isolated from the Sargasso Sea
atgaaaagtaaggataaaatattaattttagattttggctctcaatatactcagttaattgctagaagaattagagagattggcgttttttccgaagtaaaaccatcctcaatatcaactgaagaaataattaaaatgaatccgtcaggcataatcctttctggaggacctgaaactgttactataagttcttcgcagaaagtacataaatcattattagaagcaaaaataccaattttaggtatatgttatggaatgcaaactattgcaaatgaacttggtggtacggttgttaaatctgatataagggaatttggtcatgcagaaatttctcatgttaatcagtctatcttatttgataatgtaggttttgattcagatagtcttgatgtatggatgagtcatggagataaggttgaagttcttccagaaaactttgagataattgcctcttccaaagattgtaaagtagcaggatttcaaaattcagactcaaatatttttggactacaatttcacccagaagtaactcatactaatcaaggtgaacagattttatctaacttcatttttaaagtatgtagttgtagtaaaaattggtcaacatctgatatcattaattcaatggtttctgatgtaaagaacaaagtaaaaaatgaaaaggttttattagggctttctggtggtgttgactcatctgtagtagctatgttattacataaag

SEQ ID NO: 317713 - DNA, 841 bp, Unknown
  Bacterial polypeptide expressing nucleotide sequence isolated from the Sargasso Sea
gttgtcaaatgcaattgggaaaaaattgacatgtatttttgttaacacaggcttacttagaaaaggtgaggaaaaacaagttattactacttttaagaaacgatttaaaattaatttaatttatgtgaatgctgaaaacttatttttatcaaaattaaaaaatatttctgatccagaaagaaaaagaaaaattattggaaatctatttattaaaatctttgaaaaatatgcaaaaaaaattaaaaatgtaaaatttttagctcaaggaactctctatccagatttaatcgaaagcaaatcagttactggaagccaaacttcaaaaatcaaatcacatcacaatgttggaggtttgccaaaaaaaatgaaacttaaattagtagaacctctaaaatatctctttaaagatgaagttagaaagctaggattagaaattggattgaataaagagataatctctagacatccatttccaggaccaggtcttgcaattagaatgcctggaaatatatctaaagaaaaaattaaaattttaaaagaagcagataattattttataaaatctttaaaggataacaatttatatgataaaatatggcaggcatatgctgccttacttccagtaaaaacggtaggagtaatgggtgataatagaacatatgaatacgtttgtttgcttagagcaattacatctgaagatggcatgactgcagatttttttcaatttaacaaaacttttatgcaatcagtatctaaccaaattataaacaatataagaggaataaatagagttgtttatgatataacatctaaaccgccaagtactattgaattggaataa

SEQ ID NO: 317714 - DNA, 1030 bp, Unknown
  Bacterial polypeptide expressing nucleotide sequence isolated from the Sargasso Sea
gttgataacacagattagtgggaaagaaatactcaaaaactttgccttagatatatgtaatatctcagataattggagtgctaaaaattttataaataaatctattgaaaatattagaaaagagattggaaacagcaaagttatatgcggaatctcaggtggtgttgactcaagtataactgccactttaattcataaagccataggaaataatttgacgtctatatttgttgacaatgggttactaagaaaaggtgaatcagaagatgtaatgaattttcttcaaaaaggccttgggctaaacatcgttaaagtaaatgcaagtgaaaattttctatataaattaaggaacattattgacccagaagaaaagagaaaaataataggcaaagaattcattaatgtttttgaaaaagaagcaaaaaaaatcaaaaatgtaaaatacttagctcaaggtactctttattctgatgtagttgaatctgcggtcataaaatctgggcatcaagcagttattaagagccatcataacgtaggaggacttcctgacaaaatgaagctaaaacttatcgaacctcttaggttgcattttaaggatgaggttagagaaattggttatgaattaggaatcaacaaagaaataattgaaagacacccttttccaggaccaggattagctataagaataatgggtgaaataacagaagaaaaattaaatatattaagagaagctgatcatatttttatagatgaaattaagaaagcaggtttgtatcataaaatatggcaagcctttgcagttttgactaatactcaaagtgttggagttatgggagataatagaacgtatcaaaattgtgtagcaatacgagctgtaaattcaaaagatgccatgaccgcagattggtctaaaattccttatgaagttctttcttctgtttcttcgagaataattaatgaagttgaaggaataaatagagtggtttatgacataacatcaaaacctccgggaacaattgagtgggaataa

SEQ ID NO: 317715 - DNA, 470 bp, Unknown
  Bacterial polypeptide expressing nucleotide sequence isolated from the Sargasso Sea
aaaaagaatagagccacttaaatatctttttaaagacgaggtaagaaaacttggtctagagttaaatctaaataaagatattatatcaagacatccatttcctgggccaggactagcaattagaataccaggaataataacaagagaaaaaattaaaattttaaaagaagctgactattatttcattaaagcattaagagatgaaaaattatacaatagaatctggcaagcctatgctgctttattaccagtcaagacagtaggagtcatgggagacaatagaacttatgaatacttatgtttattgagagctataacatctgaagatggtatgactgcagatttttttgaatttaaaaaaccatttatgcagtttgtatcaaatcaaattgtaaacaatataagaggcataaacagggttgtttatgatattacatctaagccaccaagcactattgaattagaataaa

SEQ ID NO: 317716 - DNA, 1159 bp, Unknown
  Bacterial polypeptide expressing nucleotide sequence isolated from the Sargasso Sea
gatgagtcattcagatgaggtagtaaaattagcaagaggatttaaagtcattgcaaaaacaaatacttccaagttttcaataattgaacactcgtcaaaaaaactttatggaattcaatttcaccctgaagtaactcatactgaaaatggaaagataattttaaaaaatttcgttttttcaatctgcaatattaaaaaaaattggtcatcaaaaaatcaaaaacaaatattaataaaagaagtgaaaaaaatagttgggaaatcaaaagtaatttgtgccttatctggcggtgtagacagtagcgtagttgctaaattaattcataatgccgttggaaaacaattaatatgtatttttgttaatacaggattgttaagaaaaaatgaagaaacccaagttttaaaaacttttaaaaaaaaatttaaaatcaacttaatttatgttgatgctaaaaaattatttttaaataagcttaaaaagattaatgaacctgaaaaaaaaagaaagataatcggcaacttatttattaaaatttttgagaaatattcgaaaaaaataaaaaatgtcaagtatttagctcaaggaactctttatccagatataatagaaagtaaatcagtaactggtagccaaacatccaaaataaaatctcatcataatgttggtggattacctaaaaaaatgaaattgaaattagttgaaccattaagattactgtttaaagacgaagtaagaaaattaggattggaacttaaattgtcaaaagagactgtatttagacatccatttccgggtccgggtctagcaataagaatgccaggtgaaataacagaaaataaaattaaaattttaaaagaagctgattatatttttataaactcattgagagaatacaatttatataacaagatatggcaagcatacgcagctttattaccagttaaaactgttggagttatgggtgataatagaacttatgaatatatgtgtttattaagagcaattacttctgaagacggaatgacagctgatttctttaatttttcaaaagaatttatgcagcttgtttcaaacaaaataattaataatataacgggtattaatagagtggtttacgatataacatcgaaaccaccaagcacaatagaactagagtaa

SEQ ID NO: 317717 - DNA, 510 bp, Unknown
  Bacterial polypeptide expressing nucleotide sequence isolated from the Sargasso Sea
aatggaaaaaataattgttttagattttggttctcagtatagtcatttaatctgtagaagaataagagaattttcagtatatgcagaattagttccgtatgacatatctcctgaagagttaaagaagatgaatccaaaagggattattttttcaggaggcccatctagtgtctataacgatgatgcaccaaagccagatgaagaattgttcaattttgatttaccattattaggtatttgttatggacatcaattaattgtaaataactttggaggcaaagtaaaaagagcaaacaaagaatatggttcatctctactatctatggacaagaattcagcacttttagatggaattggagaatctatacgtgcatggatgagtcatggtgatgaagcagaagaaattccatcaaattttgaagttattggacacacagaaaattcacatgctgcggccatagcaaatacaaacagaacagtttttgggattcagtttcatccagaggtggt

SEQ ID NO: 317718 - DNA, 1546 bp, Unknown
  Bacterial polypeptide expressing nucleotide sequence isolated from the Sargasso Sea
aatgcaagacagaattctcatacttgattttggttcacaatatacccagctgattgcaagaagagttcgggaggcgggtgtttatagtgagatctatataggcgatattgatttcaacgtcattgaatcatttaagccatctggattaatactctcaggcggacccgaatctgcattcattgatgatgcacccaaaccatccaaagagatttactcaatgggtcttcccattctaggtatttgttacgggatgcaagtgatgacagaacaactcggaggaaaagtttcaccatcaaatgagagagaatttggtcatgccgatgcaaaaatggaagcaaatagccgtcttttcgagggcattgagactgatggtgagcaatcggtttggatgagtcatggagacagagttgaatctttacctgagggattccaaacaatatgtacaagtgcaaattcaccttcagcggcaatggcaaatgaagatgactcattttatgggctccaattccaccctgaggtcactcatacaagttgcggacagagaatcattgaaaactttgttcacaatatttgtggttgtggaaatgattggaatcctggaaatatcattgaaaaagacatcaaagaagttcaggaagcggttggcgatgatcaggttcttctcggattatcaggtggtgttgattcctcagttgtagctgcccttttgcacaaagcgatcggtgatcaattagtctgtattttcgtagacaatggtcttcttcgtctaaatgaaggtgatcaggtcatggaaacattctcagagcatatgaatctcaatgtcatcagagtcaatgctgaggatattttcttggagaggcttaaaggtattgatgatccagaggataagagaaaaataattggtcgaacattcatagaggtttttgaggacgaggcttcaaagttagaaaatgtgaaatggttggctcaaggaaccatttacccagatgtcattgagtcagcaggatccaaaacaggaaaagctcatgtaattaagtcacatcataacgttggcggtctccctgaggatatgaaattaaagctggtagagccgcttagggatttattcaaagacgaggtaagaaaaataggcaaagaacttggactgacctcaaagttggttaatcgacatccttttccaggtcctggcttgggagtgagaatcttaggagaagtaaagaaagagtatgccgatctattgaggttggctgatgacatatttatcgaggaattacacaaagagaatctatacgacaaagtaagccaggcatttgcagtttttctaccagtcaaatctgtgggcgtcatgggcgatgggagaaaatatgaatatgtgattgctttaagagcagttgagacaactgattttatgacggcaaattcggctaaattgccttatgaatttttggatcatgtatcaacacgaatcatcaatgaagtctctggtatttcaagagtcacgttagatatatcctcaaaaccaccatcaactattgaatgggagtga

SEQ ID NO: 317719 - DNA, 841 bp, Unknown
  Bacterial polypeptide expressing nucleotide sequence isolated from the Sargasso Sea
catgcaagaaaaagttttaatccttgattttgggtcacaatacacccaactaatagcacgtcgagtgagggagctttttatttattgtgaaatccatccttatcacaaaatccctaacgatctagatacctataaggccgttattctttcaggttcaccgttttcagtaagagctaatgacgcacctcatccaaatttggagcaaattaaaggtaaaatacctcttcttggagtctgttatggtgcacaatatcttgcacatttttatggaggacaagtcaatttatcagaaacaagagaatatggacgcgcaaatctagaatatttcgaggctaaggatcccttttttagagatgtttcaaaaaatagtcaagtgtggatgagtcatgctgatacaatattaactttacctaaaggatctaaacttattggaagcactgaagatgttgttaatgccgcatataaaattttaggcgaagatacctatgcaattcaatttcatcctgaggtatatcacactacagacggtgagcaaatattaaaaaactttttggtagatattgccaatgtaaaacagaattggactccggattcttttatagacatggctattaatgaaattaaagaaatggtatgcgaggatgttgttattcttggtctttcaggtggtgttgattcatcggttgctgcaatgctacttaatagagctttgggggataagctaaactgtatttttgttaataatggattactaagaaagaatgagtatgaagaggttttagcacaatactcaggaatgggtttgaatgtgaggggagttgatgcttcaaataagttttaa

SEQ ID NO: 317720 - DNA, 1426 bp, Unknown
  Bacterial polypeptide expressing nucleotide sequence isolated from the Sargasso Sea
tatgaccaatacaataaaaggaataattctgtctggaggcccattaaacgtttatcaaataaacaaatattcatttgataaaaaaattttacaattaaatataccaattctaggcatttgttttggacatcaaatactctctaaactaaatggtggcaaagttaaacaatcaaaacaccgtgaatttgggttggcaaatatttataaaaaaaacaatagtcttttaactgctaacttttttaaaaaaagtaatacaaaaaaagtttggatgagtcatgcagatcaagtttctaaaatcccaaaaaaatttagagtagttgcctcaagcacaaattctaaatttgctattgttgaagataaaataaaaaaattttatggagttcagtttcatcccgaagttacacatactgaaaatggaaaaaaactaattagtaattttgtttttttaatatgtaaaattaaaaaaaattggtcatcaaaagatcaaaaattacaactaattaaagatgtaagaagtcaagtaggatcaaataaagtaatttgcgctttatcaggaggtgttgatagcagtgtagttgctcaacttcttaataaagctataggtaaaaaattatactgtatatttgttaacactggccttttaagaaaaaatgaagaagcccaagttgttcaaacttttaagaaacgactaaaaatgaatctaatttatgttaatgctgaaaaagaatttttaaaaaaattagctaatgtttctgatccggaaaaaaagagaaaaattattggaaatctgtttattaaaatatttgaacgttatgctaagaagataaaaaacgtaaaatttttagctcaaggaactctttatccagatttaattgaaagtaaatctgttacaggaagtcaaacttcaaaaataaagtctcatcacaatgttggaggcttgcctaaaagaatgaaattaaaacttgttgagccattaaagtttttatttaaagatgaagtaagaaagcttggtttggaattaaatttaagtaatgaaattatatcaagacatccttttccgggccctggtcttgcaatcaggatgcctggtgtaatcacaaaagaaaaaataaaaattttaaaagaagctgattattattttattcaagcattaagagatcatggactttatcataaaatatggcaagcttatgcagccttattacctgtcaaaacagtaggtgttatgggagataatagaacttatgaatatttatgtttgttaagagcaattacttctgaggatggaatgacagctgatttttatgaatttaaaaaatcatttatgcaaattatctcaaataaaattgttaatagcattagaggtattaatagagtggtttatgatgttacttccaagccacctagcactattgaattagaatga

SEQ ID NO: 317721 - DNA, 796 bp, Unknown
  Bacterial polypeptide expressing nucleotide sequence isolated from the Sargasso Sea
tttgatcattgattttggaagtcaagttactcaactaattgcaagaagattgagagaattaaaagtgtattgtgaaattatgccatttcaaaaaattactcaaaagcaatttaaatcaaacaaccctgctggtataatattatcggggggaccatcaagtgtaatatctaattatcatccaaaattatcatttaatattttaaaaataggaattcctgttttaggaatttgttatggacaacagctcatgacgtctatgatggatggagaggtatctagtaatagtaatacatctgaatttggaagagcattaatttttaaaacaaatgaatctccaattgtagaaggtttctttaaaaataaaaaagaacaagtttggatgtcccacggtgatattgtctcaaaattacctgaaggatttaagattattgcaagctctaaaatctctccaaacgcaattatagctgatgatttaaaattactctatggtgtacaatttcatcctgaagtaattcatacaacaaatggaaaaaagatttttgaaaattttgttaacatttctggatcagacaaaagttggacaatgagttcttatgcaagaaaatcaatagatagtataaagtctgaagttaaaaatgaaaaagtaatatgtgcactatcaggtggtgttgatagcgcggttactgctattttaatccataaagctattggtaaaaatttaacttgtatatatgtggaccatggtttaatgcgagaaaatgagacgaatgaaataaaaaaaatgttcaaagaaaca

SEQ ID NO: 317722 - DNA, 1086 bp, Unknown
  Bacterial polypeptide expressing nucleotide sequence isolated from the Sargasso Sea
ttgcaatcgttgaaaataaaactaaaaaatattatggagtgcaattccatcctgaagttactcatactgagaatggtaagaaattaataagtaattttatatttttaatttgtaaaattaaaaaaaattggtcatctaaggatcaaaaaaatcagcttattaaagatgttaggaaacaagttgaaaataacaaagttatttgtgctttatcaggaggtgtggatagtagtgtagttgctcagctattaaataaagctattggaaaaaaacttcattgtatttttgtgaacactggccttttaagaaaaaatgaggaaatacaagtggttcagacatttaagaaacgtttaaagatgaatttaacttatgtaaatgctgaaaaggaatttttaaaaaatctaaaaaatgtttctgatccagaaaaaaaaagaaaaataattggtaatttatttattaaaatttttgagcgatatgccaagaaaattaaaaatgttaaatttttagctcaaggtactctatatccagatttaattgagagcaaatccgtaactggaagccaaacctcaaaaataaaatctcatcataatgttggaggtttaccaaaaaaaatgaatttaaagttagtagaaccacttaaattcttgtttaaagatgaggtgagaaaattaggactagagcttaaattaagtaaagaaattatttcaagacatccttttcctggaccaggcttagcaattagaatgccaggtataataactaatgaaaaaattaaaattttaaaaaaagctgattattattttattcaagctttaaaagatcatggtctctatcataagatttggcaagcttatgcagccttgctgcctgtaaaaacggttggagtaatgggtgataatcgtacttatgaatatctttgcttattaagagcaattacctctgaagatgggatgacagcagattattatgaatttaaaaagtcatttatgcaatctatatctaataaaatagtgaatagtattagaggcatcaatagagttgtatatgatgttacatcaaaaccaccaagcactattgaattagagtaat

SEQ ID NO: 317723 - DNA, 958 bp, Unknown
  Bacterial polypeptide expressing nucleotide sequence isolated from the Sargasso Sea
tggtcttcaaaaaaacagaaagaaaaaataatagaagaaattaaaaaacaagttgggcactctaaagttatttgtgcattatctggaggtgtagatagtagtgtagttgcaaaaattatacataaagctataggtaaaaatctaacatgtatatttgtaaatactggtttattaagaaaaaatgaggaaattcaggtaataaaaacatttaaacaaaaattaaaaattaaacttatatacgtcaacgctaaaaatttattcataaaaaaattaaaaaaagtaaacgatcctgaaaaaaaaagaaaaataattggaaatctatttattaaaatattcgaaaaatattcgaaaaaaatttcaaatatcaagtatttagcccaaggcactttgtatccagatttaatagaaagtaaatcagttacaggtagccaaacatctaaaattaaatcacatcataatgttggtggtcttccaaaaaaaatgaaattaaaattagtagaaccagtaaaatttttgtttaaagacgaggttagaaaactcggagaagaacttggtttaagtaaagaaatattatataggcatccgtttcctggtcctgggctcgcaattagaatacctggggatatagatgaaaacaaaattaacattttaaaagaagcagataatatttttattaaaagtttgtataaatataatctttatcataaaatttggcaggcctacgcagctcttttgccagtaaaaacagttggtgttatgggagataacagaacttatgaatacatatgtttgcttagagcaattacatccgaggatggtatgacagcagatttttttaatttcaaaaaagatttcatgcaagatgtatctaatcaaattgtaaatagcatcaaaggtattaatagagtggtttatgatgtaacatcaaaaccaccaagcactattgaattagagtaga

SEQ ID NO: 317724 - DNA, 717 bp, Unknown
  Bacterial polypeptide expressing nucleotide sequence isolated from the Sargasso Sea
tagatgcatcaaaacagtttatgaaagttcttaaaggagtaactgaccccgaaaagaaaagaaaacttattggaaaagagtttataaaaacatttgataaatgtgctaacaaatataaaggcatagaatatcttgcacagggtactttatatccagatgttatcgaaagccgttcagtaactggcgctccaagtgctacaattaaaagtcatcataatgttggtgggctacctaaaaaaatgaatctgaaacttgttgagcctcttaatactttatttaaagatgaagtaagaattttaggaaaggaacttggtcttagtgataatattagaaatcgtcatcctttcccaggtcccggtttggcaattagaattttaggagaagtaacaaaaagtagattagaaattttgagacaagctgataaaatttatattgatttactaaaaaaagaaaaattatatgataaaatttggcaagccttttgtgttctactaccagttaagacagttggtgtaatgggagattcaagaacttatgaaaatgtttgtgcaattagagccgtaacttctgttgatggcatgacagcagattattatccttttgaccaaacttttttaaagaaagtttctaataatattattaacaaagttaagggcattaatagagttgtttatgacacaacaagtaaacctcccggtactattgagtgggaataat

SEQ ID NO: 317725 - DNA, 1374 bp, Unknown
  Bacterial polypeptide expressing nucleotide sequence isolated from the Sargasso Sea
taaaacaaaagggagcaccaaaggtagctgaaaaagtatttgaacttaatattccaatcttaggtatttgctatggaatgcaaacaatagccaaccagttgggaggaaaagtagaactagctaataaaagagagttcggtcatgcagatttaaaattaagaaatcaagcagctggtttattcaaaggaatatctaaaaagaacattagcgtatggatgagtcatggcgatcatgtttctaaattgccaaatggttttaaatcttgtggagttacctcaaatagtccaatagcagcttttttcaatccttctaagaaaatttacggacttcaatttcacccagaagttactcacacaccgcaaggcaaaattattctaaagaatttcgttagagaaatttcaaattgtaagggtttgtggacatcgaaaaatattatttcaagagcggttgatcagataagggaagaggttggtgatcaagaagttcttcttggactatctggcggcgtggattctgctgtggtggctgctttactttctaaagctataggcgatcaattaacctgtatttttgttgataatggtttgctgagacttaatgagggtgatcaggtaatgaagacctttaagggaaaatttgggattaaagtaaaaagagctaatgcaggaaatcaattcctaagagatttaaaaggaaaaaaagatccagaacataaacgtaaagccataggaaaaacctttatagatgtttttctaaaagaagcaaaaaagaataaaaaaataaagtggttagctcaaggaaccatttatccagatgtaatagagtcagctggcactaaaaacgggtctgcgcatgtcattaaatctcaccacaacgtaggcggtttacctagttaccttaaccttcccgttatagaacctctgaaagatctttttaaggatgaagtcagaaagattggacttgaactgggactaccgaaagaaattctttttaggcatccttttccaggtcctggtttaggtgtacgaatacttggagaaataaaaagaccttatataaaaattcttcaatcagcagatgacatattcataactgaactagtaaatgagggctactatgacaaggtcagtcaggctttcgctgtttttctacccgtcaaatcggttggtgtggtaggggactccagaagatatgaatacgttatatctttaagggcggtggagactattgatttcatgactgccaaatcagcaaaattacctcatgcatttctagaaaaagtatcaaatagaataattaatgaaatacctgaagtttctagggtaacttatgatatttctagtaaacctccagcaactattgagtgggagtaag

SEQ ID NO: 317726 - DNA, 1363 bp, Unknown
  Bacterial polypeptide expressing nucleotide sequence isolated from the Sargasso Sea
aagattagagaacttggagttttttctgaaatagtaagccacaaacaattaaagaatttagatcaaaatgacctatttggtatcattctttcaggtgggccattaaatgtttatcaagataaaaaaattaaattgaataaaaatatttttaaatttgattgcccaatattaggcatttgttttggccatcaaattatatctaagttttatggaggtcatgtaaaaagctctaaaacaagagaatttggttttgcaaagataaaaaaatcaaaaaattcaattttaacaaagaatttttttgataaaaaaaatacaaataatgtttggatgagccatgcagaccatgtaacgaaaatcccaaaagattttaaaaaaattgcctcaacaaaaaactctaaatatacaattattgagaaccataaattaaaaagatttggagtacaattccatccagaggtaacacacactatcaaaggaaaagtcttactcaaaaattttatttttaaaatttgtaaagcgaaaaaaaattggtcacccaaacatcaaaaaaataatctaataaaaaaagtcaaaaatgagattggaaaagataaagttatatgcgctttatcaggaggagtagacagtagtgttgttgcacaactactaaataaatctataggtaagcaattaaaatgtatttttgttaatacaggtcttttaagaaaaaatgaggaaagacaagtagttgatacatttaagaaaaaacttaaaatcgatttaatttatgtgaacgctgaaaaacaatttttaagtaaattaaaaaatgtcacagatccagaaaagaaaagaaaaattattggtaacttatttattaaaatatttgaaaaatatgccaaaaaaataaaaaatgttaaatttttagcacaaggaacattgtatcctgatctgattgagagtaaatctgtaactggttcacaaacatcaaaaattaagtcacatcacaatgttggtggcctaccaaaaaaaatgaaattaaaattaattgaacctttaagacttttgtttaaagatgaagtaagaaaattagggttagaacttaaactttctagacaaattatttcacgacacccttttccaggtccaggtctagcaattaggatgccaggacagataacaaaagaaaaaattaagattttaaaagaagcagataattatttcataaatgagttaaaaaaagagaatttatacgacaaaatatggcaggcctatgctgcattattgccagtaaaaactgtgggagttatgggcgataacagaacttatgattatatttgtcttttaagagctataacctcaacagacggaatgacagcggactatt

SEQ ID NO: 317727 - DNA, 629 bp, Unknown
  Bacterial polypeptide expressing nucleotide sequence isolated from the Sargasso Sea
tgtatttgatgctgaagctgccaagcttgagaacatagattttttagcacagggaacaatttatccagatgtaatagagtcttcagaatctgaatcaaaggaagccagagttattaagtctcatcacaatgttggaggcttgcctgaggaaatgaagctcaagcttgttgaacctttgagagatctatttaaagatgaagtcaggaggttgggctcccaacttgatttgcctgagataattttaaatagacatccctttccaggccctggtttaggcgtgagaatacttggagaagtaaatgaaaagaaaataaagattcttcaagaagcagattttatttttatagaagagcttagaaaagctgatttgtatgactcagtcagccaagcatttgcagtttttttaccaattaaatcagttggagtggttggtgatgagagaagatactcggaagtgattgctttaagagctgtagagacagttgatttcatgacggcaaactgggcttatcttcctcatgattttttagataaagtttcaagacggattgtaaacgaaatagaggatgtaagtagagtcgtttatgatatttctggaaaaccgccagcaactattgagtgggagtgaa

SEQ ID NO: 317728 - DNA, 961 bp, Unknown
  Bacterial polypeptide expressing nucleotide sequence isolated from the Sargasso Sea
atgagcaattccaataatctctctttagataagaaaaatattgatacgattttggtattagacttcggctcacaatacactcaacttattgctagaagaataagggacttaaatgttttttcggtaatacttccgtgggatgtttcaactgaaaaaattaaatcccttaatcccaaaggagtaatattatctggaggcccagaatcagttactgaatctaataccccaagaattcctgaaattatttttaaattagatgttcctgtcttgggaatttgctacgggatgcaaacccttgctgagcaatttgggggtcaagtttcttcatcaaaaaataaagaatttggccatgctcaaattctattgaaaaaatcatctttgctttttgatgggttcagctctggatcctcaattgacgtgtggatgagtcatggagaccatgtgtcaactctgccagatcaatttagtttaattgcgtcaactgcatcagctccaatagttgcaatggagcatgtccaaaaacctatttttgcattgcagttccatcccgaggttactcatacaaaacagggtaatacagtattagaaaattttacattcaagatatgtatgtgtgcggctcaatggaaaatggaaaatcttattgagcaaagaataaatgagattaaagaaacagtaggagatcaaaaggtattacttggtttatcaggtggagtagattcttctgttacagcgatgttattagatcaagcgatcggaaaaaatttaatttgtgtttttgttgataatggattgcttcgaaaaaatgaagctgaagatgttgaaaatttatttaaagataagatggatttaaatttattagttgttgatgcaaagaaagctttttatagacatcttaaaggcatctcagacccagagcagaaaagaaaaattattggaagaacttttattgatatttttg

SEQ ID NO: 317729 - DNA, 856 bp, Unknown
  Bacterial polypeptide expressing nucleotide sequence isolated from the Sargasso Sea
aataaagcgatagctgttaccgtagactcctctgcaaattattgtaaatcatttcctcttataggtggtaaacaaatcgtctgtgaaaactggagaaacttaatttcagtaggcgcaagtccaatagcaataactaattgtttaaatttcggtaatccagaaaataaagaagtcatgggtgaatttgtggagtgtttacaaggaataaaagaagcctgtgaatttttagattatcccgtagtttcaggtaacgtatcattttataatggaactaataaaaaaaatatttttcccactccagtcataggaggtgtaggtttaatatcagatatctcaaaaactttaaaccatcattttaaaaaagaaaataatattattattttaataggtaaaacttttggccatattgaacaaagttgttttcttaaagaaaatttttcaattactgaaggtttgccgcctgaagtaaatctaaaaaatgaaaaaaataatggagaagctgttttaaaattaataaaaaaagatttaataatgagtgcacatgatgtttctaatggaggtttattagtctcattatgtgaaatgtcaattggttcaaatttaggtgctaaaatcttaaagcccaaaaaattaagaaatatgtttgaatatttttttggagaagaccaaggaagatatattatagaaatagataaaaaaaatcttgatcaagttatgaagatattagatgaggataaaatttactatgaaaacataggcaaaacccaaaagaaatattttgaggtcgtaggagaattaaacattaacataaatgacctatttaaaataaataatacttggtataataattattaat

SEQ ID NO: 317730 - DNA, 241 bp, Unknown
  Bacterial polypeptide expressing nucleotide sequence isolated from the Sargasso Sea
aagatctgtatgaccttcgttgattcgtctggatatcaaacagaacaatatccattgaacccaaataaatcaccttcaggtattacaggaattacgaatgataatggaaacataacaatcatgatgcctcaccccgagagagtttttcgctcccaccaattttcatggaaaccattatcttggggtgaattttctccttggatgcagatctttattaatgctaaaaagtttgtaagttaac

SEQ ID NO: 317731 - DNA, 1065 bp, Unknown
  Bacterial polypeptide expressing nucleotide sequence isolated from the Sargasso Sea
aaaaaatataataaaaaagaagttaatttagatatttctgattatcatctcagcctcattggtaaacttggtattgaagaaaatgataagtctagaagaggaacacttggcttagatctagaatctttaaaaaccataagaaattatttttccactataaaacgtaaaccaacagatgtagaaattgaaacattagctcagacgtggtccgagcactgtaaacacaaaatattttcagctaaaattgatgatattcaagaaggtatatttaaaaaatatattaaaggtgcgactgaaaaaattatacaattaagaaaagataatttttgtgtttctctttttacggataatgccggtggaatagaatttaataaagattggattatttgtcataaagttgaaacacataatacaccttcagccttagatccatttggtggtgcaatcactggaattgttggtgttaatagggattgtcttggatttgggaaaggagcaaaacctatagcgaatacgtatgcatattatttagcagaccctaataagaaatatcaattgtatcgtcaaaaaaataaagacccaatgcttccagcaaattttattgcgaagggtattataagtggtgttagagttgggggaaattgttcgggtattcctactcctcaaggtaatgtatattttgatgaccggtttgcaggaaagccccttgtattttgtggaacagttgggattattccgaaaaaaattaaaggaaaattatcgcataagaagaaggctaatccaggagatatcatactaatggctggaggcagagtaggaaaagatggtattcacggtgcaacattttcttcagaggaattagatcctaatagtccagtttctgcagtacaaattggtgatcctataacacaaaagaaaatgtctgatgtcatcattagagaattgcgtgatgaaaatctttactcgagcataacagataatggagctggaggattatcatcatcaattggagaaatggcaaaagagagtggtggttttatagttaatcttgaaaaagttcctctc

SEQ ID NO: 317732 - DNA, 236 bp, Unknown
  Bacterial polypeptide expressing nucleotide sequence isolated from the Sargasso Sea
cgctcacggggaagggcgttaccagtgcagcgacgagaccctgcgccaactgcaggacgacgatgccgttgccctgcgttacggcagcaaccccaacggctccgtggccgacatcgccggcatcaccaacccggccggcaacgtgctggggctgatgccacatccggaacgggcctgtgatgaggccatcgggggcatcgacggacgggccatgctcgaggcgctgctgagctgat

SEQ ID NO: 317733 - DNA, 1056 bp, Unknown
  Bacterial polypeptide expressing nucleotide sequence isolated from the Sargasso Sea
actctcggtattgttcgggaggaccatataattcactcatatgccccagaaaatgcggagaactacgatctaatcctcataggaaaaccgactgacaacagtggctttggaggcgctagcttcgcatcattagaactagaggaagagaaaaaggaacaaaacaagggagctgttcaagagccaaatgcatttttagaaagacaccttttaaaatccacttacgcacttttccaatatcttcaaaacgagaatctgtgtgaaaaagttggatttaaagatctaggtgccggaggagtggcatgcgctagtgtagagctagcagaaacatcaggctatgggtctgaggtttggctggataaggtacacattggaatggagggactccacccaagcgtatatctatgttcagagacccaagagagattcatgtgggtgtctccaccagagttaactgataaaataattacgcactacaatgaagtttttgacctcccaggtgtatcatctggagctaaggcttctgttataggtaaaattcgcaaggacaaacaatatattgttcacaataacggagaaaaaataattgacgcacttgctgaggaggtaacaaaaggattcttatatgacagagagtataaaaagccagatccggaatttcatgaaccatcgttgtcaaccccattagaccataatgcaatactgaaaaaaatgctcgctcatgaaaatattgcatcacgaagcgtggtatatgagtcttatgataaacaagtacaaggcagaacagtttctgaggcaggccaaagcgatagtggtgttatggcaccatttaatagcgataactatccggaggaaattagaaaagtaggcgtcgcactttctacagatcacaatcctagatacagtataattagcccgtaccttgggggtgtgaatgcggttgtagaggcaatgagaaatgtagcggccgttggagcaactccgcatgctatatctgactgcttatgttttggaaatccagaaaaaccccatcaaatgtgggagtttgtagaagcggtc

SEQ ID NO: 317734 - DNA, 298 bp, Unknown
  Bacterial polypeptide expressing nucleotide sequence isolated from the Sargasso Sea
tgaaggtcatgccgagtttgcctcaccagctgcgctacaagctgctgatcaaagcggcacagtggccttacgttttgtcgataactacggcaatgtgactacgcagtatccgtcgaatccaaatggttcgccgctgggtattacctcgttaacgacaaccgatggccgtgtcactattatgatgcctcaccctgagcgggtattccgcactgtggcaaacagctggcacccggatgaatggcaggaagacagcccgtggatgcggatgttccgcaatgctcgagtctggttaggctaa

SEQ ID NO: 317735 - DNA, 565 bp, Unknown
  Bacterial polypeptide expressing nucleotide sequence isolated from the Sargasso Sea
tattttgtacaacaatcttgttaaagatcaatttcaagaattttttagtgatgaaaaagttttcacattaggcgtatgtaacggatgccagatgctctcaaatttaaaagatattattccaggagctgaattttggccaagttttgaaagaaatttatcagatcaatttgaagcccgtttggctcaagtaaaaatttcaaaaacagagtcggttcttttagatgggatggaggattggatgataccagttgcatcagctcatggagaaggaagagctcaatttaataataatgatcttcaggaattagaaaaatccaatcaaatagccatgcgttttgttgattcatcagaaaactcatctgaaatatatcctattaatccaaacggctcacctaatggcataacaggtattacagcttctaatggaagagttaccattatgatgccccatcccgaaagagtttttagaaaagttcaactaagttggcacagaaaagactggaatgagtactctccttggatgcaaatttttataaatgcaaaaaaatttagcgataaaaattaa

SEQ ID NO: 317736 - DNA, 641 bp, Unknown
  Bacterial polypeptide expressing nucleotide sequence isolated from the Sargasso Sea
tatgaacgtattagtcttatcaggttatggtattaattgtgaaaatgaaaccctgcatgcatttgaagtagtaggatttaaaggaaaaattattcatattaatgatcttattcaaaatcctaaacaacttaataactatcaagtattcgctatacctggtggtttttcttatggcgatgatacaggttcaggaaatgcaatggcgaaaaaaattatgaccaatttgtatgatcaactaatagatttttcattaaaagataaattaatcataggtatttgtaatggatgccaaatattaattaatcttggattagttccaagcctaaataaaaaagatccagaagtagcattgattgaaaataaatctggtagctatgagtgtcgatggattgatgtaaaagtaagtaataataaatcaccatggctagcaaatattagtacgctgaacttgcctgttgcccatcaagaagggcaattcatgatacctattaatctactaaaaagtatcaaagctaataaccttattggtttgcaatacattaatcatcataaaaaattagcacaaggtcaatttccttttaatccgaatggatctaaagatgatattgctgcgctaacaaatcaaaacggtaatattctgc

SEQ ID NO: 317737 - DNA, 409 bp, Unknown
  Bacterial polypeptide expressing nucleotide sequence isolated from the Sargasso Sea
agagaagctcttacaggattttctcctttcccggatttccgagggcgtgttattggcggcccatgacctgtccgagggcgggcttctggtcgccttgtcggaaatgctttttgagaatcctgatcttgggctctcggcctccttcgactcgcttggcgaatcagggagcctggcagccttgcttttcggggaaagtcagggtcgtgtcctggtttcggtttccccggtccatgagtccgcactactggaggaggcgggaaaggttggtctgcaggcccatcttgtaggcaagaccaccacctccggatgcatgaaggtttccgtcgatggccgcgaggttcttgatgcgagggtttccgacctacatgagacctgggcccagtccattccgtcaatgatgagccaatga

SEQ ID NO: 317738 - DNA, 853 bp, Unknown
  Bacterial polypeptide expressing nucleotide sequence isolated from the Sargasso Sea
gctgactgaaaaaataatttcgcactacaatgaagtttttgatcttccgggggtatcatctggagcgagagcatctgtgataggtaaaattcgtaatgacaaacaatatattgttcacaataatggggaaaaaataattgacgcacttgctgaggaggtaacaaaagggtttttatatgacagagaatataaaaagccagatcaggaatttcatgaaccgtcgttgccaagcccattagaccataatgcaatactgaaaaaaatgctcgctcatgaaaatattgcatcacggagcgtggtatatgagtcttatgataaacaagtacaaggcagaacattttctgaggcaggccaaagtgacagtggtgttatggccccatttaatagcgataactatccagaagaaattagaaaagtaggagtcgcactttctacagatcacaatcctagatacagtataattagcccgtatttgggtggtgtgaatgcggttgtagaggcaatgagaaatgtagcatccgttggagcaactccacatgctatttctgattgcttatgttttgggaacccagaaaaaccccatcaaatgtgggaatttgtagaagcagtaaggggtgtctctgatgcatctatcggcataaagttaaaagaaaaccaagaccacccaaccccaataatcgctgggaacgttagcttttacaatgagtctaagtcaggcgctataccacccagtccgatcgttagctgcctcggaaaaattaacaacgttaaaaaatcagtgtcaatgtcatttaagaatgaaacctctattatcctaatggttgggtcaagaaaaaatgaacttggtggaagt

SEQ ID NO: 317739 - DNA, 226 bp, Unknown
  Bacterial polypeptide expressing nucleotide sequence isolated from the Sargasso Sea
gaattatattgacaatagcaacaaagtaacatctaaatatccttataatccatatggttctaaaaatggtgctaccgcttttactaatttggatggtagaataactattatgatgccacatcctgagagattgttttatctaaatcaattttcatacaagccgtcagactggatgacctcaccttgggaaaacttttttatgagcgcaagggagtgggttaaatga

SEQ ID NO: 317740 - DNA, 325 bp, Unknown
  Bacterial polypeptide expressing nucleotide sequence isolated from the Sargasso Sea
aggttcgcgtatgcctattgctgtgtcgcacggtgaaggtcaggctgaatttgccaatgacaacgcgctgtcacaagtaggcgcgcaggtggcgatgcgttacgtagacaactacggcaagccaaccatgcaatatccggcaaacccgaatggttcaccgcaggggatcacaggtctaacttcactagacggacgcagcaccatcatgatgccgcaccctgaacgtgtattcagagccgtggcaaactcgtggcgtccagacgattggcaagaagatggtgcgtggatgcgtatcttcagaaatgcccgtaaatttgttgggtaa

SEQ ID NO: 317741 - DNA, 895 bp, Unknown
  Bacterial polypeptide expressing nucleotide sequence isolated from the Sargasso Sea
tatggctccattcaacagtgatgaatatccagaagaaatcagaaaagttggaattgccctttcaacagatcataacccaaaccaaagtaaaataaatccatatttaggcggagtaaatgccacgctcgaagcgatgagaaatgtcgctgctgtaggagctactccacatgctttatcagactgtctatgctttggcaaccctgaaaagccccatcaaatgtgggaatttgttgaagcagtaagaggggtttcagatgcatgtaaagaagtaaaattaaaagaacacccagagtctcctaccccgataatagcaggcaatgtcagcttttataacgaatcaaaatcaggatcaataccaccaagcccaattattagttgtttaggaaaaatgaatgatgtgaataaagcaatcacgatgtcttttaaaaaaattaaatcaaaaatatttatggtaggaaaaagaaaggatgaacttggaggaagcttatattatagtctttttggtgagttgggagctaatgtcccgagcccagatttgaatgaagttaaagatcaaatatatgctatcacagattgtattgataatgaactaattgaatcatgtcatgatatttctgatggtggaattgctgttgcattatctgaaatgacttttgaaaataatattggatgctctgtaactataccaggaacattatcaattgaaaagttgctcttttcagaaactggtggcttcattattgaagtaaaagattcaaagattaaagacgtaaatgaggtttttaacaaccataatatcaatttggatttaattggagaaacctccaaagatcaaaaattagtagtcaacgatgcaatcaatatggaagttgaagaaatgaaaagtctttggata

SEQ ID NO: 317742 - DNA, 263 bp, Unknown
  Bacterial polypeptide expressing nucleotide sequence isolated from the Sargasso Sea
tttgaaaagtgcacttatcatttttcctgggtcaaattgtgatcgtgagcttcagattgcgttagaaacagttggcatgcaagttgaacgagtttggcataaggaaactaatctgccagaaggtgtagatattgtgtttctacctgggggattttcatttggtgactatttacgaccaggtgctatagctgctagttccagaattttacgatcagttgtttcttttgcaaataagggaggttacatcgttggaatatgtaatg

SEQ ID NO: 317743 - DNA, 934 bp, Unknown
  Bacterial polypeptide expressing nucleotide sequence isolated from the Sargasso Sea
ttcaatctttcagataaaagtaaaatcattccaaaactcttttctgaagaaattggtcttgttgtagaggttccaaataagcatcttaaaggtgtaaaagactattatcaggaaaaagatatctactgcgaagagattgccaaaaaatctgttgagaaaacattcaaattgataaattttaatgaagagattttttcagttgatattaacactcttttcaaatcctgggacagcatgtcacaccaagttcaaagcgaaagagatagcaaaacgtgtgcatctgaggaacaagataactttgtaaactttgattattttattactccagagattaactttgtaaccccaaagatttctagttccctttttggtaaaaagcctcgagtagcgcttttaagagaacagggaataaacggccaatacgatatggcagcagctttaatggcatctggttttgaagttgaagatttacacatgagtgaaattggagaaagagtaaaagacctaggcgcttttaatggattggtaataccaggaggattctcatatggtgacgtaatgggagcaggacgtggcatggcaaattctattttattaaaacccaaaatgaaaaagatttttaaaagattttttgaagataaaacaaagtttgcttttggcgtatgtaatggatgtcagttcttatcaaatttggcagaaattatcccaggtgcagacgggtggccttcatttaatagaaatacttctaatcaatacgaatgtcgtttagtacaggtaaaaattgaaaaatcacaatctattttgatgcaagggatggagggaagcaccataccagttatggtatctcatggagagggcagagtcgattttaaagagaatcttgtaagcaaatctattgctcaatatgttgacccaagacataaaccaacaagca

SEQ ID NO: 317744 - DNA, 421 bp, Unknown
  Bacterial polypeptide expressing nucleotide sequence isolated from the Sargasso Sea
agataatacaaataaaaatgaagaacaaaatgaaaaagtgaaaaacatagatttatggaaggtatatgataatagtataggttgtagaacaattaaaggtccattagaatcaggaagttactcaatattagatttaccagaagtaaataaaagattagtattaacatggggaaattttcaagattgtcttaatgaaatgaataaaaatgaagctgagcccaaggcaattataaattgtttaaattttggaagtcctgaacactgtattaaagatataagggaatcaatagaaaaattaaatgagaattgtaaaaaatataaaatacctattataggaggtaatgtaagtctttataatacaactgacgacatatctataaatcctactgtagtattagttatgttaggattaaaagattaa

SEQ ID NO: 317745 - DNA, 730 bp, Unknown
  Bacterial polypeptide expressing nucleotide sequence isolated from the Sargasso Sea
ttgtttaaatttggaaacccagaaaaagatgaaataatgggtcagtttgttgaaacaattgatggtatgtcacaagcttgtaactatttaaactttcctgttgtttcaggaaatgtttctttttataacgaaacaaaaaataaaggtatagctccaacaccaacgattggaggtgttggtttaattaaaaatttaaatctcatgatgacaaatgattttaaaaaagttgataactatatattcgtaattggtaaaacttcgggacacctttatcaaagtgaattttttagagaagttgtggaaatcaaaaatggacctcctcctgaagtaaatttatttaacgaaaaaaataacggtttaatagttcaaactcttatagaacaaaaacttttaaattcagttcatgatgtatcatccggtggaattattatagccttatctgaaatgtgtattacaggtaaaattggtgctaaaattaaaatacctcaaaaaaacattaccccgcatgaatatttgtttggcgaagatcaaagtagatatttggttgaaatagacaaacaaaataaaactaatgtaagcaaaattttagaaaaaaataatatatattacgaaattattggtataactcagaaagatagtttagaaataaataatgaatttagtataaaattagaagaacttagagaactaaattctttttggtttaaaaattattttaaagaaaattaat

SEQ ID NO: 317746 - DNA, 463 bp, Unknown
  Bacterial polypeptide expressing nucleotide sequence isolated from the Sargasso Sea
atgacctacagaaatgaaattgttgatttctctgttttaaaagcagaagagattaaagacaagctctcagaactaaatattcctctaaccgtatcagaagctttgaaaattcaaacccaaatgttaaagcgaccaccatctataacagaactagttttgttttcgattcaaggttctgagcattgtagctataaaagtagcaggactcatcttaaaaattttataacaactggccctgacgtcattcttggggccaaagaggatgcgggcgttatatcaatcaaaaaagataaaaagggaaacaagtggtgcattgtaatgagccacgaatctcacaaccacccttcacagattgtaccttatgaaggcgccgcaacgggtgttggtggaaatgtgagagatgttatgtgcatgggcgcagaagtcatatctaattctgattctttaaggtttggtaattaaa

SEQ ID NO: 317747 - DNA, 880 bp, Unknown
  Bacterial polypeptide expressing nucleotide sequence isolated from the Sargasso Sea
atgggagatacaatacaaaaacccggatctgattctggagtagtcagagtgcatggtaccaataaggctgttgctacatccgtggactcatctgctatatattgttatgcacacccactcacgggaggaaagcaagtagtttgtgaaagttggagaaatttaatttcttgtggatcaaggccaatagctattactaattgtttaaattttggcaaccccgagaaagaaaaaaatatgggagaatttgttgagtgtgttgagggaataaatgaagcaagtaaatttttagattatccagtcgtttcgggaaatgtatccttttataatgagacaaaagataaaggtattaaacctactccagcaataggtggggttggtttgattaaaaactacaaaaaaatggtcactatgaacctaaaaaaaaaagataatttaatattagttattggtaaaacagaaggtcatatagaacaaagttcctttgcaagaaatattttaaacgaaaaaaaaggtcctccgcctgaaattaatttgtttaatgaaaaaaacaacggtgaaacattattaaaattaattgataatgggttaataagttctgctcatgatgtctcactaggaggtattattactgcggtttcaaaaatggcaataaaaggtaaaaaagggtttaaattagatagacttaaggttttaataaataaattcgattattactttggtgaagatcagggaagatatataatagaaattgaacgtacaaatctcgaaaaagttcaaaaagttttaaaagaaaattcagtacattatgatgagcttggattggtaacagaaaatgagataataatagataaagagccaattctacatatgacgattgata

SEQ ID NO: 317748 - DNA, 712 bp, Unknown
  Bacterial polypeptide expressing nucleotide sequence isolated from the Sargasso Sea
aaattaaaaattaaagatattctaagtaaaattttatctaatccaaatgtttgtagcaaagagtggatttggcaacaatatgatcatactgtaatgggtgatacaattcaaaaacctggtggtaattctggagtagtaagagttcatgagactgataaagctgtagcggctacagttgattcttcagctgtttattgctgggcacatccacttaccggaggaaaacaagttgtttgtgaaagttggagaaatcttatttctgttggtgcaactccaatagcaattacgaattgccttaattttggaagtccggagaatgaagataacatgggtgaatttgttgaatgtgttcaaggtataggagaggcatctaaatttttagaatttccagttgtttcaggaaatgtttctttttacaatcaaacaaaagaagttggaattaaacccactcccgcaattggtggtgtaggccttatcaaaaactataaacaaatgataactatggattttaaagaaattaataatctagttttaataataggtaaaactgaaggtcatatggatcaaagtttatttgcaagaactattttagatgaaaaaaatggacctccgcctgaaataaatcttttcaacgaaaaaaataacggtgaaacattactacaattgataaaaaatgattttataaaaagtgctcacgatgtttctttaggag

SEQ ID NO: 317749 - DNA, 226 bp, Unknown
  Bacterial polypeptide expressing nucleotide sequence isolated from the Sargasso Sea
taataaccataaaaaattagcaaaaggtcagtttccctttaatcctaatggatctaaagatgatatagctgcgttaacaaatccaaatgggaatgttcttgcaatgatgcctcacccagaaagagcattttataattatcatgttcctaattggcaaaacaatacttcaaaaaaattcggtgatgggtataaaatttttatgaacgcaaaaaaattctttgcataa

SEQ ID NO: 317750 - DNA, 799 bp, Unknown
  Bacterial polypeptide expressing nucleotide sequence isolated from the Sargasso Sea
ctctcctgggggaaaacagattgtatgtgaaaattggaggaatttgatatctgttggagcaaaaccattggctatcacaaattgtttaaatttcggaaatcctgaaaataaagaaatcatgggagagtttgcagaatgcttggagggtataaaagaatcttgtgaatttttaaactacccagtggtttctgggaacgtttccttttacaacggaacaaataaaaaaaatattaaacctactccagttataggaggagttggattgataaataaattatcttaccctctagaccataattttaaaaaggaaaacagtattattatactaattgggaaaacttttggccatcttgagcaaagctgctttttaaaagaaaattattctattgtagatggaaggccaccagaggttaatttgttaaatgaaaaaaataatggtgaactagttttaaaattgattaataagaacttaatcctttctgctcacgatgtctcgagtggaggtttaattactgctttatgtgaaatgacatttgcaaatagtataggtgttaagactgaaaaacctaagaatttaagaaacttgacacaatatttattcggggaggatcaaggaaggtatattttagaaattgacaaaaaaaattacacaacagtagagaaaataattaaaaatgcagatgtatatttcgaaaacattggaattactcaaaaaaattattttgaaatcagtggtgaaatgaagactgcagtaaatgacctgtttaaagtaaataatcaatggtataataatttctaa

SEQ ID NO: 317751 - DNA, 577 bp, Unknown
  Bacterial polypeptide expressing nucleotide sequence isolated from the Sargasso Sea
atgcttggcagagccccatcaatttcagaattggttttgttttccatacaaggatcagaacattgtagctataaaagtagtagacaacatctaaagcaattcaccacagagggacctgatgtgatattaggagcgaaggaagatgctggggttgtatcagttgctaaggacgatgagggaaatcgatggtgtattgtaatgagccacgaatcacacaaccacccatcgcaaattgtgccatatgaaggagccgctaccggggttggtggaaatgtgcgtgatgtaatgtgtatgggcgctgaagtaattggatgtaccgactcgtttcgatttggtgacatatccaacaataaaacaaagtggatacatgatggcgtagtatctggagtagcgggctatggaaacccattagggataccaaacatcggtggggatctatattataatgcggggtacaatgaaaactgtctcgtaaccttagttacacttggtatagtccgggaggattatataattcactcttacgcaccacaagaagcaagtggatacgatctgatccttgtgggaaagccaacgg

SEQ ID NO: 317752 - DNA, 910 bp, Unknown
  Bacterial polypeptide expressing nucleotide sequence isolated from the Sargasso Sea
atttatccaaaaaattatcaagataaagatatatatgaaagtttacaaaaaatattaacaagtcccaataactctgaaaaaagttggatttgggagcagtatgaccaaacagttatgggagatagtatacaaaagcctggagggaatgctggtatagttagaattcatggcacaaacaaaggagtagctttaactgttgattcatcagcccattactgtttagcaaatgctataactggaggaaaattagttgtttgtgaagcctggagaaatcttatttcagtaggatctaatccaatagctataactaattgtttaaattttggtaatcctgaaaaagaaaaaataatgacacaatttgtagaaactattgatggaatttctcaagcttgctcgtatttaaatttcccagttgtttctggaaatgtatctttttacaatgaaacaaaaaataaatccatatcacctaccccaacaattggaggtgttggccttataaaaaatttaaatcatgttatgactaataattttaaagatattgaaaataatatattaattataggaaaaaccttaggccatctttatcaatctgaattttctcgtgaagtattaaattttaaagaagggccgcctccggaaataaatttattcaatgaaaaaaacaatggtatggctgttttaaatctaattactaataaattagtcgactcggttcatgatatttcttctggcggaattttagttgcactgagcgaaatgtgtattttgaataaaattggagctttgataaaattacctaaaaataatataaaaatacatgattatttatttggagaagatcaaagtagatatataatcgaggttaaggaaaaaaatatgaataaagtaagtaaattttttgaaagataat

SEQ ID NO: 317753 - DNA, 925 bp, Unknown
  Bacterial polypeptide expressing nucleotide sequence isolated from the Sargasso Sea
aaaggcaataagaaattatttaaaaaaacaaaacgaaagccttctgatgttgaaattgaaacaatagcacaaacttggtctgaacattgtaaacataaaatattctcagcagaaattgatgatattaaagaaggtatattcagaaaatatattaaaggtgctactgaaaaaattataaaactaagaaaagataatttttgtatctctctttttacagataatgctggtggtattgaatttaataaagattggatagtatgtcataaggtagagacacataatacaccctctgcattagatccttttggaggtgcaataactggcatagttggagttaacagagattgtcttggatttggtaaaggtgcaaaacctattgcaaacacttatgcatattatttatctttcccaaataaaaactatcaattgtttcgtcaaaaatataatgatcctatgcttcctgctaattttattgctaaaggtattattagtggcgtaagagttggaggtaactgttcaggcattccaacaccacagggaaatatatattttgacgatagatttgctggaaagcccctagtattttgtgggactgttggacttattcctaagaagattaaaggtaaattagctcataaaaaaaaagctaatcctggagatattatcttaatggttggaggtagagttggaaaagatggtattcatggtgcaacattttcttctgaggaactcgatccaaacagtcctgtatcagcagtacaaattggtgatcctataactcaaaagaaaatgtcagatgttattattagagaattacgtaataaaaatatgtattcaagtataactgataacggagctggggggctatcctcatcaataggtgaaatggcaaaagaaagtggaggttttgaagtaaatctgaaaa

SEQ ID NO: 317754 - DNA, 886 bp, Unknown
  Bacterial polypeptide expressing nucleotide sequence isolated from the Sargasso Sea
atggatttggaacaatacgatcagactgttatgggagatactgttgaaaaacctggatcggactctggaattgtaagaatacatggatctagtaaagctgttgcaacttctgtagattcgtcggctatatattgttatgcacatccacttacaggaggaaagcaggtcgtctgtgaaaattggagaaacttaatttcttgtggatcaaaaccaattgctattactaattgtttaaactttggtaacccagaaaaagaggaaaatatgggagaatttgttgagtgtatagaaggaatcaatgaagctagtaaatttttagattaccctgtggtctcaggaaatgtatctttttacaatgaaacaaaagataaaggcattaaacccactcctactataggtggtgttggtttggttacagattacaaaaaaataatcactatggacttaaaaaatattaataatcttattttagtagtgggaaaaacggaaggtcacatggaacaaagtatatttgctagaaatattttaaatgaaaaaaaaggacctcctccagaaattaatctatttaacgaaaaaaataacggtgaaacaattttaaaattaattaatgaaaaattaattaaatcaactcatgatgtttcattaggtgggatcatcacggcagtttcaaaaatggcaataaaaggaaaaaaaggttttaaattaattaaacctaaagtattaactagtaaatttcattattattttggagaagatcaaggaagatatataatcgaaattgaacctaataatcttccaaaagtacaaaaaattttaaaagaaaattcaattcattatgatgaaattggaattgtaacaaaaaatggaggtaattatagacaaaaga

SEQ ID NO: 317755 - DNA, 313 bp, Unknown
  Bacterial polypeptide expressing nucleotide sequence isolated from the Sargasso Sea
gcctattgctgtgtcgcacggtgaaggtcaggctgaatttgccaatgacaacgcgttgtcacaagtaggcgcgcaggtggcgatgcgttacgtagacaactacggcaagccaaccatgcaatatccggcaaacccgaatggttcaccgcaggggatcacaggtctaacttcactagacggacgcagcaccatcatgatgccgcaccctgaacgtgtattcagagccgtggcaaactcgtggcgtccagacgattggcaagaagatggtgcgtggatgcgtatcttcagaaatgcccgtaaatttgttgggtaa

SEQ ID NO: 317756 - DNA, 616 bp, Unknown
  Bacterial polypeptide expressing nucleotide sequence isolated from the Sargasso Sea
atgaacgtattagttttatcaggttacggaattaattgtgaaaatgaaactttacatgcttttgaagttgttgggtttaaaggaagaattgttcatgttaatgatcttattcaaaatcctaaacaacttaataattatcaagtattcgctatacctggaggtttttcatatggcgatgatacgggttcgggaaatgcaatggcaaaaaaaattatgaccaatttgtatgatcaactaatagaattttcatcaaaagataaattaaccataggaatttgtaatggatgtcaaatattaattaatcttggtttggttccaaacctaaacaaaaaagatcctgaagttgcaatgattgaaaataaatctggaagttatgaatgtcgatgggtagatgtaaaagtaagtaatagtaaatcaccatggcttaaaaatattaatactttaaatttgcctgttgcccatcaagagggtcaatttttgatacccttaaaaatacttaaaagtataaaagcaaaaaatcttattggcttacaatatattgatcagaataaaaatttcgcaaaaggtagattcccatttaatcccaatggctccaaagatgacatagctgctttaa

SEQ ID NO: 317757 - DNA, 702 bp, Unknown
  Bacterial polypeptide expressing nucleotide sequence isolated from the Sargasso Sea
atcaattatatctattcaagatatgggagcagcaggattaacttcatctagtattgaaatggcttcgaagggaaatttaggtattgagttaaatttaaataaagttccatgtcgagaagaaaaaatgactccatacgaaattatgctttctgaaagtcaagaaagaatgttaattgttttagaaaatggtaaagaaacagaagcaaaaaagatttttgataaatggaatttagattttgctgtaataggaaagactactaactcaaaaaaaatcgaattattttttgataataataaagtggcagaaattcctataaatatactgacagaaaatgcacccatttatgatagaaaatggaaaaaaacaaaacttccacaaaaaataaaatttaataaagatgattttaaaaaatttaaaactgctgaagttcttaaaaaaatattaagcttaccaaatatttgtagtaaagaatggatctggcaacagtacgatcatacggtaatgggtgatactatccaaaaacctggttctgactctggtgttataagagtgcatggtaccaataaagctgttgcaacatcagtagactcttctgctgtgtattgttacgcccatccacttacaggcggaaaacaagttgtttgtgaaagttggagaaatttaatttcatgtggatctagaccaattgctattacaaattg

SEQ ID NO: 317758 - DNA, 868 bp, Unknown
  Bacterial polypeptide expressing nucleotide sequence isolated from the Sargasso Sea
catacagttatgggtgatactgttcaaaaaccaggcggtgactctggtgttgttagaatacatgggactcaaaaagcaatagctgcttgcatagactcatcagcttcttattgtttttcccatcctagcacaggaggaaaacaagttgtttgtgaagcgtggcgtaatttaatttcagtaggcgcacgcccaatagctataactaactgtttaaattttggtaatcctgaaaaagaaaaaaatatgggtgaatttgttgaatgcgttgaaggaatttctgaggcaagtaaatatttagattttcctatagtttcaggaaatgtttctttttacaatgaaacaaaagataaaggaataaaacctacaccaacaattggtggtgttggattaattaaaaattataaaaaaatgattagtatggattttaaaaaacaagataacatcgtgtttgttataggtaaaactgaaggccacttggaccaaagtatatttgcaaaagatattttaggtgaaaaaaaaggtcctccgccagaggtgaacttatttaatgaaaaaaatattggcgaaacattgttaaaacttatcaatgaaaatctcattgagtcggctcatgatgtttctttaggtggaataattgtcgcaatttcaaaaatgtgtattaaaggaaatatgggaataaaatttaaaaaatttaaaagtttagtaaataaatttgaatatttatttggtgaagatcagggtagatatattgtggaaattaataaaaataatataaataaagtcacagaaatattaagaaaaaactcggtccattttgatgaacttggaattttaaaagaaaaagacttagaagttgaaggtaaagtaa

SEQ ID NO: 317759 - DNA, 733 bp, Unknown
  Bacterial polypeptide expressing nucleotide sequence isolated from the Sargasso Sea
aatttagatttttcaataattggaaaaacaacaaatagtaaaaaaattgagcttttttatgataaaaaaaaagttgcagatattcctgtagatactttggtggaaaactcaccaatgtacgacagaaaatggaaaaaaactaaattaccaaaaaaaaacaaagtcaacaaagatacttttaaaaatttaaaaattttgaatgtgttaagtaaattattatccaatccaaatatttgtagcaaagaatggatttggcaacaatatgatcacacagtaatgggagatacaattcaaaaacctgggagtgacgcaggtattgttagagttcatggaactaataaagctgtagcagctactgtagatgcttcagcttcatattgctacgctcatccattaacaggaggaaaacaagtggtttgtgaaagttggagaaatttaatttcagttggggcagaaccaattgcgataacaaattgtttaaattttggaaatcctgaaaaagaagaaaatatgggtgaatttgttgaatgcgtccaaggtcttggagaggccagtaaatatttaaatttccctgtagtttctggaaacgtgtctttctataaccaaacgaaggacaaaggtattaaaccaactccatcaattggaggtatcggtttaataaaaaattataaagatatggtaacaatgggcttcaaaaaagctgataacgttgttttggttgttggtaaaactg

SEQ ID NO: 317760 - DNA, 415 bp, Unknown
  Bacterial polypeptide expressing nucleotide sequence isolated from the Sargasso Sea
aatttatcagatcaattggaagcccgttgggctcaagtaaaaatatcaaaaacagagtccattcttttagatgggatggaggattgggtgataccagttgcatcagctcatggagaaggaagagctcaatttaatagcaatgatcttgaggaattagaaaagtctaatcaaatagcgatgcattttgttgattcatcagaaaactcatctgaaaagtatccaattaatccaaacggctcacctaatggcataacaggtattacagcttctaatgggagagttaccattatgatgcctcatccagaaagagtttttagaaaagttcaactgagttggcacagaaaagattggaatgaatactcgccttggatgcaaatttttataaatgcaaaaaaattcagcgataaaaattaat

SEQ ID NO: 317761 - DNA, 430 bp, Unknown
  Bacterial polypeptide expressing nucleotide sequence isolated from the Sargasso Sea
atggctttcacaaaagaaattgttgatttttctagtcttgacgattttcaaattcaaaaaaagttaaataagttcaatattcctctctctatagaagaagcaaaaaaaattcaatatgatatgcttggccgagctccttcccttgttgagcttgttcttttttccatccaaggctcggagcattgtagctacaaaagcagtagaaaatatttaaaacaatttactacagaaagcccagatgttgtcttgggagcaaaagaagacgctggtgttgtttctattgcgacagacaacgaaggaaacaggtggtgcattgtaatgagccatgaatcacataatcatccatctcaaattgtgccttatgaaggcgcagcaacaggtgttggtggtaacgttcgagacgttctgtgtatgggggctaaagtaattg

SEQ ID NO: 317762 - DNA, 863 bp, Unknown
  Bacterial polypeptide expressing nucleotide sequence isolated from the Sargasso Sea
agattcaggtgttgtgagagttcatggaactaataaagctgtagcagcctctgtagattcgtcagctgtatattgttgggcacacccattaactggaggaaaacaaattgtagcagagagttggagaaatttaatttcagttggtgcaactccaatagcaataactaattgtcttaactttggcagtccagaaaacgaagataacatgggagagtttgttgaatgtgttcaaggaattggtgaagcaagtaaatatttaaattttccagtggtctctggaaatgtatctttttacaatcaaacaaaagatgttggaattaaacctacaccttcaattggaggtgtgggattgattaaagattataaaaaaatgattacgatggattttaaagaaattgataatttggtattagttattggaaaaactgaaggtcatatagatcaaagtttatttgctagaacaattttagatgaaaaaaatggcccgcctccggaaataaacctttttaatgaaaaaaacaatggtgagtctttgttaaatttaattgataaagattatattaaaagtgctcatgatatttcattaggaggtttgataaccgctttgagtaaaatgtgtatcaaaggaaacaaaggaattaagcttgataaaccaaaaaatttaataaatgaaattgaatattattttgctgaagaccaaggaagatatttaatcgagattaaccctaaagattttgaaaaagtaactgatattttaaataaaaattcagttcaccatgaaaaattaggagttataatcaaaaatgacatgataattaatgataagacaaaagttacaattgacgaattaaaatcttataata

SEQ ID NO: 317763 - DNA, 727 bp, Unknown
  Bacterial polypeptide expressing nucleotide sequence isolated from the Sargasso Sea
ttgtttaaattttggaagtcctgaaaatgaagtaaatatgggtgagtttgtagagtgtgttcaaggtataggggaagcctgtgaatatttaaattttccagtcgtatctggtaatgtttctttttataatcaaaccaaagataaaggaattaagccaacaccttcaattggaggtgttggcttaattaaaaattacaaaaaaatgataacaatgggttttaaagagctcaataacattgttttggtaataggaaaaactgaaggtcatattcatcaaagtttatttgcaagaaatattttagatgaaaaaaacggacctccaccagaaataaatttatttaatgaaaaaaataatggagaaactttactgaaattaatagataataatttagtcaagagtgctcatgatgttgctttaggtggaataattactgcagttgcaaaaatgtgtattgttggaaaaaaaggaatcaatataaaaaaacctaaatatctaataaatgaaattgaatatttctttgctgaagatcaaggaagatacattttagagataagtgaaaaaaatttaaaaaaagttactgatatattaaataaaaatgcagtacattttgatgaacttggaactatcaatgaaaatgagctatatattaacgaaaagacaaaagttacaattgacgatttaagatcttctaataaaagatggttaatagaatatatgagtaaataa

SEQ ID NO: 317764 - DNA, 787 bp, Unknown
  Bacterial polypeptide expressing nucleotide sequence isolated from the Sargasso Sea
gactcttcggctgtctattgttgggctcatccgcttactggtggcaaacaagttgtagctgaaagttggagaaatttaatttcggtgggagccactccagtagcaataactaattgtttaaattttggaagtcctgaaaatgaagacaacatgggggaatttgttgaatgtgttcaaggtattggtgaggcgagtaaatatctaaattttccagtagtgtctggaaatgtttctttttataaccagactaaagaagtagggatcaaaccaacaccaacaataggtggagtaggtttaattaaagattataaaaaaatgatcactatggattttaaagaaattaataacttggtattaattattggaaaaactgaaggacatattgaccaaagtttattctctagaacaatattagatgaaaaaaatggccctcctcctgaggtaaatctatttaatgaaaaaaataatggtgagtctttactcaaattaattgaaaaagattatgtaaaaagtgcacatgatgtttcattagggggtataattactgctattgctaaaatgtgtataaaaggaaacaaaggtatagagttaaaaaaatccaaaaatttaatcaatgaaactgagtttttttttagtgaagatcaaggaaggtatataattgaaattaatcagaaagattcgagtgaagttagtagtattttgaataaaaattcagttcatcacgaagaattaggtattattatcgataaagacatgattatcaatgaaaagacaaaagttacaatga

SEQ ID NO: 317765 - DNA, 873 bp, Unknown
  Bacterial polypeptide expressing nucleotide sequence isolated from the Sargasso Sea
taagaattcatggtaaggaaaaagctattgctgtctctgtagactcatctgcaaactattgcaaagctcatcctttaactggaggcaagcaaattgtttgtgaaaattggagaaatataatttcggtaggcgctaaacctatagctataacaaattgtttaaattttggtaatcctgaagacccaaaaataatgggagaatttgcagaatgtttaatgggtataaaagagtcatgtgaatttctagactacccagtggtttcaggaaatgtatctttttataacggaacaaataaaaaaaatatttctccgacgcccgtaattggaggaattggagtaattcaaaaactaaaaaaacctatgagtcaccaatttaaaaaagcaaataataatatacttgtgatcggtaaaacgtttggccacttagaacaaagtgttttcttagaggaaatttactctatcatagagggtaaaccaccagaaataaatttaattaatgaaaaaaataatggagaaagtgttttagaaattatcaagaaggatttagcagaatctgtacatgatatttctagcggcggcttactaattgcattagctgaaatgtcaatgggatctgattatggtgtaaaaattaataaaccaaaaaaattaacaaatttatttaaatatttttttggtgaagatcaaagtagatatgttttagaaattaataaagaaaatatgaaaaaagttgaagaaatattaaagaataataatattttttatgaaaatattggtttaactcaaaaagattattttgagatagaaaaagagatgaaaataagtgttaaagaactatataaaataaataatcagtggtataataattattaat

SEQ ID NO: 317766 - DNA, 433 bp, Unknown
  Bacterial polypeptide expressing nucleotide sequence isolated from the Sargasso Sea
ccgagcattggccgaatttctctccaacgaatcgggccagtttgaatcccgggtcgtgatggtcgacgtcctggatagtgattcagtcttgtttcaggatatggcaggcacccgcgttcccgcagtcgtcgcgcacggcgagggtcgggccgacctgggtcaggatatccttgacacccttcgtgggcgcaaccagatcagtttgcagtttgtggacaattacggagaaagggcggcccgctatccttttaatcctaacggctccactgaaggagtcacgggactttgcgcagcaaacggaagggtgacgatcatgatgccccatcccgagaggaatttccgaaccgttacaaactcgtggcaccctgaggattggggtgagcacggcccctggttgaggatattccagaacgcgcgggcatttgtcgactga

SEQ ID NO: 317767 - DNA, 601 bp, Unknown
  Bacterial polypeptide expressing nucleotide sequence isolated from the Sargasso Sea
tctaaaaatttaattttaaattataatgataaagaagttgctaacttacctcttagttctttatcatctgagtcaccagtttatgaaagaaaatggattaaaagtatatcaccaaaaaaaatcttgccagaaaaagattataaatcattaaatataattgaatgtttaaaaaaaatactaagtagtccaaacaattcaaataaaagttgggtttgggaacaatatgatcatactgttatggctgatacagttcaaaagcccggtggtgattccggtgttattagaattcatggtcaaaataaaggagtagctgttactgtagattcttcagctcattattgtttagcaaatcccttaaatggtggaaagcaagtagtttgcgaagcctggagaaatcttatttcagctggatccagtccattagcaattacaaattgtttaaactttggtaatccagaaaaagaaaaaataatgggtcaatttgttgaaattattgatggtatttcacaagcttgtacttacttagattttcctgtcgtttccgggaatgtttctttttataatgaaacggcaaacaaatctatttcacctaccccaacta

SEQ ID NO: 317768 - DNA, 863 bp, Unknown
  Bacterial polypeptide expressing nucleotide sequence isolated from the Sargasso Sea
aatggagggtctccacccaagcgtatatctatgttcagagacgcaagagagattcatgtgggtgtcgccctcagagttaactgaaaaaataatttcgcactacaatgaagtttttgatcttcctgtggtatcatctggagcgagggcatctgtgataggtaaaattcgtaatgacaaacaatatattgttcacaataatggggaaaaaataattgacgcacttgctgaggaggtaacaaaagggttcttatatgacagagagtataaaaagccagatcaggaatttcatgaaccatcgttgccaaacccattagaccataatgcaatactgaaaaaaatgctcgctcatgaaaatattgcatcacgaagcgtggtatatgagtcttatgataaacaagtacaaggcagaacagtttctgaggcaggccaaagtgatagcggtgttatggccccatttaatagcgataactatccagaagaaattagaaaagtaggagtcgcactttctacagatcacaatcctagatacagtataattagcccatatctgggcggtgtaaatgcggttgtagaggcaatgagaaatgtagcagccgttggagcaactccacatgctatttctgattgcttatgctttgggaacccagaaaaaccccatcaaatgtgggaatttgtagaagcggtaagaggcgtatctgatgcatctatcagcataaagttaaaagaaaaccaagaccacccaacaccaataatcgctgggaatgttagtttttataatgagtctaaatcaggcgctatcccacctagcccaatcgttagctgccttggagaaattaataacgtggaaaaaacagtgtcgatgt

SEQ ID NO: 317769 - DNA, 808 bp, Unknown
  Bacterial polypeptide expressing nucleotide sequence isolated from the Sargasso Sea
gttcatggaagtaaaaaagctatagcggcatctgtagattcttcagcatcatattgtttttcacatccactcactggtggaaaacaaatcgtttgtgaaagttggagaaatcttgtttcagttggagctaaacctattgcaattacaaactgtttaaattttggcaatcctgagaaagaaaaaaatatgggagaatttgttgaatgcgtggaaggaatagccgaagcaagcaaatatctcgacttcccagttgtttcaggaaatgtttctttttataatgaaacaaaagacaagggaattaagccaactcctgctattggaggagtagggttaataagtgattataaaaaaatgattacaatggattttaaaagtacagggaactctgtttacgtaattggaaaaacagaaggacacttggaccaaagtatttttgctagagatttgctatctgaaaaaaaaggacctcctccaaatattaatttatttaatgaaaaaaatattggagaaaatattctaaatttaataaataaaaatctgattgttagttgccacgatgtatctttaggtggaattttaactgctgttgcaaaaatgtgcattaaaggaaataaaggtataaaaatatatcagttaaaaagtcttataaacaaatttgaatacttttttggggaagatcaaggacgttatttagtagaaatccctaaggaaaatcttgaaaaagtaaatcaaattttaaaaaaaaattccgttcactatgatgaattaggcgcaatagacgaaaaattgttaagttttaataatgaaa

SEQ ID NO: 317770 - DNA, 660 bp, Unknown
  Bacterial polypeptide expressing nucleotide sequence isolated from the Sargasso Sea
caaatcccaatggatctgtgaataatattgccgctattagcaatagcagtggaaacgtaatggcgatgatgccccatccagagcgaactacaaacggtgatgcaattttttcttcaatgaaagaatacattgatgaaaattatcccactattaatcaaccgctaagtttttcaataactaatcataaatcaaaagaattaaatatagatgataaatcgaccgaatggattattgatttaattattacagacaatgaagcaaagtctattaatacggcattaaatcatcttggctttgatatagaggttaatagacaaatacattgggaaataaatatagagggagaaccaactaatgttttaaataaaataattagttcgggagagctatttaattcaaataaagaatatattgtagataaaaaagaaagatatgatgcttcatttttagtaagacctaatgaagatatatatggaagagctaaatatgaatcccttacaaatcgatttgatataaaagaaatttcttatataaagcgaggagtaatatggaatataaattccaaaagcggtaatttaaatgatgaaataaattcaattttaacaacaaacatattttttaacccccattgctatgaatactatgaaatcaaaaaataaa

SEQ ID NO: 317771 - DNA, 883 bp, Unknown
  Bacterial polypeptide expressing nucleotide sequence isolated from the Sargasso Sea
ttggaagatataattaataccttattatctaatttgaattatttgaataaaagttgggtttttaatcaatatgattcaactgtcatgggagatactgtcaaagaacccggtcaatcatctggtattgttaaaattcatggaacacaaaaagttattggcgctaccacagactgtaatcctttatatataagaattaatccttacgagggtatgaaatatacagttgctgagtcttacaggaatttaattgcatgtaacataagtcctttagctatcacaaataatcttaattttgctagtcccttagacccaaatatcatgggtgaattagtcttatctattgatggtttaaaaacagcagcagccaaatttaatacccctatcgtttcaggcaatgtgtctttatataaccagacaaatgaaatacctattaagcctacacctgtgattggaatggtaggatcaaatcaggatttaaaaaaaataaattctaataaattttgtaatattggtaataagatccttgttttaggaaaacaattagaaaaaaatttaagtccttatcttttgcaggatcaaaatcttgcctcaaaaataaatgagtataatgatttagaggaattagatttggattatgaaaaaaaagtagctgatagtgttctgaagatgtcagatttcaaatatattatgtcctgtaatgatatttcaagaggtggtgtctttttatctttattaaaaatgcaatataaggatatgggctttaaagttaatattcctgatccaattgatcttttttgtgagtactgtgctgggtatgtgattgaaattaggaacgaagatctaaacaatgttacatcctttttaagcaaaaattggtgttgga

SEQ ID NO: 317772 - DNA, 172 bp, Unknown
  Bacterial polypeptide expressing nucleotide sequence isolated from the Sargasso Sea
atggataaatttactgtaggagttgttgtcttccctggttctaattgtgatcgtgatgtttcatgggcattggaaggttgtttagatataagaacaaaatacttgtggcatgagtcttcagatttaagtgatgtagatgcaatagttttacctggaggatttagctatggtg

SEQ ID NO: 317773 - DNA, 832 bp, Unknown
  Bacterial polypeptide expressing nucleotide sequence isolated from the Sargasso Sea
aatttagattttgcagttattggaaaaacaactgatacaaaaaatattgaacttaattttgacaacgaacaagtcgcttgtattccagtaaacactttagttgaaaattcacctatgtatgatcgaaaatggaaaaaagcaaaattaccaaaaaagaataagattaaaaaagatttattaataaatttgaaaattaaagatgttttaaataaaattttatcacacccaaatgtttgtagtaaagaatggatttggcaacaatatgatcatacagttatgggtgacacaatacaaaaacctgggggcgattcaggagtagtcagagtacatggcacagataaagcagttgctgcgacagtagattcatctgcagtatattgttgggctcatccacaaacaggcggaaagcaaattgtttgtgaaagttggagaaatttaatctctgttggagcgacaccaatagctattacaaattgtttgaattttggaagtcctgaaaatgaggagaacatgggggagtttgttgaatgtgttcaaggtattgctgaagcagctgaatatttagaattcccagtggtttcaggaaatgtatctttttacaatcaaactaaagaagttggcataaaacctacaccgtcaattggaggcgttggattaattaaggattataaaaaaatgattacaatgaattttaaagaaaataataatttagtattgattattggcaaaactgaaggtcatatagatcaaagtttatttgcgagaactattttagatgaaaaaaatggacctccacctgaaatcaatctttttaatgaaaaaaataatggtc

SEQ ID NO: 317774 - DNA, 787 bp, Unknown
  Bacterial polypeptide expressing nucleotide sequence isolated from the Sargasso Sea
agctattttaagttttaatccacatcctagacaatttttttcccgcgaactagatcaatatcaaattttttcagaagaaaagaaacaattaatttttacagaattaggcattgatcattatttttgtttaaaatttgatgaattactctccaatctttctcctgtagattttataaaaaagattattgtcgatcaattaaaagttgaaaagttaatagttggttatgattttcgatttggaaaagatagaaaaggagatacaaaccttctctttgatcatggaaagattcatggatttaatttagaaacaattgaacaaattactaatccaaaaactaaaactccttattcatctacagatatcagagaatgtattagatcaggagaaatagaagaggcaaatttattattaggtagaccttggagtatgcaaggcaaagtcattcatggtgataaaagagcgaggaaaatgaattttccaacagcgaatattcttccacacaatgaaatatatccgttaaaaggtgtttacgtcgttagcattaaatttggagatgaagtccataaaggtatcgctaattttggaactagacctactgtagaaggtgaaaaattgttgctagaagcacatctatttgattttgatagagatatctatggtaactatttgactgttgaatttcttgcatttattaggggtgaaaagaaatttgaaacctttgattatctggttaaacaaataaataaagatattcaaattgctaaagattatcacttaagaaaataa

SEQ ID NO: 317775 - DNA, 789 bp, Unknown
  Bacterial polypeptide expressing nucleotide sequence isolated from the Sargasso Sea
aaagaaatatttaaaaaatgggatcttgattttgtaataattggaaaaactacaaatacaaataaattaattcttaaatataataacaaaattgaaggtgaaattcctttagatgcattagcttcaaaagcacctatttatgacagaaaatgggttaaaaagaaactgactaaaaacaaaattgattttaaaaaattaaaaaaagttaaaattgaagatgctttaattaaaattttatcttcagcaaatcattcagacaaaaattggattacaagtcaatatgatcaaatggtaatgtgtgatacagctcaaagatctggagcagatgctgcaataataagaattcataacaaagaaaaggcaatagcagttactgtggactcatcttcaaattattgtaaagctcatcctttaacaggaggcaaacaaattgtttgtgagaattggaggaacttaatttcagtaggagccaaaccgattgctataacgaattgcttaaactttggtaatcctgaaaacccaaaaattatgggtgaattcgcggaatgtctaattggcattaaagagtcatgtgagtttctaaattttccagtagtttcaggaaatgtatctttttataatggaacaaataaaaaaaatatttctcccacaccggtaataggtggggttggactaattcaaaaattaaaaaaaggcatggatcataagtttaaaaaggatgatagtattataattgtaattggtaaaacttttggacatctagaacaaagtgtttttcttgaagaaatt

SEQ ID NO: 317776 - DNA, 326 bp, Unknown
  Bacterial polypeptide expressing nucleotide sequence isolated from the Sargasso Sea
tataaaatctgaaaatcaaacatcgatatttacaaaaaaaacgaatatagcaaaaatgcctattgctcataatgaaggaaattactttgcctctgatgaaactctgaaaaaaattgtcgggaatgatcaagttgcttttaaatattgcaaccaagaaggagagattacttctcagtcaaatccaaatggatcattagaaaatatcgctggaatacttaatgatagaaaaaatgtacttggattgatgccacaccctgaaagagccgctgagtcagccttaggctgtgacgatggtaagtatatctttgaaagtatactttcataat

SEQ ID NO: 317777 - DNA, 208 bp, Unknown
  Bacterial polypeptide expressing nucleotide sequence isolated from the Sargasso Sea
atggaagttacagaaacaatagcgatagatcatggtttaaaaaaagatgaattttctaaaatatgtaagttattaaagcgtactcctaatattacagaacttgccattttttctgcaatgtggaatgaacattgttcttataaatcatctaaaaaacatttaaaaaaacttcacactaaaggtaagcaagtaatacaaggacctggag

SEQ ID NO: 317778 - DNA, 892 bp, Unknown
  Bacterial polypeptide expressing nucleotide sequence isolated from the Sargasso Sea
aatttagattttgcaataattggtaaaacaacaaattcaaaaaacattgaattattttttaatgatgaacaggtagcaaatattccagtaaatacactagtagaaaactctccaatgtatgatcgaaaatggaaaaaatcaaaattgccaaaaaaaaataaaattgaaaaagaaactttaaataaattgaaaataaaagatgttttaaaaaaaattttatctagtccaaatgtttgtaataaagattggatctggcgccaatacgatcatactgtaatgggagatactattcaaaaacctggtggggattctggtgttgttagagttcatggaactaataaagctattgcagcatctgtagattcgtctgctgtatattgttgggctcatcctctaacaggaggaaaacaaattgttgcagaaagttggagaaacctaatatctgtaggggcctctccaatagcaataaccaattgtctaaactttggaagtcctgagaatgaagaaaacatgggtgaatttgtagaatgtgttcagggtatcggagaagcatgtaaatatttaaatttcccagtagtttcgggcaatgtatctttttataaccaaacaaaagatactggaattaaaccaactccttctattggcggagtaggtttaattaaaaattataaaaaaatgatcactatgaattttaaagaaatagataatttagttctagtaataggaaaaactgaaggtcatattgatcaaagtttattcgctagaataatattggatgaaaaaaatggtcctccacctgaggttaatttatttaatgaaaaaaataatggagaatctttattaaatttaattgaaaaagattacattaaaagtgctcatgattttccttagg

SEQ ID NO: 317779 - DNA, 918 bp, Unknown
  Bacterial polypeptide expressing nucleotide sequence isolated from the Sargasso Sea
gatttggaggtaagcgataaacgattaattgaaatcagcgataagggactactcgcgctaaatctcgatgagatgaaggccattcaagaacactatcgagaccccgacattagatccgtgaggaaggcggcaggacttccctgggacaggccgacagacgcagagttggaatgcttagcacagacgtggtcagagcactgttcgcacaagattttcgcagcgagaatcaggcacgttgacacagttacaggagaagataccacaatcgactctctgtttaagacccacataatgcaacctactctcgaaatccaagaagaagtcagttggttactcagtatatttcatgataactcaggtgtcatttcatggaatgaggactggagcgtctgcatcaaggcagagacacacaatagccctagtgcactagatccctacggaggggcaattactgggatagttggagtgaacagagacattctcggtaccggactaggcgctagaccaatcgccaacacagatgttttctgcttcggtcctccagactacacaggggaaatacctcctggcctatttcatccttccagagtgtttaggggcgttcattcaggagtcagatcaggcggtaacgagtctggaattccgactgtgaacggagcaatagtgttcgatgagagatatttaggcaaaccattggttttctgtggtactgttgggataatgcctcgattgcttccagatggtcgggagagtcacgtgaaaacaccccaaccaggggatgttgtttacatggtcggaggcagagtcggtagtgatgggattcacggagccacattctctagcctagagttgactgaagagagtcctagctctgcggtacaaataggagaccccataacacagaagaagatgctagat

SEQ ID NO: 317780 - DNA, 828 bp, Unknown
  Bacterial polypeptide expressing nucleotide sequence isolated from the Sargasso Sea
cttattgtcatgctcacccattaactgggggtaaacaagtagtttgtgaaagttggaggaatatgatctcagtaggtgcaaaacctatcgcaattacaaattgtcttaattttggaaatcctgaaaaagaaaaaaatatgggagagtttgttgaatgtgttgagggaatatcagaagcatctaaatatcttaattatcctgtcgtttcagggaatgtatctttttataacgaaacaaaagataaaggaataaaacctactccatcaattggtggtataggtttactttcagactacaaaaaaatgatgacaatggaattaaaaaatgatggaaattatctttatgttattggtaaaactgaaggccatttaaatcaatctgtatttgccagaaatatattatctgaatttgagggaccacctccagaaataaatttatttaacgaaaaacaaaatgggatgtgtattttaaatttgaaaaaggagaatttaattgaaacctgccatgatgtgtctttaggaggtattttgactgctatttcaaaaatgagtataaaaggaaataaaggagtaaaattattttccatagatggtttagtgaataaatttgaatatttttttggtgaagatcaggggagatatattgttgaaattaaacctgaaaatttagaaaatgttgaaaaaatgttaaaaaaagactcaattcattttgataaattaggagtaattgaaactaatcagattacatatggaaatgatctaaaaatatcaattgacgatatcaaacaaggctataaaaattggctaaaggagtttatggttaattaat

SEQ ID NO: 317781 - DNA, 172 bp, Unknown
  Bacterial polypeptide expressing nucleotide sequence isolated from the Sargasso Sea
atcgccggtctttgctcggaagacggccgccatctcgcaatgatgcctcatcccgagcgaaccttcctgaagtggcaatggggctggatgccccatgagtgggactcattggaaacctcgccctggctgaggatgttccaaaatgccagaacgtggtgtgatcaggtctagt

SEQ ID NO: 317782 - DNA, 227 bp, Unknown
  Bacterial polypeptide expressing nucleotide sequence isolated from the Sargasso Sea
aatggaagttaatgaacaaattgctatagatcatggtttgaagtctgaagagtataaaaaaatttgtcagttactaaaaagaactccaaatattactgaacttgggattttttcagcaatgtggaatgaacattgttcatataagtcatcacgacttcaccttaaaaagctaccaactaaaggaaagaaagtaattcagggtccaggagaaaatgcaggtgttattg

SEQ ID NO: 317783 - DNA, 886 bp, Unknown
  Bacterial polypeptide expressing nucleotide sequence isolated from the Sargasso Sea
ggtataaggattcataataaagataaagcaatagcagtaacagtagactcgtcagctaactattgtagagcacatccagaaagtggtggaaaacaaatagtttgtgaaagttggagaaatttaattgcagttggtgcaaatcctattgcaattacaaactgtttaaattttggaaatcctgaagataaaaatattatgggtgagtttgctgattgtgttaaaggaattaaggaggcgtgcgagtatttgaattatccagtagtttctggaaacgtatctttctataatggaacaaacaaaaagaatattaaccctaccccagtaataggtggagttggattaattagaaatattaaaaaaccaatgaatcataaatttaaaaaagaaggtagttcaataattttaattggaaaaacttttggtcatttagatcaaagtgctttatttgaggaaatttttaatctaaaagatggacctccgcctgaaataaatttttttaatgaaaaaattaatggtgaagctgtccttgaaattattaataaagatttagctcattctgttcatgatgtttcatctggtggattaatattagctttagcagaaatgtctttaagttcgggaattggtataaatattgaaaaaccaaaaaaactaaataacatatttgaatatttttttggcgaagaccagggcagatatgttttagaaattgatcaattaaaaatcaatgaagttaaaaatttattaaacaagaacaatatttattttgaaatagttggtaaaactcaaaaatctgtttttgaactacaaaatgagattaaaattagtgtcaatgatctttataaattaaacaaagaatggtattacaaatatcatgccaattaaa

SEQ ID NO: 317784 - DNA, 884 bp, Unknown
  Bacterial polypeptide expressing nucleotide sequence isolated from the Sargasso Sea
gccgtcgttagaatacatggtaaaaataaagctattgtaattactgtagattcttcagctcactactgtttggctaatcctattacaggaggtaaacaggtggttgctgaagcgtggagaaatttaatctcgacaggatctgagccaatagccatcacaaattgcttaaattttggcaatcctgagaaagataaaataatgggtcagtttgtggaaactattgatggaatttgccaagcttgctcatatttaaactttcctgtggtttcaggaaacgtgtctttttacaacgaaactcaaaataaagctatctctcctactcctataataggcggtgtaggtctaataaaaaatttagattgtatgatgactaataatttaaaagaaattggaagtaatttattggtcattggtaaaaccttaggacatcttcatcaaagtgaatttttcagagaagttgtaaattacaaagatgggccaccgccagaagttaatttattcaatgaaaaaaataatggtctaatagtcagaaatttaatttcaaaaaaactcataaattctgttcatgatgtatcatcgggagggatacttgtagctttgagtgaaatgtgtatttctggaaatattggagcaaaaataaaaattccaatagacagtataagtccacacgaatacttgtttggtgaggatcaaagtagatatttaattgaaataaatgagaaaaatagacttgaagtatgtaaaattttagaaaaaaatagtatatactatgaaattattggaaaaacacaaaaggatagcctagacttgaaaaaaaattttaatattactttatctgatttgggtaaatttaattctttttggtttagaaattattttaatga

SEQ ID NO: 317785 - DNA, 976 bp, Unknown
  Bacterial polypeptide expressing nucleotide sequence isolated from the Sargasso Sea
ttataatgaaaaggtaactgatattccaattgattatttatcagaaaatgcacctttgtatgaaagaaaatggaaaaaaacaaaacttcctcagaaattaaagtttgtaaaagaaaaatttaaatcattaaaagtatctgattgtttaaaaaaaattatatcaaaccctaatatatgtgacaaagaatggatctgggagcagtatgatcatacagttatgggtgacactgttcaaaaacctggtggtgactctggtgttgttagaatacatggaacaaaaaaagcaatagcagcatgtgtagactcatccgcttcttattgttttgctcatcctaacacaggaggaaaacaggcagtttgtgaaacttggcgtaatttaatttcggtaggttctagtccaatagcaattactaactgtttaaattttggtaaccctgaaaaagaaaaaaatatgggtgagtttgttgagtgtgtagaaggaatatctgaggcaagcaaatatttaaattttcctgtagtttcaggaaatgtttctttttacaatgaaacaaaagataaaggaataaaacccacgccaacaattggtggtgttggattaattaaaaattataaaaatatgattactatggattttaaaatgcaagacaacattgtgtttgtcatagggaaaactgaaggtcatttggagcaaagtatatttgcaaaagatatattgggtgaaaaaaaaggtcctccgcctgaaataaacttatttaatgaaaaaaatattggtgagacgctattaaaacttatcaatgagaatcttattgtgacggctcacgatgtatctttgggtggaataattgtcgcaatatcaaaaatgtgtattaaaggtaacatggggataaaatttaaaaagttcaaaagtttaataaataaatttgaatatttgtttggtgaagatcagggtagatatattgtggaaaatgataaaaaa

SEQ ID NO: 317786 - DNA, 632 bp, Unknown
  Bacterial polypeptide expressing nucleotide sequence isolated from the Sargasso Sea
cagtaagcttaattaccctgtcatttcaggaaatgtatcactctataatgaaactaacggtgaagggatttatcctactcccgctattggtggagttggactaattagagatttatctaatacaatgacaatagatcttaaaaatgagggtaatgttttatgcctcattggggaaagtaataatcatttaggcaatagtcattatctctcaatcatacaaagtagagaagacggcggtaccccgtcaattaatttggatgatgaattaaaaaatggaaaattcattctagattgcattgctaagaaattactaaaatctgttcatgatgttggtgaaggtggtgttcttgttgcaattgctgaaatgtgcatctcaggtaagcaaggtataaaaattgatataacaaaagattttcttcacggattcttttttggtgaggatcaagctaggtacctggttgaggtctcacaaaataaacttgaacaactagaagttgatgcaagcaagagtgcggtcaaaatagaaagaattggagaaattggaggaacatctatctcaattaattcaattggagagatagaattatcaagcttaattgaccaccatacaaaatggttcaatgaattttgac

SEQ ID NO: 317787 - DNA, 889 bp, Unknown
  Bacterial polypeptide expressing nucleotide sequence isolated from the Sargasso Sea
gtagttaggatacatattaaagataaagctatagccatatcggtggactcttcagcaaattattgcaaagcagagccaaaatctggaggaaaacaagttgtttgtgaaaattggagaaatttaatttcggttggagctaaaccattggctattaccaactgtttaaattttggaagtccagaaaaaacaaaagttatgggagaatttgttgaatgtgttgatggaattagagaggcatgtgaatttttagattttcctgtggtatctggaaacgtgtctttttataatgaaactaaatctaaaggtatttttcctacacctgtaattggaggtataggtataattgataatttaaaaaaaataatagacataaaattaaagaaacctggaaacataataatggttataggaaaaacaattggccacttagatcagagcgctttccttcaagaaaatttctcaatatttgatggaccaccacctgaaataaatttggttaatgaaaaaaataatggcttagcagttttaaaattaattaaagataatttaatcttgtctgctcatgatgtctcgtctggtggaattcttgtctctttggcagaaatgtcaattatttcaggaaatggtctaaaaatatataaaccaaaaaagctatcaaattctttggagtatttttttggtgaggatcagggaagatatttaattgaaatttctaaaaataaccaaaaaaaaattgaaacatatttaagagaaaataatgttttttttgaagttattgcggaagtacaaaatgacacatttgaaatagagaaaatattcaatttgaaaacaaaagatcttcataattacaacaatcagtggtatagtaaatattatgccaataagtaaa

SEQ ID NO: 317788 - DNA, 868 bp, Unknown
  Bacterial polypeptide expressing nucleotide sequence isolated from the Sargasso Sea
aaaattattcaattaagaaaagataatttttgtgtttctctttttacggataatgccggtggaatagaattcaataaagattggattatttgtcataaagttgaaacacataatacgccttcagccttagatccatttggcggtgccatcactggaattgttggtgttaatagggattgtcttggatttgggaaaggagcaaaacctatagcgaatacgtatgcatattatttagcagacccgaataagaaatatcaattgtatcgtcaaaaaaataaggatccaatgcttccagcaaattttattgcgaagggcattataagtggtgttagagttggaggaaattgttcgggtattcctactccacaaggtaatgtgtattttgatgatcggtttgcaggaaagcctcttgtgttttgtggaacagttgggattattccaaaaaaaataaaaggaaaattatcacataagaagaaagctaatccaggagatatcatactaatggctggaggcagagtaggaaaagatggtattcacggtgcaacattttcatcggaagagttagatcctaatagtccagtttctgccgtacaaattggtgatccaataacacaaaagaaaatgtctgatgtcatcattagagaattgcgtgatgaaaatctttactcgagcataacagataatggggctggaggattatcatcatcaattggagaaatggcaaaagagagtggtggttttatagttaatcttgaaaaagttcccctcaaatataatggtttatatccttgggagatttgggtttctgaatcacaagaaagaatgacactagcagtacctccgaagaatgtaaaaaaagttataaaga

SEQ ID NO: 317789 - DNA, 385 bp, Unknown
  Bacterial polypeptide expressing nucleotide sequence isolated from the Sargasso Sea
gttcaggttaaggtagaagacactgactcggtcttacttcgaaatatgaacggttggacagttccagttgcctcggctcatggtgagggaagagcaaactttcaaatgaataacttagaagagctcaaaaaacaaaatcaaatcgcgatgagatttgttgattcaaatgctaaatatactgaagcttacccattaaacccaaatggttcaccagagggaataactggtataactgcatcaagtggcagagttacaataatgatgccacaccctgaaagagtattcagaaagtatcaaatgagttggcatcaaaaagactggcctgaatactcaccctggatgcaaatcttcgttaacgctaaacaatatagcgacgaaaattaat

SEQ ID NO: 317790 - DNA, 914 bp, Unknown
  Bacterial polypeptide expressing nucleotide sequence isolated from the Sargasso Sea
atcactatctgcttttctggatatataattgtaggaggtttttcttatgaagataggtctcgtgctggtattatcgcagcactcgaccctattatgagacaaataaagattgaagcagataatgggaagcccgttttgggcatttgtaatggagcacaaattttagtagaaagtggactcgttcctggacttaagaattaccgtttgggtgctgccctaacagataacaaacgtgtaaaaggcgatattgtggttggagttgggtattataatacatgggctaatttaaaaatgagcgttacaccgaaccgatgtgcgtttactagacatttaaaaaaaggggacctaataaacattccgcttgctcatggtgaagggagatttatagtcccagacgaactgcttgataaaatgattttaaacgagcagactgtttatagatactctaattataacggaaatataatagatgaatttcctataaatccaaatggatcaatttataatattgccgcaatatgtaaccctgcaggcaatgtgatggcgatgatgccacatccagagcgaacagagaatggcgatgctattttttcatctatgaaaaactatattgaatccgactgcccagcaatagataatgaattattttacgaattaccaaactttgaaataaagcaatataagcccagatcaaattcaatagtgtgggctgtggacatgataattactgataatgaagctgaatcagtgaaaaatgctttaaatcaattaggacacgatgtctcaataaaacgacaaacgcactgggaaatatcattaaataaaaaccatgataaagcaatagaacaaattaaactttctggagaactttataattcaaataaagagtttataagtgaaattaatgatcataa

SEQ ID NO: 317791 - DNA, 827 bp, Unknown
  Bacterial polypeptide expressing nucleotide sequence isolated from the Sargasso Sea
atattgttacgcacaccctcttacaggtgggaagcaagttgtgtgtgaaagttggaggaatttaatttcatgtggatctaaaccaattgctattactaattgtttaaactttggtaatcctgaaaaagaaaaaaatatgggtgaatttgttgaatgtgttgaaggtattaatgaagctagcaaatttttaaattaccctattgtatctggaaatgtatctttttacaatgaaacaaaagataaaggtattaaaccaacccctacaattggtggtgtcggtttacttaaagattacaaaaaaatgatcactatgaacctaaaaaataaagacaatttaattttagtagttggaaaaactgaaggtcatatagatcaaagtgtatttgcaataaatattttaaatgagaagaaaggacctccacccgttgtgaatttatttaatgaaaaaaataatggagaaacggtattaaggttaattgatgaaggattaattaactctgctcatgacgtttcattgggaggaatcattactgcagtttcaaaaatggcaattaaaggaaaaaaaggatttaaattaaataatttgaaagttttaattaataaatttgattattattttggtgaagatcaaggaagatatataattgaaattgagcctaataatttaactaaagttcaaaaaatcttaaaagataactctgtacattgtgatgatattggaattgtaacagaaaatgagataatagtagataaagagccaattctacatattgacgatttaattaaatctaataaattttggttaaaagactttatggataaataat

SEQ ID NO: 317792 - DNA, 316 bp, Unknown
  Bacterial polypeptide expressing nucleotide sequence isolated from the Sargasso Sea
attgtctgttgaggaaatccaagacaaactactcaatctaaacatctcaattacagcgcaagaagcattgaaaattcaaaatgaaatgcttggcagagccccatcaatttcagaattggttttgttttccatccaggggtctgaacactgtagctataaaagtagtagacaacatctaaaacaatttaccacagagggacctgatgtgatattaggagcgaaggaagatgctggggttgtatcagttgctaaggatgatgaaggaaatcgatggtgcattgtaatgagccacgaatcacacaaccacccatcacaa

SEQ ID NO: 317793 - DNA, 208 bp, Unknown
  Bacterial polypeptide expressing nucleotide sequence isolated from the Sargasso Sea
atgttagttaacgaaaaagtagctattgatcatggccttaagcctgaagaatataaaaagatctgtgaattattaaaaagaactcctaatattatcgagcttggaatattttctgctatgtggaatgaacattgttcttataaatcttcaaaacttcatcttaaaaaattaccaacaaaaggaaaaaagataattcaaggaccaggag

SEQ ID NO: 317794 - DNA, 946 bp, Unknown
  Bacterial polypeptide expressing nucleotide sequence isolated from the Sargasso Sea
tgtctctaggagaagtttgaggtttggagatgttgatagaaataaaactaagtggattagcgacggggttgtttctggcattgctggatacggcaaccctttagggattcctaacgtttgcggcgatttatattttgacaaagaatataatgaaaattgcttagttactgttttaacagctggggttgtaaaagaaaaatgcgttattaggtctagggctccaaaaaattcagttgattatgatttaatattggttggtaagcctacagacaatagcggctttggtggtgcaagctttgcttccctagaacttgaagaggaaaaagaacaacaaaacaagggtgcagtacaagagccaaatgcgtttttggaaagacacattctcaaatccacctatgctctttttgaatatttagaaaaaaataatttaatagatgatgtggggtttaaagacttgggtgcaggcggcgttgcttgtgcaagcatagagctagcagatgcagcaggcttaggtgcaaaagtgtgggtagacaaaattcatacaagtatgccggagcttgacgggcatattattttatgctcagaaacccaagagcgctttatgtgggcaagcccaaaagagctaacacaaactatcttagatcactataataagaagtttgattttcccaatgtttcaatgggggctcaagcaagtgttgtgggtaaaattataaaagaacaacactatacggtgtatgcgggtgacaaaaaacttgtggacggtcctattgaaaaaattaatgagggttttgtgtatgatcgtccaatgtctaaaaaagtggttgtgtccaaagacaaggatttgccaaaaattttggactataatgatttgatgttgaagattttagcccacgaaaacgtatcttcgcgtgggccagtatatgagtcttatgataaaaatgtt

SEQ ID NO: 317795 - DNA, 232 bp, Unknown
  Bacterial polypeptide expressing nucleotide sequence isolated from the Sargasso Sea
atgagggcattagttttatcaggttacggtattaattgtgaagatgaaacactacatgcctttgaagtattaggatttaaaggaaaaattgttcatattaatgatttgattcaaaatcccaaacaactaaataattatcaagtgttcgctatacctggtggtttttcatatggtgatgatactggatcaggaaatgcgatggcaaaaaaaattatgattaatctctatgatg

SEQ ID NO: 317796 - DNA, 670 bp, Unknown
  Bacterial polypeptide expressing nucleotide sequence isolated from the Sargasso Sea
ggtattaaagaagcttgtgagtttttaaattttcctgtcgtatcagggaatgtttctttctataatggaactaacacaaaaaatatttatcccacacccgttattggtggtgtaggactaataaaagatcttaaaaagaccaaaaatcacaaacttaaaaacattaatagtaaattaataattataggaaaaacctttgggcatatggggcaaacaacatttcttgatgaagtgtattcacttagagagggtctgcctccagaggtgaatttatcaaatgaaaaaaataatggagaaataatatttaaactaatagaaaataatttaatcaacacaatacatgatgtctcttcagggggaattatcgtagctttggcagagatgtctttaagctctttaattggtattaaaattaataagccaaaaaaattatcaaatgtatttgaattttttttcggtgaagatcaaagtagatatattattgaagttcaagaaaacaattatgaaaaggttaaaaaaattttaaaagagaacaatatattttttgaaaatataggaattactcaaaatgacttttttgaattggaaaaagagttaagaataaatgtaaaagaactttatgagttaaataataaatggtataataattataatgccattaaaagctgag

SEQ ID NO: 317797 - DNA, 854 bp, Unknown
  Bacterial polypeptide expressing nucleotide sequence isolated from the Sargasso Sea
aacagataaagctgtggctgcatcagtagactcctccgcagtttattgttgggctcatcctctaacaggtgggagacaagtggtttgtgaaagtttcagaaaccttatatctgttggcgccaaaccaattgctattaccaattgtttaaatttcggtagtccagaaaatgatgaaaatatgggtgagtttgttgaatgtgtaaagggtattggtgaggcaagcgattatttaaagtacccaatagtctctggcaatgtatctttctataaccaaacaaaagatcaaggtataaaacccacaccagcaatcggtggtgttggtttaataaagaattataaaaatatgattactatggattttaaagaagttgataatttagttttagtaattggaaaaactgaagggcatattgatcaaagtttgtttgcaagaaatattttagatgaaaaaaatgggcctccacctgaagtaaatctatttaatgaaaaaaataatggagaaacgttgctcaaactaattgataataatttaataaaaagtgcacatgacgtttcgttaggtggcataattactgctgttgctaagatgtgtattaaaggaaaaaagggaataaatataaaaaaacctaaatatctaattaatgaaacagagtatttatttggtgaagaccaaggtagatatatcgtagaaataaacaaaaaagactcaaataaagtgactgaaatattgaataaaaatgcagtgcattttgatgaacttggtactattaatgaaaatgaactttatattaacgataagacaaaagttacaattgacgaactatcaacatcgaataaaagttggttaataaatt

SEQ ID NO: 317798 - DNA, 162 bp, Unknown
  Bacterial polypeptide expressing nucleotide sequence isolated from the Sargasso Sea
aatgaaatcttctgtaataacttttcctggttcaaattgtgatcgagatatggatgttgctcttaaaaaatttggatttaaaaacgaaatggtttggcataatgatgaagaattgcctaaaagtgatttagtggttttacctggaggtttttcatatgggtg

SEQ ID NO: 317799 - DNA, 893 bp, Unknown
  Bacterial polypeptide expressing nucleotide sequence isolated from the Sargasso Sea
aagccaagaacgaatgcttataattcttgaaagtggcaaagaggaaatagccaaaaaaatatttgataaatggaatttagatttcgctgtaattggaaaaacaaccaacacaaagaatatagaattattttttgataacaaacaagtagctaatattccagttaatacattggttgaaaactcaccgatgtatgatcgaaaatggaaaaaatcaaaattaccaaaaaaaaataaaataaataaaacaatatttaaaagtctcaaaatcaaagatactttaaaaaaaatcttatccagcccaaatgtttgtagcaaagaatggatttggcaacaatatgatcacaccgtaatgggtgatactatacaaaaacctggaggagactctggtgtagtaagagtccataaaacagataaagctatagctgctacagttgactcatctgcaacttattgttgggcacatccactcacggggggaaagcaagtcgtttgtgaaacttggagaaatttaatctcagtaggtgctaaacctatagcagttacgaattgtttaaattttggaagcccagagaaagaggaaaatatgggtgagtttgtagaatgtgttcaaggtatcagtgaagcatgtaagtatttggattatcctgttgtctcaggaaatgtatctttttacaacgaaactaaagacatcggaattaaaccaactcctaccataggaggcgtgggtttaattaaagattacaaaaaaatgatcacaatgaattttaaggaaatcgacaacatcgtattagtgattggtaaaacagagggtcatatagatcaaagtttattatcaagaataattttaaatgaaaataatggacccccacctgaagtaaatttatttaatgaaa

SEQ ID NO: 317800 - DNA, 739 bp, Unknown
  Bacterial polypeptide expressing nucleotide sequence isolated from the Sargasso Sea
agtattgaaatggcatcaaaaggtaatctgggtattgaattaaatttgaataaagttccatgtcgtgaagaaaaaatgacaccatatgaaattatgctttctgaaagtcaagaaagaatgttaattgttttagagaatggtagagaagcagaagcaaaaaaaatttttgataaatggaatttagattttgctgtaataggaaaaaccactgactcaaaaaaaattgaattgttttttgataacaataaagtagcagaaataccaattaatattttggcagaaaatgcacctgtttatgatagaaaatggaaaaaaacaaaacttccacaaaaaataaaatttaataaagacgattttaaaaaattaaaaattactgaagttcttaaaaaaatattaagcttaccgaatatttcaagcaaagaatggatctggcaacaatacgaccatacagtcatgggagatactatacaaaaacctggatcagactcaggtgtagtaagagtacatggcaccaataaagctgttgcaacatcagtagattcatctgctgtgtattgttatgcccaccctcttacaggtggcaaacaagttgtttgcgaaagttggagaaatttaatttcatgtggatcaaagccaattgctattacaaattgcttaaactttggtaaccctgaaaaggaaaaaaatatgggtgagtttgttgagtgtgttgagggaattaacgaagcaagtaaatttt

SEQ ID NO: 317801 - DNA, 734 bp, Unknown
  Bacterial polypeptide expressing nucleotide sequence isolated from the Sargasso Sea
tacaaattgcctaaattttggaaatccagaaaaagagaaaaatatgggtgaatttgttgaatgtgtagaaggaattgcagaggcatctaaatatttaaattatccagtagtttcaggaaatgtctctttttataatgagacaaaagataagggaataaaacccacaccctcaattggaggtataggattattatctaattataaagaaatgatgacaatggaattaaagaatgaaggtaattaccttttggtaataggtaaaactgaaggtcatttagatcaatcagtatttgcaagaaatatgttatctgaatttaatggccctccaccagaagttaacttattcaacgaaaaacaaaatggaatgagtgttttaaatttaaaaaataaaaatttactagaaacctgtcatgacgtgtctttaggaggaattttaactgctatatctaaaatgggcatcaaaagtggtaagggtgtaaaattatttactttgcaaggcttagtcaataaatttgagtatttttttggtgaagatcaaggaagatacattattgaaattaaaccagaaaatttagaaaatgttgaaaatatgcttaaaaaggactccattcattttgacaaattgggtttagtggaaggcaatgaaattatgttagaaaatgatctaaaaatttctattgaagatatcaaagaagactataaaaaatggctaaaggaatatatggttaactaat

SEQ ID NO: 317802 - DNA, 639 bp, Unknown
  Bacterial polypeptide expressing nucleotide sequence isolated from the Sargasso Sea
gattttattcaaaaaccagggggagactccggcgttgtaagaattcatggaacgtctaaggcagtagccgcatccgtagactcatcagctttatattgttttgcccaccctttatctggaggaaaacagattgtatgtgaaagttggagaaatttaatttctgtcggtgcagagccaatcgcaattacaaattgtttaaattttggaaatccagaaaaagaaaaaaatatgggagaatttgttgagtgtgttcagggcatatctgaagcttgtaaatatttggatttcccagttgtttctggaaatgtgtctttttataatgaaaccaaagataaaggcattaaaccaacaccatctattggaggagtgggtattataaaagattataagaatatgatttcaatggatttaaaaaatagcggaaacatagttttggtaattggaaaaactattggacatttagaacaaagtatattcgcaagggaaattttgtctgaaaaaaaaggacccccacccgaagtaaatctatttaatgaaaaaaataacggtttaacagtcttaaaaatgatgaatgagaaactagtagagtcatgtcatgatatttcattaggaggaatattagttgcaatttctaaaatg

SEQ ID NO: 317803 - DNA, 761 bp, Unknown
  Bacterial polypeptide expressing nucleotide sequence isolated from the Sargasso Sea
tatgaaaaatacgacaagcaggtacagggtcgaacatacacagaaactgggatagcagatgctggtgttatggccccatttaattcgtcgcagtatccagaagaaatcagagaagttgggttggctttatctaccgatcacaacccccgatttggtcttatagacccatattggtctggggtaaatgcagtagtggaggccatgcgaaatgttgcttctgttggcgcaacaccgcatgcaattacagattgcctatgctacggaaatcctgaaaaacctcaacaaatgtgggaatttgttgaaggcgttaggggtataagtgatgcctgcaaaacaataaccctaaaacattctccagaagacccgacgcctataattgctggtaatgttagtttttataatgaatctaaaaacatacctatcccgcccagtcctattgtaagctgtcttggaaaaattaaaaatgtaaaaaaaacaattacaatgagctttaaaaaagaaggctcagcattaattatgattgggaaacgaaaaaatgaactgggtggttcaatttattacagtctgcataacgagcttgggagaaacgtacctaaacccaatcttgtagaagtaaaaaatcaaatttactcattaaccgactgcattgaacaagatttaattgttgcctgtcatgatatatctgaaggaggaattgcagcgactctatctgaaatgacatttgaatattcaattgggtgcgatgtaaagatagatagtga

SEQ ID NO: 317804 - DNA, 475 bp, Unknown
  Bacterial polypeptide expressing nucleotide sequence isolated from the Sargasso Sea
gcattagaaggtgaagaccgctctgcagtacaaatccctgatcctttcattgaaaaattaattattgaagcgattttggaatgtcgtgatgaaaactgtataaacgccatgaaagatttgggcggtggcggtttatcatgtgcaatttctgaaactgctgaaagtctgggaattggaattgaactagatgtccaaaatgtacatttgcgtgaatctgatttattgcctgaagaaattatgatatctgaatctcaagaacgaatgttagtcataacgagttctgacaacctatcaaagattaacaacatatgtgaaaaattcagaatccagtgttctgtaattggtaaagtaaaagaagataaaatgatgcatgttaaaaatggaaatgaaactttggcattactgcctgctgactttgttgcccgaggtccgctcatatctagagaaaaatcaaaaccaaaatatctgtcaaaca

SEQ ID NO: 317805 - DNA, 405 bp, Unknown
  Bacterial polypeptide expressing nucleotide sequence isolated from the Sargasso Sea
aatgagtaacaaagtagctagctgggacacaattgatttttcctctagctctgacgaacaaatcaaacaggttcttgaagacttaaatattcctctcagtatagatgaggcaaaaaaaattcaattctcttttttaaaaagaccagccacgttaacagagctagtgctcttttccatccaggggtcagaacacagttcatacaagagcagtaaaaaccatatcaagcgttttattaccagcggcaagcacgtgattttgggtgcaaaagatgatgcaggggttgtttctttgacaaccgataaaaagggggaaaggtatggtcttgttgtaagtcacgaatcacacaaccacccgagccaaattgtgccatatgagggtgcggctactggcgtggggggcaatgt

SEQ ID NO: 317806 - DNA, 883 bp, Unknown
  Bacterial polypeptide expressing nucleotide sequence isolated from the Sargasso Sea
aaaacttccccaaaaaataaaatttaataaagatgattttaaaaaactaaaaattactcaagttttaaaaaaaatattagccttgccaaatatttcaagtaaagaatggatttggcaacagtatgatcatactgtaatgggagatactatccaaaaaccaggatcagactctggtgtcgtaagaatccatggcacagataaagctgttgcaacatcggtagattcttctgctgtgtattgctatgcgcatcctcttacaggaggaaaacaagttgtttgtgaaagttggagaaatttaatttcatgtgggtctaagccaatagctattactaattgtttaaactttggtaaccctgaaaaagaaaaaaacatgggagagtttgttgaatgtgttgagggaattaatgaagcgagtaaatttttagattatccagtagtttcgggtaatgtatctttttacaatgaaaccaaagataaaggaattaaacctacgcctgcaataggaggtgttggtttaataaaagattataaaaaaatgatcactatggacctaaaaaataataataatttaattttagttgttggaaaaactgagggccatatagatcaaagtgcttttgcaataaatattttaaatgaaaaaaaaggaccacctcctgaaattaatttatttaatgaaaaaaataatggtgaaactgttttaaaattaatagaggaagatctggtcaaatcagttcacgatgtctcattgggaggaattattactgcagtttcaaaaatggcaataaaaggtaataaaggttttaagctaaataaacttaaagtcttaattaataaatttgattattattttggtgaagatcaagggagatacataatttga

SEQ ID NO: 317807 - DNA, 842 bp, Unknown
  Bacterial polypeptide expressing nucleotide sequence isolated from the Sargasso Sea
acaggaacgctttatgtgggcatgtccaaaagatttaacacaaaccattttagaccattacaacaaggtgtttgattttccaaatgtttcagttggtgctatggcaagcgttgtaggaaaaattataaatgaaaagcattatactgttttttataaagataaaaaacttgtcgacggtccaatagaaaaaataaatgagggttttgtttatagtcgtccaatgtctgaaaagaaaacccaactagaaaacaatcctctgccagaaagaattgactataacgatttaatgttaaaaattttgtcgcacgaaaacgtggcttcgcgagcgcctgtttatgagtcttatgataaaaatgttcaaggaagagttgtcaatgagagggggaaaacaaacgctggtgtggttgctccttttgactcaaaaaaatttccaaaagaaattaaagatgattgtttttctgctgcccttgctcacaacccttcaattggtaaaattgacccatatcttgttgcacagcacgctgttatagaggcttgtgcaaaaactgtttctgtgggcgcctccccgcttgcacttactgactgtttgtgttttggaaatcctgaaaaacctgaacaaatgtggcaattttcgcaaagctgcattgccattagggaggcttgtagccttttacatttcaatgaaacagacaatctgccaatagtagcagggaacgtaagcttttataaccagagtggggaccaatctattccagcaagcccaatgataggttgttttgggagggtttccaaagaacaggttttaatgaacgggtttatgtctggcgatgcaaatatatatt

SEQ ID NO: 317808 - DNA, 835 bp, Unknown
  Bacterial polypeptide expressing nucleotide sequence isolated from the Sargasso Sea
attaggggcagtaatacaagttttagatgaagatctagattacgttcaggaagctttaagcgatgctgctttaaacgaatatgttcacaatataggttctttatcagactcagcagacatagtgatcaattttcaagaagaaaatttaatttctcttcctataaaagagctgttacaaaactggaatagggtaagttatgagatccagtccttgagagataacccggatactgcaaaagctgaatacattaatgatactaaaattaagaatcccggcttaagccctaaaataaccttttctgtacctgagaaaattgatttgaatagttataggcctaggattgcgattctcagagagcaaggagttaatggtcaaaatgagatggccgcagctttccatgaagtaggatttgattgcatagatgtccacatgactgacttaatagacaaaagacaaaacttacaagactttcaaggtctggtagcttgcgggggattttcttatggcgatgtccttggagcaggggggggttgggcaaatagtattttatttaatgatgaactaagaaatcaatttggtgatttctttcaaaatgagaatgttttttcattaggagtctgtaatggttgtcagatgctatctcaattgagaggtttgatccccggaactgataattggccaagctttaaaagaaatatctcagagaagtttgaagctaggctagtacaagtcattgtaaaggattcaccttccatactatttaaacacatgaagggttcagttataccagtccccgttgctcatggtgaaggcagagtagaggtttcgaatgag

SEQ ID NO: 317809 - DNA, 528 bp, Unknown
  Bacterial polypeptide expressing nucleotide sequence isolated from the Sargasso Sea
gaagatgatatgtcctcataccaatatttattatctgaatcacaagaaagaatgttgtttgtcgttaaagaagaaaaaattaatgatcttattgaaaaatttaataaatggggattatatgccagtgttattggtgaagtgataggaactaatgaggtaattatttctcataaaggtaaaactgtcgcccaaatacctacttctgccttatctgatgatactcctgtaaattttcataatgcgattgataatccacccgatgatcttttaaataaatgggaatggaaagaaaatgatttaccagaaattcatgatcaaaaaatattttcattgaaggaaaataaaaaattttcttttccagaaatcattttaaaactactctctaatccatcaatagcttctaaacgatggatttataaacaatatgactctcaagtacaagcaaatacagtatttacacctggaaaatcagatgcagccgtagtaagaaaaagggaacaaaataaaaaaaataaaagtaaagtattt

SEQ ID NO: 317810 - DNA, 915 bp, Unknown
  Bacterial polypeptide expressing nucleotide sequence isolated from the Sargasso Sea
aaaacaacaaactcaaaaaacattgaattattttttaatcaagaacaagtagcaaaaatacctgttaatattcttgttgaaaattctccaatgtatgatcgtaagtggaaaaaatcaaagttacccaaaaaaaatataattaaaaatgaagttctgaataaatttaaaataaaagatgtacttaagaagattttatccaatcaaaatatctgttgtaaagaatggatctggcaacaatacgatcatacagttatgggcgacactattcaaaaaccaggtggagactctggagtggtaagagtgcatggaacaaataaagctgtagcagcatcagtggactcctcagccgtatattgttgggctcacccattaacaggaggtaaacaggttgttgctgaaagttggagaaatttaatttcggttggggcaacaccaatcgctattactaattgtttaaattttgggagtcctgaaaaagaggacaatatgggtgaatttgtcgaatgcgttcaaggtataggtgaagctagcaaatatttaaattttccagtggtatctggcaatgtatctttttacaaccaaacaaaagaagttgggattaaaccaactccatcaattggtggtgtaggtcttattaaagattacaaaaagatgatttcaatggatttaaaagaaattgataatttagttttaatcattggtaaaactgaaggacatattgaccaaagtttgtttgccagaacaattttagatgaaaaaaatggacctccgccagaagtaaatctttttaatgaaaaaaataatggagaatcaattttaaatttaattgataaaggatacgtgaaaagtgctcatgacatatctttaggaggtctattggttgcgataagcaaaatggcattaaaggcaataagg

SEQ ID NO: 317811 - DNA, 475 bp, Unknown
  Bacterial polypeptide expressing nucleotide sequence isolated from the Sargasso Sea
catgactccctcaatcatagtttttccagcttcaaattgcgataatgatatttttaattgtattaaaagtatatatgacttaaatcctaatctaatatggtatcaggatgcaatacccaaaagaacagatcttattattatacccggaggtttttcttttggcgattatttaagatgtggtgcaatagccgcaaaatcaaaaatcttaaagcaaattaatgagtttattaaaaagggtacgcctgtattaggtatttgcaatggatttcaagttcttacagaagccaattttttacctggtacactgctaatgaataaaaatttgaaatttatttgtaagtctgtaaatttatctgttgtaaatagtgaaagtagttttactaatttatttaataaaaatgaaactataaatcttccgattgctcataaagtaggtaattattatattaatgaaaatgggttagaaaagataata

SEQ ID NO: 317812 - DNA, 183 bp, Unknown
  Bacterial polypeptide expressing nucleotide sequence isolated from the Sargasso Sea
aatgatacatcaagaaaatcatgatctttacgatcttaatgaggccctcaaagttgaaaatttaacacttaatgactacgaagaaatttgtaaaagattaaatagaaaacctaatagaacagaactaggcatgtttggcgttatgtggtctgaacattgttgttatagaaattcaaaaacctt

SEQ ID NO: 317813 - DNA, 675 bp, Unknown
  Bacterial polypeptide expressing nucleotide sequence isolated from the Sargasso Sea
aaccagaaataatggggcagttagttcaagcaattaaaggtatctctcaggccgtaaaagagctaaacatgccaattgtttcaggtaacgtaagtttatataatgaaacagatggagtttcaataaacccaacaccaacaattggggccgttggcctgatttacgaaggagaaaatccgataaatggtatggcttctgaaggaaatattgcagtagtaataggggaaactaaaggtcatctaggccaaaccgctttacttaaagagttcttcaatagaagtgatggagacgccccaaaagttaatttagaagttgaaaacaaacatggtaactttgtattagcaaatagaaatttaataaaggcttgtattgatttgtcagacggcgggttagcgctagcggcttttgaactcgcccatcgatcagagataggttttgaaatctatgaagaaagtacagagtttttatttgcggaagatcaggcacgatatctgatcgcgtgtgaattcgatcaagcggaagctctatttgttgaagcaggtaagcaaaatattcctattctgacagttggtagtttcaaaggtgacgcaatcgcttttggaaattcaagatctgagctagtttcgctttcagccattttttcgaacgcatttaaaaacttatttcaaaattaaa

SEQ ID NO: 317814 - DNA, 787 bp, Unknown
  Bacterial polypeptide expressing nucleotide sequence isolated from the Sargasso Sea
attgggaaaaactactgatacaaagaaattaatattaaattataaaaatagtacagttgcaaatattccaattgaagccttatcctccaaagcaccagtctatgacagaaagtggaaaaaaattaaattaccaaataaaaaaataagtataaaaaatttaaagaaaattaatttcgaagatgcgttaataaaaattctttcatcttcaaatcaatctaataaaaattggattacagaacagtatgatcagatggtaatgtgtgatactgttcaaagatcaggagcgaactcagcgataattagaattcataaaaaaaacaaaggaatagccttatcggtggactcatcagcaaattattgtaaatcacatccactaactggtggaaaacaaatagtatgtgaaaattggagaaatttaatatctgtaggttcaacgccagtcgctataactaattgtttgaactttggtaacccagaagaaactaaaattatgggagagtttgttgaatgtgttcagggaattaaagaagcctgtgaatttttagactttcctgtagtgtcgggtaatgtatcattttataatggaaccaataaaaaaaatatatttccaactccagtaattggtggagtaggcttaattaaagatttaaataaatctattaatcatttatttaagaaaacaaatagtattattatggtagttggaaaaacttttggtcatttaagtcaaagtatcttttttgaagaaatatattcaatcaaagatgggcctccgccagatattaat

SEQ ID NO: 317815 - DNA, 912 bp, Unknown
  Bacterial polypeptide expressing nucleotide sequence isolated from the Sargasso Sea
attaataaagatgatataaataatttgaaaataattgaggtcctaaaaaaaattttagctaatccaaatatttgtagtaaagaatggatttggcagcagtatgatcacacagtaatgggagatactattcaaaaacctggaggagactctggtgtggtcagagttcatggcaccaacaaagcagttgcagcatcagtagactcttcagctgtttattgttgggctcaccctcttactggaggaaaacaggttgtatgtgaaagttttagaaatttaatatctgttggagcaaaaccaatcgctattacaaattgcttaaattttggtagccctgaaaatgaggagaatatgggagagtttgttgaatgcgttcaaggtattggagaagcaagctcttatttaaaatttcctgtcgtgtctggaaatgtttctttctataatcaaacaaaaaatcaaggtatcaagcctactccatctataggcggtgttggacttataaaagactatactaaaatgattacaatggactttaaagaagtcgataatattgttttagttataggcaaaacagaaggtcatattgatcaaagtttatttgcaagagttatattagatgaaaaaaatggacctccaccagaaataaatctttttaatgaaaaaaataatggagaaactctgttaaaattaatcgatagtaatttaattaaaagtgcccatgatatttctttaggtggaataattactgccatatcaaaaatgtgtattaagggtaataaaggtattaatctaaaaaaaccaaaatacttaatcagtgaaatagaatattttttttcagaagatcaaggaagatatattgttgaaattactaaaaaagatctaaaaaaagtcctagatatcttgaataaaaatgca

SEQ ID NO: 317816 - DNA, 811 bp, Unknown
  Bacterial polypeptide expressing nucleotide sequence isolated from the Sargasso Sea
tcctcttactggtggcaaacaagttgttgcggagagttggagaaatttaatatctgttggagcaactcctatcgcaattacaaattgtttaaattttggaagcccagaaaatgagaataacatgggagaatttgttgagtgtgtacagggaattggggaagcgagcaaatatttaaattttccagtagtttctggaaatgtatctttttataatcaaactaaagaggtaggaattaaaccaacaccgtcaattggtggtgtaggtttaattaaagactataaaaaaatggtgacaatggatttcaaaaagattgataatttagttttggtcataggtaaaactgagggacatattgatcaaagtttatttgctagagcaattttagatgaaaagaatggtcctccgcctgaggttaatttatttaatgaaaaaaataatggagagtctttgttaaatttaattaataaagattatattcaaagtgcgcatgatatttctttaggaggtcttataactgctattagcaaaatgtgtattcaaggaaacaagggaatcaaattaaaaaaatctaacaattttgttaatgaactagaatacctattctgtgaagatcaggggagatacattattgaaattaaacctgaggatctaaaagaggtatctaatttattagacaaaaactcagttcattatgatgaattagggattattactgacaaagagatgattattaatcaaaagacaaaacttacaattgacgaattaaagtcatattatacaaattggttaacaaactatatgagtgcttaa

SEQ ID NO: 317817 - DNA, 855 bp, Unknown
  Bacterial polypeptide expressing nucleotide sequence isolated from the Sargasso Sea
atttcagctcctaacaactttaacaaaatattaatggatatgatctcccatgaaaacatagcctcaaaaagtgtggtttatgaatcttatgataagcaagtgcaaggcaggactatcatagaagcaggaatgggtgatgctggagttatggctccttttaatagtgaaaaatatccaaaagaaatacagaaagttggtattgctctttcgacagatcacaatccaaatcaaagtaagataaatccgtaccttggaggcgtaaacgctactcttgaatctatgagaaatgttgcgtctgttggcgcgactccgcatgcaatgtctgattgcctatgttttgggaatccagaaaaaccacatcaaatgtgggagtttgttgaagcggttcgaggtgtttcagatacatgtaaaaaaatgaaattaaaggagcaccccgactcctccactcctatcattgctggcaacgtaagtttttataatgaatcaaaatctggctctataccgccgagtcctattattagttgtttaggaaaaatcaatgatattagcaatgtggtaacaatgtcttttaaattacccgattcaaagatttttatgattggtaaaagaaaagatgaactaggtggtagcttgtactacagcctccacaaagaacttggagctaatgtcccaaacccaaatatagatgaagtaaaaaatcaaatttatgcaattactgacagcattgatggtaaccttattaatgcatgtcatgatatttctgatggaggagttgcggtcacattatcagaaatgacctttgaaaataatataggatgctttgttaatattcccgggaaattgtcttttgaaaaa

SEQ ID NO: 317818 - DNA, 359 bp, Unknown
  Bacterial polypeptide expressing nucleotide sequence isolated from the Sargasso Sea
ctcaatactattacaaaatatgactggttggtcattgcctgtggcttcagcacatggtgagggaagagcaaattttgcaaacaataatcttcaagaactaaagaatcaaaatcaaatagcaataaattttgttgattctaatgaaaatagaactgaaaaatatcctataaatcctaatggatctgaggaggggatcaccggtgtgactgctgcagatggcagaatcacaataatgatgcctcatccggaaagagtttttagaaaaattcaaatgagctggcatccaaaaaattggtcagagttctctccatggatgcagatatttgtaaatgcaagaaaatttactgaaaacaattaat

SEQ ID NO: 317819 - DNA, 865 bp, Unknown
  Bacterial polypeptide expressing nucleotide sequence isolated from the Sargasso Sea
aaaggtattgctgctactgtagattcttcatcgcattattgcttggcacatccattaacgggtggaaagctagttgtttgtgaatcatggagaaatcttatttcagtaggatcttaccctatagcaatcacaaattgtttaaactttggcaatccaacaaaagagaaaataatgggacaatttgttgaatgtatagatggaatttctcaagcctgtagatatttagactatccggtagtatctggaaacgtatccttttataacgaaacccaaaaaagatcaatatcacccaccccaacaattggtggtgttggcttaataaaaaatttgaactttatgatgactaaaaatttaaagaagattaacagcacaatattggtgataggaaaaacattaggacacttataccaaagtgaattttttagagaagttctaggaaataataatggtcctcctcctgaagttaatttatttaatgaaaaaaataatggtttagctgtccaaaaaattatttcgaaaggattagtaaattctgtccatgatatttcttcagggggaatactaatctctttagcagaaatgtgtatttctggaaatattggagtaaaaattaaaataccaagaaatgatattagtccaaatgagtatttatttggggaagatcagagtagatatttaattgagcttgataagagtaaagaagatgaagtatttaaaattttaaaaaaaagtagtatttactatgaaaaaattggccattctcaaaaagaaaggttagaattagataatgaatttagtataaaattagatgagttaaataaattaaactcaggctggtttaaaaattattttaatgaaaattaag

SEQ ID NO: 317820 - DNA, 818 bp, Unknown
  Bacterial polypeptide expressing nucleotide sequence isolated from the Sargasso Sea
aaatatctgtagtaaagaatggatttggcaacagtatgatcatacagtgatgggagacaccattcaaaaacctggaggagattctggtgtggtgagagttcatggcactaataaagcagttgcagcatcagtagactcatcagcagtttattgttgggctcacccttttacaggtggaaagcaagtggtatgtgaaagttttagaaatttgatatctgttggagcaaaaccaattgctattacaaattgtttaaattttggcagccctgaaaataaagagaacatgggtgagtttgttgaatgtattcagggaattggagaggctagctcttatttaaaatttcctgtcgtgtctggaaatgtctctttctataatcaaacaaaggatcaagggatcaaacccaccccatctataggtggagttggacttataaaagattatacaaaaatgattactatggattttaaagaagtcgataatgttgtgttagttattggtaaaactgaaggtcatattgatcaaagtttatttgcaagagttatattggatgaaaaaaatggacctccaccagaaataaatctttttaatgaaaaaaataatggagaaactcttttaaaattaatcgatagtaatttaattaaaagcgcgcatgatatttccttaggtggaataattactgccgtatcaaaaatgtgtattaatggtaataaaggtattaatcttaaaaaaccaaaatttttaatcaatgaaatagaatatttctttgcagaggatcaaggaagatacattgttgaaattagtaaaaaagaccaaaaaa

SEQ ID NO: 317821 - DNA, 220 bp, Unknown
  Bacterial polypeptide expressing nucleotide sequence isolated from the Sargasso Sea
atggaagtaaacgaaaatatagctttagagcacggtttaaataaacctgaatataaaaaaatatgtgaattactaaaaagaactcctaatttaacagaacttggaattttttcggcaatgtggaatgagcattgctcgtataaatcttcaagattgcatctgaaaaatttacctacaaaaggaaaaaaggtaattcagggacctggcgaaaatgcaggtg

SEQ ID NO: 317822 - DNA, 790 bp, Unknown
  Bacterial polypeptide expressing nucleotide sequence isolated from the Sargasso Sea
aatgagaaatgtagcagccgttggagcaactccacatgctatttctgattgcttatgttttgggaacccagaaaaaccccatcaaatgtgggaatttgtagaagcggtaagaggtatctctgatgcatctatcggcataaagttaaaagaaaaccaagaccatcctaccccaataatcgctgggaatgttagtttttacaatgagtctaaatcgggcgctataccacccagcccaattgttagctgccttgggaaaattaataacgtgaaaaaaacagtatcgatgtcatttaagaataaaaactccattattctaatggtcgggtcaagaaaaaatgagcttggtgggagtcttttctacgatatgcatggagaattaggtgcaaatgtcccctctccagaccttgagaaagttaaaacccagatctacgcaataacagattgcattgaagaacaactttttttatcatgccatgatatatctgatggtggacttgcggtagctatttcagaaatgacatttggaaataatattggttgcgatgtagtggtcccggggaatctagctttagaaaaactgttattttctgaaactggtggatttatagttgaaacagaacacaagcatctacaacagataaaaaatatttttaaagcccacgatataggttattataatattggcagtacaagtgacaatggtcgaattagaatgaatgatgtaattgacttagatgtgaaagaagcaaaaagtttatggtctaacgggctcagggataaaataaaatag

SEQ ID NO: 317823 - DNA, 892 bp, Unknown
  Bacterial polypeptide expressing nucleotide sequence isolated from the Sargasso Sea
tgatttcccaaatgtttcagtgggtgcacaggcaagtattgtcggtaaaattgtagatgaaaagcattatactgtctattataaaaataaaaaaattgtagatgggccaatcgaaaaaatcaacgagggctttgtctatgatcgtccaatgtctcaaatagatgtacaacaatcaaatgaagctttaccaaaaaatatagattacaataatttgatattaaaaattttatcacatgaaaacgtggcctcgcgtgcagttgtttatgagtcttatgataaaaatgttcaaggtagggttgtcaatgagagaggtaaaacgaatgctggtgtagttgctccttttgattccaaaaggttccctgaagaaattaaggatgattgtttttctgcaacccttgctcacaacccttcaattggtaaaattgacccttatgttgttgcacaatatgctgttatagaagcttgtgcaaaaactgtttccgttggcgcctctccgcttgccattactgactgtttatgttttgggaatcccgaaaaacccgaacaaatgtggcagttttctcaaagttgtattgcgattagagaaacctgtagtcttttacacttcaatgaaacaaacaacctaccaatagtagcaggaaacgtaagtttttataatcaaagtggagatcaatctatacccgcaagcccaatgatagggtgttttggcagagttgttaaagatagggtgttaataaacggtttcaaatcaagtgatgctaatttatatttattgggggaaacgcctgccttcgctggtggaagtatagcaacaaatgttttgaaaataaataatacagaactaaaaaaaattgatgtgcagaaatacggtgagacactaaactgtgtttta

SEQ ID NO: 317824 - DNA, 727 bp, Unknown
  Bacterial polypeptide expressing nucleotide sequence isolated from the Sargasso Sea
aattgtttaaactttggtaatcctgagagagaaaaaattatgggtcaattcgttgaaactatagatggtatgtcccaagcttgttcgtatttaaactttcccgtagtttcaggaaatgtatcattttataatgaaacaaataatcaatcaataattccaacaccgactataggtggcgtgggcttaataaaagatttaaataaaatggtaacaaataactttaaagagataggaagtaatataataataattggtaaaactttaggacatctataccaaagtgagttctttaaagaaattttaaattttactgaaggtccacctccttcaactaatttatttaatgaaaaaaataatggattaacaattcttgatcttgtttcaaaaaaactagtaaattcaatacatgatatttctgctggagggcttctagtttgtttgacagaaatgtgcttatcgggaaagatcggggctaaaattaaaattccaagaaataatattgaaaagcataattatttgtttggtgaagatcaaagtaggtatataatagaggtaaagaaagaaaatttgaacaaaataacaagactattaaataaaaatagtattttttatgaaaatataggaaatactcaaaatgaatatttagaagttgaagacgaatttaaactagacttaaatgaactatataaattaaataataattggtttgaaaattattttaaataga

SEQ ID NO: 317825 - DNA, 842 bp, Unknown
  Bacterial polypeptide expressing nucleotide sequence isolated from the Sargasso Sea
agactcatcagccatttattgtcatgctcacccactaactgggggcaaacaagtagtttgtgaaagctggaggaatataatctcagtcggtgcaaaacctatcgcaattacaaattgtcttaattttggaaatcctgaaaaagaaaaaaatatgggagagtttgttgaatgtgttgagggtatttcagaagcatctaaatatcttaattatcctgtcgtttcaggtaatgtatctttttataacgaaacaaaagataaaggaataaaacctactccatcaattggtggtatagggttaatttcagactataaaaaaatgataacaatggaattaaaaaatgatggtaattatctttatgttattggtaaaactgaaggtcatttaaatcaatctatatttgccagaaatatattatctgaatttaaaggaccacctccggaaattaatttatttaatgaaaaacaaaatggagcgtgtgttttaaatttgaaaaaggaaaatttaatagaaacctgccatgatgtatccttaggtggcattttaacggctatttcaaaaatgagcataaaaggaaataaaggtgtaaaattatttcctattgatagtttagtgaataaatttgaatatttttttggtgaagatcagggtagatatgttatagaagttaagcctgaaaatttagaaaatcttgaaaatatcttaaaaaaagactcaattcattttgataaactaggaataattgaaagtaatcagattacatatggaaatgatcttaaaatatcaattgacgatatcaaagaaggatataaaaattggttaaaggaatatatggtaagctaat

SEQ ID NO: 317826 - DNA, 877 bp, Unknown
  Bacterial polypeptide expressing nucleotide sequence isolated from the Sargasso Sea
caaaagagaaaaaaaaaacttctctatttagctaaaaaacatcatctttctttagatctaaaagaaatgatggctataagagaatactataaaagagaagatctaaaagattttagagaagaaagaaatttgtcatctgatccaactgactgtgaactagaaatttttgcacagacttggtctgagcactgcaagcataaagagtttaacgcaaaaattacttactatgatgaagaaacaaaaacaaaaaaagagattaactcccttttttcaagtcgcatcaaagcagcgacttctcttattaagaaaagatttgaagatcaaggaaacccttttcttctaacagttttttctgacaatgcaggggttgtcaaaatcgatgacaaaagagtttttatctggaaagtagaaacccataacacaccctcagctcttgatccttatggtggggccatcacaggtattcttggcaataacagagatgctctaggcacagggatagggggagccaagcttattttcaatacaaactgtctatgctttgggaatccaaactcgacaaaagaacttgcagcttatcaacatcaccctcgctacatcatggatggtgtcatccgagggattcaagatggtgggaataaaagtggtgtgcccactgttaatggctcagttatctttgatgatcgttatgcaggaaagcctcttgttttttgtgggacaggagccatcatggaacaaaaaattttagggagaaggagttggaaaaagcccatagcagctcaagatctcattctcatgcttggaggacgagtggggaaagacggcctacacggagccactctttcctcaacagctcttgatgaaaaaacacctcact

SEQ ID NO: 317827 - DNA, 901 bp, Unknown
  Bacterial polypeptide expressing nucleotide sequence isolated from the Sargasso Sea
agcgtgggtatcctaagtggtcttgccgccgcagggtgtggattaccaatgctgctatcagtcgtcggtcgtgttgctcccgaaaaccgtcgaagcctttggttcggaatcgtatctgctggtggcacaggtggccagatgtttctcgttcctcttaacggatatttgcttgaacgcatggactggactgatgcgataaccatattggctgcggtaatttttgccatagtcccgatggcaatgctcgctggcaaagccagtggggacgcgctcaatcaaaaaaaagatcatcaaacccttagtcaggctttgaaggaagcccgtagccataagagttttatatttttgtgccttggattttttacgtgtggctttcaagttcaattcgtagttacccatttaccaaaatacttggaagatactgggacaggagcaactattggagcccatgctatcgcactaattggtttgacaaacgtaattggcactgctcttgcaggtatgctcggtggaaaattcaagaaaaagaatttgcttgccggactttatatcgggagatccttggtaatgcttgcctttttcatatcaccaataacacagatgtcggtgtatatatttgccgcctgcataggattcctatggcttgcgacagtaccactgacggccggccttgtatctggtttttttggtccccggtatatggcgacattgtatgcgattgccttcttaagtcatcaaattggtggatttcttagtacttggatgggtggtatagttcgtgatgctactgggtcatatgatcaatggtggtggatcatcatttttggcggtatgcttgcggctttattccatcttccaattcaagaacgcccggtagaaagattaacgcaaccagcataaa

SEQ ID NO: 317828 - DNA, 775 bp, Unknown
  Bacterial polypeptide expressing nucleotide sequence isolated from the Sargasso Sea
ttagagaatggtaaagaagcagcagcaaaaaagatttttgataaatggaatttagattttgctgtaattggaaaaactactgactcaaaaaaaatagaattattttttgataatgataaagtagcagaaataccaataaatatattagccgagaatgcacctgtttacgatcgaaaatggaaaaaaacaaaacttccacaaaaaattaattttaataaagatgattttaaaaagttaaaaattactgaaattcttaaaaaaatattaggcttgccaaatatttcaagcaaagaatggatttggcaacaatatgatcatactgttatgggagatactatccaaaaaccaggatcagactcaggtgtagtaagagtgcatggcactaataaagctgttgcaacatcggtagattcttctgctgtatattgcttcgcacacccacttacaggtggaaagcaagttgtttgtgaaagttggagaaatttaatttcatgtggatctaaaccaatagctattactaactgtttaaactttggtaatccagaaaaagaaaagaatatgggtgagtttgttgagtgtgttgatggaattaatgaagcaagtaagtttttagattatcctatagtttcgggcaatgtatctttttataacgaaaccaaagataaaggaattaaacctacgcctgcaattggaggtgttggtttaattaaagactataaaaaaatgatcactatgagtctaaaaagtagcgaaaatttaattttagttgttggaa

SEQ ID NO: 317829 - DNA, 191 bp, Unknown
  Bacterial polypeptide expressing nucleotide sequence isolated from the Sargasso Sea
acttgtagataatggattgatcgttttgagatataaaaataatcccaatggatccttattcgatatcgcaggtataactaatgaaaggggaaatgttctaggtttaatgcctcatccagagcgagcatgtgacgagataattggtggtaccgacggtctctttacattaaaatcattaatatcgaaataaa

SEQ ID NO: 317830 - DNA, 196 bp, Unknown
  Bacterial polypeptide expressing nucleotide sequence isolated from the Sargasso Sea
atgaagtatccatctaatccaaatggatctagtggtggcgctacaggtttttgtaataatgatggtagaataaatattatgatgcctcatcccgaaagacttgtacatattaataacttttcgtggtcaccatctaaatggaaagtatcgccatggttgaaaatgtttattaatgcaagagaatgggttaattaat

SEQ ID NO: 317831 - DNA, 554 bp, Unknown
  Bacterial polypeptide expressing nucleotide sequence isolated from the Sargasso Sea
tctgaccaatttatatgatcagataatagatttttcattaaaagataaattaattataggcatttgtaatggatgccaaatattaattaatcttgggttagttccaagcctaaataaaaaagatccagaagttgcaatgattgaaaataaatctgggagctatgagtgtcgatgggttgatgtaaaagtaaataataataaatcaccatggctaaaaaatattagtgcgatgcacttacctgttgcccatcaagaggggcaattcatgatacctattaatctactaaaaagtatcaaagctaataaccttattggtttacaatacattaataaccataaaaaattagcaaaaggtcagtttccttttaatcctaatggatcaaaagatgatatagctgcgttaacaaatcaaaatgggaaagttcttgcaatgatgcctcacccagaaagagcattttatcattatcatgttcctaattggcaaaataatacttctaaaaaattcggtgatgggtataaaatttttatgaacgcaaaaaaattctttgcataaa

SEQ ID NO: 317832 - DNA, 841 bp, Unknown
  Bacterial polypeptide expressing nucleotide sequence isolated from the Sargasso Sea
gttgactcgtcagcttcttattgttacgcacatccattcactggaggaaaacacgtcgtttgcgaagcttggagaaatttagtttcagttggtgctgaacctatagcgataacaaattgtttaaattttggaaatcctgagaaaaaagaaaatatgggagaatttgttgagtgcattgatggaattaatgaggcgagcaaatatttaaatttccctgtcgtttcaggaaacgtatcattttacaatgagacaaaagataaaggtattaaacccacaccaacaattggaggtgttggcttacttaaggattatgaaaacgtaatgagtatgaattttaaatcaaaagataatttagtattagcgattggaaaaacagaaggcagtttggatcaaagtatttttgctaaagtaattttagatgaaaaaaaaggacccccacctgaaataaacttatttaatgaaaaaaataatggggaaacaattctaaaagttattaaagaaaaattagctttatcagtccatgacgtatctcttggaggaataatgattgctgctttaaaaatgtgtataaacggcaataagggaattaaattttacaagttcaaaggtttgataaatatttatcaatattttttttcagaggatcaaggtagatatattattgaggtagataagaaaaatcttaaaaaagtagagggtattttagagaaaaattctgtgcattttgatttattaggagaaacaactgataaagagataatcataaatgatgagttaacttttacagtagacaaggttgcagaattttataaaggttggttgtataaatacatgagttaat

SEQ ID NO: 317833 - DNA, 154 bp, Unknown
  Bacterial polypeptide expressing nucleotide sequence isolated from the Sargasso Sea
taaaaaattagcaaaaggtaaatttccttttaatcctaatggctctagcgaagatatagcagctttaactaatgaaaatggtaatgttcttgcaatgatgccccatcccgaaagagctttttatcattatcattttcctaatctggcaaaataa

SEQ ID NO: 317834 - DNA, 172 bp, Unknown
  Bacterial polypeptide expressing nucleotide sequence isolated from the Sargasso Sea
atgataaatccagaaaataatgatctatatgatcttaatgaagcactaaaagttgaaaatttaacaattaatgattatgaagaaatttgcaaaagattaaatagaaaaccaaataggactgaacttggaatgtttggtgttatgtggtctgaacattgtgttatagaaatca

SEQ ID NO: 317835 - DNA, 827 bp, Unknown
  Bacterial polypeptide expressing nucleotide sequence isolated from the Sargasso Sea
ttattgttgggctcatcctttaactggtggtaagcaagtagtttgcgaaagtttcagaaatcttatagctgttggtgcaaaaccaattgctattaccaattgtttaaattttggtagtcctgaaaatgaagaaaatatgggtgagtttgttgaatgtgttcaaggtataggtgaagcaagtgaatatttaaattttccagtagtttccggaaatgtttctttttacaatcaaacaaaagatgagggtatcaagcctacaccttcaattggtggtgtgggattgataaaaaattacaaaaaaatgattactatgcaatttaaagaaataaataacatagttttagttattggaaaaactgaaggtcatatagatcaaagtttatttgcaagaaatgttttagacgaaaaaaatggtcctcctccagaaataaatttatttaatgaaaaaaataatggagaaacacttcttaaacttattgaaaataatttaattaaaagtgctcatgatgtatctctaggaggaattattactgctgttgcaaaaatgtgtataaagggaaataagggaatcaatatcaaaagacctaagtatttgataaatgaaatggaatatttttttggagaggatcaaggtaggtatattttggaaataagtaataaagatttaaaaaaagttacagatatattgaataaaaatgcggtacattttgatgaacttggcattattacagaaaatgaactatatattaacgataagacaaaagttacaattgacgaattatcaacttctaataaaagttggttaacaaactacatgagtaaataat

SEQ ID NO: 317836 - DNA, 571 bp, Unknown
  Bacterial polypeptide expressing nucleotide sequence isolated from the Sargasso Sea
atgagggttttggtattatcaggttacggtattaattgtgaagatgaaacattacatgcctttgaagtagtaggatttaatgggaaaattgttcatattaatgatctgattcaagatcccaaacaactaaataattatcaagtatttactatacctggtggtttttcatatggtgatgatacaggttcaggaaatgcaatggcaaaaaaaattatgattaatttatatgatcaattacttgaattttcatcaaaagataagttaattatgggaatttgtaatggatgccaaatattaatcaaccttggattggttcctaatataaataaaaaagatcctgaagtagcgttgattgaaaataaatctggaaattatgaatgtcgatgggtagatgttaaagtgggcaccaataaatcaccatggcttaaaaatattactactttaagtttacctgttgctcatcaagaaggtcaattcatgatacctttaaacgtacttaaaagtatcaaagctaaaaatcttattggtttacaatatattgatcaagataaaaaattagcaaagaggtaaa

SEQ ID NO: 317837 - DNA, 247 bp, Unknown
  Bacterial polypeptide expressing nucleotide sequence isolated from the Sargasso Sea
aaacttagtttgcgtacgttatatcgacaattttggtaatgttacccaaacctatccttctaacccaaatggctccgaatcgggaatcgctggtttaacgtcctctgacggaagggccactattatgatgcctcaccctgaaagggtattcctcaaaaaacaactatcatggtctcccgacacatggctcaatgaagaaagtccttggatggaaatgtttaatgctgctaggagaacggttaaataa

SEQ ID NO: 317838 - DNA, 487 bp, Unknown
  Bacterial polypeptide expressing nucleotide sequence isolated from the Sargasso Sea
attgaacgatgatcagattaaagaaaaactatctgagttaaatatcgcactgactcctgaggaaggacgaaaaatacagcatgaaatgctaggccgaccaccttcattggctgaattggtattattctctatccaaggctcagaacactgttcctataaaagtagccgctctcacttaaaaaactttgttaccgatggcccggatgtagttttgggagcaaaagaagatgctggtgtcgttgcaataaccaaagataaaaatgggaaccgttggtgcattgtaatgagccatgagtcacacaaccacccttcccaaattgttccctatgaaggttctgctacaggcgttggtggaaatgtaagagacgtaatgtgtatgggagctgaggtcattgcctgcacagactctttccgatttggaaatataaaaaacagtaaaactaaatggatacatgacggagttgttgctggcgtagccggctatgga

SEQ ID NO: 317839 - DNA, 305 bp, Unknown
  Bacterial polypeptide expressing nucleotide sequence isolated from the Sargasso Sea
ggctcatggagaagggagggtagatgcgtctgtgagtgatattactggattgaataataatcaaaatacaacgattacatactcaaataataaagggggttttactgaagaatatcccgcgaatcctaatggttctttaaatggtatagctggtgtaacaaatatcaccggaacagtaactattatgatgcctcatccagaaagagcatttttaacagatcaatattcttggagtcctgaggaatggaccaattacagcccttggataaagttctttcttaatgctagagagtttattgattgaa

SEQ ID NO: 317840 - DNA, 745 bp, Unknown
  Bacterial polypeptide expressing nucleotide sequence isolated from the Sargasso Sea
acatcgtcaagtattgagatggcctcaaaaggaaacttgggcatagaaatagatttaaataaagtcccttgcagagaaacaaaaatgacaccttacgaaataatgctctcagaaagtcaagaaagaatgttgattgttttagaaaatggaaaagaagagatggcaaaaaaaatatttgataaatggaatttggattttgctgtaattggaaaaacaacaaattcaaaaaatattgaattatttttcaataatgagcaagttgcaaatatacccgtaaatatattagttgaaaattctcctatgtatgatcgaaaatggaaaaaagctaaattaccaaaaaaaaataagattaaaaaggaaacttacagtaagttgaaaataaaagatgtgctaaagaaaattttatctaatcctaacatttgtagcaaagaatggatttggcaacagtatgatcatactgttatgggtgatactattcaaaagcctggtggtaactctggtgtagttagagtgcatggaacaaataaagctgtcgctgcttcagttgactcttcggcagtttattgttgggcacatcctcttactggtggtaaacaagttgtcgctgaaagttggagaaatttaatttcagttggagcaacaccaatagctttgacgaattgtcttaattttgggagcccagaaaatgaagataacatgggtgaatttgtagaatgtgttcaaggaattggtgaagcaagtaagt

SEQ ID NO: 317841 - DNA, 808 bp, Unknown
  Bacterial polypeptide expressing nucleotide sequence isolated from the Sargasso Sea
actgggaggaaaacaaatagttgcagaaaactggagaaatttaatatctgttggagcaaaacctctggcaataactaactgtttgaactttggaagtccagaaaaagcagatgttatgggtgaatttatagattgtataaatggcattaaggaagcttgtgaatttttaaattttccagtcgtgtcagggaatgtttctttttacaacgaaactaattcaaaaagtattcatccaactcctgttattggaggtgttggtataattaatgatttaaaaagaattacaaatataaagacaaaagaaaatggtaatttaatactagtggtaggcaaaaccattggtcatttgggccaaagcgctttcctttatgaaaatttcgccatgaataatgggcctccacctgagataaatttgttaaatgagaaaaataatggtttagctgttcttgaattaattaaaaaaggtattgcattatctgttcatgatatttcttcgggaggtatgctagtttctttagctgagatgtcaatgtcttcaggtcttggattgaaaatatataaaccaaaaaaacttaaaaacttttatgaatatttttttggagaagatcagggaagatatttaattgagctatctaaaaataatcttaaaaatatagaggtattatttaaaaaaaataatgtttttcatgaaattgttgctgaagtacaaaatgacacgttcgaaatagaaggtttgttctctcttaaaactaaagatcttcaaatttgtaataataaatggtataatgattttaatgccattaactaa

SEQ ID NO: 317842 - DNA, 319 bp, Unknown
  Bacterial polypeptide expressing nucleotide sequence isolated from the Sargasso Sea
ttgcctatcgcccatcaagaggggcaattcatgatacctattaatctacttaaaagtatcaaagctaataaccttattggcttacaatacattaataaccataaaaaattagcaaaaggtcagtttccctttaatcctaatggatctaaagatgatatagctgcgttaacaaatcaaaatggtaatgtacttgcaatgatgcctcatccagaaagagcattttattattatcataatcccaattggcaaaataatacctctaaaaaatttggtgatgggtataaaatttttatgaacgcaaaaaaattctttgcataaa

SEQ ID NO: 317843 - DNA, 238 bp, Unknown
  Bacterial polypeptide expressing nucleotide sequence isolated from the Sargasso Sea
tatgaaggaaaaaaaagaaaaaattaatgacaaattaattatagaacatggactaactttaactgaatacaaaatgatccaaaaaatacttaacagaaaaccaaatattttagagctaggtattttttctgtaatgtggagtgaacattgttcatataaatcaacaaaaaaatggttaaagactcttccaactaaagcaaagtgggtgatttgtggtcctggagaaatgctggaataa

SEQ ID NO: 317844 - DNA, 779 bp, Unknown
  Bacterial polypeptide expressing nucleotide sequence isolated from the Sargasso Sea
aaatattcctgtcaacacattggtagaaaactctcctttgtatgaccgagaatggaaaaaatcaaaattaccaaaaaaaaataaaattaaaaatgaaactttcagtaaattaaaaataaaagatgttttgaaaaaaattttatctaatcaaaatatatgcagtaaagaatggatttggcaacaatatgatcatacagtaatgggagataccattcaaaaacctggaggagactctggtgtagtaagagtacatggaacagataaagcagttgctgcatcagttgactcttctgctgtatattgctgggctcatccattaactggtggaaaacaagtggtagcagaaagctggagaaatttaatttctgtaggagccacaccaattgcgataactaattgtcttaactttggaagtccagaaaataaagataatatgggtgaatttgttgaatgtgttcaaggaattggggaagcaagtaaatatttagattttccagtggtctcaggaaatgtatctttttataatcaaacaaaagaagctggaataaaacctactccttcaatagggggagttggtttaattaaagattataaaaaaatgatctcaatggattttaaagaaattgataacttagttttatccattggaaagacagaaggtcatatagatcaaagcatatttgctagaacaatactagatgaaaaaaatggtccaccaccagaagttaatttatttaatgaaaagaataatggagagtctttattaagcttaattgaaa

SEQ ID NO: 317845 - DNA, 469 bp, Unknown
  Bacterial polypeptide expressing nucleotide sequence isolated from the Sargasso Sea
gtatgcaacggttgccaaatgttatccaacttacaatcaattatccctggctctgagcattggcctaaatttataaaaaataattctaatcagtttgaagcaagacaagttctagtaaaaattccaaaatcaaactcaatgctcttcaaagatatgcataaatcaatattgccaataatcgtgtctcacggagagggaaaaatatctataaaaaataaatctagtctcaaaaaagcaataatgcaatatgttgatataactgggaagtatacagaggaatatccttacaatccaaatggttcattaaatggtgttacaggtttttgtaataatgatggtagaataaacataatgatgcctcatcctgaaagattaactcatgtaaataatttttcatgggctccagaggaatggaaactttccccttggcttaagttgtttaataatgcacgggagtgggttaattaat

SEQ ID NO: 317846 - DNA, 810 bp, Unknown
  Bacterial polypeptide expressing nucleotide sequence isolated from the Sargasso Sea
ctaacatttcaagcaaagaatggatatggcaacaatacgatcatactgttatgggtgatactattcaaaaacctggttctgactgcggagtggtaagagttcatggtacaaagaaagctatagcatctactgtagactcgtctgctgtctattgttacgcacaccctcatacaggtggaaagcaaattgtttgtgaaagctggagaaatttaatttcctgtggatctagacctatagctattacgaattgtttaaactttggtaatcctgaaaaagaaaaaaatatgggtgaatttgttgagtgtgttgagggaatcaatgaagcaagtaaatttttagaatatccagtagtttcaggaaatgtatctttttacaatgaaacaaaagataaaggtattaagcctactccaacgattggaggtgttggtttaattaaagattataaaaacatgattactatgcatcttaaaaatattggaaatttaattctagttgtaggaaaaactgaaggacacatagatcaaagtatatttgcaataaatattttaaacgaaaaaaaaggtcctccgccagttgtaaatttgtttaatgaaaaaaataacggtgtaactattttaaaattaataaaagatgggttaattaactctgctcatgatgtatcgttaggaggaattattacggcagtttcaaaaatggcaataaaaggtaaaaaaggttttaagtttaaaaaacttaaagttttaatgaataaatttgattactattttggtgaagaccaaggaagatatataattgaaattgaccactaat

SEQ ID NO: 317847 - DNA, 877 bp, Unknown
  Bacterial polypeptide expressing nucleotide sequence isolated from the Sargasso Sea
agagtacacggtaccattaaagcagtggcctctactgttgattcatctgcttcctattgttatgcacatccatttacaggaggaaaacaagtggtttgtgaggcttggagaaatttagtttcagttggcgctgatcctatagcaataacgaattgcttaaattttggcaatccagaaaaaaaagaaaacatgggcgaatttgttgaatgcattaatggtattaatgaagcaagtaaatatttaaattttcctgtagtttcaggaaatgtatctttttacaacgaaacaaaagacaaaggtattaaacctactccaacaattgggggagtgggattgataaaagactataaaaatttaatgacaatgaggtttaaatcgaaagaaaacttagttttggttattggaaaaactgaaggaaatttagatcaaagtatctttgcaaatataattttagatgaaaaaaaaggaccaccacctgaaataaatctgtttaatgaaaaaaataatggggaaacaattctaaaaattattcaagaaaaattagcattatcagttcatgatgtatctcttggtggaataatgattggtgccttaaaaatgtgtatagcaggcagtaagggaattaaattttataaattcaagaatttaactaatatttatcaatattttttttctgaggatcaaggcagatacattattgaggtagacaaaaataatcttaaaaaggtagagaatattttaaagaaaaactctgtgcattttgatttattgggagaaacaacagataaagagattatcataaatgatgagccaacttttacagtagacaaggtgacagaattttataaaggttggttatacaaatacatgagttaat

SEQ ID NO: 317848 - DNA, 974 bp, Unknown
  Bacterial polypeptide expressing nucleotide sequence isolated from the Sargasso Sea
gttttaaaaaaaattttatcaaacccaaatgtttgtagtaaagaatggatttggcaacaatacgatcatactgttatgggtgatacgatacaaaaaccaggaggagactctggtgttgttagggttcatggaagtaataaagcagtagcagcatcagtagattcatctgctgtatattgttgggcacatccattaacaggaggtaaacaaattgtatgtgaaagttttagaaatttaatttctgttggtgcaaaaccaattgctattacaaattgtttaaattttggtagtcctgaaaatgaagaaaacatgggtgaatttgttgaatgtgttcaaggaattggtgaggcagctgaatatctaaaattcccaattgtttctgggaatgtatctttttacaatcagactaaagagataggcattaaacccactccatctattggaggtgtcggtttgttaaaagattatacaaaaatgattacaatggattttaaggaggtagataataaagttttactaattggaaaaactgaaggacatattgatcaaagtctatttgcacgaaacattttagatgaaaaaaatggccccccacctgaggttaatctatttaacgaaaaaaataatggtgaaactttattaaaattaattgatgctggttatattaaaagtgctcatgatgtatcgattggtgggataattactgctgtagcaaagatgtgtatcaaaggatacaaaggtattaatcttaataagccaaaatacttaattaatgaaatcgaatattttttttctgaggatcaaggtagatatataatcgaagtcaataaagaaaatctaaaaaaagttaccgaaatcctagataaaaatgctgtacattttgatgaactaggtactataaatgaagatcaactttttattgatgaaaagtcaaaaattacaattgacgagcttaaatcatccaaatacacttg

SEQ ID NO: 317849 - DNA, 133 bp, Unknown
  Bacterial polypeptide expressing nucleotide sequence isolated from the Sargasso Sea
tactggtgtaggaggtataatgagagatgtattcacaatgggcgcaaggccaatagcaaatttaaattctatacattttggatctcctcagcataagaagactaaaaatcttttaagaggcgtagttaaggga

SEQ ID NO: 317850 - DNA, 194 bp, Unknown
  Bacterial polypeptide expressing nucleotide sequence isolated from the Sargasso Sea
gatgccgcgtgaaccgactccggaagaaatttcaacagagcaacgttacctaagtctgggtctgagcgattctgaataccaacttgtttgtgaattgctgggccgaaaaccgaatcttaccgaaacagggatctacggggtaatgtggtcggaacactgcagttacaaaacctcaaagatgcaactctaccgtt

SEQ ID NO: 317851 - DNA, 764 bp, Unknown
  Bacterial polypeptide expressing nucleotide sequence isolated from the Sargasso Sea
ggactctgcggtaattagaattcataataaagaaaaagcaatagcaataacagtcgactcatcagcattgtactgtaaagctgatccaaaaactggaggaaaacaaatagttgctgagaattggagaaatttaatttctgttggtgcaaaaccattggcaataacaaattgtctgaactttggaagcccagaaaaacctgaggttatgggtgaatttgtggattgcataaacggaataaaagaagcttgtgaatttttaaattttccggtcgtttcaggaaatgtttctttttataacgaaaccaactcaaaaagtattcatccaacaccagttataggtggtatcgggattattaataacctaaataaaattacagacattaagacaaaaaaaaatgggaacttaatcataatagttggtcaaactattggtcatttagggcaaagtgcttttctttatgaaaatttttctttaaaagatggaccgccgcctgagataaatttattaaatgaaaaaaataatggtttagctgtcctcgaattaattaaaaagggcattgcactatctgttcatgatatttcttctgggggtatgcttgtttccctagctgagatgtctatgtcatcaggtcttggattaagaataaataagccaaagaaacttaaaaacttttatgaatatttttttggtgaagatcagggtagatatttaattgaggtttccaaaagtaatcttaaaactatggaggtatttctcaaaaaaa

SEQ ID NO: 317852 - DNA, 295 bp, Unknown
  Bacterial polypeptide expressing nucleotide sequence isolated from the Sargasso Sea
catgctcgctcctcgtgctctcattcttcgtgctcccggaacaaactgtgactttgaaactgcttatgcatttgaacaggccggtgcaatcactcggcgtgttcatattcgtgctttgacagaaaagcccgaattagccaatgactttcagatattctgtatcccagggggcttttcctatggtgatgatatagccagcggacgtatcctcgccattgaactgaagcttcggcttggagacactctacaaaagtttcgtgacaagggtgggttgattcttggaatctgcaacggc

SEQ ID NO: 317853 - DNA, 827 bp, Unknown
  Bacterial polypeptide expressing nucleotide sequence isolated from the Sargasso Sea
atattgttgggctcatccacctactggtggcaaacaagtagttgctgaaagttggagaaatttaatttctgttggtgcagtacctatagccattactaattgtcttaattttggaagtcccgagaatgaagacaacatgggtgaatttgttgaatgcgtagaaggtatcggagaagcaagtaaatatttaaattttcctgtagtctctgggaatgtatctttttacaatcaaacaaaagaaattggaattaaacctacgccgtcgatcggtggagttggcctaattaaagattataaaaaaatggttacaatggattttaaagaaattgataatttagtgataataattggtaaaacagaaggacatatagatcaaagtctttttgctcgagctattttagatgaaaaaaatggacctcctccagaagtaaatttgtttaatgaaaaaaataacggtgaatctttattaaatctaattaataaggattacattaaaagtgctcatgatatatctttgggaggtattcttacagctataagtaaaatgtgcataaaaggaaataaggggtttaaatttgaaaaatcaaaaaatttaatgaacgaattcgagtttttctttgctgaggatcaaggaagatatttaattgaaattaaccctaaagattataaagaagtttctaaaattttagataaaaattcagttcaccatgaaaaattaggagttattattgagaaaaatgtaattattaatgaaaagacaaaagttacaattgacgaattaaaatcttataatagtaattggttaattgattatatgagcgcataat

SEQ ID NO: 317854 - DNA, 304 bp, Unknown
  Bacterial polypeptide expressing nucleotide sequence isolated from the Sargasso Sea
atgaacgtattagtcttatcaggttatggtattaattgtgaaaatgaaacactacatgcatttgaagtagtaggctttaaaggaaaaattgttcatattaatgatctaatacaaaatcctaaacaacttaataactatcaagtattcgctatacctggtggtttttcgtatggcgatgatacaggttcaggaaatgcaatggcgaaaaaaattctgaccaatttgtatgatcagctaatagattttgcattaaaagataaattaattataggcatttgtaatggatgccagaatattaattaat

SEQ ID NO: 317855 - DNA, 213 bp, Unknown
  Bacterial polypeptide expressing nucleotide sequence isolated from the Sargasso Sea
atgggagtatcgccaagagctatccggcaaatccaaatgggtcgcctgacggacttgctgggatgtgtagtatggatgggcgcgtgaccataatgatgcctcatccagaacgtgtctttcgggcttgtcaaaattcttggcaccctgatgattggaacgagttagctccaagcagtcgcatgtttcaaaatgcaaggaaatggcttagataga

SEQ ID NO: 317856 - DNA, 503 bp, Unknown
  Bacterial polypeptide expressing nucleotide sequence isolated from the Sargasso Sea
tatgagtaaattattaagaaattcttgggctctttttactggctattttatccttatggtagctcatggatttcaaggaaatttgcttggagttagatctgtaatagaagaatttaactttattgcaacaggcgccataatgtcaggatattttgtcggatattttgctggcgcaaatacaatacctaatcttgtgggaaaagtcggacatataagagtttttgccgcttttgcctctatggcatctttaagtattttgattcatgctatctttgtcaatcctgtagtctggacgttagcaagatttataactggatttagtattgtagcaatttttattgttatggaaagttggttaaatgaccgcgccaataatagaacgcgtggacagttattatccatctatatgtttattactttaataggattatctttgggaactcttttattaaattttggtagtcctgaaaaatatgaaccttttatattaatttcttttgtat

SEQ ID NO: 317857 - DNA, 683 bp, Unknown
  Bacterial polypeptide expressing nucleotide sequence isolated from the Sargasso Sea
taaatggaacctagattttgctgtaattggtaagactactaaatcaaaaaaaatagaactttattttgataagcaaaaagttgcagatattccagttaacaccttagttgagaactcacctatgtatgatcgtaaatggaaaaaagctaaactaccaaaaaagaataaaattaaaaaagaagatctaaaaaatttaaaaattattgatgtactaaaaaaagttttatctaaccccaatgtgtgtagtaaagaatggatttggcaacaatatgatcacactgttatgggtgatactattcaaaaaccaggtggagactcgggtgttgttagagttcatggaaccgacaaagcagttgcagcctctgtagactcttcagcagtttattgttgggctcaccctttaactggaggaaaacaagtagtttgtgaaagttttagaaatctaatttcagttggagcaaaacccattgctattacaaattgtctaaattttggaagtcctgagaatgaagataacatgggtgagtttgtagaatgtgttcaaggtattggtgaagctagtaaatatttgcaatttccagtcgtttctggaaatgtatctttttataaccaaacaaaagaagaaggtatcaagcctactccatcaattggtggtgttggtttaattaaagattataaaaaaa

SEQ ID NO: 317858 - DNA, 658 bp, Unknown
  Bacterial polypeptide expressing nucleotide sequence isolated from the Sargasso Sea
aaacccgaatggctctattataatctcgctgcagtatctaaccctgctggtaatgtgctggcgatgatgcctcaccccgaaagaactgattttggagacaagttatttacctcaatgaaggaatttgtcgaacacaagatttcttttaaaaaggagcccttgtcttacaatccagataaaaatgaaattatcaactatgttccaactaaaaatgtatcagaatgggttatcgatatggtaattacagacaatgaagccgaaacagtgcaaaatgcattgcaaagaaaagggctggatgtaactgtacaaagacaacaacactgggaaatatatacatcagataattcagatgatactctaaaaaaaattgaggataccggtgagttattcaactcaaataaagaatttataagctcaattaaaccaaaagaaaacacggcctcctttcttgttcgacaaaaagaagatatgcattgtcaggctaaatttgagtcgataagagaaagattcaaaataattgaattaatgcaacttaagcgcggcatagtctggaacatcagcataaaaaatactaacttccaacctgttttagataaaattatagacacaaacatactttttaatccattatcgcatgaatgttttagaatcagttagt

SEQ ID NO: 317859 - DNA, 598 bp, Unknown
  Bacterial polypeptide expressing nucleotide sequence isolated from the Sargasso Sea
atggcgataatgcctcaccctgaacgaacactaaaaaatgaagctgatgatctttttgacagcatgaaaaactatgttgagtctgattctccctttagctataaagccttaaattttaaatcaaaaaaaatagatgttcagaaatttaaaaaaccatcaaaaggtagagaacttcttatttctacaattatcgctgacaacgaagctgcatcggtcgaaaaatgtattcacaacctgggtgtagacgctaaggtaaaaaaatatgttcattttgaaattgatacaaccgagggttttgatgttgataaaattatctcaaccgacgtgttgtttaaccccagcaaagaatatatagctgaaacaaaagaagaatcgggggcgtacaggtttttggttcgcaacaaggacgacattgttgggcaaagtcttgttcaaaccctacgagaccgctttgagttgtcagatttgaaatctataaaaagaggtattgtttgggaggttaaaattaattcacgttcaacaaaaaaagacgtggatttaatattaaatagtcatattttttctaatcccgtttcacaggaatgtcatgaatattgac

SEQ ID NO: 317860 - DNA, 874 bp, Unknown
  Bacterial polypeptide expressing nucleotide sequence isolated from the Sargasso Sea
ggtgcaacttttacctttaattatggactttatcatcagacgcctgtttatgaaaatatatatttaaatactaatcgccaagaagatcctcaggaagttattgaagagagtgcgggctttcttggcaatgctactatggtggcttctaggacgcagtcatatgaatttggttttaatgttcaggtgggtaggaattgggcctattctattgctggatgggtgaaagatatggataagctttcaacatcaaaaacgtatagaagtatgcttggggaatattccgttgcttcaaatggtgactatggaacggcgaaaggtattgattttacacttgaaaatagagggcaattgataaataccactatacagtacacctattcaaaggctaaggctaatggtgagtacgaccaggcagcgtttggtaatcaatttgttgatgctccaacacaagagtttacaatgccttttgataggcctcatgatttaacggttcaactttatagttcaaggcttccttttggaatcgttgcgtcgttagttgggttttatcagtcaggcattccttacacaggaaccttggaaaagggtgacggtgagccctatgaggatgtattaaataaatatgcaaaaaggacggacgcatataagcaagtagatatttccttttcaaaatttttagaattgaaagatgttaaattagctttgggtgttaatgtgtttaatgttcttgatattcgtaatgtgttagatatttatcctgagactggtagtcctaaaacaagaagtgaatattttaccaaagagattgctttgcctcaagatggtggtactgtttcaaattcttattatgataggccttggcattttagtggat

SEQ ID NO: 317861 - DNA, 1183 bp, Unknown
  Bacterial polypeptide expressing nucleotide sequence isolated from the Sargasso Sea
attgggtaaaactacaaatacaaaaaatatagagttattttttgatggagaagaagttgcaaatataccagtccatacactggtagaaaattctccaatgtacgatagaaaatggaaaaaagccaaattaccaaaaaaaaataagattaaaaaagaaactattaataaactaaaaattaaagatattttagctaaaattttatctagtccaaatgtttgtagtaaagaatggatttggcaacagtatgaccatacagtgatgggagatactattcaaaaacctggtggagattctggcgtagtaagagttcatggctctaataaagcagtcgcagcatcagtggactcttcagcggtatattgctgggctcatcctttaactgggggtaaacaagtagttgctgagagctggagaaatttaatttctgttggtgctacaccaatagcaataacaaattgtttaaattttggaagtcctgagaatgaagataatatgggtgaatttgtagaatgtgttcaaggaattggtgaagcaagtaaatatttaaattttcctgtagtttcaggaaatgtttctttttacaaccaaacaaaagaaattggaattaaaccaactccctcgattggtggtgttggtctaattaaagactataaaaagatgataacaatggattttaaagaaattgataatttagtaatcgttataggaaaaacagaaggtcatatagaccaaagtttatttgcaagaacaatattagatgaaaaaaatggtcccccacctgaagtaaatttattcaatgagaaaaataatggagagtctttacttaatttgattgaaaaagattttataaaaagtgctcatgatgtatctttaggaggaatgcttactgctgttactaaaatgtgtataaaagggaacaaaggaattaaatttacaaaatctaaaaacttaatgagtgatattgagtatttcttcgctgaagaccagggtagatatataatagagattaatcaaaaaaatttaaaagatgtttgtaaaattttagataaaaattcagtacatcatgaggaattaggtattattacagataaagaggtaattattaatgaaaagacaaaagtgtcaattgacgaattaaaatcttataatactaattggttaactgactatatgagctcataa

SEQ ID NO: 317862 - DNA, 805 bp, Unknown
  Bacterial polypeptide expressing nucleotide sequence isolated from the Sargasso Sea
acaggaggaaaacaagtggtttgtgaaagttggagaaatatgatttctgttggagctaaaccaatagcaattacaaattgccttaattttggaaatccagaaaaagaaaaaaatatgggagagtttgttgaatgtgttgagggaattacagaagcttcaaaatatttaaattaccctgtagtttcaggaaacgtctctttctataatgagacaaaagatagaggaattaaacctactccttctattggaggtattggactattatcagattataaacagatggttacaatggaattaaaaaatgatggaaattatctattaataattggtaaaacagaaggtcacttagatcaatcaatatttgcaaaaaatattttgtctaatcataatgggcctcctccagaaattaatttattcaatgaaaaacaaaatgggatgagtattttaaatttaaaaaataagaacttaattgagacttgtaatgatgtttccttaggaggaattttaactgctgtttcaaaaatgggtataaaaggaaataaaggggtaaaattatttccaattgagggtttggtaaataaatttgaatatttttttggagaagaccaaggaagatatataatagaaataaagcctgaaaatttagaaaatgttgaaaaaatacttaaaaaagattcaatccattttgataagctaggtatagtagaaagtgatcagattacttatggaaatgaccttaaaatatcaattggaaatattaaagaaggctataaaaaatggctaaatgaatatatgattaactaat

SEQ ID NO: 317863 - DNA, 1163 bp, Unknown
  Bacterial polypeptide expressing nucleotide sequence isolated from the Sargasso Sea
aaagaaataatcaatgataatcttaaaaatagttttaaaggctttgaacttgcttcaactaaaattgttttaataaaaggaagaaaagaagatattattaaaatatctaaaaatgaagcaaatccattaattcaaacaattaagatttatccatttaaaaaatatctaaatattttcaaaaaaaatcagtttaaattagaaaaggttaaattaccaaaaaaaaaatatactaaaaaagaaataaatttagatatttctgatcataatcttagtctaattggtaaacttggtattgaagaaaataataaatctagaagaggaacgcttggtttagatctagaatctttgaaagcaattagaaattatttttccaatataaaacgtaaaccaacagatgtagaaatcgaaacattagcacaaacttggtcagagcattgtaagcacaaaatattttcagctaaaattgataatattaaagaaggtatatttaaaaagtacattaaaggagctactgaaaaaattattcaattaagaaaagataatttttgtatttctctatttactgataatgctggtggtgtagaatttaataaagattggattatttgtcataaagttgaaacacataacacaccttcagcattagatccatttggcggagcaattactgggattgttggagtgaatagagattgtcttggatttggaaaaggagcaaagcctatagctaatacttacgcgtattatttagcatatcctaataaaaattatcaattataccgtcaaaaaaataacaaagatgcaatgcttccagctgattttattgctaaaggaattatcagcggtgttagggttggtggaaactgttcaggtattcctacacctcaaggtaatgtatattttgatgaccgttttgcaggaaagcctctagtattttgtggaacagttgggataattccaaaaaaaataaaaggaaaattagcccataagaaaaaagctaatccgggagatattatactaatggtaggaggtagggttggaaaagacggtatccacggggcaacattttcatcagaggagttagaccctaatagcccagtttctgcagtacaaattggtgatcctataacacaaaaaaaaatgtctgatgtaatcataagaga

SEQ ID NO: 317864 - DNA, 666 bp, Unknown
  Bacterial polypeptide expressing nucleotide sequence isolated from the Sargasso Sea
taatggggcagtttgttcaagcaatcaaaggcatctctcaggccgtaaaagagctaaacatgccaattgtttcaggtaacgttagtttatataatgaaacagagggcgtatcaataaatccaacaccaacaattggggccgttggactaattaacgaattcgaaacgccaataaatggtagggcttctgaagggaatatggcagtactgataggggaaactcaaggtcatctaggccaaagcgctttactccaagaggtcttcaatagaagtgatggagacgccccaaaagttaatttagaagttgaaaaaaaacacggcaactttgttctggaaaatagagaattaataaatgcttgtattgatttgtcagacggcggattagctcttgctgcttttgaacttgcccatcgatcggagataggttttgaaatttatgaagaaagtactgagtttttatttgcggaagatcaggcacgatatctgattgcgtgtgaatttgatcaagcagaaactctatttgttgaagcaggtaagaaaaatattcctataatgacgattgggagtttcaaaggtgatgcaatcgtttttggaaattcaagatccgagctagtttcactttcagccattttttcggacacatttaaggaattatttcaaagttaaa

SEQ ID NO: 317865 - DNA, 1609 bp, Unknown
  Bacterial polypeptide expressing nucleotide sequence isolated from the Sargasso Sea
ccaatcgggcggatcagttcagatcggtcatgctattcacgaaaaaacggtcaccgatttcgtattagctgcatctgaagaacatctttttcatgccattacagattgtggcgcaggagggttgtcgagtgccgtcggggaaatgggagctgaactaggtgccgaggtagatctggaaaaggtacctttgaagtatgatggtctttcagccaccgaggtgtggatttcggaagcgcaggagcgaatggtgcttgccgtttctccttcagaatggccacgtcttgcagaagttgcccgactcgaaggcgttgaagcaacacctatcggcacatttactggaaacggtcaactggcccttcggtggaacggtgaacatgttggtgacctcaattgtcattttcttcacgagggccggccacgagagcggctccaatccaaatttacaccgccacagaaccttcctgttcgctggtcactcgatgatgaaaactttgaaactgtactacttgaactacttcggtccgaagatgtagccagtaaggaatggatcattcggcagtacgatcatgaagttcaaggaaaaagtgttctcaaaccattactgggaccaatgggtggaccggctgacgctacggtgatacgcggagttttaggccgaccaagaggcatcctgataggcatcggtcttcggcatcaccttgggaccatcaatccatttgagatggctgttggagggattgtggaagctgtttcgaactgcatagcatccggagctgatccagagcgaattgcgttgcttgataatttttgctggggtgactgccgacgaccagattcacttggaacactcgtagaagcatgtcgtggttgctatgaagcagcagtgacgctcagagctccattcgtaagtggtaaagacagcctcaacaatgtcttcacgtggaaagacgatgcaggcgtcatcaaagagcaatcaataccacctactttacttgccacagcaattggtcagataaatgatgtgagtctgtgcgtttcatcagatcttaaacgagcgagcaatcggattgctattgttggggtttcaacaacggaacttggcggcagtcaacttgctgttattcgccgaatcacgggaggtgatatccccaaagtagacttcaaaaactgccgggaagctttcaaaagcatctacgatctaaaccagcagcgactccttgcgtcgtgtcacgatctatccgacggagggctaggagtagcgctcgctgaaatggctattggcggaggtttaggcgccgacatcaacctggcaaaggtaccactccgtgatactggcaacctggcacaacacgacaacatcatgagtttactatgcgttgcctgtgctgaaactccagggcgatttttaatagaagtcaaagaagaggatgccacagaagtggaccgaatactgtgcgggagtacgtggtcgtggattggccatgtcaccgacgacaacttacttacaattcgcggcggtgaaaattcggttgtcacccaaacattgattcacaaacttgcaactgcctggcgagagccaagtactgctcaaacacacggcaagtcctaa

SEQ ID NO: 317866 - DNA, 1081 bp, Unknown
  Bacterial polypeptide expressing nucleotide sequence isolated from the Sargasso Sea
ttgtatgagccaaataaaatacaaaagcatgatctaaatgaaaccatattattattaattggtcacgaaaacattgctagccgcaagccagtttatgaaaaatatgataaacaagttcaaggtcgagtacatacagaaacaggtgttgcagatgctggtattcttgccccttttaattctaatgactatcctgaagaaattcggaatatcggaattgcaatatcaacagaccataaccccaggcaaaacattattagtccatattggggaggagttaattctgtcgtcgaggctatgagaaatgtagcagcagttggcgcaaccccacatgcagttactgattgcctgtgttttggtaatcctgaaaaaccagaacagatgtgggagtttgcagaagcaactcgtggtgtttctgaagcctgtaaaaaaattactttaaaaaacaacccagcccatcccacacctatcattgcaggcaatgtaagtttttataatgaatctaaaaatggggcaattcctccaagcccaatcgtaagctgcctggggcgacttaaagatgttaataacgcaatcgatatggtgcttaaggataatgattctatgttatttatgataggagagcgaaaaaatgaacttggcggaagtgcttactataatttatatgatgaacttggatctaatgttccaatgcctgatttagatgaagttaggaatcaaatatatgcgattacagattgcatagattttaagcttatcaaatcttgtcacgacatttctgatggtggtgttgtatgctcaatcattgaaatggctattagcaattcaatcgggtgtgatttgacttttaatgataaattgcccctttatcaaacattgttttctgaaacaggtggatttgtaattgaagtagataaaaacaatattaatgatatagagtctatttttgaaaaatataaaataaatgtaattccaattggcaaaacgaccaacacgcaaactataatgattaatcagactattgaactctcgattgatcatcttaagattacttgggaaaacggattaagagaaaaactataat

SEQ ID NO: 317867 - DNA, 823 bp, Unknown
  Bacterial polypeptide expressing nucleotide sequence isolated from the Sargasso Sea
atgaatcaagtccgtgtagcagttctttccggcttcggaattaattgtgaaaccgagactatggcggttttcgaaatggccggggccaccgctgtccgagtccatgtcaatcgacttgtaaacggagaaatgagtctagatgactatcacatcatggcggttccggggggattctctttcggagatcacctaggtagtggcaggcttatgggtaacagactgagattcggcctaagagatcaagtaaggcgttttgttcaatcgggcaaactggtaatcggaatttgcaacgggttccaagtacttgtcaagatgggactacttccaggcgacgaagaagtcagtttgacgcaaacagcatcacttgcattgaacgatagtggccattatgaaaatcgctgggcaactctagagtttgaccccaatagtccctgcatctggaccaagggaatcacgagaatgagagtccctgttcgtcacggcgagggcaagttcgttaccaacgacagaaaacttctcgatcgttggtccgaatcaggacaactagcagttcgctatgtcgaccctgccatggaataccctagttcgagtgatgaggttcttccatacccaatatcgcccaatcagagttggcggaatatcgcaggagtatgtgaccctacagggctagtctttgggctgatgccgcacccagaagccaaccactccacgtggttaggtgcgacctggacaagagacgtagatcaaggcgaacacggcgagggagagggcatggcaatcttcagaaacgccgttgaatacgccaaatcaaaaataatctagc

SEQ ID NO: 317868 - DNA, 1225 bp, Unknown
  Bacterial polypeptide expressing nucleotide sequence isolated from the Sargasso Sea
attggtaagtttattaaaaaagaaaaagccatatgtaaaatacaataaaactgaaattctcattttagatatggaatttcttcatgaaggttatccaaaattaaatttaaaaacatcttttccaaaaattaaaaaagaaaagaaaaaaataattaagaaaagttctttgatagataagctacataaacttctctctagtccaaatattgtatcaaaagaatttatagccacgcaatatgatcacgaagtacaagctacctctattataaaaccattacaaggcgaaggtagagtttttggaaatgctactgctattaaacctctatttgatgatgaaaaatcaatagctctttctcaagctgcatatcctcagtacgccgaaacaaatccttatgatatggctgggtgctctattgatacagcatataaaaatttaattgtaagtggtgccaactcaaaaaaaattgcaattcttgataacttttgttggtgcagctcggatgaacctgatcgcttatatcaattgaaagaagcagcaaaagcttgttatgattatgcagttgcttaccaaacaccttttatttcaggaaaagatagtatgtttaatgattttaaaggttttgataaaactggaaaatcagtaaaaatttcaatacctccaacattgctgatttcttctattggagtggtagataaaatttcacacttaacaaaaatgacacccgatgatggtgatatacttttagttttaggaaatacccgtaatgaattacaggatagtgtttattccaaaattataggttatgaaaaatcaaaaaatccagttgtaaatagcaatgatgcacttcgcacatatagaaattttgaaaaagctaataaactaggaattataaattctgcaattggaatagatttgggtggaattggaattgcagttaccaagatggcaattgcttcaaagaaaggtttaaccattgatttaaaactaaaaaataaaatctcagttgaccaatttttattttctgaaacacaaagtagaattcttgtttccatgaaaaaaaataagttagccaattttaaaaaaatatttaaaggttctgattatacaattattggcaaatgtacgggctcagatgtagttgagtttaaagataacaaaaaaattattagaagtaaaatttcagattttgctaagtcatacaaacaaaatattaaagggttatga

SEQ ID NO: 317869 - DNA, 1345 bp, Unknown
  Bacterial polypeptide expressing nucleotide sequence isolated from the Sargasso Sea
aatggcttcaaaaggaaatgtaggtgtttatattaatcttgataaagttccattgaggcaaccactgagcgcctatgagatacttttatctgaaagccaagaaagaatgctagctgttatcgataaaaaaaataattataaagtcagagaaattcttcaaaaatggcaaattgattatgaagtcattggagaaattacagatacaaaaagagttgtgtttgagtcaaataataaaaaagttgtcgatcttcctgtagaaataattgttgatgatgctcctgaatacgatagagagttttacatcccaagaaaaagaaaaaacaaagattttgatttttctaaaattaaattggaagatatgataactaaccttcttacaaatcttaattatttagataaaagttgggttttcgatcaatatgactctactgtgatgggagatactatcagagaaccaggtcaatcatcaggtatagtaaagattcacggaacacaaaaagttattggtgcatctaccgattgcaatccattatacataagaatcaatccttatgaaggaatgaaatatacggttgctgagtcatatagaaatctaattgcatgcaatattaatcctttagcgattacaaataaccttaactttgcaagtcctttagatccaaacattatgggagagttggttttatctattcatggattaaaaactgcagctgtcaaattcaatacacctattgtttcaggtaatgtatctttatataaccagacaaatgaaataccaattaagcctacacctgtaataggaatggtaggttccaatatggatttaaataaaataaacacaaataagttttgtgaaattggtaataagatcattattttaggaaaacaattaacaaaaaattgtagcccttacttattacaagatcaaaaaattgcttttaacatatgtgaatttaatgacttagaggtattagatctagattttgagaaaaaaattgcaaattgtgttttggaattatcagatttgaaatgcattatgtcttgcaatgatatttccagagggggtatcttttcggcattattaaaaatgcaatataaggatatgggttttagggtcaaggtccctgatcctattgatttattttgcgaatatagtgctggatatgtgattgaaatcagaagcaaagattttgaagaggtaacttcatttctgacaaaaaaaggtgctgaatacctcgaaattggggagataattaaagaaggtattgaaataaattctaaaaaatttgactattttgatattatgaataaatatcgtaatgattttgagaagataattagttag

SEQ ID NO: 317870 - DNA, 247 bp, Unknown
  Bacterial polypeptide expressing nucleotide sequence isolated from the Sargasso Sea
atggttgaagttaatgaaaaaatagcgattgagcatggattaaaaagtgaagaatataagaaaatctgtgatctattaaagagaacacccaatattactgaattaggtgttttttcagcaatgtggaatgagcactgttcttataaatcgtcaagaatgcatcttaaaaaattacacaccaagggtgaccaagttattcaaggtccaggtgaaaatgctggaattgttgatattgaagatgatgatg

SEQ ID NO: 317871 - DNA, 1141 bp, Unknown
  Bacterial polypeptide expressing nucleotide sequence isolated from the Sargasso Sea
aaatcaatttaaaatagaaaaggtaaaattaccgaaaaaaaaatatagtaaaaaagaaattaatttagatatttctgatcatcaactcagtcttattggtaaacttggtattgaagaaaatgataaatctagaagaggaacacttggcttagatctagaatctttaaaagtcataagaaattatttttccactataaaacgtaaaccaacagatgtagaaattgaaacattagcacagacgtggtccgagcactgtaaacacaaaatattttcagctaagattgatgatattcaagaaggtatatttaaaaaatacataaaaggcgctactgaaaaaattattcaattaagaaaagataatttttgtgtttctctttttacggataatgctggtggaatagaatttaataaaggttggattatttgtcataaagttgaaacacataatacaccttcagccttagatccatttggtggtgcaatcacaggaattgttggtgttaatagggattgtcttggatttgggaaaggagcaaaacctatagctaacacgtatgcatattatttagcagaccctaataaaaattatcaattgtatcgtcaaaaaaataataaagatccaatgcttccagcaaattttattgctaaaggtattatcagtggtgttagagttggaggaaattgttcaggtatccctacccctcaaggtaatgtgtattttgatgaccggtttgcaggaaagcctcttgttttttgtggaacagttgggattattccaaaaaaaataaaaggaaaattatcacataagaaaaaagctaatccaggagatattatactgatggctggaggtagagtaggaaaagatggtattcacggagcaacattttcttcagaggaattagatcctaatagtccagtttctgccgtacaaattggtgatccaataacacaaaagaaaatgtctgatgtcatcattagagaattgcgtgatgaaaatctttactcgagcataacagataatggggctggaggattatcatcatcaattggagaaatggcaaaagagagcggtggttttatagttaatcttgaaaaagttcctctcaaatataatggattatatccttgggagatttgggtt

SEQ ID NO: 317872 - DNA, 583 bp, Unknown
  Bacterial polypeptide expressing nucleotide sequence isolated from the Sargasso Sea
gagggttggtcaaaaactatcatgtataataataaagttaaaaaccagtttgaagaattctttaataaccaaaaaacttttacacttggggtctgtaatggctgccaaatgctttcaaatttaaaagatattattcccgatgcagattattggcccagttttggaagaaacttttctgatcaatttgaagctaggttaattcaggtaaaagttaacaataccgattcagttttattaaataatatggagggttggacagtcccaatagcttcagctcatggagaaggaaaagccaactttttagataacaacttagaagaattaaaaaaacaaaaccaagtaacaatgacttttgttgactctaataaaaatcctacagaaaaatacccattaaatcctaatggatcaatcgaaggtattacaggtgttacagcttccaatggaagagtcactataatgatgcctcatccagaaagagtatttagaaaatatcaaatgagctggcattctaaagattggaatgaattttctccatggatgcaaatatttattaatgctagaaactttagcgatagtagctaat

SEQ ID NO: 317873 - DNA, 304 bp, Unknown
  Bacterial polypeptide expressing nucleotide sequence isolated from the Sargasso Sea
ggcgaaggaagagctgtgttcgaagaagactacattaatcaattgtatgcatccaaacaagtagcaattaattttagtgattctagtggcaattgctctaatgattatccgattaatccaaacggctctattgatggagccactggatttactgcagcagatggcagggtaaccattatgatgccacaccctgaaagggtttttcgaatggcccagctatcttggcatcctaaaagtaatgacaattactcgccatggatgcaaatgttcatcaatgcatataaatttactcaagatgtataaa

SEQ ID NO: 317874 - DNA, 1103 bp, Unknown
  Bacterial polypeptide expressing nucleotide sequence isolated from the Sargasso Sea
tgaattacttcggtccgaagatgtagcaagtaaggaatggatcattcggcagtacgatcacgaagttcaggggaaaagtgttcttaagccattactgggaccaatggggggaccagctgatgctaccgtgatacgcggagtattgggccgaccaagaggcattctgatcggcgttgggattcggcaccaccttggaaccattaatccgtttgagatggctgttggtggtattgtggaagctgtttcaaactgtattgcatccggggctgacccagagcgaattgcgttgcttgataatttctgttggggtgactgccgtcgaccagattcacttggaacactggtggaagcatgtcgtggttgttatgaagcagcagtgactcttcaagctccatttgtaagtggtaaagatagcctcaacaacgtctttacctggaaagacgacacaggtgtcctcaaagagcaatcaataccaccaacattgcttgccacagcaatcggtcagataaatgatgtgagtttgtgcgtttcatcagattttaaacgagcaggcaatcgaattgctattgttgggatttcaacatcggaacttggtggtagtcaacttgctgttagtggccgggtaacgggtggtgacattcccaaagtaaatttcaaaaattgccagaatgctttcaagagcatctacggattaaaccagcagcaactcatcgcatcgtgtcacgatctatctgatggagggcttggggtagctctagctgagatggctataggcggcggcttaggcgctgacataaacctggcaaaggtaccgatcgatgatactggaaaccttgctaaacccgatgaactcatgagtttactacgcgtcgcatgtactgaaacgcctggacgattcttgatagaagtcaaggaagagaacgcgtctgaagtagacagaatacttcacgggagcacgtggtcgtggattggaagtgtcacgaacgacagtttgcttacaattcgctgtggtgaagattcaattgttagccaaacattggtttacaaacttgcaaccgcatggcgggagcaaagtactgctcaaacacacggcaagtcttaag

SEQ ID NO: 317875 - DNA, 315 bp, Unknown
  Bacterial polypeptide expressing nucleotide sequence isolated from the Sargasso Sea
cagtagcgcatcaagaaggaaggtttttaataccatcaaaaatatataaaactataaaagataaaagtttaataggattacaatatattaatataaaaaacgaattagccgataagaaattccctgacaatcccaatggatcgcaaaatgatattgctgcaattacaaataaaactggaaaagtaattgcaatgatgcctcatccagaaagagcattatattattatcatgaaccagaatggcaaaataataaaattagaaaatttgctgatggttataaaatatttaataatgcaaaaaaatattttaaataat

SEQ ID NO: 317876 - DNA, 1270 bp, Unknown
  Bacterial polypeptide expressing nucleotide sequence isolated from the Sargasso Sea
tatgggggcaaaagtaattggctgtactgatagttttcgttttggtgatataaaatcaaataaaacaaaatggatacatgatggtgttgtagctggaattgggggttatgcaaatcctttgggtgttccaaatattggaggggacatttattatgataaaagctacaatgataactgcttggttactcttgttactcttggcgtagttcgtgaagatgaaatatttcattcatatgcacctaaaaatgctgatggatatgatttaatattggtggggaaagctacagataatagtggttttggtggcgcaagttttgcatctcttgaacttgaagaggggaaaaaagaacaaaacaagggggcagtgcaggagccaaatgcatttttagaaagacatattttaaaatctacatattcgttatttgaaataattaaagaacggggattgttaaacaaggtgggtttcaaagaccttggtgcgggtggtgtcgcctgtgcaagcgttgaacttgcagacacgtcaggttatggagcagaggtttggttggacaatgtgcatgttggcatggaaggattgcacccctctgtggttctgtgctctgaaacacaagagcgatttatgtgggtttgtcatccggacattacagaaacaatattaaatcattataataaaacatttgatatgccaggcgtgtctaagcttgcacaagcatcagtaattggaaaaatacatgataaaaagcaatacattgttcattctggaaacgaaacaattgtaaatgcgccagctgagatggttaccaaagggtttaactatgatcgggatactaaagaacctgtgttaggtttatacgaacccgatcttaacgagcctacaaactatgatgaggttttaaatagtctgctttgtcatgaaaacatatgctctagatcctctgtttatgaaacctatgataaacaagtacagggtcgcaccattattgagcctgggtatgctgatgcaggcgttattgcaccatttaacaatagtcactatcctgaagaaattagaaaagtaggtattgctcattcaacagaccacaacccgctttatggaaaaattagtccttattggtgtggtataaattctgtagttgaatcaatgagaaatgtggctgcgacaggcgcaacacctcacgcaattacagactgtctttgttttggtaaccctgaaaaacctgagcaaatgtgggagtttgcagaatctgcaaggggggttgcagatgcgtgc

SEQ ID NO: 317877 - DNA, 270 bp, Unknown
  Bacterial polypeptide expressing nucleotide sequence isolated from the Sargasso Sea
tatgctttcccctcgtgctctcattcttcgtggccctggtacgaattgtgaccaagaaaccgcttacgccttcgagcgtgccggcggtcacacaaaacgcatacacgttcaggcactcgcccagtccccttctcttctcgatgatttccagattttctgtatccctggtggcttttcgtatggtgatgatatcgccagcggacgaatcctcgcacttgaattgaccgtacgtcttggtgatacactccgtcgttttcacgagaggggggg

SEQ ID NO: 317878 - DNA, 852 bp, Unknown
  Bacterial polypeptide expressing nucleotide sequence isolated from the Sargasso Sea
ctgcatctgtagactcatcagcaacttattgtcatgctcatccattaacaggtggtaaacaagtggtttgtgaaagttggagaaatatgatttcagtaggtgcaaaaccaatagcaattacaaattgccttaattttggtaatccagaaaaagagaaaaatatgggtgaatttgttgaatgtgttgaggggattacagaggcttctaaatatttaaattacccagtagtttcaggaaacgtctctttttataatgaaacaaaagataagggaattaaacccacaccctcaattggaggtataggattattatctaattacaaagaaatgatgacaatggaattaaagaatgaaggtaattaccttttggtaataggtaaaactgaaggtcatttagatcaatcagtatttgcaagaaatatattatctgaatttaatggccctccaccagaagttaacttattcaacgaaaaacaaaatggaatgagtgttgtaaatttaaaaaataaaaatttaattgagacttgtcacgacgtatctttaggagggattttaactgctatatctaaaatgggtattaagagcggtataggggtaaaattatttcctttagagggcttagtaaataaatttgagtatttttttggtgaagatcagggtaggtatattattgaagttaaaccagaaaatttagaaaatgttgaaaatatgcttaaaaacgactctattcattttgacaaattgggtttagtagaaggcaataatattatattagaaaatgatctaaaattatcaattgacgatattaaagaaggctataaaaattggctaaaggaatatatggttaactaat

SEQ ID NO: 317879 - DNA, 185 bp, Unknown
  Bacterial polypeptide expressing nucleotide sequence isolated from the Sargasso Sea
ccctgtcatttcaggaaatgtatcactctataatgaaactaacggtgaagggatttatcctactcctgctattggtggagttggactaattagagatttatctaatacaatgacaatagatcttaaaaatgagggtaatgttttatacctcattggaggaaagcaacaatcatttaggcaatagt

SEQ ID NO: 317880 - DNA, 1300 bp, Unknown
  Bacterial polypeptide expressing nucleotide sequence isolated from the Sargasso Sea
tgccccaagttagataatgtagaaaattttatttttgtcattgaactattacaatctatgcatgaaaaaaataaaatagtttcatatcatgacatatctgatggtggtcttttaacaacaattgctgaatgttgctttgcagggcatacaggtatgagtatcaacattgacaaaaattttgaaattaataaatttttgtttagtgaagaacttggttttgtagttcaaatagaagataaatttcttgcagatttttatatgtccttaaattctaaagttattgagcattacgaattaggaaaagtaaattcaaaatatgttttagagattaagaataataagaaaataatttactcaaatagtatagaaaaacttcataaaatatggcataaaaatagttttcaaattcagttattaagagataatccaaaaacatcaaatgacgagtttgaaaaagtcggtaaaaaaaacttaaaagggctatatataaaaacaaataataataataaaaagaagattataaatacaaaattaaaacctaaaatagcaatattaaaagagcaaggtgttaatggtcattatgaaatggcacaagctttttcaatggctggttttgactcatatgatgtaaatatgaactctattattcaaaagtcttttaaacttgataatttccaaggagttgttttttgtggtggattttcttttggagatgtattaggtgctggaagcgggtgggcgaataaaatattacataactctgcattaaaagacgagtttcagaaatttttttcagatcaaactaaattttctcttggtgtttgtaacgggtgtcaggttttatcaaaattaacagaaataataccaggaagtgaaaactggccaaatctttgtattaatgatagtgaaagatttgaatcaaggtatgtaatgacaaagatagttaagtctaattctttcttttttgatggaatggaaggatcagaattaccaataattgttgctcatggcgaaggtaaaatgcaaattaataatatagatttttctatattagaaaaaaataatcaattgagtatgagatacatcgataataatggttctattacagagaaatttccttacaacccaaacggatcatttaagggtattacttcggtatcttctaaaagtggaaatattttgatgatgatgccacatccagaaagattattggatataaagcaatttccaatatatagtaatgaaaaagatagtccttggagtaaattttttgaaaacgcaaagaaattcctaaattaag

SEQ ID NO: 317881 - DNA, 229 bp, Unknown
  Bacterial polypeptide expressing nucleotide sequence isolated from the Sargasso Sea
aatgcaatatgttgatacaactgggaagtacacagaggaatatccttacaatccaaatggttcactaaatggtgttacaggtttttgtaataatgatggtagaataaacataatgatgcctcatcctgaaagattaattcatgtaaataatttttcatgggctccagaggaatggaaactttccccttggcttaagttgttcaataatgcacgggagtgggttaattaa

SEQ ID NO: 317882 - DNA, 1297 bp, Unknown
  Bacterial polypeptide expressing nucleotide sequence isolated from the Sargasso Sea
aatgacactagcagtacctccagctaatgtaaaaaaagttataaagagatttaattcaagaggtgtggaagtaacaataattggtaaatttattaaaaaagaaaaagccatagtaaaatacaataaaactgaaattctcaatttagatatggaatttcttcatgaaggttatcctaaattaaatttaaaaacatcttttcctaaaattaagaaggaaaagaaaaaaataattaagaaaagttctttaatagataaattacacaaacttctctctagtccaaatattgtatcaaaagaatttatagcaacgcagtatgatcatgaagtacaagcaacttctgttgttaaaccgctacaaggaaaaggtagagtttttggaaatactaccgctataaaacctctattttatgatgaaaaatcaatagctctttctcaagctgcttatcctcagtacgccgaaacaaatccttatgacatggctggatgctctattgatacagcatttaaaaatttaattgtaagcggtgccaactcaaaaaaaattgcaattcttgataacttttgttggtgcagctcagatgaacctgagagattatatcaattgaaagaagcagctaaagcttgttatgactattcagttgcttatcaaacaccttttatttccgggaaagatagtatgtttaatgattttaaaggtttcgataaaaaagggaaatcaatcaaaatctcaatacctccaacattgctcatttcatcaattggaatagtagataaaatttcacatctaacaaaaataacaccagataaggatgatatactatttgtattaggcaatactcataatgaattagaggatagtgtttattctaaaattataggttgtaaaaaaacaaaaaacccaagtgtaaatagtaaaaatgctctaaagacatataaaaattttgaaaaggctaataaattagaaatcttcaactcagcaattggaatagatttaggtggacttggaattgcaattactaaaatggcaatagcttctaagaaagggttatcgattgatttaaaattgaaaaataaactatctgttgatcaatttttattttctgaaacacaaagtagaattcttgtttcagttaaaaaaaatcagttagcaaattttaaaaaaatatttaacgtatcaaattatacgcgtatcggtaaatgtacgagtactgatatgatagagtttagagataaaaaaaagattgttagaggtaaaattttagattttgaaaaatcatacaaacaaaatataaaaggg

SEQ ID NO: 317883 - DNA, 85 bp, Unknown
  Bacterial polypeptide expressing nucleotide sequence isolated from the Sargasso Sea
aatgtataatgttgcagccttaagtaaccccgatgggaatgtgatggcaataatgccgcacccagaaagaacgcctaatggtgat

SEQ ID NO: 317884 - DNA, 622 bp, Unknown
  Bacterial polypeptide expressing nucleotide sequence isolated from the Sargasso Sea
ttgtggtggatttcttatggagatgttcttggagctggtggaggctggtcttcaagtataagttataacaaagttgttagagatgcattcgaacatttttttaatcgaaccgaaacttttacttttggggtttgtaacggttgccagatgttgtctaatttaaaagatttaattccaggtgctgaaaattggccccagtttctctggaatgattctgatcagtttgaagcacgtttatctcaagttaccattgctaaatcaaagtcagttttgtttgatggcatggcaggatggcaaattcctgtagctgttgcgcatggagagggacgagcctcattcaaagaaggagcattacaaaaactttcagagcgcaatcaaattgcagttcaatttactgataaccaaggagctgtagcatctatatatccattgaatccaaatggatcaccggagggcatcactggcttaacttccctagatggaagagcaaccatcatgatgcctcatccagaaagggttttcagatcacaacaattatcttggaaatcatcaaattggaaggaatattctccttggatgcaaatcttcttaaatgcttataaatttagtcaaggatcataga

SEQ ID NO: 317885 - DNA, 235 bp, Unknown
  Bacterial polypeptide expressing nucleotide sequence isolated from the Sargasso Sea
caatatattaatataaaaaatcaattagcgtccaaaaaatttccggacaatcccaatggttctcataatgatattgctgcaattacaaataaaactggaaaagtaattgcaatgatgcctcatcctgaaagagcattatattattatcatgagcctgaatggcaaaataaaaaaaatagaaaatttgctgatggtttcaaaatttttaataatgcaaaaaaatattttaaataat

SEQ ID NO: 317886 - DNA, 808 bp, Unknown
  Bacterial polypeptide expressing nucleotide sequence isolated from the Sargasso Sea
gatgactcccagggtagcagtcctgtcgggcttcggaatcaactgcgagacagagaccatggccgtattcgagatgtcaggagcccatgctgacagggttcatgtgaatagactggtcaacggggatttggacctctcagactatcagattatggcgatacccggagggttctcctttggcgaccatctaggtagtggcaggttgatggggaacaggcttcgcttcggtttgagggaccaggtaaggggtttcgtaagggaggggaagcctgtaattggtatatgcaacggcttccaggtacttgtgaagatgggacttcttcccggtgacgaagaagtctccctaacccagactgcctccctagcactcaatgacagcggacactacgaaaacagatgggcgacccttgagttcgactcaaagagcccatgcatatggacagcggggctcgagcgcatcagggtcccagttcgacatggggagggaaagttcgtcacagacgatcccacattgatggataaatgggcagagtccggccaattggtcgcgaggtacgtcgatccttcgaacgaataccccagtgctagcgacaacatccttccttacccaatctctccgaatcagagctggaggaacgtcgccggggtctgtgacccgacagggttggttttcggattgatgccacaccccgaggcaaaccattcaacatggctcggagccacatggaccagagaagacaatgagcacggacagggagaggggatggcgattttccacaatgcagtcagtcacgtaatggacgcctga

SEQ ID NO: 317887 - DNA, 832 bp, Unknown
  Bacterial polypeptide expressing nucleotide sequence isolated from the Sargasso Sea
cagttttattgttgggcccaccctttaactggtggaaagcaagtagtttgtgaaagttttagaaatcttatatctgttggtgcaaaaccaattgctataactaattgtttaaattttggtagtccggaaaatgaagataacatgggagagtttgttgaatgtgttcaaggaattagtgaagcaagtgattatttaaatttcccagtagtttctggaaatgtatctttctacaaccaaacaaaagaccagggtataaaacctacacctgcaataggtggagttggattaatcaaaaattataaaaatatgataactatggaatttaaagaagttgacaatttagttttggttattggaaaaactgaggggcatattgatcaaagtttatttgcaagaaatattttagatgaaaaaaatggacctccaccagaagtaaatttatttaatgaaaaaaataatggagaaaccttgctcaaattaattgataataatttaataaaaagcgcacacgacatttccttgggtggcataattactgcggtagcaaaaatgtgcattaaaggaaaaaaaggaataaatattaaaaaacctaaatatctaattaatgaaatagagtacttgtttgctgaagatcaaggtagatatattctagaaataaacaaaaaagattttaaaaaagtagctgatatattgaataaaaatgcagttcattttgatgaacttggtacaattactcaaaatgaactatatattaacgataagacaaaagttacaattgacgaattatcaacttcaaataaaagttggttaaacaactatatgagtaaataat

SEQ ID NO: 317888 - DNA, 373 bp, Unknown
  Bacterial polypeptide expressing nucleotide sequence isolated from the Sargasso Sea
aatgcgaaaaattaactttggcataatacaattcccaggttctaactgtgaacaagattgtttccatgttttgagttatgtattaaaacaaaattgtagatacatatggcacgatacaaaaaccttaaaaaatatagactgcgttatagttcctggaggtttttcttatggagactatttaaggacaggggcaattgctgctcaaagtaatataagcttaagaataaaagagtatgcagacaaaggaggattggttttaggtatttgtaatggatttccaatactgactgaattagaattgttacctggtgtttctcttagaaataaatcattaaacttcatatgcaaggatgtatacctaaaaacaataaat

SEQ ID NO: 317889 - DNA, 712 bp, Unknown
  Bacterial polypeptide expressing nucleotide sequence isolated from the Sargasso Sea
aaattatgggggcaaattgttcattctattaaaggtataagcgaagcatctttaaagcttaatatgcctgtaatttcaggaaatgtatcattatataacgaaactaatggtaaagcaattttacctacaccagttataggagctgttggcgcaattgatgaaaataaacattctgcatctttatcaaatgcatttgacggtaacagtatttttgttattggccaagataacagtcatactgacggttgggttgggcaaagtatttacgctcaggaaattttaaatatagataaagactacgcgccaccacctataaatattgaactcgaattagcaaatggtaattttattttaaaagctattgaacagaaactcactaactgcgttcatgatatttcagacgggggactggcaatagcgatttcagaaattcttctttcatcccaaactaaaggaattggcgcagtaataaataaaaattataattataattcagaaagtttttggtttggagaggatcaaggtaggtatttagtatgcacttctaaaaataaagaaatagaagagcttgctgaaagtaataaaattaaaattacgaatattgctacaataaacctgagcgacagattgaccttttcaaatgaagattacatatgtataagtgaattagacgtgaagcataagaattggtttaaaaacttcatgtcataaa

SEQ ID NO: 317890 - DNA, 1252 bp, Unknown
  Bacterial polypeptide expressing nucleotide sequence isolated from the Sargasso Sea
atggataaaaagaaaatagcctatcttcaattcccaggatctaacaccgaaaacgaaacaaaaaatattttacaaaagcatggaatgataccatttggtcacttttggaacgatgcgcccgaacttctaaataattacgacggttttattattttaggcggattttcctttgaagataggtccagatcaggaattattgcatcgcttgagccagttgttaatgagcttaaaaaacaagctctgtttggtaagcctattttaggaatttgcaatggagcgcaaattttagtagagtcaggccttgttccaggcaaccaagattttcagactttggtttcgttgacggacaacaaaagaatgattggtaaccgtattgttggaacaggttattacaacaagtggtgctatataaagccatgcgaaaatacaaaatcagcttttgtcaaaagtggtggaaacccaatgcgcgttcctattgcacacgcagaaggtcgttttttatttaatggcgatcttgaggatgaaatattaaaaaacaacctaataacttataagtattgtgattcaagtgggaatctttctaatgactttccaatcaatccaaacggctcgcttcatagcgccgccgccttaagcaaccccaacggcaacgtaatggcaataatgccccaccctgaacgcacacttggaaatgaagcagacgatctttttaaaagcatgagaaactatatggagtctgatgatccttttagctttaagtctttaaatttttcatcgaaaaaaataaatataaaaaagttcaaaaaacccgctaagcaaaatgaaattcttgtatcaacaatcattgcagataatgaggcggcatcggttgagaagtgtattaacagcttgggtgtcaaagcaaaggtaaaaaagtatcttcattttgaaattgatgcaattgaacgtctcgatattaacacaattatatcaactgatgtgctctttaatccaagtaaagaatacatcacaaatattaaagagggatctgatatttacaggttcttagttcgaagcaaggatgatattgttggtcagagtctcgctcaaaccctacaagaccgttttaatctatcaggattaaaatcaattaaaaagggtgttgtatgggaagttaaaattaattcatctggagcaaaaaaagacgtggatttaatattaaatagtcatattttttctaatccaatttcacaggaatgtcatgaatattgac

SEQ ID NO: 317891 - DNA, 823 bp, Unknown
  Bacterial polypeptide expressing nucleotide sequence isolated from the Sargasso Sea
ttgctatgcacaccccttactggtggaaagcaagttgtttgtgaaagttggagaaatttaatttcatgtggttcaaagccaattgctattactaattgtttaaattttggtaaccctgaaaaagaaaaaaatatgggtgaatttgttgagtgtgttgaaggaattaatgaagcgagcaaatttttagattatccaatcgtttcaggaaatgtatctttttataatgaaacaaaagataaaggaatcaagcctactcctactattggaggtgttggattaattaaagattacaaaaaaatgactactatggaattaaaaaatagtgaaaatttaattttggttgttggaaaaactgaaggtcacttagatcaaagcgtttttgcaataagtattttgaatgaaaaaaaaggaccacccccagaggttaatttgtttaatgaaaaaaataatggcgatacagttttgaaattaattaatgaaggattaattagctctgcacatgatgtttcattaggaggcattattacagcggtttccaaaatggctataaagggccaaaaaggatttaaattaaacaagcttaaagttctaatgaataaatttgattattattttggagaagaccaaggaagatatataattgaaatagaggcaaagagtctttcaaaagtacaaaaaattttaaaaaacaattcagttcattatgatgagattggaattgtaactaaaaatgagataatagttgataaagagccaattctgcatattgacgatttaattgaatgtaataaaaattggttaaagaattatatggataattaat

SEQ ID NO: 317892 - DNA, 889 bp, Unknown
  Bacterial polypeptide expressing nucleotide sequence isolated from the Sargasso Sea
gggtgtagttagagttcatggaacaaataaagcggttgcagcatgtgtagactcgtcagcaatttattgctttgctcatccattgacaggaggaaagcaagtcgtaagtgaaagttggagaaatttaatttctgtaggagctaaaccaattgcaataactaattgtttaaattttggtaatccagaaaaagaaaaaaatatgggagaatttgttgaatgtgtgaacggtatttctgaagctgccaaatatcttaattttcctgtagtttcaggtaatgtttctttttataacgaaactaaagataaaggaataaaaccaactccctccataggtgggattggtttgatcgaagattataagaatatgataactatgaaactgaaaaaggaagataacataattttagttataggaaaaactgaaggctatttagatcaaagcattttctcaagaactgtattattagaaaaaaaaggtcctccaccagaagttaacttatttaatgaaaaaaataatggtgaaacaatattaaagttaataagtaaaaaattaatactatcatgccatgatgtatcagttggaggtattcttactgctgtttcaaaaatgtgtataaaaggtaaaaaaggagtcaaaattaacccacaaataaatttcctgaataagttcagttatttttttgctgaagaccagggaaggtatataattgaaattgaaaagaaaaatttagatccagttaaaaaattattaaaagaaaactctgtgcattttgatgaatttggcgttgtaacaaaagaaagactacaatttaaagatgaattaaatataagtattgtagatttaagcaaaaagtataaatcttggttagaagattatatggctaattaa

SEQ ID NO: 317893 - DNA, 833 bp, Unknown
  Bacterial polypeptide expressing nucleotide sequence isolated from the Sargasso Sea
agctacttattgtcatgctcatccatttacaggtgggaaacaagtagtttgtgaaagttggagaaatatgatttctgtaggcgcaaaacctattgcaattacaaattgtcttaattttggaaatcctgaaaaagaaaaaaatatgggtgagtttgttgaatgtgttgaaggaatttcagaagcatctaaatatcttaattatcctgttgtttcaggaaatgtatctttttataacgaaacaaaagataaaggaataaagcctactccttcaattggaggtgtaggattattatctgattataaaaaaatgataacaatggacttaaaaaatgagggcaattatcttttcgtagtcggcaaaactgaggggcacttggatcaatcaatatttgcaagaaacatattatctgaatttaatggtccacctcctgaaatcaatttatttaatgagaaacaaaatggaatgagcattttaaatctaaaaaaagaaaacttaattgaaacatgtcatgatgtttcattaggaggaattttaacggctatttcaaaaatgagtataaaaggaaacaaaggtgtaaaattattttccatagacggtctagtaaataagtttgaatatttttttggtgaagatcaagggagatatattatagaaattaaacctgaaaatttagaaaaagtcgaaaaagtgttaaaaaaggactctatccattttgataaattaggagtaattgaaaatgatcagattacatatggaaatgatctaaaaatatcaattgacgatatcaaagaaggctataaaaattggctaaaggattatatggtaaactaat

SEQ ID NO: 317894 - DNA, 1012 bp, Unknown
  Bacterial polypeptide expressing nucleotide sequence isolated from the Sargasso Sea
tacagggacatgtctgtaagagcttctagaaaaaagaacggccttactcccaataggccgaccgatgccgaactagagtgtttagcacaaacttggtcagaacactgctcacacaaaatattcgcctcaaaaattagacatgtggatatccaaacaggagaagagtcagtcatcgactctctcttccgaactcacatcatgcagccaactctggacatacaaaaggaggtcgattggcttcttagtatatttcacgacaactcaggtgtcatatcttggaacgataagtggagcgtgtgcataaaggctgagacccacaatagtcctagtgcactagacccctttggaggtgcaataactggaattgttggtgtaaaccgtgatattctcggcacaggtttaggggctagaccgattgctaataccgacgtattctgcttcggtcccccggactattcaggtagtattcccgagggcctatttcacccttctagagtattcagaggggtccactccggcgtaagatctggtggcaacgagtctggaatccccaccgtgaatggatcaatcgtatttgacgaacgtttcatcggtaagccgctggtattttgtgggacaattggaatcatgccgagaagactccctgatggtagagaatcccacattaagacaccacaaccaggggatgtagtgtacatggtggggggtagggttggcagcgacggaattcacggagcgaccttctctagtttagaactaacagaagagagccccagttcggcagtacaaataggagatccgataactcaaaaaaagatgcttgatatgataattgaagctagagatgccgggctaatccaagtaataaccgacaatggtgctggcggtctttccagcagcgtgggggaaatggctgagcttactgggggggcggatttagacctctccaaagtccccttgaaacaggaaggcctgtcatcttgggaaattcttgtttccgaatctcaggaaa

SEQ ID NO: 317895 - DNA, 1333 bp, Unknown
  Bacterial polypeptide expressing nucleotide sequence isolated from the Sargasso Sea
atgctctgggaagttgatgtccatgaccgtcagaacgatactactgctcaagacctcgttaccgctggaaacgatctcggttttgacattcactctgctcatgctgctaatgggtggcttattgagggagatttggacttcgatgaggttcgaagaataggaacacgcctcttcacagattccgtaacagaagtctgcagggtggcgaaagtcggagaagaggaattggtttcaataccgcccggcgcagaagaggctcataatctcattttgcatgtcctcccaaaacctggcgtgactgatcccgcagcagaaagtgccaaagaagcaatggccctgcttggagtgaatgccaccgcagttcggagtcttaagaaatactgggtgcccgcggaatgcatgacattagaacaagttgcagagattgcatggaaacgacttgccagcgaagccattcatgaagtcattattggcccacttacgctttcaaggctgagtggcggcagtaggtggaaactgaaacgtgagcatgtgcgacttaatggactgaatgattccgaacttgaagaactgagccgcaaacagtgcctcgcactcacagcaaaagaattgcatgcagtacgagatcactttaatagcctcggccgagaaccattcgagatagaacttgaaacaatcgcccagacatggagtgagcattgttgccataaaactcttggaagtcctgtagaccatatcggacctgacggtgagtctcgctatgacaacttacttaaagagacagtttttgcatcaacggagaccatccgagagcaacttggtccagacgactggtgtgtaagtgtattcagtgataattctggcgttgttcgctttgatggcgatcacgatatctgtgtcaaagtcgagacccataatcatccttctgctatcgaaccatacggaggtgctgcgaccggtctgggaggtgtgatccgggatgtgcttggcactgggcatggtgcaaagccacttgcaaatctagatgttttctgtgtcgctcctttggacacaccagctaaagcaattccgcctggtattattccaccaaaaaaattacttcatggagttgttgctggtgtacgcgattatggcaaccgaatgggtatcccaaccattgctggggctgtggcattccacccagggtaccttggaaatcctcttgttttctgtggcacggtggggctcatgccccgtgattctgcggatggccgtgttgaacctggtgatctcgtagttgttgctgggggcagaacaggccgtgatggcatccacggcgcaaccgtttccagca

SEQ ID NO: 317896 - DNA, 223 bp, Unknown
  Bacterial polypeptide expressing nucleotide sequence isolated from the Sargasso Sea
atgtataagaaaattttagttgcaaatcgtggcgaaatagcaataagagttattagagcatgtaaagagttagggataaaaactgtagcagtctattcagatgccgacaaaagttccttgcatgtaaatatggcagatgaagcatataatattggaggaccccttcctagtgaaagttattttgattggagaaaatattataaaagtagcaaaaaaaactaag

SEQ ID NO: 317897 - DNA, 508 bp, Unknown
  Bacterial polypeptide expressing nucleotide sequence isolated from the Sargasso Sea
agcactttttagcttaggggtgtgtaacggttgtcagatgatgtcgaatctgaagagcctgatccctggtgctgatttatggccacgtttcgtccgtaacaagtctgaacgtttcgaagcccgtttcagtctggtcgaagtacaggaaagtgcctctttattctttaaaggcatggcaggttcccgtatgcctatcgcagtgtcacacggcgaaggtcatgcagagtttgcttcacaagcagcactgcaagccgcggatcaaagtggcacagtggcgttacgttttgtcgacaactacggcaatgtgacgactcaatacccgtcgaatccaaatggttctccgctgggtattacttcgttaaccacgacggatggtcgtgtcactatcatgatgccacacccagagcgtgtgttccgtactgtggcaaacagctggcaccctgatgagtggcaggaagacagtccgtggatgcggatgttccgtaacgcccgcgtctggttaggctaa

SEQ ID NO: 317898 - DNA, 871 bp, Unknown
  Bacterial polypeptide expressing nucleotide sequence isolated from the Sargasso Sea
aagaatacacggaaaagaaaaagctattgcggtatctgtagattcgtctgcgaactactgtaaggctcacccaataagtggaggaaaacaaattgtttgtgaaaattggagaaatttgatctctgttggagctaagcctattgcaattactaactgtttaaattttggtaatcctgagaacccggaagttatgggtgaatttgctgaatgcctaataggaattaaagagtcatgtgaattcttaaattacccagttgtatcaggaaatgtatctttttataatggtactaacagaaaaaatatttctcccacaccagtaataggtggaattggactaatatcaaagtttaaaaaaccaattaatcatcaatttaaaaaaaataatagcactatacttttaataggaagaacttttggtcacttggagcagagttcttttcttgaagaaatttactcaatttcagatggccaacctccagaaataaatttaattaatgagaaaaacaatggagaaagtattctagaaataataaaaaataatttagtaagttcagtgcatgatgtgtccaatggaggtttaattgtgactctagcagagatgtgcatgggatctaattatggtgctaaaatctacaagccaaaaaaattaacaaatttattaaattatttgtttggtgaagatcagagtagatatattttggaaattgaaaaaggtaacttagaaatggttgaaaaaatattaaaaaataacaatatattctatgaaaatataggatctacacaaaaagattattttgagattgaaggagaattaaaaattaatattaatgcattatataaaattaacaatcaatggtacaataactattaa

SEQ ID NO: 317899 - DNA, 1173 bp, Unknown
  Bacterial polypeptide expressing nucleotide sequence isolated from the Sargasso Sea
caacaaatagtaaaaatattgagttattttttgaaaataaaaaagttgcggaaattcctatagattttttagctgaaaatgctccaatgtatgatcgtaaatggataaaagcaaaacttccaaaagaaaacaatttttcaaaagatggttttaagtctttaaaattaattgattgtttaaataaaatcttaactgacccaaacattgcagataaagaatggatatggaaccaatatgatcatacagttatgggtgatactatacaaaaaccaggcggtaatgcaggcgtagtaagagtgcatggaactaataaagcggtggctgcagcagtggactcatctgcaacatattgccatgctcatccattaacaggtggaaaacaagtagtttgtgaaagttggagaaatatgatttctgttggagctagaccaatagcaattacaaattgccttaattttggaaacccagaaaaagaaaaaaatatgggagaatttgttgaatgtgttgagggaattacggaagcttctaaatatttaaattaccctgtagtttcaggaaatgtctcattctataatgaaaccaaagataaaggaattaaacctaccccatctattggtggcattggtttattatctgattacaaaaaaatgataacaatggaattaaaaaaagacggaaattatctttatgtcattggtaaaactgaaggtcatcttgaccaatctatatttgcaaaaaatgttttgtctaatcatgacggaccgcctccagaaattaatttattcaatgaaaaacaaaatgggttgagtattttaaatttaaaaaataagaatttaattgagacttgtcacgatgtatccttaggaggaattttaacagctattcaaaaaatgagtataaaaggaaataaaggagtaaaattgttttcaattgaaggcttagtaaataaatttgagtattttttcggagaggaccaaggaagatatataatagaaataaagcctgaaaatttagaaaatgttgaaaaaatacttaaaaaagattcaatccattttgataaattgggaatagtggaaagtgataagattacttatggaaatgatctaaaaatatcaattgacgatattaaagaaggctataaaaaatggctaaaggaatatatgattaactaat

SEQ ID NO: 317900 - DNA, 682 bp, Unknown
  Bacterial polypeptide expressing nucleotide sequence isolated from the Sargasso Sea
atgagttcccaacaaacccaaatggctcaatttataaccttgcatggcatatgcaatcccgccggaaacgtaatggccatgatgcctcatcccgaaagaacaagaaacggagatgtaatattttcttcaatgaaggagtttattaagaaaaaatatccaatcattaataaaaatttgtcttataaaataaaatcgaaaactcttgctgattatattccaaattcaaaggctacaacctggagaataagcactattattactgacaatgtagcatcatcagtgcatcaaacattaaaaagctttggctgtgatattaaaatacatcgtcaaatcaactgggaaatagagataaaagaaaataaaaatcacgttttagggcaaattgatgcctctggcgaattatacaattcaaataaagaatttatcgatgagtcaaaaaatcaggactatgatttatcattgcttatactacaaaaagatgatgttcatgctagaatgaaacaagaatctttaacaaatcgatttgagattggtggaataaaaaaaatcaagagaggcgtgctctggaatctgtccttgattagcggtaatatacaggacgtattagaaagaattattaactcaaacatactttacaatcaagaatctcatgaatgctatagaatcaaccaaacactataaa

SEQ ID NO: 317901 - DNA, 598 bp, Unknown
  Bacterial polypeptide expressing nucleotide sequence isolated from the Sargasso Sea
atggcgataatgccccaccctgaacgaacattaaaaaatgaagctgatgatctttttgacagtatgaaaaaatatattgagtctgattcttcctttagctataaagctttaaattttaaatcaaaaaaattaagtattcaaaaatttaaaaaactatcaaaaagcagtgaacttcttatttctacaattatcgctgacaacgaagctgcgtcggtcgaaaaatgtattcacaacctgggtgtagacgctaaagtaaaaaaatatgttcattttgaagttgatacaactgagagttttgatattgataaagttatctcaaccgacgtattgtttaaccccagcaaagaatatatagctaaaacaaaagaagagtctggggtgtgcaggtttttggttcgtaacaaggaagacattgttgggcaaagccttactcaaactctacaagaccgctttgaattgtcagatttaaaatctataaaaaggggtattgtttgggaggttaaaattaattcacattcaataaaaaaagacgtggatttaatattaaatagtcatattttttctaatcctgtttcacaggaatgtcatgaatattgac

SEQ ID NO: 317902 - DNA, 535 bp, Unknown
  Bacterial polypeptide expressing nucleotide sequence isolated from the Sargasso Sea
aatgaaatcatctgtaattgtttttccgggatcgaattgcgacagagatattgctgaagccttaaaaaaaatgcaatttcaaaatcaaatggtttggcataaagaaactaaactaccaaaatctgatttaatagttattcctggtggattttcctatggtgattatttaagatcaggagctattgcgggtaaatctttaataattgatgaggttataaaatcagctaactcgggatgtttagttttaggaatttgtaatggatttcaaattttgactgaaacaggtctattaaaaggaacacttttaagaaataaaaatttaaaatttataaataaagatgttcatattaaagttgtaaataatactacaagattttcaaataaatacgaaaaagatcaaattttaaagattaatattgcacataatgagggaaattatttcactgacgcaaagcatcttgatcaattaaaaaaggaaaacctcattgcatttaaatactgtgatgaaaagggaaatatcgatgataattcaaat

SEQ ID NO: 317903 - DNA, 328 bp, Unknown
  Bacterial polypeptide expressing nucleotide sequence isolated from the Sargasso Sea
aactctaacaaccaattttttcttaaattataaaaaaaaaaatataattaaattacctatagctcataatgaaggtaattattttgctaacgcaaagcttataaattctcttgaagacaaaaatttaatagcttttaaatattgtgatgaaaaaggcaatataaatgaaaattctaaccctaatggttcagttaataatattgctgggattttaaacaataaaaagaatattttaggcatgatgcctcatcctgaaagagttattgatccacttctttctggagaagatggttcaataatttttgaaagtttattaaatcataaatag

SEQ ID NO: 317904 - DNA, 272 bp, Unknown
  Bacterial polypeptide expressing nucleotide sequence isolated from the Sargasso Sea
aatgaaatcatcagtaattacttttcctggttcaaattgcgacagagacatggatgttgctcttaaaaaatttggatttaaaaataaaatggtctggcatgctgatgctgaattaccaaaaagtgatttggttgtattgccaggtggtttttcatatggggactacctaagatgtggaagtatggcatctaaatcaaaaataatgcagtctgtaattaattttgctaattcagggggtatggttttgggtatctgtaatggatttcaaatat

SEQ ID NO: 317905 - DNA, 270 bp, Unknown
  Bacterial polypeptide expressing nucleotide sequence isolated from the Sargasso Sea
catgagcatcggcgtccttgtctttcccggctccaactgcgaccgcgatgtgcagtgggcgacagaaggatgcctcggcatgcccacccggcggatctggcacgaggaaacggacctgagcggcctcgatgccgtggtgctgccagggggcttcagctacggcgactacctccgctgtggcgcgattgcccgcttcgccccagcactccaggcgctgctcggcttcgcggctcaagggggacgcgtcctggggatctgcaacggatttca

SEQ ID NO: 317906 - DNA, 790 bp, Unknown
  Bacterial polypeptide expressing nucleotide sequence isolated from the Sargasso Sea
atgacgccatatgaaatgatgctatctgaaagtcaagagagaatgcttattattcttcaagatgggaaggaagactacgcaagaaaaatatttcagaagtgggatttggattttgttgttatcggaaagactacaaatactaaaaatcttactttaaaatttaataaaaagactgttggagaaattcctatagatgcacttgcaaataaagctcctatttatgatagaaaatggataaaaaaaaaattacctaaatatgaattagatataaagagtcttaaaaaaattaaagttgaagatgcattacttaaaatcttatcatcaccaaattatacaaataaagaatggattactaaccagtatgatcaaatggtaatgtgtgacactgctcaaagatcaggttcagatgctgcaataattagaattcataataaagataaagcaatagctgtaagcgtggactcttcagcaaactactgtaaatctcatccagtaacaggtggtaaacaaattgtttgcgaaaattggagaaatttaatttctgtaggtgcaaaacctttggcaataactaattgtttaaattttggtaatccagaaaataaagaaataatgggtgaattcgctgagtgtcttgaaggaattagagaggcatgtgaatttttgaattttccagtagtttcaggaaatgtttcattttacaatgggacaaataagaaaaatatttttcctacgcctgtaattggaggtataggacttattaaaaaattatcaaaacctattagccacaatt

SEQ ID NO: 317907 - DNA, 469 bp, Unknown
  Bacterial polypeptide expressing nucleotide sequence isolated from the Sargasso Sea
atgaagtcagcagtaataatatttccgggatcaaactgtgatagagatatggatgttgcattaaaaaaatttggctttaaaaataaaatggtttggcacaatgatcaggaaattcctaaaagtgatttaattgtattacctggaggtttttcatatggagactatttaagatgtggaagtatagctggaaaatcaaaaataattaaatcagttattgaatttgcgaattctggaggcctggtactaggtatatgtaatggatttcagatattaactgaaactggtttgttaccaggagttcttctacaaaacaaatatcaaaaatttatatgtaaaaatattcatgtgaaaataaatgataaagaaaataagtattttaaaaatatcaaaaaggaaattcttgaattgcatattgctcataatgaaggaaattatttttgttcaatggatgaaatgaaatcgttaagcg

SEQ ID NO: 317908 - DNA, 493 bp, Unknown
  Bacterial polypeptide expressing nucleotide sequence isolated from the Sargasso Sea
atgaaatcttcagtaataacctttcctggttcaaattgtgatagagatatggatgttgctttgaaaaaatttggatttaaaaataagatgatctggcataatgataatgaattaccaaaaagtgatttggtagtattgccaggtggtttttcttatggtgactatctaagatgtggaagcatggcttcaaaatcaaaaataatgcaatcagtaatcaattttgcaaaatcaggtggattagtaatgggaatttgtaatggttttcaaatattagtagaaacaggcttagttccaggagttttgttaagaaataaatatttagaatttatctgcaaaaatgtttttgtaaaattagataataaagaaaatctctattttaaaaatctggataaagatatttttgagttacatatagctcataatgaaggaaactatttttgtacaaaagaccaacttaaagaaattcaggacaataatcaaatagctatttatt

SEQ ID NO: 317909 - DNA, 928 bp, Unknown
  Bacterial polypeptide expressing nucleotide sequence isolated from the Sargasso Sea
tcaatcttatgtaaggaaaaagaagtattcagcgaatcaataactgttttagagagatattggagagaaacttcacatgctattcaaagcattagagataacaaaaaaattgcagattcagaattaaatttattaaacaacaaaaattatcatggattaaattcaaatgtttcatttgatgaaaatcaaatcaagaatctatcaattaaaggtacaaaaccaaaagtagccattttaagagagcagggcgttaatggtcagaatgaaatggcagcagcttttacaattgctggatttgaggcatttgatgtgcacatgcaagatttacttgatggaaatatagatttaaagcaatttcaaggtatggctgtttgtggaggcttttcttatggagatgttttaggtgctggtggaggctggtctaaaacgattctttacaataacaatgttaaagatcaattccagcaattttttgaaaatgaagctactttcactcttggtgtatgtaatggttgtcaaatgctgtcaaatttaaaagatattattcccgaagcggattattggccaagctttgaaagaaacttctcagaccagtttgaagctagattagtgcaggttaaggttgaaaacactaactcagttttgcttcgcaatatgaacggttggacagttccagttgcatcagcccacggtgagggacgagcaaactttcagaagaataatttagaagagctgaaaaaacaaaatcaaatcgcaatgagattcgttgactcaagcgcagaacatactgaggtttatccaataaacccaaatggttcaccagaaggaataaccggtattactgcagcaagtggcagagtcactataatgatgccacatcctgagagggtatttaggaagtatcaaatgagctggcatcaaaaagatt

SEQ ID NO: 317910 - DNA, 193 bp, Unknown
  Bacterial polypeptide expressing nucleotide sequence isolated from the Sargasso Sea
atggataattttactgtaggagttgttgtcttccctggttctaattgtgatcgtgatgtttcatgggcattggaaggttgtttagacataaaaacaaaatacttgtggcatgagtcttcagatttaagtgatgtagatgcaatagttttacccggaggatttagctatggtgattatttaagatgcggagcaa

SEQ ID NO: 317911 - DNA, 271 bp, Unknown
  Bacterial polypeptide expressing nucleotide sequence isolated from the Sargasso Sea
atgaaatcatctgttatagtttttccaggatcaaattgtgatagagatgttgctgttgcattaaaaaagcttcaattcaaaaattcaatgatctggcataaagaaactgaacttccaaaatcagatttaattgtggttcctggaggtttttcttacggagattatctaagatcaggtgctatagcagctaaatcaaatatattgtcagaagtagtaagggctggaaagaaaggttctttaattttgggcatctgtaatggatttcaaattt

SEQ ID NO: 317912 - DNA, 427 bp, Unknown
  Bacterial polypeptide expressing nucleotide sequence isolated from the Sargasso Sea
ttgcaatggttttcaaattcttacagaaacagtttattaaaaggaaccttattaagaaataaaaatcttaaatttataaataaagatattaatatcaaagtattgaatgataaaaccaaattcacatcaaaatataagttaaacgaaattttaaaaattaatattgcacataacgaaggtaactattttactgatagtaatcatttagaagaacttgaacaaaataatcttgtagcatttaaatattgtaacgaaaaaggtgacatagatgaaaaatcaaatccaaatggagctatcaataatatagccggaatatttaattcaaaaaaaaatatattaggtatgatgcctcatccagagagaatggtggataaaatagtttctaacaaagatggactaaatttattttcaagtttgcttaattaat

SEQ ID NO: 317913 - DNA, 292 bp, Unknown
  Bacterial polypeptide expressing nucleotide sequence isolated from the Sargasso Sea
tcaggcttgaaacctgggctaaaaattaaattacctatagcccataatgatggaaattattttgctaataacgaattgttaaataaattagaaggtaatgggcaaatagcatttaaatatgatcaatctgaaaaccataatggatcaaaaaatgatatagcaggagttttgtctaaaaatggtcgagttctaggaatgatgcctcatcctgaaaggtcaataactaaatttcatgattctaaagatggaaagttgttttttgaattattattagatcaactacttgggtaat

SEQ ID NO: 317914 - DNA, 671 bp, Unknown
  Bacterial polypeptide expressing nucleotide sequence isolated from the Sargasso Sea
aatggctgctgcgtttaaccgtgctggttttgcagctgttgatgtacacatgagcgatatcctcgaagggcgtttaactcttgagcagtttaaaggcttagtggcatgtggtggtttctcttatggtgacgtattaggcgccggtgaaggctgggctaagtctatattgtttaacgatatggcacgcgatcagttccaaaacttcttccaccgtgaagacacctttagcttaggtgtgtgtaatggttgtcaaatgttatcaacattgaaagagttaattccgggtactgagcattggccacgttttgtaacaaataagtcagagcgttttgaagcacgctttagcttagttgaaatacaagaaaacccgtctgtgttctttaatggaatggcggggtcgcgtatgccaattgctgtatctcatggtgaaggccatgcagaatttgcaaacgatgccgccactaaagctgcgcttgaaagcggcactgttgcagttaaatttgtagataactacggtaacccgacaacacaatacccggctaacccgaatggttcaccagaaggtattaccggtattacttctactgatggccgtgcaacagtaatgatgccgcacccagagcgtgtattccgcgctgttgctaactcgtggcacccagatgagtggaaag

SEQ ID NO: 317915 - DNA, 846 bp, Unknown
  Bacterial polypeptide expressing nucleotide sequence isolated from the Sargasso Sea
aggccgcacgcaacctcagttgcgtaggagcagagccactggcgatcacgaacaacctgaacttcccttcaccggagacgtcgcagggttactggcagctcgccatggcttgccgtggcattgctcaagcctgtcgagagctcgacacgccagtgacgggcggaaacgtgtccctctacaacgaaaccagacgcgacgacggcaccgtccagccgattcatcccacacccgtgatcggcatggtgggactcgttgatgacgtcagcagggcgattggtctcggttggcgtcaggcgggtgatcccatcgttttgctcggggttcctttggatgatcagggagatccccggttgggtctgtctggcagcagctatcagcagttggttgctggtcggctggctgggcgtcctcccatcgtcgacctgtcgctcgagcgtgccgttcaggctttgcttcgtcaggccattgctgaaggccttttggcgtcctcccacgacagcagcgacggcggtttagctgtggcgcttgccgagtgctgcatcacctcgggacttggagctgaactgtcggtccaggatcaaccatcgcgtcttgatcgagccctgttcggggaagggggtgctcgcgtcgtggtgtcggtgaagtcggaacagatggagggctggcagtgcctgatccagcgtcatccggatgttcccctgcaagcgcttggacgtgtggtcgatcaaccgagcttgtgctttgaccttgcaggacaacgggttctgaacaggacgatccaagacctgcaaacggttcacgaagaggctttgcctcgacgtctcaggtgtgatgcagaatcttgac

SEQ ID NO: 317916 - DNA, 435 bp, Unknown
  Bacterial polypeptide expressing nucleotide sequence isolated from the Sargasso Sea
tgccggtaatgggaatttgtaatggatttcaaattctaattgaaagtggtcttcttcaaggtgcactaatgagaaatagtagtttaagctttatatgtcgcgacataataattaaaccaacaaatacaaaaaccatgtttactaataaatccactatttcgaaaatgccaatagctcacaacgagggaaattattttgctaacagtaatcaaataaaagaaatagaagataacgatcaaattgccttccaatactgtgacgaaaatggagatatcaattcccattcaaatccaaatggatcaataaataatattgccggggtgttcaacaaaagcaaaaatgtactaggtatgatgccgcaccccgaaagagcagctgaaagcattcatgggtgtgatgatggaagaaatatttttgaaagtcttctaagttaat

SEQ ID NO: 317917 - DNA, 451 bp, Unknown
  Bacterial polypeptide expressing nucleotide sequence isolated from the Sargasso Sea
aatgaaatcatccgttatagtttttccaggatcaaattgcgatagagatgttgctgtagctctagaaaaactgcaattcaaaaattcaatggtttggcacaaagaaactgaattgccaaagtcagatttaattgtagttccaggaggtttttcatatggtgattacttaagatccggggcaatagcagcaaagtctaatatattgtcagaggtaatcaatgctggaaaaaaaggtgctttgattttaggaatttgtaatggatttcaaattttaattgagtgtggtttgttggagggagcgctattaagaaattctggattaaaattcatttcaaaagatatacttgtaaaagttcagtcaaataaaaataagttttttaataaatataaagctggtgaaatattaaagttaaatattgcgcataatgaaggtaattatttcactaacaaa

SEQ ID NO: 317918 - DNA, 582 bp, Unknown
  Bacterial polypeptide expressing nucleotide sequence isolated from the Sargasso Sea
aatgagagtagctgttgttacctttcctggatcaaattgtgatagagatgtttcagttgcggtaactaaaattacaggtaaaaaacctctaagcatttggcatcaagaccatgaaattccaaattgtgatttgataataattcctggaggtttttcctatggagattacttacgatgtggagcagttgcagctaactcgccaataatgcgtgaagtgaaaaaccatgcttcgagaggcggagctgttcttggtatttgcaatggctttcaaattttattagaagccaagttgttaaatggagcactgattaggaattcaaaattaaagtttgcttgcaaggaagtagacttaaaagtttcaaccaatatcaattcccctttcttggataaagttaatagagaagatataattaaattacccatagcacataatgaaggtaatttttttgcagatgaaaaaactcttgaacgaattgaaggggaaggattagttgcgttgagatactataatgctgatagtaatagtgattacaatcctaatggctcaatcaacgatatagcaggcattctatctgaaaacgg

SEQ ID NO: 317919 - DNA, 277 bp, Unknown
  Bacterial polypeptide expressing nucleotide sequence isolated from the Sargasso Sea
tcttaaaattaatattgcacataatgaaggtaactattttacaaactcagatcatttaaaggagttaaataatgaaaacttaatagcatttaaatactgtaacaaaagtggagacataaatgaaagctctaatcctaatggttctttagaaaatattgctggaatatttaattcaaaaaaaaatatcttaggcatgatgcctcatcctgagagaatggttgataacttaatttctaacacagacggcgtaaatctattttcaagtttacttaattaa

SEQ ID NO: 317920 - DNA, 358 bp, Unknown
  Bacterial polypeptide expressing nucleotide sequence isolated from the Sargasso Sea
tgctctcgttgcaaatgaaaatcttaattttatctgttatgacgttgaactggatatcgtttcttctaaaggcggttggtttaataatgtagatgaaaaacaaactattaaattgccaatagctcatggggaaggaagatatcattgtgattctgatactttaaaaaaacttgtagataatgaattgatcgctctgagatataaaaataatcccaatggatcctcatttgatatcgcaggcataactaataaaaagggaaatgttcttggtttaatgcctcatccagagcgagcatgtgacgagacaattggtgggactgatggtctctttacattaaaatcattaatattgaaataa

SEQ ID NO: 317921 - DNA, 303 bp, Unknown
  Bacterial polypeptide expressing nucleotide sequence isolated from the Sargasso Sea
aatgaaatcagcagtaattacttttccaggttcaaattgtgacagagatatgcacgtcgcactgaataagtttggttttaaaaataaaatggtctggcataatgataatgaattacctaaatctgatttgatagtacttcctggaggattttcatatggtgattatttgagatgtgggagcatggcttctaaatcaaagataatgcaatcagtaatcaattttgcaaaatcaggtggtttagtaatgggaatttgtaatggatttcagattttggttgaaagtggattggttccaggaatttt

SEQ ID NO: 317922 - DNA, 605 bp, Unknown
  Bacterial polypeptide expressing nucleotide sequence isolated from the Sargasso Sea
ctcaacttcccttcacccgaaacgcccaagggctactggcagttggccatggcttgtcgcgggattgcggatgcctgccgtgctctggacacacccgtcaccggtggcaatgtctccctctacaacgagacccgtcgggatgacggcacgcttcaaccgatccatccgactccagtgatcggcatggtcggtttggtggaggacatcgaccgggtggtcggactggcttggcgtcaacccggtgatgctgtgctgttgatgggtgttgcaccggatgaacagggggatgaccgccttggtcttgctggcagcagctatcaaatgctggtcagtggggcgctggcaggtcgtccaccgcgggtggactttgatctcgaacgcggtgttcagacgttgttgcgccgggccattgctgctgggctcctggcctccgcccatgacagcagtgatggcggtctcgccatagccctggcggaaagcagcattgcgtctggtctaagcgtcgatctgcggtttgacctgccgagcgaaggtctggctcgggccctgttcgccgaaggtggtgcgcgggtggcgatctccgtgaaggctgagtgccggcagca

SEQ ID NO: 317923 - DNA, 265 bp, Unknown
  Bacterial polypeptide expressing nucleotide sequence isolated from the Sargasso Sea
aatgaaagaaattatttttgtactaatgatcaattaaaagaaattgaggataataatcaaatagctataaattattgtgatgaaaatggaaaaatagaagatcaatttaatcctaatggatccataaaaaatatagcgggtgtatttaataaagaaaagaatgttttaggaatgatgccccaccctgaaaggatgattgatgcatctctatctggtgaagatggatcaattttttttaaaaacttaataagcaacttaaaatgat

SEQ ID NO: 317924 - DNA, 388 bp, Unknown
  Bacterial polypeptide expressing nucleotide sequence isolated from the Sargasso Sea
gatgaaatcttcagtaattattttcccaggatctaattgtgatagagacatggatgtggcccttactaaatttgggtttaaaaacacaatggtttggcacaatgatcaatcaattccaaaaagtgatttaatagttcttccgggaggtttttcttacggtgactatttaagatgtgggagtattgcatcaaaatccaatataattaagtctgtaattgattttgcaaactcaggaggattggttctaggtatttgtaatggatttcaaatattaaccgaaacaggattgcttactggaattcttccacaaaataaatatcttaattttatctgtaagaatgtttttatcaaagttaaggataaaaaaataaatattttaaaaatataa

SEQ ID NO: 317925 - DNA, 400 bp, Unknown
  Bacterial polypeptide expressing nucleotide sequence isolated from the Sargasso Sea
aatgaaatcatccgtcatagtttttccaggatcaaattgcgatagagacatagctgtagctttagaaagactacaatttaaaaattctatggtttggcataaggaaactgaactaccaaattcagacctagttgtaattcctggaggtttctcatacggagattacttgagatctggagcaatagcagcaaaatctaatattttatcagaggtaataaatgcgggaaaaagaggagctttaattttgggcatctgtaatggtttccaaattttaattgagtgtggtttattacaaggagctctattaagaaattctggtttaaaatttatttcaaaagatatacttgtaaaagttcaatcgaacaaaaataagttttttaataaatataaagctaatgaa

SEQ ID NO: 317926 - DNA, 371 bp, Unknown
  Bacterial polypeptide expressing nucleotide sequence isolated from the Sargasso Sea
atatttagaattcatatgtaaaaatgtttttgtgaagttggacaacaaagaaaatgcatattttaaaaatcttaataaagatgttttagaatttcatattgctcataatgagggaaattatttttgtacagaagatcaattaaaagaaattaaggataataatcaaatagcaatttattattgtaataaagaaggcaggatagaagaccgatataatccaaatggttcaattaaaaatattgcaggcatttttaataaagaaaaaaatgtcttgggtatgatgcctcatcctgagagaatgatagaccagagtttatctggggaagatggctcaatttttttcaaaaacctaattaataatattaaataat

SEQ ID NO: 317927 - DNA, 580 bp, Unknown
  Bacterial polypeptide expressing nucleotide sequence isolated from the Sargasso Sea
gatgaattcttctgtaataatttttcctggatcaaattgtgatagagatatggatgttgcgctaaagaagtttggatttaaaaaccaaatggtttggcacaatgatgaaaaaatacctaaaagtgatttaatagtgttgccaggtggtttttcgtatggagattatctaagatgtggaagtatagctggcaaatctaaaattataaaatctgttacaaattttgcaaattctggtggattagttttgggaatatgtaacggatttcaaattcttacagaaacagaattgcttccaggtatacttcagcggaacaaatatttaaattttatatgtaagaatatattcgttaaaataaaaaataatgaaaataaattttttaaaaatatcaaaaaagaaatcttaaaactccacatagctcataatgaaggaaattatttttgttctaaggaagagttaaaatcaattaaagacaacgatcaaattgcatttacttattgtggtaaaaacggtgaagaagatgaaaaaaataatccaaatggtgctcttaataatattgcgggaatttttaataaagaaaaa

SEQ ID NO: 317928 - DNA, 196 bp, Unknown
  Bacterial polypeptide expressing nucleotide sequence isolated from the Sargasso Sea
tattattgtaatagtgagggtaagatagaagatcaatataaccccaatggttcaattaagaatattgcaggcgtttttaataaacaaaaaaatgtcttaggaatgatgccacatcctgaaagaatgatagatcaaagtttatcgggggaagatggttcaatttttttcaaaaatcttattaacaatattaaataat

SEQ ID NO: 317929 - DNA, 601 bp, Unknown
  Bacterial polypeptide expressing nucleotide sequence isolated from the Sargasso Sea
atggctctttcatctttgtcatcacttcgcgtcgcgatcacagtatttcccggttcaaattgtgaccgggatatgatggtagcggttgaacaattgaccaatcggcgcccggcattggtctggcataaagaagcaagccttgatccggttgatcttgtgattgtcccgggtggcttttcatttggcgactatctgcgctgtggcgcactggctggccggtcaccagtaatgaatgcggtgatggaccatgctgcgcgtggcggtgcagttctgggcgtatgtaacgggtttcaggtgcttaccgaaactggcatgttgcccggcgtgttgatccgcaatgccgggcttcggtttagctgtcgactggttcggctcgaaactgcggaaacaatgtcatcgccctttacccagggtttgacagccggacaatcgcttgatattcccgttgcccataatgagggcaattattttgctgatgacaatacgctggaccgattacaagataatggccagattgcctttcgctatattgcgagcgatgccgaagggccagccaatccgaatggcgcggcgcgtgatatagccgggtattttatcaaac

SEQ ID NO: 317930 - DNA, 384 bp, Unknown
  Bacterial polypeptide expressing nucleotide sequence isolated from the Sargasso Sea
gatgaagtcttcagttatagtttttcctggttcgaattgcgatagagatgttgccatcgctttaaaaaaattacagtttaaaaattcaatgatatggcataaagaaactgaacttccaaaatcagatttaattgttgttccgggtggattttcttacggtgactatctaagatctggtgcaatagcagcaaaatcaaatattttatccgaagttatatctgctggaaaaaaaggttctctcattcttggaatatgtaacggatttcaaattttaattgaatgcggtttacttaaaggagcattattaagaaatttaggacttaagtttatatcaaaagatattcaagttaaaattttatctaataaaaacagattttttataaa

SEQ ID NO: 317931 - DNA, 334 bp, Unknown
  Bacterial polypeptide expressing nucleotide sequence isolated from the Sargasso Sea
atgataaagaaaataaatattttaaaaattctaaaaaaaaacattctagaactacacatagctcataacgaaggaaattatttttgttctgatgaagaattaaaatctttagaggataataatcaaatcgcagtcaaatattgtaataaagatggtttggaaagtgatgaattcaaccccaatggcgcacttaaaaacatagctggtatttttaataaagataaaaatatattaggaatgatgccccaccctgaaagaatgatagattcatatctttctggtgaagatggatctcttttttttgaaaatttactaggaaatttaaaacaatgaa

SEQ ID NO: 317932 - DNA, 670 bp, Unknown
  Bacterial polypeptide expressing nucleotide sequence isolated from the Sargasso Sea
gaatttcctacaaatcccaatggatctgtgaataatatgcccgctattagcaatagcagtggaaacgtaatggcgatgatgccccatccagagcgaactacaaacggtgatgcaatattttcttcaatgaaagaatacattgatgaaaattatcccactattaatcaaccgctaagtttttcaataactaatcataaatcaaaagaattaaatatagatgataaatcgaccgaatggattattgatttaattattacagacaatgaagcaaagtctattaatacggcattaaatcatcttggctttgatatagaggttaatagacaaatacattgggaaataaatatagagggagaaccaactaatgttttaaataaaataattggttcgggagagctatttaattcaaataaagaatatattgtagataaaaaagaaaaatatgatgcttcatttttagtaagacctaatgaagatatatatggaagagctaaatatgaatcccttacaaatcgatttgatataaaagaaatttcttatttaaagcgaggagtaatatggaatataaattccaaaagcggtaatttaaatgatgaaataaattcaattttaacaacaaacatattttttaacccgcattgctatgaatactatgaaatcaaaaaataaa

SEQ ID NO: 317933 - DNA, 835 bp, Unknown
  Bacterial polypeptide expressing nucleotide sequence isolated from the Sargasso Sea
aatgctggaatggtaagaatacataatactgataagaaattatgtgcaagtgttgattgcactccaagatacgttgtcagtgacccttatgagggctctattcaagctgtttgtgaggcatttaggaacctcatagccgtaggcagtaaaccacttgctataacgaataatttaaattttggaaatcctgaaaaaagagaaattatgggtcaaattgtagcatcaataaaaggaataaaagaggcatcattgaagttaaacatgccagtagtttctgggaatgtttctttgtataatgaaactaatggtaatgctattcttcctactcctgtaattggcgcagttggtattatagacaagaatgaaaatactgcctcgatgtatgatgctaatataggagatggtatatatattattggtcaaaatgaaaaccaagaaataggttggattggtcagtctctttattcaaaacatattttaaaaattagtgagttgtattctccacctccagttgacctcgaatttgaattgaggaatggtaactttataacaaaagctataggccaaaatataacaaactgtgttaacgatgtttcggatggaggtttagctatttcattagcagagatacttctcaactctaaaatacccaatattggagcaattatagataaaagttttataaaaaagtgtgagagtttttggtttggagaagaccaaggaaggtatttaatttgttcatcaaagcatcatgaattaatcaatttagctaaaagtgaaagaattagagtttcaaaaattggatcaataaattcaagttcaagattgacctttt

SEQ ID NO: 317934 - DNA, 194 bp, Unknown
  Bacterial polypeptide expressing nucleotide sequence isolated from the Sargasso Sea
aatgaaatcatctgtaataacctttcctggttctaattgtgatagagacatggacgttgctttaaataaatttggattcaaaaataagatagtttggcataatgatagcgatctgcctaaaagcgatttggtagttttacctggagggttttcatatggtgattatttgcgatgtggcagtatggcttcaaaat

SEQ ID NO: 317935 - DNA, 354 bp, Unknown
  Bacterial polypeptide expressing nucleotide sequence isolated from the Sargasso Sea
aatgaaatcatctgtaataacttttcctggttcaaattgcgatcgagacatggatgtagctttaaaaaaatttggctttaaaaataaaatggtatggcatgatgataacgaattaccaaaaagtgatttggtagttttaccaggtggtttttcttatggtgattatctcagatgtggaagtatggcttcaaaatctaaaataatgcactctgtcataaattttgcaaaatctggaggtttagttgtaggaatttgtaatggctttcaaatattagttgaaacaggtttgctaccaggagttttgttaagaaataaatatttagaatttatctgtaaaaatgtttttataaaagt

SEQ ID NO: 317936 - DNA, 731 bp, Unknown
  Bacterial polypeptide expressing nucleotide sequence isolated from the Sargasso Sea
tatgggagatactattcaaaaacctgggggtgatgctggagttgtaagagttcatggaacaaataaggctgtagctgcatcagtagacagttcagctgtttactgttgggcccacccacttactggtggaaaacaagttgtctgtgaaagttttagaaatttaattgctgttggagcaaaacctatagccattacaaattgtttaaattttggaagccctgaaaatgaggagaatatgggtgagtttgttgaatgtgttcagggaattggtgaagcaagtgaatatttaaaattcccagtagtttcaggaaatgtttctttttacaatcaaactaaagatgaaggtataaagcctactcctgctattggaggtgtcggtttaattaaggattataatatgatgattacaatggattttaaagagattgataatgtggttttggttattggaaaaacagaaggacatttagatcaaactttatttgcaagaaatattttagacgaaaaaaatggtcctcctcctgaaataaatttatttaatgaaaaaaataacggagaaactttactaaaacttattgaaagcaatctaattaaaagtgctcatgatgtttctctaggaggcattattactgcggtagcaaagatgtgtattaaaggtaaaaaaggaattgatctaaataaaccaaaatatttaattaatgaaatggagtatttttttggtgaagatcaag

SEQ ID NO: 317937 - DNA, 349 bp, Unknown
  Bacterial polypeptide expressing nucleotide sequence isolated from the Sargasso Sea
tgcaaataaaaaccttaatttcatctgtgatgatgttgaactagatattgtttcttcaaaaggaggttggtttaataatggagataaaaaacaaactattaatctgccaatagcgcatggggaaggaagatatcattgtgattctgatactttaaaaaaacttgtagataatgaattgatcgctttgagatataaaaataatcctaatggatcctcattcgatatcgcaggcataactaatgaaaagggaaatgttttaggtttaatgcctcatccagagcgagcatgtgacgaaacaattggtgggactgatggtctctttacattaaaatcattaatattgaaataa

SEQ ID NO: 317938 - DNA, 873 bp, Unknown
  Bacterial polypeptide expressing nucleotide sequence isolated from the Sargasso Sea
aagacaaatatttaaaaaatgggatttggactttgtcgtaattggtaaaacaactgatactaaaaatttatctttaaaatttaagaatgaggtcgtagcatcaattcctataggagcattgtcttcaaaagcgcctttatatgacagaaaatgggtcaaaaaaaaattagataaaaaaaaaattaatataaaagaacataaaaaaattaaatttgataaagctttttttgaacttatatcttcccctaatcattcaaacaaaaaatgggtgaccgagcaatatgatcaaatggttatgggtgatactatagagcgttctggagcggatgctgctattataaaaattcatcaaaaagataaagcaatcgccatgacagtagattcttcggctaactactgtaaatctcatccgttaagtggtggcaaacaaattgtttgtgaaagctggagaaacttagtttctgttggggccaaaccaattgctattactaattgtttaaattttggaaatcctgaaaatccagaaataatgggacagttcgcagaaaatatattaggaattaaagaggcatgtgaatttttggactatccggtagtttctggaaacgtttcgttctacaatggtacaaataataacaatatttatcctactccagtaataggtggtgtgggattaataaaaaatttaaataaaactaaaaatcataaatttaaaaaaattgatagccaaattatgataataggtaaaacttttggtcatctaggacaaagtgcttttataaacgagttatacgatgtccattatggaatgcctcctgaaataaatttgctaaatgaaaaaaataatggtgaaatgattttaaaactcattga

SEQ ID NO: 317939 - DNA, 166 bp, Unknown
  Bacterial polypeptide expressing nucleotide sequence isolated from the Sargasso Sea
tttgagatataaaaataatcctaatggatcctcattcgatattgcaggcataactaatgaaaagggaaatgttctaggtttaatgcctcatccagagcgagcatgtgacgagacaattggtgggactgatggtctctttacattaaaatcattaatattgaaataa

SEQ ID NO: 317940 - DNA, 910 bp, Unknown
  Bacterial polypeptide expressing nucleotide sequence isolated from the Sargasso Sea
aatgaccgagcttcttcatgccttcagcgaaaccacttaccgcttccaatcgctaagggacaacccaaatactgcaaaagaagaactggaaactattctaaacccaaaagatcctggtttgtcattgctcattcccgacaattcagtttttactcgagtgaacacaaacctcgcaccaatcttaaaactccccccgaaattaggggtgctcagagaacaaggtgttaatggacatatagaaatggcggccgcttttgcacgggcgggatttgagaccatggatgtgcatatgtctgatattgtcgaggggaatgaagacctaagcgattatgtagggctagcagtatgcggaggattttcctacggagatgtccttggagctgggcgaggttgggctggtacgataaggtttaactcgagggcgtatgacgtatttgcgaattttttcgaaaatcagaacactttcactttcggagtttgcaacggttgccaagttctcagtgaactgagaactctgatccctggctcagaactgtggccgaagttcgaaaaaaataaatcggagcaatttgaggccaggttatcgctagtagaagtcctaccttccccttctatagttctaaatgggctcgaaggtatgcgtgctccgatagcagtggcgcactcagaaggtcgaatgaaacctcccgctcaagataagctaaccgaatacacttgcctgcgatttgtagataatttcggaaaacctacagaaacctaccctgctaatccgaatgggtctccccaagggctgactggagtcacatcagcggatggtcgtgtgacgattatgatgccccatccggaaagagtgtttctcacacaacaattatcgtggatgcagagaacgtggcggcgcaaggagagtcct

SEQ ID NO: 317941 - DNA, 142 bp, Unknown
  Bacterial polypeptide expressing nucleotide sequence isolated from the Sargasso Sea
aaatggttcaattgaggctattgcaggtattacaaacaaaaaaaagaatgttcttggaatgatgcctcatccagagagagcatattctgattttcatcaatcacaagatggaagacttattatagagtctctaatttcatga

SEQ ID NO: 317942 - DNA, 193 bp, Unknown
  Bacterial polypeptide expressing nucleotide sequence isolated from the Sargasso Sea
tattgcggagtagatggcgcagaaaatgaaaaaactaatcctaacggagcaattaaaaatatagctggaatatttaatagaaataaaaatgtattgggaatgatgcctcatcctgaaagaatgatagataaatatttatcaggtgaagatggttcattatttttcaaaaatattttagataattttaaataat

SEQ ID NO: 317943 - DNA, 232 bp, Unknown
  Bacterial polypeptide expressing nucleotide sequence isolated from the Sargasso Sea
catgagcatcggcgtccttgtctttcccggctccaactgcgaccgcgatgtgcagtgggcgacagaaggatgcctcggcatgcccacccggaggatctggcatgaggaaacggatctgagcggccttgatgccgtggtgctgcccgggggcttcagctatggggactatctccgctgcggtgcgattgcccgcttcgccccagcccttcaggcgctgatcggcttcgcggca

SEQ ID NO: 317944 - DNA, 280 bp, Unknown
  Bacterial polypeptide expressing nucleotide sequence isolated from the Sargasso Sea
aatgaattcatctgtaattatttttccaggttcaaattgtgatagagatatggatgttgctctcaaaaaatttggctttaaaaatgaaatggtttggcatgatgatgaaaaacttccaaaatcagatttaattgttctacctggtggattttcatacggtgattatcttagatgtggaagtatagctggtaaaagtaaaattattaaatctgtaatagattttgcagaaaaaggagggttagttttaggtatttgtaatggttttcaaatattaacggag

SEQ ID NO: 317945 - DNA, 181 bp, Unknown
  Bacterial polypeptide expressing nucleotide sequence isolated from the Sargasso Sea
tgtgatgaaaagggtctggttaatgatgaaactaatcctaatgggtctctaaacaatattgcggggattttaaattcaaagaaaaatatactaggaatgatgcctcatccagaaaggatgattgataaaattatatcaaacgaggatgggcttaatattttttcaagtattttgaattaaa

SEQ ID NO: 317946 - DNA, 232 bp, Unknown
  Bacterial polypeptide expressing nucleotide sequence isolated from the Sargasso Sea
atgaaatttggagttataacatttcccgggtctaattgtgatcaagacatgattggtgttttgagggatgaaatggggcagaaagttgagagcatatggcataaagaaaccgatttaaagggctctgactttatagttttacccggaggtttttcatatggggactacttgagatctggagctattgctagattttctcccaataatggaagagataatcaatcatgctaaa

SEQ ID NO: 317947 - DNA, 562 bp, Unknown
  Bacterial polypeptide expressing nucleotide sequence isolated from the Sargasso Sea
atgaaatcatcagttattacttttcctggttcaaattgtgacagagacatggatgtcgcgttgaagaagtttggatttaaaaacaaaatggtttggcatgctgattctgaattaccaaaaagtgatttggttgtattaccaggtggtttttcatatggggactacttaagatgtggaagtatggcatctaaatcaaaaataatgcagtctgtaattaattttgcaaattcaggaggtatagttatgggtatctgtaatggatttcaaatattggtagaaactggtttagttccaggtgttttgcttagaaataaatatttagaatttatttgtaaaaatgtttttgtaaaaattaaagataaaaaaaataaatattttaaaaatgttgataaagaagtttttgaattccatatagctcataacgaagggaattatttttgtaccaatgatcaattaaaagaaattgaagataataatcaaatagctattaactattgtgatgaaaatggaaaaatagtagaccagtttaatcctaatggttctataaaaaatattgccggtg

SEQ ID NO: 317948 - DNA, 280 bp, Unknown
  Bacterial polypeptide expressing nucleotide sequence isolated from the Sargasso Sea
ttaaaaattaatattgctcataatgagggaaattattttacaaaagagagtcatttggaagaattaaataaagaaaatcttatagcttttaaatattgcgatgaaaaaggagttgtaaatgatcgctctaaccctaatggtgctttagaaaatattgctggaatatttaatgccaaaaaaaatatattaggaatgatgcctcatcctgaaagaatggtcgatgaaattatttctaacactgatggtgtaaatcttttttctagtttaataaacaaataag

SEQ ID NO: 317949 - DNA, 138 bp, Unknown
  Bacterial polypeptide expressing nucleotide sequence isolated from the Sargasso Sea
tcagcaatttttgatgacaagatagaagaaaaaaaacctacagttcaagttggagatccttttacagaaaaattattattagaagcatgtttggaattaatggcaggaaaatcaattatatgtattcaagatatgggt

SEQ ID NO: 317950 - DNA, 843 bp, Unknown
  Bacterial polypeptide expressing nucleotide sequence isolated from the Sargasso Sea
aaggactaaaaagcaatatctcgtttgatgaaaatgagcttaagcatattaatatcaaaataacaaagcctaaagtagcaattttaagagaacagggcgtaaatggacaaaatgaaatggcagctgcttttacccttgcaggcttcaatgcttttgatgttcatatgcaagaccttcttgatggaaatacaaatttaaaggactttcagggtatggcagtatgtggtggtttctcatacggtgatgttctgggtgccggaggaggctggtcaaaaactattttgtacaacaatcttgttaaagatcaatttcaagaattttttagtgatgaaaaagttttcacattaggcgtatgtaacggatgccagatgctctcaaatttaaaagatattattccaggagctgaattttggccaagttttgaaagaaatttatcagatcaatttgaagcccgtttggctcaagtaaaaatttcaaaaacagagtcggttcttttagatgggatggaggattggatgataccagttgcatcagctcatggagagggaagagctcaatttaataataatgatcttcaggaattagaaaaatccaatcaaatagctatgcattttgttgattcatcagaaaactcatctgaaatatatcctattaatccaaacggctcacctaatggcataacaggtatcacagcttctaatggaagagttaccattatgatgccccatcccgaaagagtttttagaaaagttcaactaagttggcacagaaaagactggaatgagtactctccttggatgcaaatttttataaatgcaaaaaaatttagcgataaaaattaat

SEQ ID NO: 317951 - DNA, 760 bp, Unknown
  Bacterial polypeptide expressing nucleotide sequence isolated from the Sargasso Sea
atgtataatcgtaaatggaaaaaagccaaacttccaaaaaaaaataagattaaaaaagaagatattaaacatttaaaaattattgatactttaaaaaaaattttaatgaatccaaatgtgtgtagtaaagaatggatttggcaacagtatgatcatacagtcatgggagacacaatacaaaaacctggtggagacgcaggtgttgtaagagttcatggaacagataaagcagtggctgcctctgtagattcttctgcagtatattgctgggctcatcctttaactggtggaaagcaagtagtatgtgaaagttttagaaatcttatatcggtgggggctaaaccaattgctattaccaattgtttgaattttggtagtcctgaaaacgaggaaaatatgggtgagtttgttgaatgtgttcaaggtattggtgaagcaagcgaatatttaaaataccctgttgtctctggaaatgtatctttctacaaccaaacaaaagaagaagggattaaacccacacctgcaattggaggagttgggttaataaaggattataagaatatgatcactatggagtttaaagaagtcgataatttagttttagtgattggaaaaactgaaggacatattgatcaaagtttatttgcaagaaatattttagatgaaaaaaatggacccccacctgaagtaaatttatttaatgaaaaaaataatggagaaacattactcaaattgattgataataatttaataaaaagtg

SEQ ID NO: 317952 - DNA, 767 bp, Unknown
  Bacterial polypeptide expressing nucleotide sequence isolated from the Sargasso Sea
caaaagaattgttgatgggcaggtggttggcgttggctattacaacacctggactaatcttaagctatcaacaaagcctgagcgctgcgcttttactagacattcagatccaaaaatcttaatgaatattcctcttgcccatggtgagggcaggtttgttatgccaaatggcttattagatcaattaatcaaaaatgaacaattagtttataaatattctaatgattctggagatattattgatgaatttcctacaaatcccaatggctcagtgaataatattgccgctattagcaatagtagtggaaatgtaatggcgatgatgcctcatccagaacgcactacaaatggtgatgcaattttttcctcaatgaaagaatacattgatgaaaattatcccactattaataaaccactaagtttttcaataactaatcataaatcaaaagaattaaatatagatgatcaatcaaccgaatgggttattgatttaattattacagacaatgaagcaaggtctgttaatactgcattaaatcatcttggctttgatatagaggttaatagacaaattcattgggaaataaatatagatggggagccaactaatgttttaaataaaataattgattcaggagagctatttaattcaaataaagaatatattgtagataaaaaagggaaatacgatgcttcatttttggtaagacctaatgaagatatatatggaagagctaaatatgaatcccttacaaatcgatttgata

SEQ ID NO: 317953 - DNA, 554 bp, Unknown
  Bacterial polypeptide expressing nucleotide sequence isolated from the Sargasso Sea
aatgcttggacgggcaccttcgttacctgagttagtattattttctattcaaggatctgagcattgcagctataaaagtagcagaactcaccttaagcaatttgttacagatagccccgatgtagttctaggtgcaaaagaggacgcaggggttgtagctgttgcaaccgataagcagggaaaaagatggtgcattgttatgagccacgagagccacaaccatccctcacaaatcgtaccctatgaaggagcagcaacaggcgtgggtggtaacgttcgcgatgttatgtgtatgggtgcggaagttattgcatgtacggattcttttcgatttgggaacatagataatgcaaaaacaaaatggataaacgacggtgttgtgtcaggtattgccggatacggtaatccgttgggtgttcccaatattggtggtgacatttactatcacaatgattacaatgaaaattgtttggtaacactggtaacactgggaattgtcaaagaggaccatataattcattcctacgcaccagagaatgcaaatggttatgatc

SEQ ID NO: 317954 - DNA, 254 bp, Unknown
  Bacterial polypeptide expressing nucleotide sequence isolated from the Sargasso Sea
tattaatttgccaatagcgcatggggaaggaagatatcattgtgattctgatactttaaagaaacttgtggataatgaattgattgctttgaaatacaaaaataatcctaatggatcctcattcgatatcgcaggcataactaatgaacagggaaatgttttaggtttaatgcctcatccagagcgagcatgtgacgaggcaattggtgggactgatggtctctttaccttaaaatcattaatattgaaataaa

SEQ ID NO: 317955 - DNA, 934 bp, Unknown
  Bacterial polypeptide expressing nucleotide sequence isolated from the Sargasso Sea
ggcagatgaggctcctcaatatgagaggaaatggattaaatcaaaaattaaaaaaagtgaactaaaaataaaagatttgaagaaagtaaaaacagaggttgcattgatcaaaatattatcatctccagatcattcaaacaaaagttggataactgaccaatatgatcaggtagtaatgtgtgataccattcaaaagtcaggtggggatgctgctgtagtaagaattcataaaaaagaaaaggcaatctcaatttctgtggactcctctgcaaactactgtgctgctgaaccaagaacaggtggaaaacagattgtgtgtgaaaactggagaaatcttatttctgttggctcaaaaccattggctattacaaattgtttaaattttggaagtccagaaaagcctgaggtgatgggagaatttgttgaatgtattgagggaatgaaagaagcttgtgaatttttaaattttcctgttgtctcaggaaatgtatctttttataacgaaactaattctaaaagcatttctcctactccggtgattggtgggatcggaatctttgataatttaaataatataataaatataaaaactaaaaaaattggaaatttaatattagcagtcggtaaaacgttgggtcatttaagtcaaagctctttcttaagacagatttatttaataaatgatggctcgccgcctgaaataaatttaatgaatgaaaaaaataatggattagctgtatcaaaattaattaataataactttgttttatcttgtcatgatgtatcgtcaggtggaatactggttgctttagcagaaatgtctatggcatcgatgttaggacttaaaataacccgacctaaaaaatttaatgatctgaatgagtacttttttgcagaagatcaaagtagatatttaattgaaatagaaagagat

SEQ ID NO: 317956 - DNA, 150 bp, Unknown
  Bacterial polypeptide expressing nucleotide sequence isolated from the Sargasso Sea
acaaccccaacgggtcggtgtccgacatcgcaggcatcaccaatgccagcggcagcgttctgggcctgatgccccaccccgagcgggcctgtgatccggccacgggaggaaccgacggccgccgcatgctggaagccctgctgggctgat

SEQ ID NO: 317957 - DNA, 904 bp, Unknown
  Bacterial polypeptide expressing nucleotide sequence isolated from the Sargasso Sea
tttgtagaagcttgtttggagttaatggctggcaattcaataatttcaattcaagatatgggtgctgcaggactaacatcatcaagtgttgaaatggcatccaaaggtaaattaggaatagaattagatttaagcaaagttccatgtagagaagaaaaaatgacaccatatgaaataatgctatccgaaagtcaagaaagaatgcttatagttttagaaagtgggaaagaaaatgaagcgaaaaagatatttgataaatggaatttagattttgcaattattggaaaaacaacgaatagtaaaaaaatagaaattaattttaatgaagaaaaagttgctgatataccaatagatttactttctgaaaaagctccgatctatgatagaaagtggaaaacaactaagcttcctcaaaaaataaaatttaaaaaagaaagttttaaatcattaaagctaagtaactgtttaaaaaatttactagcacatccaaatatttgtgacaaacaatggatttgggaccaatatgatcatacagtcatgggtgatacaatacaaaaacctggaggaaatgcaggagtagtaagagttcatggaacagaaaaagcagttgctgcttcagtagactcatccgctttgtattgccatgcgcatcctcttactggtggaaaacaagttgtatgcgaaagttggagaaatttaatttcagttggtgcacaaccaatagcaattactaactgcttaaattttggaaatcctgaaaaagaaaaaaacatgggtgaatttgttgaatgtgttcagggaatatctgaggccagtaaatatttagattacccagttgtgtccggaaatgtttctttttacaacgaaaccaaagacaaagggattaaaccaacaccttcaattg

SEQ ID NO: 317958 - DNA, 210 bp, Unknown
  Bacterial polypeptide expressing nucleotide sequence isolated from the Sargasso Sea
aatgaaatcatctgttattacctttcctggttcaaattgtgatcgagatatggatgtagctttaaataaatttggatttaagaacaaaatggtctggcataacgatcatgaacttccaaaaagtgatcttgttgttttaccaggaggtttttcttatggtgattatctcagatgtggaagtatggcatcaaaatctaaaataatgcattc

SEQ ID NO: 317959 - DNA, 352 bp, Unknown
  Bacterial polypeptide expressing nucleotide sequence isolated from the Sargasso Sea
atgaaatcatctgttataacctttcctggttcaaattgtgatagagacatgaatgttgcacttaataaatttggtttcaaaaataaaatggtttggcataatgataatgatttaccaaaaagtgatttggttgtcttacctggtggtttttcttatggagattatcttagatgtggaagtatggcttcaaaatcaaaaataatgcaatcagtgataaattttgcaaaatcaggtggtctcgtaatgggcatatgtaatggatttcaaatattagtcgaagcaggtatggttcctggcgtcctattgagaaataaatatttagattttatttgtaaaaatgtttttcttaaag

SEQ ID NO: 317960 - DNA, 893 bp, Unknown
  Bacterial polypeptide expressing nucleotide sequence isolated from the Sargasso Sea
aatgatgttgtctgaaagtcaagagagaatgcttattattttagaagatggaaaagaaaatgaggcaaaaaaaatatttgataaatgggatttagattttgtggtaattggaaaaacaactagttcgaaaaatctaactttaaaatttaatgataacattgtgggtgaaattccaatcgatgctctttcatcaaaagcacctgtgtatgatagaaaatggattaaaaaaaagccacaaaaaagtaaagttgatttaaaaaaacttaagaaaattaaaattgaggatgctttgattaaaatactatcaagtcctaatcattcaaataaaagttggattactaatcaatatgatcaaagcgtaatgtgtgatactgtgataaaatctggttcagatgctgcagttataagaattcataacaaagataaagctattgccgtttctgtagactcatcggcgaattattgtaaatcacatcctattactggtggaaaacaaatagtttgtgaaaactggagaaacttaattacaataggtgctaaacctatagcaatcaccaattgtttaaactttggtaatccagaaaatagagaaataatgggagaattttcagaatgtgtagagggcattaaacaagcatgtgaatttttgagttatcctgttgtctcgggaaacgtctctttttataatggtacaaataaaaaaaatattgaccctactcctgttattggtggtgttggattaattaaaaagcttattaaacctttaagccatagttttaaaaaagataaaagcccattaatcttgataggcaaaacatttggtcatttagagcaaagttgttttttaaaagaaaattattcaatcaatgatggatcgccccctgaaattaatc

SEQ ID NO: 317961 - DNA, 345 bp, Unknown
  Bacterial polypeptide expressing nucleotide sequence isolated from the Sargasso Sea
aatgaaatcatctgtaattatattccctggttcaaattgcgacagagacatggatgtggctttgaagaaatttggttttgaaaatcaaatgatttggcataatgatgctaaaatacctaaaagtgatttaattgtacttcctggaggtttttcttacggcgattaccttagatgtgggagtattgctggaaaatcaagaataattaaatctgtgattgattttgcaaattcaggaggattagttcttggaatatgtaatggttttcaaatactaactgagacaggtttgttgcctgggatacttcaacaaaataaatacttaaactttatttgcaaaaatgtttt

SEQ ID NO: 317962 - DNA, 469 bp, Unknown
  Bacterial polypeptide expressing nucleotide sequence isolated from the Sargasso Sea
tgagtttgctaattcaggaggattaattttaggcatattttacggattccagattttaactgaaacaggtttgttgcctggtatcctccaacaaaataaatatcttaattttatatgtaaaaatgtatttgttaaagttaatgacaaaaataataaatattttaaaaatattaaaaaagatattctcgaattacatatcgctcataatgaaggaaattatttttgctctaatgaagaactaaaattattggaagataataaccagatagcagtaacttattgtaataaaatgggtttagagaatgatgaaaataatccaaatggtgccattaaaaatatagcaggaatatttaataaaaataaaaatgtcttgggtatgatgccacatcctgaaagaatggttgatgctcacctatctggggaagatggatctctattttttgaaaatttactagaaaatctaaaatga

SEQ ID NO: 317963 - DNA, 840 bp, Unknown
  Bacterial polypeptide expressing nucleotide sequence isolated from the Sargasso Sea
tttgcttgatgatagaaattttcaaggacttaaaagcaatatctcgtttgatgaaaatgagcttaagcatattaatatcaaaagaacaaagcctaaagtagcaattttaagagaacaaggcgtaaatggacaaaatgaaatggcagcagcttttacgcttgcaggcttcaatgcttttgatgttcatatgcaagaccttcttgatggaaacacaaacttaatggactttcagggtatggcagtatgtggtggtttctcatacggtgatgttctgggtgctggaggaggctggtcaaaaactattttgtacaacaatcttgttaaagatcaatttcatgaatttttcaataacgaaaaagtttttacattaggtgtatgtaacggatgccagatgctctcaaatttaaaagatattattccaggagctgaattttggccaagttttgaaagaaatttatcagatcaatttgaagcccgtttggctcaagtaaaaatatcaaaaacagaatcggttcttttagatgggatggaggattggatgataccggttgcatcagctcatggagaaggaagagctcaatttaataataatgatcttcaggaattagaaaaatccaatcaaatagccatgcattttgttgattcattagaaaactcatctgaaatgtatcctattaatccaaacggctcacctaatggcataacaggtattacagcttctaatgggagagttaccattatgatgcctcatccagaaagagtttttagaaaagttcaactaagttggcacagaaaagactggaatgagtactctccttggatgcaaatttttataaatgc

SEQ ID NO: 317964 - DNA, 867 bp, Unknown
  Bacterial polypeptide expressing nucleotide sequence isolated from the Sargasso Sea
gaaagtcaagagagaatgttaattgtacttgaaaaaggtaaagaaaatgatgcaaaaaaaatatttgataaatggaatttagattttgcagtaataggagaaacaactaactccaaaaaaattgaattagtttttaataataaaaaagttgcagaaatacctatagatctccttgcagaaaacgcgcctatatatgatcgaaaatggaaaaagactaaattacctcaaaaaataagatttgataaaaatgaattgaaaactttaaaattatcagattgtttaaaaaaaatattaaacaactcaaatatttgtgacaaacaatggatttgggatcaatacgatcatactgtaatggctgatactatacaaaaacctggtagtgatgctgggatagtaagagtacatggaaccaaaaaggctgttgctgcatgtgtggactcttctgcctcttattgtttttcccatcctcttactggaggaaaacaaattgtatgtgaaagctggagaaacttgatttcagtcggagctaaacctatagctatcacaaactgtctaaactttggaaatccagaaaaagaaaaaaatatgggtgagtttgttgaatgtgttgaaggtatagcagctgcaagtaaatatcttgattttccagttgtctcaggaaacgtatctttttataacgaaacaaaagataaaggaattaaaccaactccaactattggaggtgttggattgataaacaactaccaaaaaattataactatggaatttaagaatccgggtaatgtagtttatgttattggaaaaacagaaggacatttagatcaaagtatttttgctagagatttgttatctgaaaaaaagggtccg

SEQ ID NO: 317965 - DNA, 289 bp, Unknown
  Bacterial polypeptide expressing nucleotide sequence isolated from the Sargasso Sea
atgatagcaaatataattgtctttccaggttctaattgtgatcgggatataaaagttgcattagaaaaatttcaaattaaatgtaaaatgatatggcataaagaaaatgaattgccaaaagcggatttagttgttcttccaggtggtttttcttatggagattatcttagatgtggatcgatggcatctaaatcagtcataatgaaagaggtaattaaacacgcgtctactggggcgtatgttattggtatatgcaacaatttccaaatattaacagaaactaaattgc

SEQ ID NO: 317966 - DNA, 541 bp, Unknown
  Bacterial polypeptide expressing nucleotide sequence isolated from the Sargasso Sea
ggattttcttatggagactatcttagatgtggaagtatcgctggtaaatctaagattattcaatcagttatagattttgcaaactctggaggtttagtcttgggtatttgtaatggatttcaaatcttaacagaaacaggtctattaaagggagttcttcaacaaaataaaaatattgaatttatttgcaaaaatatatttgtcaaaattaacaatagtgaaaacaaattttttgaaaatatagataaagatatcttggagcttcatatagctcataatgagggaaattatttttgcactaaagatgaattaaagtcattagaagacaataatcaaattgcagcttactattgcagctctgatggaaaaatagatgataagtcaaatccaaacggtgcaataaaaaatatcgctggaatatttaatgaaaagaaaaatattttaggaatgatgcctcacccagagcgaatgatagatcaaagtttatctggtgaagatggctcaatattttttgaaaatttattaatgaatttgaaataat

SEQ ID NO: 317967 - DNA, 842 bp, Unknown
  Bacterial polypeptide expressing nucleotide sequence isolated from the Sargasso Sea
acaaattttggttgaaagcggtttggttccggggttaaataatttcaaattaggattagccttaacagataataaaaggattcaaggcggacaggttgttggcgttggttattataacacatggtcaaatcttaaactagacgttcagggggataggtgtgcctttacaagacatcttgaacaaggggaatttataaacatcccgctagcacatggagagggaagatttgtaattcctgactctttattaaaagaaataaccacgaacaaacaaacagtatttagatattgtaatgatacgggttctgtcattgatgagttcccaaccaatccaaacggctctatatataatttggcagcagtttgtaatacgactggcaatgttatggcaatcatgccacatccagagcgcacaaaaaagggcgatgtaattttttcatcaatgaaagaatatattgaactagataacccaacctatgattgtattttaaaatataatgaaagcttaaccaagcttgcccaatataatagtaataataacgatgaatgggttgttgatatgattattaatgacaatgaagcagcttctattcaaaacgcattggttcaaatgggacatgatgttgatatttcacgtcacacccattgggagataaacatacaaggacaaaagtcaaaaatattatctaaaatagataaatcaggagaactctataattcaaacaaagaatatatttctaatattaaaaaaacaagcaaaacagcttcatttttaattaggcaaattgatgatgtttttggtcgcctgaaactagaatcactaaaaaatacattgaaataaa

SEQ ID NO: 317968 - DNA, 439 bp, Unknown
  Bacterial polypeptide expressing nucleotide sequence isolated from the Sargasso Sea
attgagttttcaagaacacgagaaattacatataaaacaaaacatcaaacgtgatttaactaaaacagagttacaagtgttagcagctgagtggtctgaacattgctcgtacaagtcatcaaagaaacatttgaggatgcttccaactactggtccaaatgtcattgttgaaaaaggatatgattctggtgttttagatgttggcggtggttacgttgtaactgtgcatattgagagtcataatcatccttctgcagtagaaccatttggtggtgcggcaactggtgtaggtggtgtcattcgtgatattttatctgcaggaacaagaccaattgcattatttgatggattaagatttggcaatatagaagatgacgttcatgcaagatggttattcaaaaatgcagttgcaggaattgcagattatggaaattgtctt

SEQ ID NO: 317969 - DNA, 412 bp, Unknown
  Bacterial polypeptide expressing nucleotide sequence isolated from the Sargasso Sea
aattttagttgaatcgggattacttccaggagtcttactcaaaaatgaatctctgaattttatgtgcgagtggactaatctaattgtaaaaaataataaaacaccatttacaaataaacttaaactaaatcaaaaaattccaatacctatcgcaaatggtgagggaagatattatgcagacaaagaaaccttgaatcaattaaaaaagaataaccagattgtcttttcatatgaaaataaggtcaatggctctgtatcccaaattgctggagtgtgtaataatgatggaaacgttgtaggaatgatgcctcatcctgaaagagcagctgaaaaagaaataaaccaaattgaccacaagccttcatcattaatctttgaatcattgattgaaacaatgggtgtaaaaaattga

SEQ ID NO: 317970 - DNA, 892 bp, Unknown
  Bacterial polypeptide expressing nucleotide sequence isolated from the Sargasso Sea
agattttgctattatcggaaagaccactaaatctaataatattgaattaatttttataaataacaaagttgcccaaataccaatcaacctattggcagaaaacgcacctgtttatgatagaaaatggaaaaaaacaaagttacctcaaaaacttaaatttaataaagatgaatttaaatcattaagtttatccgattgtttaaaaaaaatattaagcaatcctaacattgctgaaaaaaaatggatatgggatcaatatgatcatacagttatgggtgatacaatacaaaaacctggtggtgatgcaggtgttgtaagagtccatggatctaataaagctattgctgccacagtggattcatcggcatcttattgttattctcatccacttagtggaggaaaacaagttgtatgtgaaagctggagaaatttaatttcagttggagcaaaaccattagcaataacaaattgtttaaattttgggaatcctgaaaaagagaaaaacatgggagaatttgtagaaagtgttgagggaatatcagaggctagcaaatatttggaatttccaatagtttctggaaatgtatcattttataatgaaaccaaagataaagggataaaacctactccaacaataggtggtgtaggattaataaaagattataaaaatatgattagcatggattttaaagaaaatgacaatctagtatatgttattggcaaaacagaaggtcatttagatcaaagtatttttgctaaagatatacttaatgaaaaaaagggaccacctcccagtattaatttatttaatgaaaaaaacattggtttaacaattttaaatttgatagagaaaaaactaattataagttgccatgatgtttctttgggtgga

SEQ ID NO: 317971 - DNA, 841 bp, Unknown
  Bacterial polypeptide expressing nucleotide sequence isolated from the Sargasso Sea
gattgtacacccaggtattgtaaaagctctccgtttcttggtggtatgcaagcagtttgtgagacataccgaaatttgtgttcagtaggagctacaccaattgctataacaaattgtttaaactttggtaatccagagaaaccagaaattatgggacaatttgtagatgtggtcaaaggtattgctgaagcatgtaaaaaattaaattaccccgtaatttcaggtaatgtctctttatacaatgaaacaaatggaattggtattaatcctacccccgtgattggaggtgtaggattaataaagaatattaatcaaacttctaatcacaaatttaaagaagcaggtaatttagtttatattattggagatactgtaggtcacttgggccaaagtattttatgttatgacatacttaatattaaaagaggtgaaccaccgccattggaattagagaaggaaataaaaaatggtaaatttataattgaagctataaaacaaaacttaatacaatcctcgcatgatgtttcttctggtggtattattttatctatacttgaaatgtgtattccatctaaaattggtattaatttaaatatagataaatttgactttcaactagttaaatacttatttggcgaagatcaatcaagatatgtaatagaagttaagccagaaaatgaagatgtgctgttgaaaaatatgaaaaataaagccattagttacgaaagaataggaaaaactatcaaggaaaaatatattcatattaatcataaatataaattagatttaaataatttaattgaattacataataaatggtttaaaaattataataaataat

SEQ ID NO: 317972 - DNA, 867 bp, Unknown
  Bacterial polypeptide expressing nucleotide sequence isolated from the Sargasso Sea
ctgtattaggaattgtaatggagctcaaatattagtagaaagcgggctggtgcctggtcttaaagacaaccgtgttggcttggctcttacggataataaaagagtacaaaaaggacatgttgtgggagttgggtactataatacctgggctaacttgaagttgtctagtccttcgaagcggtgtgcttttactcggcacttaaaaccaggtgagcatataaacatccccctggcccatggcgaaggtcgatttataataccagaggaacttttgggagaaatggtcaggaacggacaaactgtctatagatattgcaacgatgatggggagaccattgatgagttcccaaccaaccccaatggctctgtatataacttagcagccgtttgtaatgcacctggcaacgtaatggcaataatgccccatccagaaagaacaaaaaatggagatgttattttttcttcaatgaaggattttatcgaagatggcaacccagctactgagggttcattaaattttcaggtctatgaacatcatatcaaaaatctaccacaggaaaacgatacgacagaatgggtcatagatatgatcattacagataatgaggccgcttctgtaaacaatgcccttaagcgactcggccatgatgtttctataacaagacaaactcattgggaaataaaaaccgatggagaccatgatcatattttgagaatgatcgatgattcaggagagctctataattcaaacaaagaatatattggagaaatcatatcaaatgataagaccgtatcatttcttgtaaggcaaaaagaagatatgcatgggcgaattaaatacgaatctttaaccgaaaggtttgaaat

SEQ ID NO: 317973 - DNA, 201 bp, Unknown
  Bacterial polypeptide expressing nucleotide sequence isolated from the Sargasso Sea
gaagaaaaaaaaccaacggttcaagttggtgacccatttactgaaaagctattacttgaggcaggtctagaactaatgaaagaagaggcaattattgcaattcaagacatgggtgcagctggactaacatcctcttcaattgaaatggcatctaaaggtgaagtgggtttggaaattgatctttcaaaagtacctatgcgt

SEQ ID NO: 317974 - DNA, 212 bp, Unknown
  Bacterial polypeptide expressing nucleotide sequence isolated from the Sargasso Sea
aatgaaatcatcagttattgtatttccaggatcaaattgtgatagagatattgctgtagcattagaaaaaatgcaattcaaaaattcaatggtgtggcacaaagaaactgtattacctaaatctgacctaatagttgtgcctggtgggttttcctatggtgattatctaagatctggagcgatagctgctaaatcaaatattttaagtgaag

SEQ ID NO: 317975 - DNA, 424 bp, Unknown
  Bacterial polypeptide expressing nucleotide sequence isolated from the Sargasso Sea
gatggataattttactgtaggagttgttgtcttccctggttctaattgtgatcgtgatgtttcatgggcattggaaggttgtttagacataagaacaaaatacttgtggcatgagtcttcagacttaagtgatgtagatgcaatagttttaccaggaggatttagctatggtgattatttaagatgcggagcaattgcgagattctctccattaataaatgccttggatgagtttgttaaaagcgggaaaagagttttaggaatttgtaatgggtttcaaattttgacagaatcagggtttttacctggtgctcttgttgcaaataaaaatcttaattttatctgtgatgacgttgaactggacatcgtttcttcaaaaggaggttggtttaataatgtagatgaaaaacaaacaattaagtgc

SEQ ID NO: 317976 - DNA, 201 bp, Unknown
  Bacterial polypeptide expressing nucleotide sequence isolated from the Sargasso Sea
aatgatagcaaatataattgtatttccaggttcaaattgcgatcgggatataaaagttgcattagaaaaatttcaagtaaaatgtaaaatgatatggcatcaagaaaatgaattaccaaaagcagatttagttgttcttcctggtggtttttcttatggagattatcttcgatgtggatctatggcatctaaatcagtcat

SEQ ID NO: 317977 - DNA, 688 bp, Unknown
  Bacterial polypeptide expressing nucleotide sequence isolated from the Sargasso Sea
ttgttaaatcgcgcacctactctatctgagtgtattttatggggcattcaaggttcagagcattgctcatataaaagttcaaaaaatcatcttaaaaagtttgtaactgatggcccaaatgtgattttaggtgccaaagaagatgccggtgtaattagaatttgtaaagatgaaactggtttgggttatggtttagttataagtcatgagtcgcataatcatccatcgcaagttgtgccatttgaaggagctgccaccgggattggtggtaatattcgagatgtaacttgtatgggtgctgaagttattgcacttgctgatggtttaagatttggagattttaataatcctaaaactcattggatttatgatggagttgtatctggattagcaagttatggtaatgcaattggtgtaccaaacattacaggagatgcgtattttcattcaggctttaaagataattgcttagttactgtgacaactttaggtagtttaaaagatgatgaaattattcactcatatgccccaaaagatgcaaataattatgctttgattctagttggaaaaccaactgataacagtggctttgggggtgcaagttttgcatcggttgatctagaagaagaagatagtgatgccaacaaaggtgcggtgcaagagccaaatgcgtttttgggtcgcatga

SEQ ID NO: 317978 - DNA, 246 bp, Unknown
  Bacterial polypeptide expressing nucleotide sequence isolated from the Sargasso Sea
aatgaattcatcagttattgtttttccaggttctaattgcgacagagatatagcagttgctttaaaaaaattgcaatttaagaataaaatgatttggcataaagaatccaaattgccaaaatctgatttaattgtcatccctggtggtttttcttatggagattatcttagatcaggagcaattgcaggcaaatcgttgatagtcaatgaggttattaaagctgctaacaatggctgtttagtttt

SEQ ID NO: 317979 - DNA, 547 bp, Unknown
  Bacterial polypeptide expressing nucleotide sequence isolated from the Sargasso Sea
atgaaatcatctgtaattatattccctggttcaaattgtgatagagatatggatgttgctttaaagaaatttggttttgaaaatcaaatggtttggcacaatgattctgaaattcccaaaagtgatttgattgtactgcctggaggtttttcttacggtgattaccttagatgtggaagtattgctggaaaatcaagaataattaaatctgttattgattttgcaaattcagggggattagttcttggaatttgtaatggttttcaaatactcactgagacaggtttgttacctggaatacttcaacaaaataaatacttaaactttatttgcaaaaatatttttgtaaaaattaaaaataaagaaaacaaatattttaaaaaaattaaaaaagaagttttagaactccatattgctcataacgagggaaattatttttgttcaaatgatgaattaaaatcaattgaagataacggtcaaatcgctgttacgtattgtgaccataaaggaaatgatgatgaaaaaaatatccaaacggtgcgtcttc

SEQ ID NO: 317980 - DNA, 832 bp, Unknown
  Bacterial polypeptide expressing nucleotide sequence isolated from the Sargasso Sea
ttagaaaaagttccttgtagagaagataaaatgacaccttacgaaattatgctttctgaaagccaagaaagaatgttgttaataatagatgaaaaaaaagaaaaaaatgcagaaaagatttttagaaaatgggatttagattttgttgttattggaaaaactatagaagaaaaaaaattaaaattaaaccataataaacaaaaagttgctgatataccaattgaagcattagcaagtaaagctccattatatgatagaaaatggaataaaactaaattaccagaaaaaaaaataaaatttaatgctttaaaaaaagttaaatttaaagacactctgattaagattctatcttcttataatcagtcaaataaaagttgggtaactgaacaatatgatcaaatggttatgggcgacacattacaaagatctggttctgactcagctgttattaaaatacataacaaagataaagcaatagcagttaccgtagattcgtcagcaagttattgtaaatctcatccattcactggtggaaaacaaattgtttgtgaatcttggagaaatcttattgctgttggagcaaaaccactagctataacaaattgtttaaattttggtaatcctgaaaatccagatgtaatgggacagtttgcagagtcagttaatggaatgaaagaagcgtgcgagtttctagattatccagtcgtttcaggaaatgtttctttttataacggaacaaatcagagaaacatctaccctactcctgttattgggggtgtcggaatattaaacaaaataaatcataaaaaaaatcatattcttaaaaaagaaa

SEQ ID NO: 317981 - DNA, 560 bp, Unknown
  Bacterial polypeptide expressing nucleotide sequence isolated from the Sargasso Sea
aatgaaatcctcagtaattatatttcctggttcaaattgtgatagagatatggatgtagctttaaaaaaatttggctttaaaaaccagatggtttggcacaatgatgcagaaataccaaaaagtgatttaatagttttgcccggtggtttttcttatggtgattaccttagatgtggaagtatagctggaaaatctaaaattattaaatctgtcattgattttgcaaattcaggtggattagtccttggaatttgcaatggttttcaaattttaactgagacaggtttgttgccaggaatacttcaacaaaataagtacttaaattttatctgtaaaaacgtgtttgtaaaaattaaaaataaagaaaatcaatattttaaaaatattaaaaaagaaattttagagcttcatattgctcacaatgaaggaaattatttttgctcaaaagatgagttaaaatcaattgaagataatggtcaaattgcggttacttattgcgatcatgaaggtaatgataatgaagagaataatccaaatggtgctttaaagaacattgctg

SEQ ID NO: 317982 - DNA, 400 bp, Unknown
  Bacterial polypeptide expressing nucleotide sequence isolated from the Sargasso Sea
attattgcctggagttcttctaagaaataaattttctgaatttatttgtaaaaacgtatttgtaaaaataaataatactgaaaataattattttaaaaaaataaaaaagcaaactttagaattgcatatagcccataatgaaggaaattatttttgtacaagtaatcaatttaaaaaaatagaagataataatcaaatagccttattttattgtaatgaaaaaggtgaaattaaagatgaaaacaatcctaatggatcaaaaaataatatagctggtatttttaataaagaaaaaaatatacttggtatgatgccccaccctgaaagaatgatagataaatatttatctggcgaggatgggtctttattttttgaaaatttactaaataatcttaaataa

SEQ ID NO: 317983 - DNA, 931 bp, Unknown
  Bacterial polypeptide expressing nucleotide sequence isolated from the Sargasso Sea
tatttggatgaaaaaaaagttgctgacatcccagttaatacccttgttgaaaactcgcccatgtatgatcgaaaatggaaaaaagcaaaacttccaaaaaaaaataaaattagaaaagaagatattaaacatttaaaaatagttgatattttaaagaaaattttagcaaatccaaatatatgtagtaaagagtggatctggcaacagtatgatcataccgtgatgggagatacaattcaaaaacctggaggagacgcaggtgttgtaagagttcacggaacagataaagctgttgctgcttcagtagattcttcagcagtttattgttgggcacatcctttaactggtggaaaacaagtggtttgtgaaagtttcagaaatcttatttctgttggtgctaagccgattgctatcactaactgtttaaattttggaagtcctgaaaatgaagaaaatatgggtgagtttgttgaatgtgttcaaggtataggtgaggcaagtgaatacctgaagttccctgttgtttctggaaatgtatctttctacaatcaaacaaaagatgaaggtataaaacctacgcctgcaattggtggagttgggttaatcaaaaattataagaatatgattacaatggagtttaaagaagttgacaatttagttttggtaattggaaaaactgagggacatcttgatcaaagtttatttgctagaaatattttagatgagaaaaatggacctccgcctgaggtaaatctattcaatgaaaaaaataatggagaaacgttgctgaaattaattgataataatttaataaagagtgcacatgatgtttctttaggtggtataattactgcggtagcgaaaatgtgtattaaaggtaaaaaaagaataaatattcaaaaacctaaatttttgattaatgaaatagaat

SEQ ID NO: 317984 - DNA, 286 bp, Unknown
  Bacterial polypeptide expressing nucleotide sequence isolated from the Sargasso Sea
ttggaactccatattgctcataacgaaggtaattatttttgtaatgacgaggaattaaaatcattagaagataaaagccaaattgcagttacttattgtgacaacaaaggtatggaaaataacaaaaataatccaaacggtgcaataaaaaatattgctggaatatttaatgaaaacaaaaacgtcttaggcatgatgcctcaccctgaaagaatgatagacaaatatctttcaggagaagacggttcactattttttgaaaatcttttaagaaactttaaataat

SEQ ID NO: 317985 - DNA, 512 bp, Unknown
  Bacterial polypeptide expressing nucleotide sequence isolated from the Sargasso Sea
gatgaaatcttcagtaattatttttccaggttctaactgtgatagggacatggatgtagctcttaataaatttggttttaagaaccaaatggtttggcataatgataaatcaataccaaaaagtgatttaataatacttcctggtggtttttcttatggagactatttaagatgtggaagtatagcgtcaaaatcaaaaataattaaatctgtaattgattttgcgaattctggaggactagttctaggtatttgtaatggatttcaaatactaactgaaactggtttgcttccaggtattcttcaacaaaataaatatcttaattttatttgtaaaaatgtgtttataaaaattaaagataaaaataataaatattttaaaaatattaaaaaagatgttttagaacttcatattgctcacaatgaaggaaattacttttgtactgaacaagagttaaaatctttagaagataacaatctaatagctgtaacctattgtaatccgaaaggat

SEQ ID NO: 317986 - DNA, 653 bp, Unknown
  Bacterial polypeptide expressing nucleotide sequence isolated from the Sargasso Sea
agaagcatgtttaatgctcgactttccagtagtgtcaggaaacgtctcactatacaatgaaacgaatgggcaatcgattttaccaacgccggccatcggtggcgttggtttaatcaaggactcttctaaatcagttagcctcgctttatccggaaatggcgaaaaattaattttagttggagaaacactaggccatttgggtcaaagtatgtatctgagagagattcagggtgaggaggctggagcaccaccaccggtagacctcatccaagagcgtcgaaatggtgatttagtaagaaacctaattgatgcggaccttattactgcctgccacgatatctcagacggaggtcttgcggtcgctgctgccgagatggcaattgctggtaacgtcggtactgtcttggactccacggccgctggtgggttgccagtccatgcctggttatttggcgaggatcagggtagatatctgattgcgacgaataaatcacaaggcgttttagatgctgccaaatctgcaagtgtctcagcaaaaattgttggggttgcaagcggtgttgatattagtatcgctgagttcagtatcccaattgatgatatccggaatgctcatgagggctggatgcccgagttcatggcaacgaagtaat

SEQ ID NO: 317987 - DNA, 817 bp, Unknown
  Bacterial polypeptide expressing nucleotide sequence isolated from the Sargasso Sea
tgaatctaaaccaaaagttgctattttaagagagcaaggtgtaaatggccatattgaaatggctgcagcatttaccttcgcaggttttgatgctgtagacgttcatatgcaagacatcatttgtggccaggaagacttaagttcattttctggactgattgcttgtggtggcttttcttatggtgatgttttaggagcaggcaacggttgggcgtcaactataaaatataattcaaatgcaaaaaatgcttttaaattattttttgaagatgaaaaaaaattcgctctaggcgtgtgtaatggttgtcaaatgttttcacaaatcaaagaactcatcccaggagcagagatttggccaaactttatcaaaaatgactcagatcaatttgaggcacgtctctcacaaattagaattgtaaaatcagattcaatcttgttaaaagatatgcacgactggttgattccagttgcagttgctcatggagagggcaaagctgatctttcaacacagcaaataaaagccctcaaaaaaaagaatatggttgcaatgagtttttgtgaagctaatggcaaacctacaaaatcctaccccatgaaccctaatggtacaaaagatggtattactgcgtttacagctgcaaatggaagagtcacaattatgatgcctcatcccgaaagagtatttcgtaaatcgcaattgtcatggcagccgtctcacctgaaagaatactcaccatggatgcaaatgttttctcatgcaaggaaattttgtgacaaagtattaattaatatattttgtaccaagatcgcatcttga

SEQ ID NO: 317988 - DNA, 425 bp, Unknown
  Bacterial polypeptide expressing nucleotide sequence isolated from the Sargasso Sea
gatgaaatcttcagtaattattttcccaggatctaattgtgatagagacatgggtgtagcccttactaaatttgggtttaaaaatacaatggtttggcataatgatcaatcaattccaaaaagtgatttaatagttcttccaggaggtttttcttacggtgactatttaagatgtgggagtattgcatcaaaatccaagataattaagtctgtaattgattttgcaaactcaggaggattagttctaggtatttgtaatggatttcaaatattaaccgaaacaggattgctaactggaattcttcaacaaaataaatatcttaattttatctgtaagaatgtttttgtcaaagttaaggataaaaaaaataaatattttaaaaatataaaaaaagaaatattagaattgcatattgcccataacg

SEQ ID NO: 317989 - DNA, 550 bp, Unknown
  Bacterial polypeptide expressing nucleotide sequence isolated from the Sargasso Sea
tatggttatgggggatacaataggaatgcctggatctgaatctggagtagtaaagattcataatatagacaaacaagccttagccataacaaccgattgtactcctagatattgtgcatctaatgctcatataggcggtatgcaggcagtatgtgaatcttataggaacctatgctctgttggtgcgatacccttagcaataacagattgtttaaattttggtaatccagaaaaaaaagaagttatggggcaaattgttgatgcaataagaggtatttctgatgcttgtaagaaactatctatgccggttgttgctggtaatgttagtttgtataatgaaactgaaggaaagagtattcctcctacgccccaaattggagcagtcggaataataaaaaatactgataatcaattatctaacaaaattagcgaaaataataatcaagatataatagttctaggttccactagagggcatttacaatgctcaatatatgcaaaagaaatagcaaaaattgaaaaaggttgtccaccttctataaaccttgat

SEQ ID NO: 317990 - DNA, 400 bp, Unknown
  Bacterial polypeptide expressing nucleotide sequence isolated from the Sargasso Sea
aatgaaatcatctgtaattatattccctggctcaaattgtgatagagatatggatgtagctcttaaaaaatttggatttaaaaatcaaatggtttggcacaacgatgctgaaattccaaaaagtgatttaattgttttgccaggaggtttttcttatggtgattaccttaggtgtgggagcattgctggtaaatcaagaattattaaatctgtaattgattttgcaaattctgggggattggtgcttggtatctgtaatggttttcaaatactaactgaaacaggcctacttcctggaatacttcagcaaaataaatacctaaactttatttgtaaaaatgtatttgtgaaaattaaaaataaagaaaatagatattttaaaaatattaacaaagaagtt

SEQ ID NO: 317991 - DNA, 485 bp, Unknown
  Bacterial polypeptide expressing nucleotide sequence isolated from the Sargasso Sea
catgagccggagcgcccttcgcgtcacggtcgccgttttcccggggtcgaactgcgaccgcgacataatggtcgccatcgagaagctggcaggacggcggccggcaatggtctggcacaaggaaagcagccttgatgctaccgatctggtgatcatccccggcggtttctcctatggcgactatcttcgctgcggcgcccttgccgcgcgctcgccgatcatggaggccgttctggaccacgccgcacgcggtggcgcggtgatgggggtttgcaacgggttccagatcctgctggaaaccggccttcttccgggcgtcctggtcgagaatgcaggcctcaaatatgtttgccgcaacacctgtgtcgaggttgtcggcggcaccgcctcaccctttaccgacggtctcgagaccgggcagcgcatgatcattccggtggcccataacgaggggcaatatttcgccagcgacgaagacttcagcg

SEQ ID NO: 317992 - DNA, 809 bp, Unknown
  Bacterial polypeptide expressing nucleotide sequence isolated from the Sargasso Sea
tctgagagtcaagaaagaatgttaattgttctagaaaatggcaaagaagaacaagcaaaaaaaatttttgataaatggaatttagattttgcagtaattggtaaaacaacaaaatcaaaaaaaattgaattattttttgatgataaaaaagttgctgatattccggtaaacatattagttgaaaactcacctatgtatgaccgtaaatggaaaaaaacaaaacttcctaaaaaaaataaaattaaaaaagaggaacttaatagtttgaaaatattaaatgttttagaaaaaatcttatcacatccaaatatttgcagcaaagaatggatttggcaacaatacgatcatactgttatgggagatactattcaaaaacccggaggagactctggtgtagttagagtgcatggaactaataaagctattgcagcatcagtagattcatctgctgtttattgttgggctcacccattaacaggtggtaaacaagtagtttgcgaaagttttagaaatttaatttctgttggagcaaaaccaatagctattacaaattgtttaaattttggtagccctgaaaatgaagaaaatatgggtgagtttgtagaatgtgttaagggtattggggaagcaagtgaatatttaaaatttccggtggtatcaggaaatgtatctttttataaccaaacaaaagacataggtattaaacctactccatcaattggaggagttggcttaattaaagattataaaaatatgattacaatggattttaaagaaatagacaacattgtcttggtcattggcaaaac

SEQ ID NO: 317993 - DNA, 893 bp, Unknown
  Bacterial polypeptide expressing nucleotide sequence isolated from the Sargasso Sea
cttacagacaacaaaagaatacaaggtggacaagttgttggtgttggttattataatacatggtcaaaccttaaattggctgttgaggcagagaggtgtgcatttacaaggcatcttcaaaagggtgaacatatcaacatccctttagcgcatggcgagggtcggtttgtaatccccgattctttattaaaggaaataatttcaaacaatcaaacagtatttagatattgcaacgatgctggatcagttgttgatgagttcccaacaaacccaaatggttccatatataatttagcagctgtttgcaatacggatggaaatgtgatggcaataatgccacacccagaacgtactagcaagggtgatgtaattttttcatctatgaaagaatatattgaattagacaatccaattcatgagcatgctttacattataaagaaactttaatcaaacccgattattataataataacaacaacgtggaatgggttgtggatatgattattaatgataatgaagcagcttctgttcaaaatgcgttgggtcaaatgggatacgatgttgttatttctcgccacacccattgggagattaatattaaagagcctaagtctaaaatattatctgaaatagataaatcaggagagcttttcaattcaaataaagaatatattacgaatattcaaaaagcacacaacacagcttcatatctaatcaggcaaattgatgatgtttttggtcgctcaaaactagaatcattaaaagacacatttgagataaaagaaatatctgatttaaaatacggtgttatatggaatataaaagtaaacagcggtaattttgattcaacattagacagcattttaaaaacaaatatattatttaacccctt

SEQ ID NO: 317994 - DNA, 202 bp, Unknown
  Bacterial polypeptide expressing nucleotide sequence isolated from the Sargasso Sea
gatgaagtcagctgtaatagtatttccaggatcaaactgtgatagagatatggatgtggctttaaaaaaatttggctttaaaaaccaaatggtttggcacaatgatcacgaaattcctaaaagtgatttaattgtattaccaggtggtttttcctatggagattatttaagatgtggaagtatagcgggaaagtcaaaaata

SEQ ID NO: 317995 - DNA, 335 bp, Unknown
  Bacterial polypeptide expressing nucleotide sequence isolated from the Sargasso Sea
aatgaagtcacacgttatcgtttttccaggatcaaattgtgatcgtgatgtagcggtagctatcaaaaatatttctggtcatctaccgcaaatgatatggcacaaagaaacgtccattaatcaatcggatctgatcgttgtaccaggagggttctcttacggcgattatttaagatgtggcgccatggcatcaacatcccctatcatgcaagatgttgtaaaaaaggcaaaagaaggtattcctgtattgggaatttgtaacgggttccaaattctgatcgaaagtggattgttagatggtgcgttgatgagaaatagtagtttgagctttatat

SEQ ID NO: 317996 - DNA, 394 bp, Unknown
  Bacterial polypeptide expressing nucleotide sequence isolated from the Sargasso Sea
ctgcttaaaggaacattattaaggaataaaaatcttaaatttatcaataaagacgtaaatattaaagttatgaataataaaaccaaattttgtaaaaaatacaaaaaggatcaagtgatcaaaattaatattgctcacaatgaggggaattattttaccgacacaaagcatcttgatgaaatgaaaaaaaatgatcttatagcttttaaatattgtgatgaaagtggtttggttaataatgactctaatcctaacggagccattgataatatagctgggatatacaattctaggaaaaatatattaggaatgatgcctcatccagaaagaatgactgataaattgatttcaaatacagatggttcaaatcttttttcgagtttaatgaattaaa

SEQ ID NO: 317997 - DNA, 443 bp, Unknown
  Bacterial polypeptide expressing nucleotide sequence isolated from the Sargasso Sea
tagtattaggtatttgtatggatttcaaatctttactgaaacaggcttactaaaagaattttacaacaaaataagtttcttaattcatatgcagcaatgttttgtaaaagttaaagataaacataataaatattttaaagatttaaaaaaagatgttttaaaacttcatattgctcacaatgaaggaaattacttttgtagtgatgatgaattaaaatcattggaagataataatcaaatagctgtaacgtattgtggagaagatggtacagaaaatgaaacaactaatccaaacggagcaattaaaaatatagctggaatttttaataatagtaaaaatgtattgggaatgatgcctcatccagaaagaatgatagataagtatttgtcaggtgaagatggttcattatttttcaaaaatatcttggataattttaaataat

SEQ ID NO: 317998 - DNA, 917 bp, Unknown
  Bacterial polypeptide expressing nucleotide sequence isolated from the Sargasso Sea
attgagttttgatgatgtcttattttcatctacgttaaacaaattattagatgaatggagttcagtaagctataaagtacaaaaaataagagacaatattgaatcagctcaaagcgaaaaagaagtttataagaaatgggatgaaataatcaccccaaaaatagatttttcaattccatctccaaataagaatttattttctaaaaagccaaaaattgcactactgagagaacaaggtataaatggtcactatgatatggcagctgctttgatggaagctggtttcgaagtgcatgatgttcatatgagtgaattgccaggcaaaattaaaaatcttgattcgtataatggtcttgttgtgcctggaggcttttcatatggagatgttttgggcgcaggctcaggaatgtctaatacaattttatttaacccaaagattaagaagatttttaagaatttcttagagaatgataaaaaatttgcattgggaatatgtaatggatgccaatttttatctggactcaaagaaattgttccaggagcagagaattggccagcgtttaaaaagaatctttctaatcaatatgagtgcaggttagtacaattaaaaattgaggatagcccttcaatctttcttaaagatatgaaagacagcattattccagtcatggtctctcatggagaaggtagagcagatttcaattcagaagaagaaaatgtgatcgctaggtatgttgaccctgatcacaagattacacagatatatccattaaatcctaatgggtctgtaaacggtgtagcaggcgtttgcaatgatgatggaaggattactatcatgatgcctcatccagagagaacctatcttactaaacaattttcttggtcttcaaaagattggtcggagcattctccatggg

SEQ ID NO: 317999 - DNA, 484 bp, Unknown
  Bacterial polypeptide expressing nucleotide sequence isolated from the Sargasso Sea
aatgaaatcatctgtaattatttttcctggttcaaattgtgatagggatatggatgttgctttaacaaaatttggattcaaaaataaaatgatttggcataatgatgttgaattgccaaaaagtgacttagtagttttgcctggtggcttttcttatggtgattacttaagatgcggaagtattgcgggcaagtccaagattattaaatcagtaattgattttgctaaaactggaggcttggtccttggaatttgcaatggatttcaaattttaactgaaactggtttattgccaggagtattgcaacaaaataaatatttaaattttatttgcaaaaatgttcatataaaaataaatgatacgaaaaataaatacttcaaaaatatcaaaaaagaagtcttagaactccatattgcacataatgaaggtaactatttttgttcaaatgaagaattaaaatcaataaagaataataatcaaatt

SEQ ID NO: 318000 - DNA, 157 bp, Unknown
  Bacterial polypeptide expressing nucleotide sequence isolated from the Sargasso Sea
aatggaagtaaatgaaaaaattgctgtagatcatggtttaaagcctgatgaatataaaaaaatttgtgatttattaaagcgtgttccaaatttcacagaacttggaattttttcagcaatgtggaatgaacattgctcctataagtcctcaagatta

SEQ ID NO: 318001 - DNA, 903 bp, Unknown
  Bacterial polypeptide expressing nucleotide sequence isolated from the Sargasso Sea
tttagaaagtcaagaaagaatgttaattattttaaaaccaggatcagaggaaaaagcaaaattaatttttgacaaatgggatctagattttgctattataggaaaagttactaatacaggaagattaattcttactaaagacggttttgaagcctgcgacatacctcttaaacctcttgtcgaagacgctcctgaatatgataaaccttatgaaataaaaactaataaaaaagtattaaaaccatgtgatgttaaaaccaatcttacaattattgatatattaacaacaatttttaaaaatccaaatatagccagtaagaaatggatttgggaacaatatgacagctcagtaatgggcgacacaatttttgcaaatggtgatagtgacgcttcaatattaaaaattcatggaacagaaaaaaatgaatcttacgggaaaggtcttgctattacgactgattgcacgccacgttatgttaaatcagaccccataattggaggaatgcaagctgtttgtgaagcagcacgaaacatagcttcgtcaggtgcaaaaccactagcgattacaaacaacttaaattttggaaatcctgataagaaaaatgttatgggagaaattgtagggtctataaaaggaatttcagaggctgcttcttttttaagaactccaatcgtatcagggaatgtttccctttataatgagacaaatggtaaaagtattcttcctactccagtcattggtatggtaggagccatagatgaggttgaaaattctctggagataagtgcaaaactagataatgtgttaattgtccttggacaatctgataattttaatgcaggttggggtggttgtagtatttatcaggaaattattaataaaaaacttgaaagagcccctcc

SEQ ID NO: 318002 - DNA, 424 bp, Unknown
  Bacterial polypeptide expressing nucleotide sequence isolated from the Sargasso Sea
aatggctagttttactgttggtattgtcgttttccctggttctaattgtgatcgtgatgtttcctgggctttagagggttgtttagacattaaaacaaaatttctatggcatgaatcatctgatttgaacgatgttgattcaattgttttgccaggaggatttagttatggtgattatttaagatgtggagcaatagcaagattctctccattaataaattctttacatgactttgttaaaagcggaagacgtgtattaggaatatgtaatgggtttcagattttaactgaatcaggttttcttcctggagcacttgttgctaataaaaatctcaatttcatttgtgatgatgttgacttgaatgtaatcacttcgaaaggcggttggtttcaaaagtcaaacgaaacacaaaaatataaaatt

SEQ ID NO: 318003 - DNA, 343 bp, Unknown
  Bacterial polypeptide expressing nucleotide sequence isolated from the Sargasso Sea
agatgtccatataaaagtaattaataatcaaactagattctcttcaaagtacaatttgaatcaaattttaaagatcaatatcgcccacaatgaaggtaattattttacagataataagcatttagaaacacttaaaaaggataatttaattgcattcaaatactgtgatgaaagtggaaatatcaatgagcaatctaatcctaatggtgcaatggataatattgcaggcatatttaattctaaaaaaaatatattaggtatgatgcctcatccagaaagaatgatagatgaagttatttctaataaagacggtgttaacttattttctagcttgttaaattag

SEQ ID NO: 318004 - DNA, 829 bp, Unknown
  Bacterial polypeptide expressing nucleotide sequence isolated from the Sargasso Sea
cttgggaattgaaataaatttaaacgaggttccttgtagagaaagtaaaatgacaccttatgaaattatgctttctgagagccaagagagaatgttgatagttttagaaaatggaaaagaaaaacaagcaaaaaaaatatttgataaatggaatttagatttcgcggtaattggtaaaacaactaactcaaaaaaaatccaactttactttgatgatgaaatggtagcggacattccagtaaatacattggttgaaaactctcctatgtatgaccgtaaatggaaaaaagcaaagctacctaaaaaaaataaaattaaaaaagaagatttaaaaaatttcaaaattattgatgttctaaaaaaagttttagctaacccaaatatttgtagcaaagagtggatttggcaacagtatgatcatacggttatgggggacactattcaaaaaccaggaggtgatgctggagttgtgagggtacatggaacaaataaagctgtagctgcaacagtagattcttctgcagtttattgttgggctcaccctcttactggcggtaaacaagttgtttgcgaaagttttagaaatttaatagctgttggagcaaaacctatagctattaccaattgtttaaattttggaagtcctgaaaatgaagagaatatgggtgagtttgttgaatgtgttaaaggaattggtgaagctagtgaatatttaaaattcccagtagtttctggaaatgtttctttttacaatcaaactaaagatgaaggtataaaacctactcctgcgattggaggtgtcggtttaattaaggattataataagatg

SEQ ID NO: 318005 - DNA, 631 bp, Unknown
  Bacterial polypeptide expressing nucleotide sequence isolated from the Sargasso Sea
atggcagtatgcggtggattttcctatggtgatgttcttggggcaggaggaggttggtcaaaaactattctgtataacaacaatgttaaaaatcagttcgaagaattctttaataaccaaaaaacttttacacttggggtctgtaatggttgtcaaatgctttcaaatttaaaagatattattcctgatgcagattattggcccagttttgaaagaaatttttctgatcaatttgaggctagattaattcaggtaaaaattaacaatactaactcagttttattaaatgatatggatggatggacagttccaattgcttcagctcatggagaaggaagggctaaatttttaggtaatagtttagaagaattaaaaaaacaaaaccaagttgcaatgacttttgttgattctaatcaagaccctacagaaaaatacccattaaatccgaatggatcaattgaaggtattacaggagttacagcttccaatggaagagttaccattatgatgcctcatccagagagagtatttagaaagcatcaaatgagctggcattcaaaagattggaatgaattttctccatggatgcaaatatttattaatgctagaaattttagtgataataattaat

SEQ ID NO: 318006 - DNA, 253 bp, Unknown
  Bacterial polypeptide expressing nucleotide sequence isolated from the Sargasso Sea
atgagatcatcagtcattatttttccaggatcaaattgtgatagagacatggatgtggctctaaaaaaatttggctttaaaaatcaaatggtttggcacaatgataaatctattccaaaatcagatttaatagtattgccgggtggcttttcatatggtgattatttaagatgtggaagtattgcttctaaatcaaaaataataaaatcagtaattgattttgctaattcaggggggttagttctgggaattg

SEQ ID NO: 318007 - DNA, 262 bp, Unknown
  Bacterial polypeptide expressing nucleotide sequence isolated from the Sargasso Sea
tatgaaaattgatgatcaagtcattgaaaaacatggtttaaaacccgaggaatacctaaacataaaaaaacttttaaagagagatccaaatttattagaacttggaattttttcagcaatgtggaatgagcattgttcttacaagtcttcaagaaaacatttaaaaaatttatttacaaaaggtaaacaagttattcaaggacctggtgaaaatgcaggagtggtggattttggtgatgatgatgcaatcgtttttaagata

SEQ ID NO: 318008 - DNA, 404 bp, Unknown
  Bacterial polypeptide expressing nucleotide sequence isolated from the Sargasso Sea
aatgaaatcatctgtaattatattccctggttcaaattgtgatagagacatggatgtggctcttaaaaaatttgggtttgaaaatcaaatggtttggcacaatgatgctaaaattcctaagagtgatttgatagtattacctggaggtttttcttacggagattatcttagatgtggaagtattgcaggaaaatcaagaataataaaatctgtaattgattttgctaactcaggaggattagttcttggcatttgtaatggttttcagattttaacagagacgggtctactgcccgggatacttcaacaaaataaatacttaaactttatttgcaagaatgtttttgtaaaaattaaaaataaagaaaataaatattttaaaaaaattaaaaaagatatattag

SEQ ID NO: 318009 - DNA, 262 bp, Unknown
  Bacterial polypeptide expressing nucleotide sequence isolated from the Sargasso Sea
aaacaaactattaagttgcccatagctcatggagaaggaagatatcattgtgattctgatactttaaaaaaacttgtagataatgaattgatcgctttgagatataaaaataatcctaatgggtcctcattcgatatcgcaggcataactaatgaaaagggaaatgttctaggtttaatgcctcatccagagcgagcatgtgacgagacaatcggtgggactgatggtctctttacattaaaatcattaatattgaaataaa

SEQ ID NO: 318010 - DNA, 805 bp, Unknown
  Bacterial polypeptide expressing nucleotide sequence isolated from the Sargasso Sea
gccaatccatatcttggatctaaaatagcggtagcagaaacttggagaaaccttagtgctgcaggatcaaaacctcttgcaattacagataatcttaattttggaaatcctgaaaagaaagaaataatgtatgaaattaaagaagcaataagaggcattaaagaagcatgttcttcactagattatccggtagtttctggaaatgtatctttatataatgaaactaatggtaaagctatttatccaactccaataataggaggtataggatttattaaaaatatagaaaatacttgtgaaaataaattagaaaaaaatgctaccatttttttaattggtaataccagaggtcatatgaatttatcatcatttaataaagaagtagaaaatgacgaaactggcgctcctccaaaattaaatcttgatgaagaaaaaaagaatggggtctttgttagaaatattataaataaaggccttgttattggatgtcatgatttatctgaaggaggagttattattggattggtagaaatgataattaaaaataatattgggcttgaaattactattccacaaaaaaaaatttcagatactgaatggttatttggtgaggatcagtccagatacatattaatttcgaataaagctgaaaaattgagaaaatttgcagaacaaaataacgtaaaatgtcaaatacttggttctgtaaaaggtaagtctttaaaaataaaaaatactcttgaaatttctataaaagaacttattgattataataaaagatttttctataattataatgagtaga

SEQ ID NO: 318011 - DNA, 271 bp, Unknown
  Bacterial polypeptide expressing nucleotide sequence isolated from the Sargasso Sea
aatgaaatcatctgtcatagtttttccaggatcaaattgcgatagagatgttgccgtcgctttagagaggatgcaatttaaaaatttaatggtttggcataaagaaactgaattaccaaaatcagacctaattgttattcccgggggtttttcatatggagattacttaagatcaggtgcaatagcggctaaatcaaatatattatcggaagtaatcagcgcaggaaaaaagggggcattgattttaggaatctgcaacgggtttcaaatt

SEQ ID NO: 318012 - DNA, 772 bp, Unknown
  Bacterial polypeptide expressing nucleotide sequence isolated from the Sargasso Sea
acgagactcccatgagaagaaccctcaacctggagatgtagtgtatatggttggagggcgtgttggtgcggacggtatccacggcgctaccttttccagcctagaattaaccgaagaatcaccctctagtgcggttcaaatcggagacccaatcactcaaaagaaaatggtcgacatgacattagaagcgagggatgccggacttatttcttgtataacagataatggcgcaggaggactatctagcagtattggagagatggctgaatacacaaatggttgtgaaattgatttagcaaaagttccactaaaacaagagggcctatcctcttgggaaatattggtttcagaatctcaagagcgcatgacaatcgctgtaaaacccgaagatgtagatgctttcgaagccttagccaaactgcatgaagtagaagcaacaccagttgcttcatttaccaatacaggcaatttccatgtcaaatatggagaggacacagtagcactactgcctatcgaattcttacatgatggtgttccacaattgcaacttgagagcgaatggaagccaccgataatcgagccatttattccacctgaatcagcagaccattcaaacatattattgcgaatgctcgcacgaccaaacattgcatcaaaggaaacatgggttaggcaatacgaccacgaagttatcgcacaaacagcggtaaaaccgttcgttggagtcgaaagagacggccctggtgatgcaggattaatagctccaattcat

SEQ ID NO: 318013 - DNA, 313 bp, Unknown
  Bacterial polypeptide expressing nucleotide sequence isolated from the Sargasso Sea
gatgaaatcttcagtaatcatttttcctggctcaaactgcgatagagatatgagtgtggctcttacaaagtttggatttaaaaacaaaatggtttggcataatgataacgagcttcctaaaagtgatttggtggttttgcctggtggtttttcttatggagattatcttagatgtggcagtatagccggtaaatcacaaataattcattcagttgtcaattttgcaaagtctggtggtttagtgcttggtgtttgtaatggttttcaaattttaactgagactggtttattacctggcgtttgcagcaaaata

SEQ ID NO: 318014 - DNA, 377 bp, Unknown
  Bacterial polypeptide expressing nucleotide sequence isolated from the Sargasso Sea
tatggatgtaacaataattcgctttccgggaactaattgtgattttgatacagcaaatgctgtaaaaaaaattcttggcactgacccaaaaatagtttcttgcaaagaaaatgaaattccaaaatccgatttaataatcatcccaggtggattttcctatggtgattatctgagatctggtgcgatagcagctcgtgaaccgataatagatgatcttgaattaaagggaaatcagggtgtttatataattggtatttgcaatggcttccaaatcttaactgagagaaagctcttgccaggatctcttatgaaaaatagttcactaaaatttatatcaaaaaatattgaacttaaaattgataggaatgatacttttt

SEQ ID NO: 318015 - DNA, 382 bp, Unknown
  Bacterial polypeptide expressing nucleotide sequence isolated from the Sargasso Sea
ttcaacaaaacaaatttcttaattttatttgcaaaaatgtattttgtgaaaattaaaaataaagaaaataagtattttaaaaatattaaaaaaaatattttagaattacatatagctcataatgaaggaaattatttttgttcaaatgatgaattaaaatctttagaagataataatcaaattgctgtaacttattgtaatgaacaaggcctagaaggacaaacacataatccaaatggagctcttaaaaatatagctggaatatttaataaaaataaaaatgtactaggaatgatgccacatcctgaaagaatgattgataaatatttgtcaggtgaagatggatcattattttttgaaaatcttttagaaaatttataat

SEQ ID NO: 318016 - DNA, 412 bp, Unknown
  Bacterial polypeptide expressing nucleotide sequence isolated from the Sargasso Sea
aatgaattcttcagttattgtttttccaggctcaaattgcgacagggatatagcggtcgctttggagaaaatgcaatttaaaaaccaaatggtttggcataaagaaactaagcttcccaaatcggatctaattgttgtcccaggtggtttctcctatggagattatttaagatcaggtgctattgcaggaaaatcattaataattaatgaggttattaagtcggcgaacgatggttgtttagttttagggatttgtaatggatttcaaatattgacagaaacaggattgctgaagggagttttgttaagaaataaaaagttaaaatttattaataaagatgtaaatattaaagttattaataatgatactaaattttccaataaatataaaaagaatcaggttcttaaaatc

SEQ ID NO: 318017 - DNA, 475 bp, Unknown
  Bacterial polypeptide expressing nucleotide sequence isolated from the Sargasso Sea
aatgaaatcatcagttattgtcttcccgggttcaaattgcgatagggatgttgctgtagcgctagaaaaatttcaaattaaaaatcaaatgatttggcacaatgaatcaagtctaccaaaatctgatttagttgtattgccaggcggtttttcttatggtgactatctaagaacaggctgcatagctagcaaatctagaattattagtgatgttttaaagcatgcaaatagtggaggtttaattttgggaatttgtaatggttttcaaatattaattgagacaactttattacccggggttttattgagaaacaaaaaactaagatttttatcaaaagatgtctttttaaaagtgatgaatattaataataagttctgcttaaattataataaaaaaaatattatcaaactaccaatagcccacaatgaaggcaattattttgcaaatgatgatcttttaaaaaaacttgaagat

SEQ ID NO: 318018 - DNA, 837 bp, Unknown
  Bacterial polypeptide expressing nucleotide sequence isolated from the Sargasso Sea
tttcagtagactcttcagcgaactattgtaaatcacatcctattactggcgggaaacagattgtatgtgaaaattggagaaatattatttcagttggtgctaagccaattgcgattacaaactgtttgaattttggtaatccagaaaataaggaagttatgggtgagtttgcagaatgtattgatggtattaaagaagcatgtgaatttttgaactatcctattgtttcaggaaatgtatctttttataatgggacaaataaaaagaatatttatccaacgccagttatagggggagttggactaataaaaaaattaactaagcccttagaccacagttttaaacaggaaaagagtgaaattattttaataggaaaaacattcgggcaccttggacaaagttgttttttaaaagaaaattattctatagttgagggaaatccaccggaaattaatctgacaaatgaaaaaaataatggagaaatagtgctcaaattaattaatgaaaatttagtttattctgttcatgacgtatcaaatggaggcttaatcatttctttatgtgaaatgtcaatgataaatagaataggagtaaaaattgaaaaaccaaaaaaattaagaaatttatttgaatatttttttggtgaagatcaaggtaggtatgtattagagattgatagcaaacaaattcgtaaagtagaaaaaatacttaaacttaataatatttattatgaaaaaattggacatacacaaaaaaaatattttgaaattgaaggtgaattgaaggtagacataaatgacctatttaaaatcaataacaattggtataatagttaaa

SEQ ID NO: 318019 - DNA, 557 bp, Unknown
  Bacterial polypeptide expressing nucleotide sequence isolated from the Sargasso Sea
aatgaattcatctgtaattatttttccaggatcaaattgcgatagagatatggacgtagctcttaaaaaatttggttttaataataaaatggtgtggcacaatgataatgaaattccaaaatctgacttaattgttcttcctgggggattttcttacggtgattatcttaggtgcgggagtattgcaggaaaatcaaaaataatctcctctgttatcaaatacgctaactcaggtggattagttttaggaatttgtaatggttttcaaattttgactgaaacaggtttattgccaggtgttcttcagcaaaataagtatttaaatttcatatgcaaaaatacatttataaaaataaataataaatctaataaatatttcaaaaatattaaaaaaaatgttttagaacttcacatagcacataatgaaggaaattttttttgttcagatgatgaattaaaaaaaattaaagataacgaacaaattgctgttacttattgtaattcaaatggggaagaggatgaattatcaaacccaaatggtgcaattaataatattg

SEQ ID NO: 318020 - DNA, 415 bp, Unknown
  Bacterial polypeptide expressing nucleotide sequence isolated from the Sargasso Sea
aatgaagtcatctgtaataatttttccagggtctaattgtgatagagatatggatgttgctttaaaaaaatttggttttaaaaaccaaatggtttggcacaacgatcttgaaattcctaaaagtgatttaattgtactgcctggtggtttttcctacggagactatttgcgatgtggaagtattgctgctaagtcaaaaataatcaaatctgtaattgaatttgcaaattcaggtggtttattattaggaatatgtaatggatttcaaatattaacagaaacaggtttactgccaggcattcttcaacaaaataaatatcaaaaattcatatgtaaaaatgtttatgtgaaagtaaacaataaagaaaataaatactttagaaatattaaaaaagaagtattggagttacatata

SEQ ID NO: 318021 - DNA, 430 bp, Unknown
  Bacterial polypeptide expressing nucleotide sequence isolated from the Sargasso Sea
aatgggatttcaaatcttaacagaaacaggcttacttaatggaatactacaacaaaataagtttcttaattttatatgctgcaatgtttttgtaaaagttaaagataaacaaaataaatatttcaaagatttaaagaaagatgttttagaacttcatattgcccataacgaaggcaattacttttgtagtgatgatgaattaaaatcattggaagataataatcaaatagctgtaacgtattgtggaaaagatggatcagaaaatgaaacaaccaatccaaacggagctattaaaaatatagctggaatatttaataaaaataaaaatgttctgggaatgatgccacatcctgagagaatgattgataaatatttatcaggtgaagatggttcattatttttcaaaaatattttggataattttaaataa

SEQ ID NO: 318022 - DNA, 733 bp, Unknown
  Bacterial polypeptide expressing nucleotide sequence isolated from the Sargasso Sea
ggcgcccaaatattggtggagtcaggcctagttccaggtattaaaaaaagccaaactataatcgcattaactgacaataaacgaattcaagatagccatgtggtaggaactggctattataatacatgggcaaatctaaaagttactgtcccctcagagagcaccgcatttaccagacacctcaaccatgaagaaataatccatgtccctttcgcacatgctgaggggaggtttatcattcctgaagacctgctaaatgaattaattaaaaacgaccaaacagtatttcgatactgcaatgatgacggtgagatactaagccagtttccaacaaacccgaatggttctgattataatcttgctgctgtttctaactctgctgggaatatcctcgcaatgatgccacaccctgaaagaactaatctgggggacaaattattttcttctatgagagagttcattgaacaaaaaatatcagtcaagaatagctctctgtcgtactctccgcctaaagtgaatattaaaaattataccccagaagaaaatgtatccgagtgggtggttgatatggtaataacagacaacgaagcagaaacagttcaaaacgcactcaaaagaatggggattgatgtaaccatacacagacagcaacactgggaaatatccaccttagacgattcaagtaatacactgaaaaagattgaaaatactggtgtgctttttaattcgaata

SEQ ID NO: 318023 - DNA, 334 bp, Unknown
  Bacterial polypeptide expressing nucleotide sequence isolated from the Sargasso Sea
gatggataattttactgtaggagttgttgtcttccctggttctaattgtgatcgtgatgtttcatgggcattggaaggttgtttagacataagaacaaaatacttgtggcatgagtcttcagatttaagtgatgtagatgcaatagttttacccggaggatttagctatggtgattatttaagatgcggagcaattgcgagattctctccattaataaatgccttggatgagtttgttaaaagcgggaaaaaagttttaggaatttgtaatgggtttcaaattttgacagaatcaggatttttgcctggtgctcttgttgcaaataaaaatctt

SEQ ID NO: 318024 - DNA, 199 bp, Unknown
  Bacterial polypeptide expressing nucleotide sequence isolated from the Sargasso Sea
ttaaaaaaacttttagataatgaattgatcgctttaagatataaaaataatcctaatggatcttcatttgatatcgcaggcataactaatgaaaagggaaatgttctaggtttaatgcctcatccagagcgagcgtgtgacgaggcaattggtgggactgatggtctctttacattaaaatcattattaatgaaataaa

SEQ ID NO: 318025 - DNA, 526 bp, Unknown
  Bacterial polypeptide expressing nucleotide sequence isolated from the Sargasso Sea
tgattatttgcgatgtggaagtatggcatcaaaatctaagataatgcaatctgttgttaattttgcaaaatctggaggtctagtgatggggatctgtaatggatttcaaatattggtagaaacaggactagttcctggagttttgttaagaaataaatatttagaatttatatgtaaaaatgtttttgtaaaagttgatagtaaagacaatccttattttaaaaaccttaataaagatatttttgagtttcatatagctcataatgaaggaaattatttttgtacaaaagatcaacttaaagaaattgaagataacaaccagatagctatttattattgtaataataatggaaaaactgaagatcaatataaccctaatggatctacaaataacattgctggtatttttaataaagaaaaaaatgttttaggcatgatgcctcatcctgaaagaatgattgatcaatctttatctggagaagatggcgctatattttttaaaaacttaataaataatattagataa

SEQ ID NO: 318026 - DNA, 904 bp, Unknown
  Bacterial polypeptide expressing nucleotide sequence isolated from the Sargasso Sea
aaaatgatttctcatccaaatatttgttctaaacaatggatatgggaacaatacgatcatactgttatgggagatacaattcaaaaacctggtggtgacgcaggtgttgtaagagtacacggcaccaaaaaagctgtagcttcatcagttgactcgtccgcaacttattgtcatgcacatccattcactggcggaaaacaagttgtttgtgaatcttggagaaatctagtttcagttggtgcagaacctatagcaataacgaattgtttaaattttggaaaccctgaaaaaaaagaaaatatgggtgagtttgttgaatgcattgatggtattaatgaagcaagtaaatatttaaattttcctatcgtctcgggaaacgtatcgttttataatgaaacaaaagacaaaggtattaagcctacaccaacaattggaggtgttggtttaataaaagactataaaaatttgatgactatgaaatttaaatcaaaagaaaacttagttttagttattggaaaaacagaaggaaatttagatcaaagtatctttgcaaatgtaattttagatgagaaaaaaggtcctcctcctgaaataaatctattcaatgaaaaaaacaacggagaaacagttcttaaacttattaaagaaaagcttcctttgtcagttcatgacatatctcttggtggaataatgattggtgccttaaagatgtgtgtagcaggtagtaagggaattaaattttataaattcaaaaatttaacaaatatttatcaatattttttttctgaggatcaaggaagatacattatcgaagtagaaaaaaataatcttaaaaaagtagagagtattttgaagaaaaactctgtacattttgatttgctaggagaaacaacagataaagaga

SEQ ID NO: 318027 - DNA, 788 bp, Unknown
  Bacterial polypeptide expressing nucleotide sequence isolated from the Sargasso Sea
tttgttacagaaatgggaatggaaagaaaataatttaccagaaattaatgagctaaaaatattgtcattgaaggaaaataaaagtttttctttttcacaaatcattttgacacttctttctaatccatcaatcgcatctaaaagatggatttataaacaatatgactctcaagttcaggcaaatactgtttttaaacctggagagtcagatgcagctgtaataagactaagagaacaaaatgaaaaaaataaaaataaagtattttctggcgttgccgcttcagttgattgtaatagtagatgggtttcacttgatccttttagaggaactattgctgcagttgcagaatctgcaagaaacgttagttgtgttggggctgaaccagttgcaattaccaataatttgaatttttcttctcctgaaactgatatagggtattggcaacttttatcttcatgtaatggaatttctgaagcctgtaaagctttagatacgcctgttacaggtggaaatgtttctttatacaatgaatcaaaaagtaaagataatgaaattacgcctattaatcctactccagtcattggaatggttggaaagattgataatgttgaaaaagcaataagtagtcaatggaaaaatatttatgatcaaatctggttaattggctcccataactcagaaactactattgcagctagttcttatttggaatattttcatggagaagtaacaggacggcctccaaaaatagatttattggatgaaaagatttgccaaagttttctaa

SEQ ID NO: 318028 - DNA, 430 bp, Unknown
  Bacterial polypeptide expressing nucleotide sequence isolated from the Sargasso Sea
atgtaatggttttcaaatactaactgagacaggtttgttacctgggatacttcagcaaaataaatacttaaactttatttgtaaaaatgtttttgtaaaaattaaaaataaagaaaataaatattttaaaaaaattaaaaaagaagttttagaactccatattgctcataacgaaggaaattatttttgttcaagtgatgaattaaaatcaattgaagacaatgatcaaatagctgttacctattgtgatcataaaggaaatgatgatgaaaaaaataatccaaacggtgccttaaaaaatatagctggtatatttaataaagataaaaatattctaggaatgatgcctcatccagaaagaatgattgatccatttttatcaggtgaagatggatcactattttttgaaaatttaattgaaagcttataa

SEQ ID NO: 318029 - DNA, 375 bp, Unknown
  Bacterial polypeptide expressing nucleotide sequence isolated from the Sargasso Sea
ctacaaatacttgccgcagaatggtctgaacactgttcttacaaatcttcaaaaatgcatttgagaatgttacctactactggcccaaatgtaattgttgaaaaaggatatgattccggtgttttagatgttggtgatgggtatgttgtaactgtacatattgaaagtcataatcatccatcagcggttgaaccgtttggtggtgctgcaactggtgtaggtggtgtaattcgtgatatcttatctgcgggaacaagaccaattgcattgtttgatggattaaggtttggtgatatagaaaatgatgcacatgcacgatggttattcaaaaatgcagtatcaggaattgcagattatggaaatttgtcttggcat

SEQ ID NO: 318030 - DNA, 295 bp, Unknown
  Bacterial polypeptide expressing nucleotide sequence isolated from the Sargasso Sea
aatggaagttaatgaacaaatagcaatagaccacggtctaaagaaagatgagtataaaaaaatttgtgatctattaaaaagatcgcctaatcttacagaacttggaattttttctgcaatgtggaatgaacactgttcatataaatcttcaagacttcatttaaaaaaattacccacaaaaggaaaaaaggtaattcaaggaccaggagaaaatgcaggtgtcatagacattgaagatggtgatgcaatagtttttaaaattgaaagtcataatcatccttcctttattgaacca

SEQ ID NO: 318031 - DNA, 223 bp, Unknown
  Bacterial polypeptide expressing nucleotide sequence isolated from the Sargasso Sea
ttggtagaaaaccatggtcttaaaactgatgaatttgagagaattgttgaaggtcttggaagagaacctaatctgactgaacttggaattttcagcgcaatgtggaatgaacattgttcatacaagtcttctaaattctggcttaaaaagttacccacatctggtgaacgtgtcattcaaggtcctggtgaaaatgcaggggtaatagatatagatgatggaa

SEQ ID NO: 318032 - DNA, 385 bp, Unknown
  Bacterial polypeptide expressing nucleotide sequence isolated from the Sargasso Sea
cttcaccagaatatatatcttaattttatttgtaaaaatgtttttatcaaagttaaggataaaaaaaataaatattttaagaatataaaaaaagatattttagaacttcatattgctcataacgaaggaaattacttttgttcagagcaagaattaaaatctctagaagataatagtcaaatagcaataacttattgtgattctaaaggtttagaaaacgatgataataatccaaacggtgcgattaaaaatattgcaggaatatttaataaaagtaaaaatattttaggaatgatgcctcatcctgaaagaatgattgataaatacctatctggagaagatggatctctattctttgaaaaccttttggaaaacttaagataat

SEQ ID NO: 318033 - DNA, 589 bp, Unknown
  Bacterial polypeptide expressing nucleotide sequence isolated from the Sargasso Sea
cataatgatgacgagcttccaaaaagtgacttggttgttttgccaggtggttttttttatggagattatctccgttgcggaagtatggcctctaaatctaaaataatgcaatctgttattaattatgcaaaatcaggtggtttggtaatgggaatttgtaatggttttcaaatccttgttgaaacaggattagtcccgggtgttttgttgagaaataaatatttagaatttatttgtaaaaatgtttttgtaaaattaaacaataaaaaaaattcatattttaaaaatcttgaaaaagatattttagaattacacatagctcataatgaaggaaattatttttgtactagagatcagttaaaagaaattgaagataatgatcaaattgctatttattattgtgacaaagaaggaaaaattcaggatcaatttaatccaaatggttcaattaaaaatattgctggtattttaaataaagaaaaaaatgtgcttggtatgatgcctcatccagagagaatgatagataaaagtttgtcaggtgaagatggatccttattttttaaaaatttaattaataatattaaataat

SEQ ID NO: 318034 - DNA, 308 bp, Unknown
  Bacterial polypeptide expressing nucleotide sequence isolated from the Sargasso Sea
taaaaatttaaaaaaagatattttagaattacatattgctcacaacgaaggaaattatttttgttcaaatgatgaattaaaatctttagatgataataaccaaattgctgtaacttattgtagcgataaaggtttggaagaagaaatatataatccgaacggtgctattaaaaatatagcgggtatttttaataaaaataaaaatgtactaggaatgatgccacatccagaaagaatgattgataaatacttatctggagaagatggatctttatttttcgaaaaccttttgggaaacttgaaataat

SEQ ID NO: 318035 - DNA, 252 bp, Unknown
  Bacterial polypeptide expressing nucleotide sequence isolated from the Sargasso Sea
aatggaagttacagaagcagttgcaatagaccacggattaaaaaaagaagagttttctaaaatatgtgaacttcttaaaagaacacctaatttaactgagcttgcaatattttctgcaatgtggaacgaacattgctcctataagtcttctagaaaacatttaaaaaaaatgcacaccaaaggaaaacaagtcattcaaggacctggagaaaatgcaggtgttattgatattggagatgatgatgcaattgt

SEQ ID NO: 318036 - DNA, 526 bp, Unknown
  Bacterial polypeptide expressing nucleotide sequence isolated from the Sargasso Sea
gattatcttagatgtggaagcatggcatcaaagtcaaaaataatgaaatcagttataaactttgctaactcaggtggaatggtgatgggaatttgtaatggatttcaaattttagttgaaactggattggtacctggagttttgttaagaaacaaatatttagaatttatttgtaaaaatgtatttgtaaaaattaaaaataagaaaaatacctattttcaaaacattgataatgatgttttagaatttcatattgctcataatgagggaaattatttctgtacgaaagatcagttaaaaaaaattgaagataatgaacaagttgcaattaattactgtgataaagatggaaaaacagaagaacaatttaatcctaatgggtcaataaaaaatattgcaggtatttttaataaagaaaaaaatgttttaggaatgatgcctcatcccgagaggatgattgacccttcactatctggtgaagacggttcacttttttttaataatttgattaataaccttaaatgac

SEQ ID NO: 318037 - DNA, 872 bp, Unknown
  Bacterial polypeptide expressing nucleotide sequence isolated from the Sargasso Sea
aatgcttcctgcagattttattgcaagagggattatcagtggtgttagagttgggggaaactgctcaggtattcctacacctcaaggtaatgtttattttgatgaccggtttgctggaaagcctctagttttttgtggaacagttggaattattccaaaaaaaataaaaggcaaattagcacataataaaaaagctaatccaggagatattataataatagcaggaggtagagttggaaaagatggtatccacggtgcaacattttcatcggaggaattagatcctaacagcccagtttctgctgtacaaattggtgaccctataactcaaaagaaaatgtctgatgtaatcattagagaattacgtgatgaaaatttttactcaagtattactgataatggagctggaggattatcatcttcaattggagagatggcaaaagagagtggtggttttatggttaatcttgaaaaggttcccctaaaatataatggattatatccatgggaaatttgggtttctgagtctcaagaaagaatgacactagctgtaccaccaactaaagttaaaaaagttatagagcttttcaacaccagaggtgttgaagcaacagtaattggtaaatttattaaaaaagaaaaagcgatagtaaaatataacaaaactgaaattctcaatttagatatggaatttcttcatgaaggttaccctaaattaaatttaaaaacatcttttcgaaaaaataaaaaagaaaagaaaaaaataattaagataagttctttgatagataaattacataaacttctgtctagcccacatattgtatcaaaagagtttatagcaacacaatatgatcacgaagtacaagcaa

SEQ ID NO: 318038 - DNA, 225 bp, Unknown
  Bacterial polypeptide expressing nucleotide sequence isolated from the Sargasso Sea
aatgaggtcatctgtaatagtttttcctggttcaaattgtgatagggatattgctgttgcattagaaaagctacaatttaaaaatactatggtctggcacaaagaaacaaagatgccaaagtcagacttaattgttgttcctggaggtttttcatatggagactatctaagatcaggagcaatagctgcaaaatcaaatatactaaatgaagttattaaagctgg

SEQ ID NO: 318039 - DNA, 507 bp, Unknown
  Bacterial polypeptide expressing nucleotide sequence isolated from the Sargasso Sea
aatgaaatcatcagtaattacctttcctggttcaaattgcgatagagatatagacgttgctttaaagaagtttggttttaaaaataaaatgatttggcataacgataatgaactacctaaaagtgatttagttgttttgccgggtgggttctcatatggagattatctacgttgtggaagtgttgcttctaaatctaaaattatgcaatcagtgattaattttgctaaatctggaggtctagtaatgggtatttgtaatggttttcaaatattagtggaaactggtctggttccaggtgttttattaagaaataaatatttagaatttatttgtaaaaacgtatttgtaaaaattgataataaaaacaacccttactttaaaaaccttgaaaaagatatttttgaacttcacattgcacacaacgagggaaactatttttgtactaaagaccaattaaaagaaattcaagataataatcaagtagcaatctattattgtgataatga

SEQ ID NO: 318040 - DNA, 505 bp, Unknown
  Bacterial polypeptide expressing nucleotide sequence isolated from the Sargasso Sea
tatggcatctaaatcaaaaataatgcagtctgtaattaattttgcaaattcaggaggtatggttatgggtatctgtaatggatttcaaatattagttgagactggcttggttccaggtgttttgcttagaaacaaatatttagaatttatttgtaaaaacgtttttgtaaaaattaacaataaaaaaaataaatattttaaaaatgttgataatgaagttttagaatttcatatagctcataatgaaggaaattatttttgtaccaatgatcaattaaaagaaattgaagataataatcaaatagccattaattattgtgatgaaaatggaaaaatagaagatcaatttaatcctaatggatccataaaaaatattgctggtatatttaataaagaaaaaaatgttctgggtatgatgccccaccctgaaagaatgattgatacatctttatcaggtgaagatggatcattattttttaaaaacttaatcaataacttaaaatga

SEQ ID NO: 318041 - DNA, 267 bp, Unknown
  Bacterial polypeptide expressing nucleotide sequence isolated from the Sargasso Sea
catgaaatcagccgtcattgttttcccgggctcaaactgtgaccgtgacgttcaagtcgcgctagcctctagcactgacatcccccctgttatgatatggcatggagataccggcctcccttcggtcgatttaatcgtcgttccgggggggttttcttatggtgattatcttcgagctggcagtatggcagccaactcgccggtgatgagggaagtcgtcactaaggctaaggctggcacaccagtgctagggatttgtaatgggtt

SEQ ID NO: 318042 - DNA, 244 bp, Unknown
  Bacterial polypeptide expressing nucleotide sequence isolated from the Sargasso Sea
aatgaaatcatcagtaatcacttttcctggttctaactgtgacagagacatagatgtagcgcttaagaaattcggatttaaaaataaaatggtctggcatgcagataccgaaataccaaaaagtgatctagttgtattacctggtggtttctcctatggggattatctaagatgtgggagcatggcatctaaatctaaaattatgcaatctgtaataaattttgcaaattctggtggtatggta

SEQ ID NO: 318043 - DNA, 727 bp, Unknown
  Bacterial polypeptide expressing nucleotide sequence isolated from the Sargasso Sea
ctttcatcttcttgtaatgggatttctgaagcctgtaaagttttagaaactcctgttactggaggaaatgtatctttgtacaatgaatcaaaaaataaagataatgaaattaatcctattaatcctactccagtcataggaatggtcggcaagatagacaatattcaaaaagctataagtagtggatggaaaaatactaatgatcaaatctggttaattggctcttataaatcagaaacaacattagcagctagttcttatttggaatattttcatggagaaattacaggacgtcctccaaaaatagatttgttggatgaaaagttttgtcaaagttttttaagaaatgcgatttttaaaagttttatactttcttctcacgatgttagcgatggaggtttggctatagctctagcagagtgctgcattttgtctagaaaaggcgcaaagatagaattagagaaagactttaatcgagaagataatttattgttttcagaaggaggttctagaattgtattttctatagataaaatcaaggagaaagaatggcttgattatttaaaaaaaattcaaattaattctcattcaagcgtatatgtaaaaaaaataggatgcgtttctagtgaaactcttaatataaaaattcaagataaaaatatctgcaatattagggttgaggaattaaccgaaaaatttaataatagtatttcagttcacttttaaa

SEQ ID NO: 318044 - DNA, 457 bp, Unknown
  Bacterial polypeptide expressing nucleotide sequence isolated from the Sargasso Sea
tctgggtggtttagttttaggaatttgcaatggatttcaaatcttaacagaaaccggtctattaaaaggagttcttcaacaaaataagaatattgaatttatttgtaaaaatatatttgtcaaagttaacaatagtgaaaacaaattttttaaaaatatagataaagatgtcttagagcttcatatagcacataatgagggaaattatttttgtactgaagatgaattaaagtccttagaagataataatcaaattgcagcatactattgtagctctgatggaaaagtagatgataagtctaatccaaacggtgcaataaaaaatattgctggaatattcaatgaaaagaaaaatattctaggaatgatgcctcatccagaaagaatgatagatcaaagtttatctggtgaagatggctcaatattttttgaaaatttattaaagaatttgaaataa

SEQ ID NO: 318045 - DNA, 462 bp, Unknown
  Bacterial polypeptide expressing nucleotide sequence isolated from the Sargasso Sea
aatgaattcatcggtcattatattccctggatctaattgtgatagggatatggatgttgcattaaaaaagtttggttttaaaaataaaatggtatggcatgatgatgataagttacctaaaagtgatttaattgtcttgccggggggattttcttatggagactaccttagatgtggaagtatagctggaaaatctaaaattattcaatcagttatagattttgcaaactctggtggtttagttttgggtatttgcaatggatttcaaatcttaactgagacagggttacttaaaggagttcttcaacaaaacaaaaatattgaatttatttgtaaaaatatattcatcaaaattaataatgctgaaaataagtttttttcaaatatagaaaaagatattttggagcttcatatagcgcataatgaaggtaattatttttgctcagaaaatgaattaaagtc

SEQ ID NO: 318046 - DNA, 322 bp, Unknown
  Bacterial polypeptide expressing nucleotide sequence isolated from the Sargasso Sea
aatggaaacaaaatttacttcaaaatataatttaaaccagatattagaaattaacattgctcataatgaaggaaattatttcactaacgagactcatatggaagaattaaaaaaagaaaatcttattgcgtttaaatattgtgacgaaaaaggagttgtgaatgatcgctctaaccctaatggcgctttagaaaatattgctggaatatttaatgccaaaaaaaacatattaggaatgatgcctcatcctgaaagaatgatcgataaattgatttctaacacggatgggataaatcttttttccagtctaataagcaaataa

SEQ ID NO: 318047 - DNA, 868 bp, Unknown
  Bacterial polypeptide expressing nucleotide sequence isolated from the Sargasso Sea
aataatgctttctgaaagtcaagagagaatgctcatagttttagaggaaggaaaagagaaagaagctaaaaaaatttttgataaatggaatttagatttcgcagtaattggaaaaactacagatagcaaaaatatagaattattttttaaaaatgaaaaagtagccgaaataccaatagactttttagctaaaaatgctccaatgtatgaccgaaaatggatcaagtcagaacttccgaaagaaaatagtttttcaaaagatcaatttaaatctttaaaattaggcgaatgtttaaataaaattttacaagatccaaatatttcagataaagaatggatctggagccaatacgatcacacagttatgggtgatacaattcaaaaacctggtggtgatgcaggtgttgtaagagttcatggtacaaataaagctgtagctgcagcagtagactcatcagcaacctattgtaacgctcacccattaacaggtggaaaacaagttgtttgtgaaagctggagaaatatgatttctgtaggtgccaaaccaatagcaatcactaattgtcttaactttggaaatccagaaaaagagaaaaatatgggtgaatttgtcgagtgcgttgaaggaatttctgaagcatcaaagtatttaaattaccctgtagtctcaggaaatgtgtctttttataacgaaacaaaagataaaggtataaagcctaccccttcaattggtggtattggtctgttggctaattataaaaaaatgatcacaatggaattaaaaaataatggaaattatctttttgttattgggaaaacagaaggacatttggaccaatcagtatttgctagaaatatattatctaaa

SEQ ID NO: 318048 - DNA, 514 bp, Unknown
  Bacterial polypeptide expressing nucleotide sequence isolated from the Sargasso Sea
aatgaattcttcagttatagtttttcctggatcaaactgtgatagagatatagcgactgcactcacaaaactgcaatttaaaaataaaatggtttggcataaagataataaattacccaagtcagatttaattgttattcccggaggtttttcttatggtgactatttaagatctggtgcaattgctgcaaaatctaatattttaaatgaggtaattaaagcagctaattctggttgcctaattttaggaatatgtaatggttttcaaatacttattgaaactggccttcttaaaggcgcgttattaaggaataaagatttaaaatttatttcaaaagatgtttatttaaaagtaacaaacaataataataaattttgtaaaaactataaaaaaaataatattataagattaaatattgctcataatgaaggtaattattttacacaaaaagaccatttaaaagaactagaagacaaggagcttataccgttcaagtattgtaataaaaatggc

SEQ ID NO: 318049 - DNA, 333 bp, Unknown
  Bacterial polypeptide expressing nucleotide sequence isolated from the Sargasso Sea
ttatttcgaaagttgtcgatctgcgtgttaagaatatatcaagcacttttacacataattattcatttaacagtattatctctattcccattgcgcatcatgagggaaattattttgccgcaaaagatgatttaaagaaactccatgatgaaaatcgtattgcttttgagtacattgaaaatccaaatggagcttctgataatattgctggtattttatccaaaaatcatcgtgttttaggaatgatgcctcaccccgagcgccacactgagagtgcgcatggatgtcaggatggttatccttttttcaagggcttgcttgagactagttaaa

SEQ ID NO: 318050 - DNA, 844 bp, Unknown
  Bacterial polypeptide expressing nucleotide sequence isolated from the Sargasso Sea
aagacaggggatgtaattgcagctcaagatatgggtgctgcaggtttaacatgcagtagcgcagaaatggccgcaaatggaaatttagggatatcaattgatttagatttagtcccttctagagaagatgatatgtcctcataccaatatttattatctgaatcgcaagaaagaatgttgtttgtcgttaaagaagaaaaaattaatgatcttattgaaaaatttaataaatggggattatatgccagtgttattggtgaagttatagaaactaatgaggtaattatttctcataaaggtaaaattgttgcgcagatacctacttctgccctatctgatgatactccagtgaattttcacaatgtgattaataatccacccaatgatcttttaaataaatgggaatggaaagaaaatgatttaccagaaattcatgagcaaaaaatattttcattgaaggaaaataagaatttttctttttcagaaatcattttaaaactactttctaatccatcaatagcttctaaaagatggatttataaacaatatgactctcaagttcaagtgaatacagtttttaaacctggaaaatcagatgcagccgtaataagactaagggaacaaaataaaaaaaataaaagtaaagtattttctggtgtcgctgcttcagttgattgcaatagtagatgggttgcgcttgatccttttagaggatctatcgctgccgttgcagagtccgctagaaatgttagttgtgttggtgctgagccagtagcaattacaaataatttaaatttttcttcgccggagaatgaaataggatattggcaactctcatcttcat

SEQ ID NO: 318051 - DNA, 916 bp, Unknown
  Bacterial polypeptide expressing nucleotide sequence isolated from the Sargasso Sea
ggaatagaattaaatttaaacaaagttccctgtcgagaagaaaaaatgacaccttatgaaatcatgttatcagaaagccaagaaagaatgttgattgttttagaaagtggaaaagaagaaagagcaaaaaaaatatttgataaatggaatttggattttgctataattggtaaaactacagatacgaaaaaaatagaaatttattttgataaaaaaaaggttgctgacattccaattgattgtttatcagaaaatgcaccaatttatgagagaaagtggaaaaaaacaaaacttccacaaaaactaaaatttaaaaaagaaaaatttaaatctttaaaagtttctgattgtttaaagaaagttttatctaatcccaatatttgcgataaagaatggatttgggaacaatacgaccacacagttatgggtgataccattcaaaagccaggtggagattctggggttgtaagaatacatggctcaaaaaaagcagttgctgcatcggttgactcgtctgcgtcgtactgttttgcacatcctaatactggaggtaaacaaattgtttgtgaaagttggagaaatttaatttctgtaggcgcaaccccaatagctattacaaattgtttgaattttggtaatccagaaaaagaaaaaaatatgggtgaatttgttgagtgtgtagaaggtatatctgaagcaagtaaatatttagattttccaatagtttcagggaacgtttctttttataacgaaacaaaagataaaggaataaaacctactccagcaatcggaggtgttggtttaattaaaaattataaaaatatgattaccatggattttaaaaaagaaaacaacattgtatttgtcataggtaaaactgaaggtcatttagaccaagagcatattgcaaaagata

SEQ ID NO: 318052 - DNA, 535 bp, Unknown
  Bacterial polypeptide expressing nucleotide sequence isolated from the Sargasso Sea
tggagattacctaagatgcggtgccttagctgctagatctccagtaataagttcaattaaaaaccatataagtcgcggtggcgcagtattaggtgtatgtaatggttttcaaattttaattgaagctaaaattctccctggatctcttttgagaaataagaaacttctatttacttgcagagaaacaacattagaagtgcaaagttgtattaaaaatccttttctctctaattttaaaattggtgaatgtctaaagattccagttgcacataatgaagggaattattttgctcccaaagatttgttaaaagaactgaaagaagaaggaagaattgctttaaaatatattaaacaaaaagatagagaaaaaaattataaccctaacggatcaacagaagacatagctggcattctatcaaacaatggaagagttcttggaatgatgccacacccagaaagagctataaactatctacaaggtggaacagacggtttaaaacttcttacaaactgcattgaacaaataattggttaa

SEQ ID NO: 318053 - DNA, 215 bp, Unknown
  Bacterial polypeptide expressing nucleotide sequence isolated from the Sargasso Sea
aatgggtttaacgagagatgaatataatttaatttgtaaaaaaattaataaaactccaaatatgacagaattaggtattttttctgctatgttttcagaacattgctcttataaaagttcgaaaaaatggttaaaaactttaccaacagaggctagtcatgtgatccaagggcctggtgaaaatgctggtgtaattgatattggtgaaaatctag

SEQ ID NO: 318054 - DNA, 798 bp, Unknown
  Bacterial polypeptide expressing nucleotide sequence isolated from the Sargasso Sea
caaccattaagcgcatatgagatactactatccgaaagccaagaaagaatgttggcagtcatagatgaaaaaaataattttaaggtgaaaaaaattcttcaaaagtggcaaatagattatgaagttatcggagaaataactaataataaacgagttgtgtttgagtcaaataatgagaaagtggtagacctacccgtagatataattgttgatgatgcacctgaatacgacagagaattttatatgccaagaaaaagaaaaggcaaagattttgatttttccaacattaaattagaagatataattaatactttattatctaatttaaattatttggataaaagttgggtttttaatcaatatgactcaactgttatgggagatactgtcaaagaacccggtcaatcatctggcatagttaaaattcatggaacaaaaaaagttattggtgctaccacagactgtaatcctttatatataagaattaatccttacgagggtatgaaatatacagttgctgagtcttacaggaatttaattgcatgtaacataaggcctttagctatcacaaataatctaaattttgctagtcccttagacccaaatattatgggtgaattagtcttatctattgatggtttaaaaacagcagcagccaaattcaatacccctatcgtttcaggcaatgtgtctttatataaccagacaaatgaaatacctattaagcctacacctgtgattggaatgataggatcaaatcaggatttaaaaaaaataaattctaataaattttgtaat

SEQ ID NO: 318055 - DNA, 497 bp, Unknown
  Bacterial polypeptide expressing nucleotide sequence isolated from the Sargasso Sea
taaatcaaaaattatgcaatcagttatcaattttgcaaattctggtggaatggtaatgggaatttgtaatggttttcaaattttagttgaaacaggtttggtgcctggagttttattgagaaataagtacttagagtttatttgcaaaaatgtctttgttaaaattaataacaaaaataactcttattttaaaaacattaataacaatgtacttgaacttcatatagctcataatgagggaaattacttttgcacaaaagatcaattaaaggaaattgaggacaacacccaaattgcaatcaattactgtgactcagaaggtaaaattgaagaaactttcaatccgaatggatcgataaaaaatatcgctggaatttttaataaagagaaaaatgttttgggtatgatgcctcatccagaaagaatgattgacccttctctatcaggtgatgatgggtctattttttttaaaaatctaattaataatttaaaatgat

SEQ ID NO: 318056 - DNA, 618 bp, Unknown
  Bacterial polypeptide expressing nucleotide sequence isolated from the Sargasso Sea
aatgaaggcatcgataattgtctttcctggatcaaattgcgatagagatattgctgtatctattaaaaaacttacagatctaaaaccaataatggtctggcataaagaaacctccatacctgattcagatttaatagtcattccaggcggatttacatttggagattatttaagatgtggctctatcgcagcaaatagcccaattatgaatgatgtcattaaaaaagcaacagacggattacccactttaggaatatgtaatggttttcaaattcttacggaatcaggattgctacctggaacactcattaaaaatgattgtctttcctttttatgtaagactgtttcaataagagttgagaataatgaaacaaatttttctaaaaaatataaacaaaatgaagtgatcaatatacctattgctcacaatgaaggcaatttctttgctaatgaagatacattgaaaaaaattaaagactctaatcaaataatttttaaatattgcaatcaaaatggagaggtaaataatgaagcaaatccgaatggttcaatcgaaaatattgctggtataacaaatgagcaaggtaatgttttgggtatgatgcctcatcctgaaag

SEQ ID NO: 318057 - DNA, 271 bp, Unknown
  Bacterial polypeptide expressing nucleotide sequence isolated from the Sargasso Sea
aaatatagcccataatgagggtaattattttacaaaagaaaaacatttaaaaaaactagagcaggaaaatttaatagcttttaaatattgcgataaaaatggaaaaattgatgatgatgctaatccaaatggttcgctaaataatattgctggtatttttaataacaaaaaaaatattcttggtatgatgcctcatcctgaaagaatgattgatagaataatttcgaatgaggatggcattaatttatttcaaagtttattgaataaatga

SEQ ID NO: 318058 - DNA, 793 bp, Unknown
  Bacterial polypeptide expressing nucleotide sequence isolated from the Sargasso Sea
agggattggatatgggagcaatatgatacatcagttatgggtgatacagtaatacccccaggtcaaaactctggtgtaatcagagttcacaatacgaataaaaaattgtgtgcaagtgtcgactgtacaccgagatatgtgagtgctgatccatttttaggttcaatgcaggcagtttgtgaagcatatagaaatattatctcggttggcggtacaccactcgctattacaaacaatttaaactttggaaatccagagaaaaaagaaattatggggcaaattgttcattctataaaaggtataagcgaagcatctttaaaacttaatatgcctgtaatttctggaaatgtatcattatataacgaaactaatggtaaagcaattttacctacaccagttataggagctgttggcgcaattgatgaaaataaaaattctgtatctttatcaaatgcagttgacggtaacagtatttatgttgttggccaagataacagtcatactgacggttgggttgggcaaagtatttacgctcaggaaattttgaatatagataaagactacgcgccaccacctgtaaatattgatgccgaattagcaaatggtaattttattttaaaagctattgaacagaaactcacgaactgcgttcatgatatatcagatgggggactggcaatagcgatttcagaaattcttctttcatctcgagccaaaggaattggtgcagtaataaataaaaattatattcataattcagaaagtttttggtttggagaggatcaaggtaggt

SEQ ID NO: 318059 - DNA, 811 bp, Unknown
  Bacterial polypeptide expressing nucleotide sequence isolated from the Sargasso Sea
gtgagttgtgttggagcagaaccagttgctattacaaataacttgaattttccttctcctgaaactgatataggatattggcaactttcatcttcatgtaatggaatttctgaagcatgtaatgcttttgaaactcctgtaacaggaggaaatgtttccctttacaatgaatccaaaaataaagaaaacgtaattactccaattaatcccactccagttattggaatggttgggaaaatagataatgttgaaaaagctattagcagtgaatggaaaaatattcatgatcaaatatggttaattggttcttataaatcagaaacaacaatttcagctagctcttacttggaatattttcatggagaaattacaggtcgtcctccaaagttggatttgggagatgaaaaattttgccagggttttttaaggaatgctattttaaaaagtcttgtagtttcttctcacgatgttagcgatgggggtttatgcatagctttagcagagtgttgtattttgtcaggaaaaggtgcaactatagatcttaataaagattttaatagagatgataatttattatttggagaaggcggttctaggattattttttcaatagacaaaatgaaagaaaatgaatggttaaattatctaaaagaaaatcaaatcaattttcaacaaagtatatatgtaaaaaaaataggaaatgtttctagtaaaaatctcaatataaaaattatagataaagatatttgcaatattagggttgaggaattaaccgaaaaatttaataatagtatctcaggtcacttgtaaa

SEQ ID NO: 318060 - DNA, 331 bp, Unknown
  Bacterial polypeptide expressing nucleotide sequence isolated from the Sargasso Sea
aaaaataagcaaagtaaatatttcaaaaatttaaaaaaaaatatcttagaactccatatagcacataatgaaggaaactatttttgttcacaagatgaattaaaaaatttagaagataatgatcaaatagctgtagcatattgtaatgaaaaaggatcagaagaagaaatacacaaccctaacggtgctcttaagaatattgcaggtatacttaataaaaataaaaatgttcttggaatgatgccacatccagagagaatgattgataaatatttatcaggagaagatggttctttattttttgaaaaccttttaggaaatttaaactaat

SEQ ID NO: 318061 - DNA, 445 bp, Unknown
  Bacterial polypeptide expressing nucleotide sequence isolated from the Sargasso Sea
aatgaaggtagcaattgtagtttttcctggcacttggagtgatgaagattgtgtttatgcaatgcaccaggttggggcagaaccatataaggtttggcatacagaaaaaagactaggaagccctgatcttgtaattattcctggaggtttttcttatggagattatcttcgatgtggtgcgatagcgcgattttcaaatattatggaagatataatatcgtatgcaaaaaatggtggtcttgttgtaggcatttgtaatggttttcaaattttatgtgaatctggtttattgcctggtgttcttattagaaatgattctctacaatttagatgccaagacacttttttaaaattaaatgataacgtgatagattcaccttttttaaattcaatcaataaaaatccatcactgaaaattccaatttctcatggttcaggaaattat

SEQ ID NO: 318062 - DNA, 745 bp, Unknown
  Bacterial polypeptide expressing nucleotide sequence isolated from the Sargasso Sea
gtacttttggaagaaatgatcggtaacgaacaaactgtatacagatattgtaacgataatgggcagaccattgatgaattcccaaccaaccccaatggctctgtatataacttagcagccgtttgtaatgcacctggcaacgtaatggcaatgatgccccatccagaaagaacaaaaaatggagatgttattttttcttcaatgaaggattttattgaacatgacaaaccaactattgagggttcattaaagtttcaggcacctgaacatcatatcaaaaaactaccacaagaaaacgatacgacagaatgggtcatagatatgatcattacagataatgaggccgcttctgtgaacaatgcccttaagcgacttggccatgatgtttgtataacaagacaaactcattgggaaataaaaaccgatggtgaccatgatcatattttgagaatgatcgatgattcaggagagctctataattcaaacaaagaatatattggagagatcatatcaaataataagaccgtatcatttcttgtaaggcaaaaagaagatatgcatgggcgaattaaatacgaatctttaaccgaaaggtttgagatcgaaggattaaaaaaattaagacgaggcgtagtgtggaatctctcaattaacagcggtaatattaataccgttgtaaacgatattttgaacactaacatactatttaacccattatctcatgaatgctataaaatcaactgag

SEQ ID NO: 318063 - DNA, 299 bp, Unknown
  Bacterial polypeptide expressing nucleotide sequence isolated from the Sargasso Sea
taaatataaaaaagatcaagttctaaaaataaatattgctcacaacgaaggaaattattttacaaatccagatcatttgaaagaattgaataatgaaaatttaatagcttttaaatactgtgatgaaaatggaaatataaacaaaaaatctaatcctaatggttctttagaaaatattgctggaatatataattctaaaaagaatattttaggtatgatgcctcatcctgagagaatggttgataatataatctcaaacactgatggaattaatttgttctcaagcttactaaactaaa

SEQ ID NO: 318064 - DNA, 847 bp, Unknown
  Bacterial polypeptide expressing nucleotide sequence isolated from the Sargasso Sea
ggttcaaattggagatcctctcactcaaaaaaggttaactgactttcttttaaaggccagagacttggggctttactcttctttgaccgataatggtgctggaggcttaagctctagtgttggagaaatggctgagtgtactggcggagccactttagatttatcaaagtgccctgttaaataccgaggacttaaagcttgggaacttatgatctctgaaagccaggaaaggatgactttcgcagtccccccttctaagtcacgggcctttgaagacttgggtaggaaatacggagtttctgtcactgatatcggtttctttcataataagggagtcttagaagtttttcatttaggagagcgggtagcttttctagacctacctcttattcacgacttactacctccaatgaaattaaaggccctttggaaaggtccaagaaagagaaaagagtggtggaaaggacgaaatgagtcttcagagaaagagttttttaaagaaaaaaacgttctagaagttttaatgaagcttctctcttcacccaatattgtttcaaaagaaaactgggttaggcaatatgatcatgaagtcctaggctcaacccatctcaaaccttttgttggaaaaaaaggagatggcccaggagacagttccgctctgtggctttacccccatggaggtgaggaaaattctgtcattcaaataggttgtggtcttgcacctaagataagcctttgggatccctatgttatggcccaatatgcggtggatgaggccattcgaaatattgtggccaatggtggagatattgatcagtgtgctttgttagataatttttgttggcct

SEQ ID NO: 318065 - DNA, 868 bp, Unknown
  Bacterial polypeptide expressing nucleotide sequence isolated from the Sargasso Sea
aaaattacttttagaagcgtgccttgaatttttgaaagataattctattatatctatacaagatatgggtgctgctggactaacttcatcgagtgttgaaatggcttcaaaaggaaaacttgggatagaattaaatttaaataaagttccatgtcgtgaaaaaggtatgagcccatacgagatgatgttatctgaaagtcaggaacgtatgttaataattcttgatgataaaaaagaagaacaagctaaaaaaatatttgaaaaatgggatttagatttcgtagttattggaaaaacaactaataatgaaagattagtattaaattttgatgataaaaaagtagcagatattccaataatagctttagcagaaaaagctccattatatgatagaaaatctataaaatctaaattatcgagaaataaagttaaaataaaaaatttaaaaaaaattaaaattgaggatgctcttattaaaattttaggctcaccaaatcaatcaaataaaagttggataacagatcaatacgatcaagtagtaatgtgcgatactatccaaaaatcaggaggagacgctgctgtcatcaggattcataataaagataaagccatagctatttctgtggactcttcagcaaactattgcaatgctgatcctaaatcaggtgctaaacaaattgtttgtgaaaattggagaaatttaatatcagttggagcaaaaccattagctattacaaactgtttaaattttggaagtcctgaaaaaagtaaagttatgggagaatttattgaatgcatcgaaggcatgaaagaagcatgtgaatttttaaattttccggtagtatcaggggaatgtatctttttataa

SEQ ID NO: 318066 - DNA, 694 bp, Unknown
  Bacterial polypeptide expressing nucleotide sequence isolated from the Sargasso Sea
aattgtgatatagatactaaaaactattttgaaaatagtttttatatatcttataaagaaactacattaccaaatttagatttgttagttttacctgggggttttgcttttggtgatagatattataagaaggcaaccgaacaatatgaaattaatccaggaaaaatggcaattgaatgtaatgtaacaaaaattatttatgaagcacacaaaaaaaacatacctattttaggtatttgtaatggatttcagattttaataaaattaggtttattaccaggccagttattaatgaatgaaaaaaaaaaatttataagtagattagtaaaatgtaaattaaatgaacaagaaataaaattaaatatagcaaataaatttggtaattatcaaatagataaagaaggatacaatagtttactagaaaataatcaaatttttttaaaatatgaatattatgtaaatggttcttataagaatattgcaggtgtttgtaataaagaaagaaatgtatttggtttaatgccacatccagaaagaagtaaaaataatttcaaaacatttttatttgaagaaataaatagtaataattttcattatagaatagaaagattaataaaaagtgaacacatttcttataaaagtactaaaaaatatttatctaaattatatacaaaaaacaataatattatacaag

SEQ ID NO: 318067 - DNA, 428 bp, Unknown
  Bacterial polypeptide expressing nucleotide sequence isolated from the Sargasso Sea
aatattagtagaaactggtttggttcccggtgttttgttgagaaatagatatttagaatttatttgtaaaaatgtttttattaaaccagcaaataaaaaaaatctttattttaagaacattgataaggatattttagaatttcatatagctcacaatgaaggaaattatttttgtacaaatgatcaactcaaagaaattgaagataataatcaaattgcaatttattattgtaataataaaggtcaaattgaagaaaaatttaatcctaatgggtcgataaaaaatattgcaggaatatttaataaagaaaaaaatgttttgggaatgatgccacatcctgaaagaatgattgatcaatgtttgtctggagaagatggatctttattttttaaaaatctaatcaataacatcaaaaatgctagttaac

SEQ ID NO: 318068 - DNA, 956 bp, Unknown
  Bacterial polypeptide expressing nucleotide sequence isolated from the Sargasso Sea
acttttagaactaaatattcctctaaccgtatcagaagctttgaaaattcaaacccaaatgttagaacgaccaccatctatcacagaactagttttgttttcgattcaaggttctgagcattgtagctataaaagtagcagaactcatcttaaaaactttgtaacaactggccctgatgttattctaggcgctaaagaagatgctggcgttatatcaatcacaaaagataaaaaggggaatagatggtgcattgtaatgagccacgaatctcacaaccatccctcacagattgtaccctatgaaggcgctgcaacgggtgttggtggaaatgtgagagatgttatgtgcatgggagcagaagtcatatctaattctgattccttaaggtttggtaatttaaaaagtgacaagacaaaatggatacacaatgaagtcatagccggaattgccggatatggaaacccgataggcgttcctaatgttggaggggacctttactacaataatggctatgatgaaaattgtttagtcactttaactactcttggcattattagagaagatgaaataattcattcatttgcaccaaaaaatgcagctgggtacgatctaattttagttggaaaaccaacagataatagtggttttggaggcgcaagctttgcctcactagaacttgaagaagaaaaagcggataaaaacaaaggcgctgttcaagagccaaatgcttttttagaaagacatttattaaaatcttcctatgagcttttcagaattttaaaagagagaaatttaataagtcaagtcggatttaaagatcttggcgcaggtggagttgcatgcgctagcgtagaactagctgaaacttcaggctttggtgcagaagtttgggttgataaaatacctgttagtatgaaagacttacacccctctgtcgtgctttgtagtgaaacac

SEQ ID NO: 318069 - DNA, 211 bp, Unknown
  Bacterial polypeptide expressing nucleotide sequence isolated from the Sargasso Sea
aatgaaatcatccgttatagtatttccaggatcaaattgtgatagagatatagctgtaactttggagaaacttcagtttaaaaattcaatggtttggcacaaagaaactgaattgcccaaatctgatttaatagtaattcctggaggcttttcatatggtgactatttaagatcaggcgcgatagcagcaaaatcaaatatattatctgga

SEQ ID NO: 318070 - DNA, 409 bp, Unknown
  Bacterial polypeptide expressing nucleotide sequence isolated from the Sargasso Sea
tgaaactggattgttaccaggcgttttattaagaaataaaaaattaagatttttatctaaaaacgtatatttaaaagttattaatcataataataaattttgttcaaattttactaaaaaaaatataatcaaacttccaatagctcataatgaaggaaattattttgcaaataacgatattataaagaatcttgaagataataatctaatagcttttaaatattgtgacgaaaaaggaaatataaataaagattctaatccaaacggttctattaataatatagctggaattttaaatagtaaaaaaaatattttaggaatgatgcctcatccagaaagagtaatagatccttttctgtcaagcgaagatggttcgataatgtttgagagtctaataaaatcaaattaa

SEQ ID NO: 318071 - DNA, 789 bp, Unknown
  Bacterial polypeptide expressing nucleotide sequence isolated from the Sargasso Sea
caatagcaatcacaaataatttgaatttttcttcccctgagaatgaaataggatattggcaactttcttcttcatgtaaagggatatctgaagcctgtaaagctctagaaactccagttacaggaggtaatgtttccttatataatgaatcaaaaaataaagataataaagtcacccctattatgccaactccagtcataggaatggttgggaagttagataatgttgaaaaagctataagtacaaaatggaaaaattttcatgatgaaatctggttaattggctcctgtaaatcagaaacaacaatagcagctagttcctatttagagtattttcatggagaaattacaggtcggccccctaaaatagatttgttagatgaaaagctttgccaaagttttttaagaaatgcgatcttgaataatctagtagtttctgctcatgatattagtgatggtggtctagctattgctttagcagaatgttgtattatgtcttcaaaaggtgcaactatagaattacaaaaagaactaaatagagatgataatctattgtttgcagagggtggctcaagaattattttttcaatagataaaatgcgtgaaaaagaatggttaaattatctagaacgaattcaagttaatttttcatcaagtatatatgtaaaaaaaataggaaatgttacgagtgaaactcttaagataaacattgaagataaaaatatctgcaatattagggttgaggaattaaccaaaaaatttaataatagtatctcagcttacttttaaa

SEQ ID NO: 318072 - DNA, 724 bp, Unknown
  Bacterial polypeptide expressing nucleotide sequence isolated from the Sargasso Sea
catggtgcgcgccaacacgatggtgaatcccggcagcgatgccgcggtgattcgcatcaaggccgacagcgtgccgggtggcgacgatcgtgaggactttcctgagaaacttgtggcattggccgtcgattgcaacgcgacgcacgtgtacctcgatccctacgaaggctctaaggcggcggtggcggagtgcgcccgcaatctggcctgtagcggcgccacgccgattgggaccacggataatttgaatttcgggaatccgcacaatcctgagctcttttggcagctcaaggaagcggtgcgcggtttggccgagggctgcatcgcctttgatgcaccggtgaccggcggcaacgtgagtctctacaatcagaatccggacggggcgattgatcccacgcccaccgtggccatggccgggttggtggaggaggaacggcacgtgaccacgcagtggtttaaggaggacggcgacgccgtaattcttctgggcgccccagtggactccgaagatgccctgcaaggtctgggcggctcggcttacctgcaggttgcgcatgaggccaagaccggtcaaccgccccgctgcaatctcgaaaccgaacgcacgctgggcaccacgttgctgggcctgatccagagtgatctggtgaaaagtgcacacgactgctccgagggcggcctagcggtggcactggccgagtgcaccttttcggagctggaa

SEQ ID NO: 318073 - DNA, 727 bp, Unknown
  Bacterial polypeptide expressing nucleotide sequence isolated from the Sargasso Sea
ggtctttctctatctgaaaacaagagagtgaaaaatggtcaagtcgttgggattggatattttaatacttgggtctatttaaaaagctcttataataatgatcagtgcgctttcacaagaaccctaaaacccgaagaaatcataaatattccccttgctcatggagaaggtcgctttttactaaaaaagagcttgttagaagacttaatttccaacaatcagattccctttagatactccaattcgagaggagagattctagaagattatccaacaaacccaaatggctctatttacaatattgctgctgtttgtaatcaaagcggtaatgttatggcgattatgccacaccccgaaagaacagagcttggagatgaaatttttaagtctatgaaagactttataaataatggtacagtatttaagagaacccttttatcaaaaacacaaagaagcattgaaataaagaattataaaagaaaaaaggagtgtcacgagctcgtgattgatatgattattacagataatgaagcgctctctgttgaaaacaccctaaaccagcttgggcatgacgtctttatttcaagaaaaagtcattgggaaattcatttaaaaaagatgacacctcaagctactagcttaatagaaaaaagcggagaaatttataacccaaacaaagaatttattagtaaaattgagaacgaaaaaaacactgttacttttctaa

SEQ ID NO: 318074 - DNA, 625 bp, Unknown
  Bacterial polypeptide expressing nucleotide sequence isolated from the Sargasso Sea
attgagttttcaagaacatgagaaattacacattgaaaaaaatgtaaaacgagagttaacctctaccgaactacaaatacttgctgctgaatggtctgaacactgttcttacaaatcttcaaaaatgcatttgagaatgttacctactactggcccaaatgtgattgttgaaaaaggatatgactccggtgttttagatgttggtgatgggtatgttgtaactgtacatatagaaagtcataatcatccatcggcagttgaaccgtttggtggtgctgcaaccggtgtaggtggtgtaattcgtgatatcttatctgcgggaacaagaccaattgcattgtttgatggattaaggtttggtgatatagaaaatgatgcacatgcacggtggttattcaaaaatgcagtatcgggaattgcagattatggaaattgtcttggaattccaacaattggtggtgaggtagaatttgatacatgctatacaaattatgcattagttgacgtggcagcagtaggatttggaaaaaaatcaaaattaattaaaaatcacgcaaacatcaatgatttggttttactaattggcggttcaactggtcgtgatggtgtaggtggttcacaattt

SEQ ID NO: 318075 - DNA, 244 bp, Unknown
  Bacterial polypeptide expressing nucleotide sequence isolated from the Sargasso Sea
tttgctagtaaagaacaaatagaaaaacttgaagataaaaatttagttgcttttaaatactgtgatgaaaaaggtaatatcaataaaaatacaaatcctaatggatcttcaaataatattgctggaatattaaatgataaaaagaatattctaggtatgatgcctcaccctgaacggttaattgatccattgttatcaggcgaagatggttcgttaatgtttgaaagtttaattaaagcttaat

SEQ ID NO: 318076 - DNA, 202 bp, Unknown
  Bacterial polypeptide expressing nucleotide sequence isolated from the Sargasso Sea
atggataattttactgtaggagttgttgtcttccctggttctaattgtgatcgtgatgtttcatgggcattggaaggttgtctagacattagaacaaaatacttgtggcatgagtcttcagatttaagtgatgtagatgcgatagttttacctggaggatttagctatggtgattatttaagatgcggtgcaatcgcgagat

SEQ ID NO: 318077 - DNA, 202 bp, Unknown
  Bacterial polypeptide expressing nucleotide sequence isolated from the Sargasso Sea
atggataattttactgtaggagttgttgtcttccctggttctaattgtgatcgtgatgtttcatgggcattagaaggttgtttagatataagaacaaaatacttgtggcatgagtcttcagatttaagtgatgtagatgcaatagttttgcctggaggattcagctatggcgattatttaagatgcggagcaatagcgagat

SEQ ID NO: 318078 - DNA, 427 bp, Unknown
  Bacterial polypeptide expressing nucleotide sequence isolated from the Sargasso Sea
atgaaatcatctgtaataacgttccctggttcaaattgtgatagggacatggatgttgctcttaaaaaatttggatttaataataaaatggtatggcatgatgataatgaactaccaaaaagtgatttagttgttttgcctggtggtttttcatatggcgattatcttcgatgtggaagcatggcttcaaagtcaaaaataatgcaatcagttattaattttgccaaatcaggtggtcttgttatgggtatttgtaatggatttcaaatattagttgaaacaggacttgttccaggagttttgttgagaaataaatatttagaatttatttgtaaaaatgtattcgtcaaaatcgataataaagaaaatccttattttaagaatcttagtaaagatgtttttgaatttcacaatagctcacaatgaa

SEQ ID NO: 318079 - DNA, 718 bp, Unknown
  Bacterial polypeptide expressing nucleotide sequence isolated from the Sargasso Sea
tattatttcaattcaagatatgggtgctgctggacttacttcatctagtgttgaaatggcatcaaaaggagaattaggaattgagcttaatttggataaagttccatgtagagaagaaaatatgaccccatacgaaatgatgctgtctgaaagtcaagaaagaatgttaattattcttgaagatggaaaagaacagcatgcaaaaaagatatttaaaaaatgggatctagattttgtaataattggaaaaaccactgatacaaataaactaactcttaaatataacaataaaattgaaggagaaattcctttggatgctttagcatcaaaagcgcctatctatgatagaaaatgggtaaaaaaaaaattaactaaaagtaagattgatttaaaaaaattaaaaaaaattaaaattgaagatgctttgataaaaattttatcctctgccaaccattcaaacaaaaattggattacaagtcagtatgatcaaatggtaatgtgtgatacggctcaaaaatctggagcggatgctgcgataatcagaattcataagaaggaaaaagcaatagctgtttctgtggactcctcatcaaattattgtaaatcacatcctttaactggtggaaaacaaattgtatgtgaaaattggagaaatttaatttctgtaggtgccaaaccaatagcgataacaaattgtttaaactttggtaatcctaaa

SEQ ID NO: 318080 - DNA, 520 bp, Unknown
  Bacterial polypeptide expressing nucleotide sequence isolated from the Sargasso Sea
agattatcttagatccggagctatcgcagccaaatcaaatatattaaatgaggtgattaaagctggaaaagatggatccttgatacttggtatttgtaatggatttcaaatattaattgagtgcggattgttacagggggctcttttaagaaattctggtttaaaatttatatcaaaggatatttttgtaaaagttcaatcaaccaaaaataaatttcttaacaagtataaaattaatgaaatattaaaattaaatattgcgcataatgaagggaatttttttacaagcaaagagcacttaaaagaacttgaagacaacgatcttataccaataaaatattgtgataaagatggtaaagtaagttctgagagtaatccgaatggatccttaaataatattgcaggtatttttaataaaaataaaaatatattgggtatgatgcctcatcccgaaagaatggtagacaaaatttgctctgatgaagatgggttaccactttttctaagcttgatgaattaa

SEQ ID NO: 318081 - DNA, 673 bp, Unknown
  Bacterial polypeptide expressing nucleotide sequence isolated from the Sargasso Sea
catatgcaagacctacttgataaaaatattaatttgaaatcattcaatggcatggcagcatgtggtggattttcgtacggtgatgttttaggtgcaggaggaggttgggcaaaaacaatattaaataatgaaatagttaaagatcagtttgaagaatttttcacaaataaaaacacttttacactaggcgtttgtaatggttgccaaatgatttcaaaattaaaagaaataattcccggcgctataaattggccaagttttgagaaaaatttgtctgatcaatttgaagcaagattagttcaagttgaaattcaaaaaactaactcaatattgcttgataatatggatggatggactctaccagttgcatcagctcatggagaaggttatgcaagatttgaaaacgatagcttaaaaaaattaaatgaatcatcgcaaatagctcttaattttgtaaattctgatggtaagaaaactgaaatttatcctataaatccaaatggctctgaagagggtgttactggagttacgtcagacgatggtagggtcacgatcatgatgccacatcctgagagagtatttagaaaaattcaaatgagttggcatccaaagcattgggaagagttttcaccatggatgcaattatttattaatgctaaaaaaattgtttaat

SEQ ID NO: 318082 - DNA, 694 bp, Unknown
  Bacterial polypeptide expressing nucleotide sequence isolated from the Sargasso Sea
tcctccttcgattcatgaactggtcttgttctcaattcaaggatctgaacattgtagttacaaaagcagtagaaatcatttaaaaaagttcacaacagatggcccccacgtagtacttggcgccaaagaagacgctggtgtggtctcaattgcaacagataaaaacggaaaaagatggtgcattgtcatgagccatgaaagtcataatcacccatcacaaattgtaccatatgaaggggcagcgacaggcgtagggggaaatgtcagggatgtgatgtgtatgggtgcagaagtgatagcatgcaccgattcgttccgctttggagatattaaaaatcaaaagaccaaatggatccatcacggcgtagtgtctggtgttgcaggctacggcaatccattaggaataccaaatattggtggagacgtatattataatgagaggtatagtgacaattgcctagtaacattagtaacgctaggtattgtaagagaggataatattattcattcatatgcaccagagaatgctgatggacatgacttgatattaattggaaaacctactgataatagtggattcggcggtgcaagttttgcctcgctcgaattggttgaggatgaaaaagaaaaaaacaaaggggcagttcaagaaccaaacgcttttcttgaaaggcatttgttaaaatccagttat

SEQ ID NO: 318083 - DNA, 826 bp, Unknown
  Bacterial polypeptide expressing nucleotide sequence isolated from the Sargasso Sea
aatcggtattgaacttgacgtaaaaaatgttcatttacgtgagtctgacttgtcccctgatgaaataatgatttctgaatctcaagaaagaatgcttgtaatatcttctccagacaacctctcaaaaattgaaaaaatttgtgataaatttagaattcaatgttctgtaattggtaaagttaaagaggataaaatgatgcatgtgaaaaacggtaatgatactttggcattactccctgcagattttgttgcacgtggtcctttaattgaccgaccaaaatcaaaaccagaatatctttcaaaacttccatcttcccctccatctgaaaatcaattgccattatctgagactttactcaaactactctcttcgccaaatattgcaagtaaacattgggttttccgtcaatatgatcatgaagttggaattagaaccgtcataaaacctggttttgatagttctgtcttacgtcttgacaatggaaaatcgttatctgtaaaaattgacggtaatccaaagcattgttacattgatccacgacaaggtgcaatcggatgctttgaagaagcatgtagaaatgttgtttgtaccggtgcaactcctatgggcatggttgatcatttacaatttggcaatcctgaagatcctgaaatattttggacatttatggaatctatagagggaattactgattttgcaaaatttcttaatgttccatgtgtaggaggtaaagttagtttctataatgaaacctctgaaggtccaatcaaaccaactccattgattggggtacttggactgattgaaaattcacctcttctacca

SEQ ID NO: 318084 - DNA, 712 bp, Unknown
  Bacterial polypeptide expressing nucleotide sequence isolated from the Sargasso Sea
aatgaacagtaagccccaaatagcatacatacagtttccaggctccaacacagaggctgaaaccgtagccgctgttgagcgaaaccacatggttgctgttccacacttttggaatgaacctattgaaaaactaagagattatcatggttatattgttttgggtgggttttcatatgaagaccgatctcgctctggaattattgcttcgctagagccaattatggaccaaataaaaaaagaggttttgatgggaaagcctttattgggaatatgtaatggagcacaaatacttgttgaggctggaatagttccggggaataaaaactttgacacagttgtcggcctaaccgaaaacaagcgcatacaaaacaaccaaattgtaggaactggctattataacacatggtgtcatgttaaggctaacaaaaaaagtgtttctgcatttattgaaaaaggcagcgccccgctttatataccaatagcccacgcagaagggcgctttgtaatggacaaagagctgttaaagcttgttgtagaaaaaaacctaattaattatagctattgtgcgccggacggaaaaacagactccagctttccaacaaacccaaatggctcaatagaaaatattgctgctcttgggaacactgctgggaacgccatggcaattatgccacacccagaaagaacaattaatggtgagggagactcaatt

SEQ ID NO: 318085 - DNA, 409 bp, Unknown
  Bacterial polypeptide expressing nucleotide sequence isolated from the Sargasso Sea
attaatagaaacaggattattaaaaggagctctattaagaaatagaaatttaaaatttatcaataaagacatcaatattaaagttataaataatgatactaaattttcaaataaatataaaaaagatcaagttctaaaaattaatattgcgcataatgaaggaaattattttacaaatccaaatcacttaaaagagttaaacaatgaaaatttaatagcatttaagtactgtaatcaaaatggagaaataactaaagagtctaatcctaacggctctttagaaaatattgctggaatatttaataccaagaaaaatattctaggtatgatgccgcatcctgaaagaatggtagataatcttatctctaatactgatggagtaaatttattttcaagtttacttaaataa

SEQ ID NO: 318086 - DNA, 142 bp, Unknown
  Bacterial polypeptide expressing nucleotide sequence isolated from the Sargasso Sea
ttaaagaatattgctggaatttttaataaggaaaaaaatgttttaggaatgatgcctcatcctgaaagaatgatagacaaaagtttatctggtgaagatggatctctattttttaaaaatcttttaaataatattaaatgaa

SEQ ID NO: 318087 - DNA, 261 bp, Unknown
  Bacterial polypeptide expressing nucleotide sequence isolated from the Sargasso Sea
aatgaaatcatcagtaattatttttccaggttcaaattgcgatagagacatggacgttgctttaaaaaagtttggttttaaaaatcaaatggtttggcataacgaaaaatccataccaaaaagtgacttaattgttttgcctggtggtttttcatatggagattacctaagatgtggaagtatagcgtctaaatcaaacattattaaatctgtagtagattttgcaaactcaggaggattagttttgggaatttgtaatgg

SEQ ID NO: 318088 - DNA, 424 bp, Unknown
  Bacterial polypeptide expressing nucleotide sequence isolated from the Sargasso Sea
ctttcaatactcgtggaaacaggtttggttcctggtgtcttgttaaggaataagtatttagaattcatttgcaaaaatgtttttataaaaattgacaataaagaaaatccttattttaaaaatcttgataaagatgtttttgaatttcatatagctcacaatgagggtaattatttttgtacgaaagatcaacttaaggaaattgaggataatcatcaaatagcaatatattactgtaataacaagggtcatactgaagaaaaatttaaccctaatggatcaacaaaaaatattgctggaatttttaataaagaaaaaaatgttttagggatgatgcctcaccctgaaagaatgattgatcaaagtttatcaggtgaggatggttctattttttttaaaaacttaattaataatttaaaataat

SEQ ID NO: 318089 - DNA, 829 bp, Unknown
  Bacterial polypeptide expressing nucleotide sequence isolated from the Sargasso Sea
aaaggtaagttagctcatttaaaaaaagcaagaccaggagacgccattattatggtaggtggaagagttggtaaagatggaatccatggagcaacattttcttctgaagagctagatacaaaaagtccagttactgcagttcaaatcggagatccaattactcaaaaaaaattttctgatgtgattataaaagaacttagagatgaaaatttatataatagtataaccgataatggagcaggtggtctctcctcatctgtcggagaaatggccaaagaggcaggaggatttgtagttgatttagatttggttcctttaaaatatacaggtttacagccttgggagatatggatttcagaatctcaagaaagaatgaccatggcagtaccacttaaaaatcaaaaaaaagttatagaattactaaataaacgaggtgtagaagcttcagtaatagggaaatttgtaaaaaaaaaatctgctattgttaaatataaagatagcgaagttcttaatatggatatgaattttcttcacgaaggatacccaaaaaaaattttgaaaagtaaaaaacctaatatgattttaaaaaaaaatatgtttttaaataaaaaaaattatagagatattttaataaatatattatcaagcccaaacattacttccaaagaatttattagctcacagtacgaccatgaagtacaaggaacttctgttataaaacctctccagggagtcggtagggttttttctgacgctacggtaataaaaccactttttacttcggagagatgtgttgctgtatctcaaggccaatatatcccaaacttat

SEQ ID NO: 318090 - DNA, 269 bp, Unknown
  Bacterial polypeptide expressing nucleotide sequence isolated from the Sargasso Sea
aatgaaatcagctgttattatttttccaggctcaaattgtgatagagacatggatgtggcgctaaaaaaattcggctttaaaaatgagatggtatggcacgatgatgaacaattacctaaatcagacttaattgttctaccaggaggattttcatatggtgattatcttagatgtggaagtatagctggaaaaagtaaaattataaaatctgttatagattttgcagcaaaaggtggattagttctaggtatttgtaatggttttcaaa

SEQ ID NO: 318091 - DNA, 350 bp, Unknown
  Bacterial polypeptide expressing nucleotide sequence isolated from the Sargasso Sea
aaatgttcatgtaaaagttaaggataagaagaataaatattttaataatatcaaaaaggatattctagaacttcatatagcccataatgaaggaaatattttttgctcaaaggatgaaattaaatccttagaagataacaaacaaattgcagttacttactgtgatcaaaaaggtatagaaaatgatgaaaataatccaaatggtgcattaaaaaacattgcaggtatttttaataaaaataaaaatgtattaggaatgatgcctcatcctgaaagaatgattgataaatatctttctggtgaagatggttctttattttttgaaaatcttttaggaaattttaaataat

SEQ ID NO: 318092 - DNA, 283 bp, Unknown
  Bacterial polypeptide expressing nucleotide sequence isolated from the Sargasso Sea
ttggacttctatagcacataatgaaggaaactatttttgttcagaagatgaattgaaaaatttagaagataataatcaaatcgctgtagcatattgtaatgaaaaaggatcagaagaagaaataaacaaccctaacggtgctcttaagaatattgcaggaatatttaataaaaataaaaacgttcttggaatgatgccacatccagagagaatgattgataaatatttatcaggagaagatggttctttgttttttgaaaaccttttaggaaatttaaactaa

SEQ ID NO: 318093 - DNA, 828 bp, Unknown
  Bacterial polypeptide expressing nucleotide sequence isolated from the Sargasso Sea
cctaaaaaaaaaatattattaaaagatttaaaaaaagttaaatttgatgaaactttgataaaaatattatcatctccaaatcatacaaacaaaaaatggataacggaacaatatgatcagatggttatgtgtgatacattacaaagatctggctctgatgcagcagtaataagagttcatgataaaaataaagctattgccgtaactgtagactcttcagcaaattattctaaatcacatcctttaactggaggaaagcaagtagtttgtgagagtcgaagaaatctaattgctgtgggagctaaaccaattgcaataactaactgtcttaattttggaaaccccgaaaatcctaaaataatgggggaatttgcagaaacaattataggaatgaaggaagcatgtgaatttttagattaccccgtagtttcgggaaatgtttcattttataacggcacaaaccaaaaaaatatttatccaactccagttataggtggtgttggattaataaaaaaaattaaaaaacctattggaagtttttttaaagaagaaaatagtgtagttttattagttggaaaaacttttggtcatttataccaaagtgctttttttgatgaaatctactcaattaaagatggtcctccacctgaaataaacttactaaatgaaaaaaacaatggtgattcagttctaaagctgattactgatgggttggttttgtctgctcatgatgtttcaactggcggattaattgttggcctcgcagaaatggctatgggttcaaattacggaataaaaatcgacaaacctaagaaacttgccaattta

SEQ ID NO: 318094 - DNA, 151 bp, Unknown
  Bacterial polypeptide expressing nucleotide sequence isolated from the Sargasso Sea
aaatggtgcaataaaaaatattgccggaatatttaatgaaaaaaaaaatattttaggaatgatgcctcacccagaacgaatgatagatcaaagtttatctggtgaagatggctcaatattttttgaaaatttattaaagaatttgaaataa

SEQ ID NO: 318095 - DNA, 900 bp, Unknown
  Bacterial polypeptide expressing nucleotide sequence isolated from the Sargasso Sea
actggaaaattggcataaagtaggttttgaaattcaatctctaagagataaccctgtcacagcagaggcggaatttaaaaacgacacagatatcaataattcaggattgagaccgaaaataaatttttctatacctaaaaaaattcaactaaatagtactagacctagagttgccatactaagagaacaaggagttaatggtcaaaatgagatggctgcagcttttaatgaagttggttttgactgcattgatgtacatatgactgatctgatttcagctagacataccctagctgaatttgaaggtttagtagcttgtggaggattctcatatggtgacgtcctaggtgcagggggtggttgggcaaatagtattctctttaatgaagacttaaggaaacaatttggagacttttttcataacgaaaatgtattttcattgggagtatgtaacggatgtcagacattgtccttattaaaatctttaataccgggtgcgactaattggccagatttcaagagaaataaatcagagaaatttgaagcgagattagtgcaagtttctgtaaaagaatcaccttcaatcttctttaaagatatgggagattcgattatcacagttccagtggctcatggtgaaggtcgagtagatgcatctgacagagatatttctgaattaaataaaaatcatcatacgacgattacatattcagatgataaagggagctttactgaaaattaccccgcgaatcccaatggatctttagatggtatcgctggagtaactaacatcagtggaacggttactattatgatgccccatcctgaaagagcttttctaaaagatcaatattcttggagtcctgatgaatggacccattacagtcctttggataaatt

SEQ ID NO: 318096 - DNA, 133 bp, Unknown
  Bacterial polypeptide expressing nucleotide sequence isolated from the Sargasso Sea
attgctggaatttttaacaaagaaaaaaatgtgttaggaatgatgcctcatcctgaaagaatgattgatagtagtttgtctggtgaagatggatctttattttttaaaaatttgataaataatattaaataat

SEQ ID NO: 318097 - DNA, 900 bp, Unknown
  Bacterial polypeptide expressing nucleotide sequence isolated from the Sargasso Sea
tcatactgttatgggagatacaatacaaaaaccaggaggtgacgctggtgttgtaagagttcacggaacggataaagcaattgctgcttcagtggactcttctgcagtatattgttgggcacatcctttaactggtggaaaacaagtagtttgtgaaagtttcagaaatcttatttctgttggtgccaaaccaattgcaattactaactgtttaaattttggaagtcctgaaaatgaagaaaatatgggtgagtttgttgaatgtgttcaaggtataggtgaagcaagtgaatacctgaagttccctgtcgtgtctggaaatgtatccttctacaaccaaacaaaaaacgagggtataaaacctacgcctacaattggtggagttgggttaatcaaaaattataagaatatggtcactatggagtttaaagaatttgacaatttggttttagttattggaaaaaccgagggacatattgatcaaagtttatttgcaagaaatgttttagatgagaaaaatggacctccgcctgaggtaaatctattcaatgaaaaaaataatggagaaacattactgaaattgattgataatagtttgataaaaagtgcacatgatgtttcgttgggcggtataattactgcagtagcaaaaatgtgtattaaaggaaaaaaaggaatatatattaaaaaaccaaaatatcttattaatgaaatagaatacttgtttgctgaagatcaaagcagatatattatagaaataaacaaaaaagattttaaaaaagtagctgatatattgaataaaaatgcagtccattttgatgaacttggcacaactattgaaaatgaactatatattaatgataagacaaaagttacaattgacgaattggcaacttcgaa

SEQ ID NO: 318098 - DNA, 562 bp, Unknown
  Bacterial polypeptide expressing nucleotide sequence isolated from the Sargasso Sea
aatgaaatcatcagtaattatttttcctggctcaaattgtgatagagacatggatgtggcattaagaaaatttggctttaaaaatcaaatggtttggcatgacgatatcaaccttccacaaagtgatttaatagttttgccaggtgggttttcttacggtgattatctaagatgtggaagtattgctggaaaatcaaaaattattaattcagtcataaactatgctaattctggtggattagttattggaatttgcaatggatttcaaattttaactgaaactggtcttttatcaggagttttacagcaaaatgaaaacataaaatttatttgtaaaaatgtttttgtaaaaatcaataacatcgaaaataaatactttaaaaatattaaaaaaaatattttaaaacttcatatagctcataatgagggaaattacttttgttccaatgatgaattgaaatctatacaagacaataatcagattgctttatcttattgtaataaaaatggagaagtaaatgaagaaaataaccctaatggagctattgaaaatatagctgga

SEQ ID NO: 318099 - DNA, 159 bp, Unknown
  Bacterial polypeptide expressing nucleotide sequence isolated from the Sargasso Sea
ctaatcctaatggttctataaaaaatattgcaggtattttcaataaagaaaaaaatgttttaggaatgatgcctcatccagaaagaatgattgatcagagtttatcaggagaagatggttctgtattttttgaaaatttaatcaaaaacgtcaaataat

SEQ ID NO: 318100 - DNA, 559 bp, Unknown
  Bacterial polypeptide expressing nucleotide sequence isolated from the Sargasso Sea
aatgaattcatctgtaataacttttccgggatcaaattgtgatagagatatggatgtagctttaaaaaaatttggttttaaaaataaaatggtttggcacaatgattttgaacttcctaaaagtgatttggtagttctaccaggtggtttttcttatggtgattatttaaggtgtggaagtatggctgcgaagtctaaaataatgaagtcagtaattaattttgctaattcaggtggtatggtactaggtatttgtaatggattccaaatactgactgaaacagggttgctgccaggaattcttttgagaaataaaaatgctaaatttatttgtaaaaatgtctttgtaaaaattaatgacaataaaaataattattttaaaaattttaaaaaaaatacacttgaacttcatattgcacacaatgaaggaaattatttctgctcagaagatgaactaaaaaaaattaataacaataatcaaattgccttactttattgcgatgaaaacggtgaagttaacataaattctaatccaaatggtgctttccaaaaatatgct

SEQ ID NO: 318101 - DNA, 400 bp, Unknown
  Bacterial polypeptide expressing nucleotide sequence isolated from the Sargasso Sea
aatgaaatcatccgtaataacctttcctggttcaaattgtgatagagatatgaatgttgctctaaataaatttggatttaaaaataaaatggtctggcataatgataatgaattacctaagagcgatttagtagtattgccaggtggtttttcttatggcgactaccttagatgcggaagtatggcatcaaaatctaaaataatgcaatcagtaatcaattttgcaaaatcaggtggattagtaatgggaatttgtaatggttttcaaatattagtagaaactggtttggtccctggtgttttgttaagaaataagtatttagaatttatatgtaaaaatgtttttgtaaaattagacataaagaaaatctctatttttaaaatctttgaaaagatgttt

SEQ ID NO: 318102 - DNA, 529 bp, Unknown
  Bacterial polypeptide expressing nucleotide sequence isolated from the Sargasso Sea
aatgaaatcatctgtaataatatttcctggttcaaattgtgatagagatatggatgtagctctaaaaaaatttggttttaaaaatcaaatggtttggcacaatgatgatgaaataccaaaaagtgatctaattgttttaccaggtggtttttcttatggtgactatctaagatgtggaagcattgctggaaaatcaagaattattaaatctgttattgattttgcaaattctggaggattggttttaggaatttgtaatggttttcaaatacttactgagacaggattattgcctggaatacttcaacaaaataaatatttaaattttatttgtaagaatgtttttgtaaaaattaaaaataatgaaaataaattttttaaagacatcaaaaaagaaattttagaacttcatattgctcacaatgaaggcaattatttttgttcaaatgatgaattaaaatctattgaggataaaaggcaaatcgcagttacatattgtgatcataacggtaatgatgatgaagaaaac

SEQ ID NO: 318103 - DNA, 874 bp, Unknown
  Bacterial polypeptide expressing nucleotide sequence isolated from the Sargasso Sea
gaagcttgtcttgaactaatggctggtaaatcaataatatcaattcaagatatgggtgctgcaggcctaacttcttctagcattgaaatggcatctaaaggtgatttaggtattgaaatagatttaacaaaagttccttgtagagaggaaaatatgacaccttatgagataatgctctcagaaagccaagaaagaatgcttattgttttagaggaaggaaaagaaaatgaagcaaaaaaaatatttgataagtggaacttagactttgcggtaattggaaaaacaacaaatagtaaaaatattgaattgtttttcaaaaatgaaaaagttgctaaaattccaatagattttttagcggagaatgcacctatgtacaatcgaaaatggataaaagcaaaactcccaaaagaaaataaattttcaaaggatcaatttaaatctttaaagctcggcgattgtttaaaaaaggttttaattgatccaaatattgcagataaagaatggatctgggaccaatatgatcatacagttatgggtgatacaatacaaaaacctggagggaatgctggtgttgttagagttcatggtacaaaaaaagctgttgctgcatctgtagactcttcggcaacttattgtcatgcacatccattaacaggtggtaaacaagtggtttgtgaaagttggagaaatatgatttctgtaggcgcaaaaccaatagcaattacaaattgtctaaattttggtaatccagaaaaagagaaaaatatgggtgaatttgttgaatgtgttgaaggaattacagaggcatctaaatatttaaattacccagtagtttcaggaaacgtctctttttataatgaaacaaaagataagg

SEQ ID NO: 318104 - DNA, 907 bp, Unknown
  Bacterial polypeptide expressing nucleotide sequence isolated from the Sargasso Sea
catggccgacactttgaagattggtcggccaggtggagacgctgctatggtgcgggtacataatactaataaagctttagcgttcactagtgatagctcgcctcgatattgtgtggctgatccagtagagggtggccggcaagtggtcgcggaggcctatagaaatattacagccactggcgcgttccctcttgcaataacggataatctgaattttggtaatccagaaaaacctaaaataatgggccaatttgttggttgcattatggggatgtccgaagcatgcaaatctttggactttccagtagtgtcaggaaatgtgtcgttttataatgagactaatggagaggcaattctgccaacacctacaataggggctgttggtttaatatctgactcgtcaaaagcggtcgggataggattctgtgaggaaggcgagtctatcttattggttggcagatctaatgggcacttagaatgttctctttactcgaccataatcgaggggtttgacggcggtgttcctccaaaagttgatttgggcatggagcggtgtcacggggactttgttcgtgagatgataaattcagacctcgcttcagcatgccatgatatatcagatggcggtcttatgattgcaatatccgaaatggctttagcaggaaataaagggtgtaaaatcaactataagccaaccaatttagaactacatcaatgggcgtttggagaggatcaaggccgttatattttaactactaaaagggctgacaaagtgattatgaatgctaaaaaattaaaaatccccattcagattattggggtagtctcagggcagtctttgcactgggtaggaaatggggagtgctcgttatcggatataaggagcgctcatgagaactggttgcca

SEQ ID NO: 318105 - DNA, 778 bp, Unknown
  Bacterial polypeptide expressing nucleotide sequence isolated from the Sargasso Sea
gttggagatccatttactgaaaaacttttactagaggcttgtttagagttgatggctggagattcaattatagccattcaggatatgggtgctgccggattaacttcctcaagtattgaaatggcatcaaaaggaaaccttggtattgaaattaatttaaacaaagtgccttgtagagaaactaaaatgactccttatgaaattatgctttctgagagccaagaaagaatgttgattgttttagaaaacggtaaagaagatcatgcaaaaaaaatatttgataaatggaacttagattttgcagtaataggtaaaactactaaatctaaaaaaatagaactttattttgatgaagaaagggtagcaaacattccagttaatacattagttgaaaactctcctatgtacaatcgtaaatggaaaaaagcaaaacttcctaaaaaaaataagattaaaaaagaagatattaaacatttaaaaattattgatactttaaaaaaaattttaacaaatcctaatgtgtgtagcaaagaatggatttggcaacaatatgatcatactgtaatgggagatacaatacaaaaacctggaggagacgcaggtgttgtaagagttcatgggacagataaagctgttgctgcatcaatagactcctctgcagtttattgttgggcacaccctttaactggcggaaaacaagtagtatgtgaaagttttagaaatcttatctctgtaggggccaaaccaattgctataactaactgtttaaattttggaa

SEQ ID NO: 318106 - DNA, 376 bp, Unknown
  Bacterial polypeptide expressing nucleotide sequence isolated from the Sargasso Sea
aataagtttctaaattttatatgtagcaatgtttatgtaaaagttaaagacagacaaaataaatatttcaaagatataaaaaaagatgttttagaacttcatatagctcacaatgaaggaaattacttttgtagtgatgatgaattaaaatcattggaggataataatcaaatagccgtaacgtattgcggagaagatggtacagaaaatgagaaaactaatcctaacggagcaattaaaaatatagctggaatatttaatgaaaataaaaatgtattgggaatgatgcctcatccagaaagaatgatagataagtatttatcaggtgaagatggttcattatttttcaaaaatattttagataattttaaataat

SEQ ID NO: 318107 - DNA, 167 bp, Unknown
  Bacterial polypeptide expressing nucleotide sequence isolated from the Sargasso Sea
aatgagatcatcagtcattatttttccaggatcaaattgtgatagagatatggatgtagctctaaaaaaatttggttttaaaaatcaaatggtttggcacaatgatcaatctatttcaaaatcagatttgatagtattgcctggtggcttttcttacggtgattact

SEQ ID NO: 318108 - DNA, 928 bp, Unknown
  Bacterial polypeptide expressing nucleotide sequence isolated from the Sargasso Sea
tttaaaagtaaaaaagtaaagtttaaagactttaaaaaaataagttttgatgaggctttttttaaaataatatcatcaccaaatcaatcaaataaaagatgggttacagaacaatatgaccaaatggtgatgggcgatacaatagagcgatctggaacagatgcagcaattattaaaatacataataaggataaagcaatagctgttactgtagattcttctgctaattattgtaaatcatttcctttaaatggtggtaaacaaattgtgtgtgagagttggagaaatttaatatctgtaggagctaaaccaatagctattactaattgtttaaattttggaaacccagaaaatcctgaaatcatgggagaatttgcagaaaatatacttggtataaaagaagcgtgtgaatttttagattatcctgtcgtatctggaaatgtttctttctataacggcacaaataataataatatttaccctacaccagtaattgggggtgttggattaattaaaaatttgaataaaattcaaaatcatagatttaaaaaaattgatagcaatataatagttgttggtaaaacatttggtcatcttgatcaaagtgtttttataaatcaaatacataatttacatgatgggatgccgccagatgtaaaccttttaaatgaaaaaaataatggtgaaatggtttttaaacttattaatactggtattataaactcagtacatgatgtatcgactggtggtatcattttggcattagctgaaatgtctattagttctcaaattgggataaaaataaataaaccaaaaaaattgacaaacatatttgaatatttttttggtgaagatcaaagtagatatataattgaagtagataagaaaaattattcaaaacttgagtcattatttaaagaaaaataat

SEQ ID NO: 318109 - DNA, 199 bp, Unknown
  Bacterial polypeptide expressing nucleotide sequence isolated from the Sargasso Sea
aatgaaatcatcagtaattatttttcctggttcaaattgtgatagagatatgcatgttgcattaactaaatttggatttaaaaataaaatgatttggcataacgatgctgaattacccaagagtgatttaattgttttgcctggaggtttttcttatggtgactatttgagatgtggaagtattgcggggaagtctaaa

SEQ ID NO: 318110 - DNA, 718 bp, Unknown
  Bacterial polypeptide expressing nucleotide sequence isolated from the Sargasso Sea
tcatgtaatggaattgctgaagcctgtaaagctttagaaactcctgttacaggaggtaatgtatctttatataatgaatctaaaaataaagaaaatctaattacccctataaatcctactcctgttattggaatggttggaaggatagataatgtcgaaaaagctataagtagtgaatggaaaaatattgaagatcaaatctggttaattggttcttccaaatcagaaataaaaattgcagctagttcttatttggaatattttcatggagaaattacaggtcggcctccaaaaatagatttgttggatgaaaagttttgccagagttttttaagaaatgcgattttaaatagccttgtagtttcttctcacgatataagcgacggcggtttagctatagctttagcagagtcttgtattttatccggaaggggtgcaactatagaattagagaaagatttaaatagagttgataatttattgtttgccgaagggggatcaagaattatattttcaattagtaaaattaaacaaaatgaatggtttaattatctaaaacaaaatcaaataaaattcccatcaagtgtttatgtaaaaaaaataggatacgtatctgctgacttgctgaatataaaaatcgacaaaaaaaatatttgcaatattagggttgaggaattatccgaaaaatttaataatagtatttcagattacgtttaaa

SEQ ID NO: 318111 - DNA, 916 bp, Unknown
  Bacterial polypeptide expressing nucleotide sequence isolated from the Sargasso Sea
tacgaaattatgttatctgaaagccaagaacgaatgcttatagttcttgaaagtggcaaagaagaaatagccaaaaaaatatttgataaatggaatttagatttcgctgtaattggaaaaacaactaacacaaagaatattgaattattttttgataacaaacaagtggctaatattccagtaaatacattggttgaaaactcaccgatgtatgatcgaaaatggaaaaaatcaaaattaccaaaaaaaaataaaataaataaaacaatatttaaaagtctaaaaatcaaagatacgttaaaaaaaatcttatccagccctaatgtctgtagcaaagaatggatttggcaacaatatgatcacaccgtaatgggtgatactatacaaaaacctggcggagactctggtgtagtaagagttcataaaacagataaagctatagctgctacagttgactcatctgcaacttattgttgggcacatccactcacagggggaaagcaagtcgtttgtgaaacttggagaaatttaatctcagtaggtgctaaacctatagcagttactaattgtttaaattttggaagcccagagaaagaagaaaatatgggtgagtttgtagaatgtgttcaaggtataagtgaagcatgtaaatatttggattatcctgttgtttcaggaaatgtatctttttacaacgaaactaaagacattggaattaaaccaactcctacgataggaggtgtgggtttaattaaagattacaaaaaaatgattacaatggatttaaaggaaatcgacaacatcatattagtgattggtaaaactgagggtcatatagatcaaagtttattatcaagaataatattaaatgaaaataatggaccgccacctgaggttaatttatttaatgaaaaaa

SEQ ID NO: 318112 - DNA, 224 bp, Unknown
  Bacterial polypeptide expressing nucleotide sequence isolated from the Sargasso Sea
gcgcctgggcggcgatggacaaattccattccgctatacagatagcagcaccattggcccagcaaatccgaatggcgcatcccacgacattgccggcgttatttcaaaaaacgggcgggttcttggtatgatgccacatcccgaacgagccatgtcagatttgcatggcagcactgatggtgcccatttcctgttaaaatcgcttgaggcgctggtatcatgac

SEQ ID NO: 318113 - DNA, 851 bp, Unknown
  Bacterial polypeptide expressing nucleotide sequence isolated from the Sargasso Sea
atctgtcgactcatcagcaaattattgtaaagctgatccaaagtctgggggaaaacaaattgtttgtgaaaattggagaaatttaatatcagttggcgctaaacccttggcaataactaactgtttaaactttggaaacccagaaaaaccaaaagttatgggagagtttgtagaatgtattgatggaatgagagaggcatgtgaatatttagactttccggttgtttcgggaaatgtctctttttacaacgaaacaaattctaaaagtatttatcctacacctgtaattggtggtataggattaattcaaagtttaaaaaaagttataaacataaaaacaaaaaatattggtagccttattatggttataggcaaaactcttggccatataggacaaagtgcttttttattagaaaatttttctatagatcaaggccctccacctgagattaattttgaaaacgaaaaaaataacggtttagctgttttaggattgattaaagataatttaattttctccgcacacgatatttcttcaggcggtatgctagtttctttggctgagatgtcaatctcatctggttttggattaaaagtttttaaaccaaaaaaacttataaattctctggaatacttttttggcgaagatcagggaagatatcttgtggaaatctcaaaaactaaccaaaaaaaaattgaaaaatatttaaaggaaaacaacgttttttttgaaattgtagcagaggtacaagataatacatttgagttagaaaaaacatttagtttaaaaacaaaagaacttcaaaattacaataatcagtggtataataaatttaatgccattaactaaa

SEQ ID NO: 318114 - DNA, 952 bp, Unknown
  Bacterial polypeptide expressing nucleotide sequence isolated from the Sargasso Sea
gcctcccccagaatacgaccgtccctacgatgaaatcaaagcaccggcgacgatccgatctgagaatataccattccacaaagacatcgctgcggcattgaataaattgatgtcatcacctgacatctgctcaaaacgctggatatgggaacaatatgaccacatggtcatgggcgataccgtccagcggccaggtggtgacgcggcaattatccgcattcacggcaccaccaagggcctcgcggtcaccactgattgcacgccgcgttattgtaaagctcatccagagaccggcggacgtcaggccgtcgtcgaagcttggcgaaatctgacggccgtgggcgcaatgcctttggcgcttacgaataaccttaattttggaaatccagaacgccgtccaatcatggggcagcttgtaggttgcattaaaggaattggtaccgcagcacgggcacttgaatttccggttatttcggggaatgtttcgctctacaatgagacaaacggcgaagcaattctgccgacccccgttatcggcggcgtagggctaatcgacgatatcaacgcaaccgtcggtataggtattccgggcccaggctttacgatgttgctgatcggtgagaccgatggttggcttggcaactcgctttatttacgggaacttttccaaggggaagaaggcgcgccgccccccgtagatttggaggtagagcgtcttcacggtaatttcgtccgctcagaaatccgctcagggggtattgccgcttgtcacgacttgtcggatggtggccttctcgtaggcctcgctgaaatggcactcgccggaaaatgcggtgtgacactcgactactcgagcgatggcccactgcacgcctggtacttcggcgaagatcaagcgcgttatctctgcgcaacaaaaaagccagacacactttggcgaacgccgaaaaag

SEQ ID NO: 318115 - DNA, 811 bp, Unknown
  Bacterial polypeptide expressing nucleotide sequence isolated from the Sargasso Sea
aaaaaaaaataggattgcaaaagaggatattaaacatctaaaaattattgatgttctgaaaaaagttttggcaaatccaaatgtttgtagcaaagaatggatttggcaacaatatgatcacactgttatgggagatacgatacagaaacctggtggagacgctggtgttgtgagggttcatggaacagataaggctgttgctgcttcagtagactcctcggccgtttattgttgggctcatccattaacaggtggaaagcaagtagtatgtgaaagtttcagaaatttaatatctgttggtgctaaaccaattgcaatcactaattgtttaaattttggtagtcctgaaaaagaggaaaatatgggtgagtttgttgaatgtgttcagggaattggagaggcaagcgaatatttaaagtttccagtcgtttctggaaatgtatcattctataaccagacaaaagataaaggtataaaacctacacctgcaataggtggaattggattaattaaagattataaaaatatgatcactatggaatttaaagaagttgacaatttagttttagtaattggaaaaactgaaggacatattgatcaaagcttatttgcaagaaatattttagatgaaaaaaatggaccaccacctgaagtaaatttatttaatgaaaaaaacaatggagaaacagttctaaaattgattgaaaataatttaattaaaagcgcacacgacgtttctttaggtggcataataactgcagtagcaaaaatgtgtattaaaggaaaaaaaggaataaatataaaaaaacct

SEQ ID NO: 318116 - DNA, 364 bp, Unknown
  Bacterial polypeptide expressing nucleotide sequence isolated from the Sargasso Sea
atgagatcttcagttataatctttccaggatctaattgtgatagagatatggatgttgctcttaaaaaatatggttttaagaatcatatgatttggcataatgatattaacctccccaaatgtgatttagtggttcttccaggtggtttttcatatggcgactacttaagatgtggaagtattgctggtaaatctaaaattattcaatctgttattgattttgctaaatcaggtggattagttttggggatttgtaatggttttcagattttaacagaaactggcttgctaccaggcgtattacaacaaaataaatatttgaattttatatgtcgaaatgttcacgttaaagtaaagacaaaaa

SEQ ID NO: 318117 - DNA, 793 bp, Unknown
  Bacterial polypeptide expressing nucleotide sequence isolated from the Sargasso Sea
agaactaatggctgacaattcaattatagccattcaagacatgggagctgcaggattaacttcttcaagtatagaaatggcatcaaaaggaaagttaggcatagaacttgatttaaacaaagtcccatgcagagaagaaaagatgactccttatgaaattatgttatctgaaagccaagagagaatgttaattgtgcttgaaaaaggtaaagaaaattacgcaaaaaaaatatttgataaatggaatttagattttgcagtaataggaaaaacaactaactctaaaaaaattgaattaatatttgataataaaaaggttgcagaaatacctattaatctactagcagaaaatgcaccaatttatgatagaaaatggaaaaaaaataagttaccgcaaaaaataaaatttgataaaaatgagtttaaatctttaaaattatcagattgtttaaaaaaaatattaagtaatccaaatgtttgtgacaaacagtggatttgggatcagtatgatcatacagtaatgggtgatactattcaaaagccaggtagtgacgctggcattgtaagagtccacggaaccaaaaaagccattgctgcatctgtagactcttcagcatcatattgtttttcacaccctctcacaggtggaaaacaagttgtttgtgaaagttggagaaatctaatttcagttggagctaaaccaattgcaattacaaactgtttaaattttgggaacccagaaaaagaaaaaaatatgggagaatttgttgaatgtgttgagggtataactgaa

SEQ ID NO: 318118 - DNA, 788 bp, Unknown
  Bacterial polypeptide expressing nucleotide sequence isolated from the Sargasso Sea
ctctcagaaagccaagagagaatgcttatagttttagaggaaggaaaagaaaatgaagcaaaaaagatatttgataagtggaacttagactttgcagtaattggaaagacaacagatagtaaaaatattgaattgttttttaagaatgaaaaagttgctgaaattccaattgattttttagcggagaatgcacctatgtatgatcgaaaatggataaaagcaaaacttccaaaagaaaataatttttcaaaggaacaatttaaatctttaaaacttggtgattgtttaaaaaaaattttaattgatccaaatattgctgataaagaatggatctgggaccaatatgatcatactgttatgggggatactatacaaaaacctggagggaatgctggagttgttagagttcatggcacaaataaggctgttgctgcatctgtcgactcttcggcaacttattgtaatgcacacccattaacaggaggtaaacaagttgtttgtgaaagctggaggaatatgatttctgtgggagcaaaaccaatagcaattacaaattgcctaaactttggtaacccagaaaaagaaaaaaatatgggtgaatttgttgaatgtgtagagggaattacagaggcttctaaatatttaaattacccagtggtttcaggaaacgtctccttttataatgaaacaaaagataaaggaattaaacccacaccctcaattggaggtataggactattatctgactacaagaggatgatgacaatggaattaaaagatgaaggtaa

SEQ ID NO: 318119 - DNA, 204 bp, Unknown
  Bacterial polypeptide expressing nucleotide sequence isolated from the Sargasso Sea
gatggataattttactgtaggagttgttgtcttccctggttctaattgtgatcgtgatgtttcatgggcattggaaggttgtttagacataagaacaaaatacttgtggcatgagtcttcagatttaagcgatgtagatgcaatagttttacccggaggatttagctatggtgattatttaagatgcggagcaatagcgagatt

SEQ ID NO: 318120 - DNA, 375 bp, Unknown
  Bacterial polypeptide expressing nucleotide sequence isolated from the Sargasso Sea
tatggcattaacaacagttgaaaaacagaatattgaaaacttattaaatcgccctccgtctgaagttgaattatctatttttgatacaatgtggagcgagcactgttcttataaaagttcaaagccagtacttagaacattgcctacaaagggaccaaacattatgttaggtgttggagaagattctggaattatagagtttgctacagttgatggacataaatatgggattgcggtttcacatgagtcacataatcatccatcacaagtgttacctgttgaaggagcggcaacaggtgttggtggcgttgttcgtgatgtatattgtatgggcgccgatgtcattggtgttttagattcactccattttggtgt

SEQ ID NO: 318121 - DNA, 340 bp, Unknown
  Bacterial polypeptide expressing nucleotide sequence isolated from the Sargasso Sea
cctggtggcttttcttatggtgattacctaagatgtggaagtatagctggaaaatcaaaaattattaaatctgtgattgattttgcaaattcaggtggattagttttaggaatttgtaatggttttcaaattctaacagagacaggtttattacctgggatacttcaacaaaataaatatttaaattttatttgtaagaatgtttttgtaaaaattaaaaataaagaaaataaatatttcaagaatatcaaaaaagatattttggaactgcacattgcccataatgaaggaaattatttttgctcaaaagatgaattaaagttaattgaagataataaaa

SEQ ID NO: 318122 - DNA, 305 bp, Unknown
  Bacterial polypeptide expressing nucleotide sequence isolated from the Sargasso Sea
gatgagatcacatgtcgttgtttttccaggttctaactgtgatcgcgatattgctgtatcaataaagaatatctcaggtaatgctccagagatggtatggcataaagaaacatcaataaattcttctgaccttatagtggttcctggaggattctcttatggtgactatctgcgttgtggagcgatagcttcaacatctccaataatgaaagatgtagtaaaaaaagcacatgcaggtgtacctataattggtatatgtaatggatttcaaatattaatcgaaagctctctccttgacggggctt

SEQ ID NO: 318123 - DNA, 562 bp, Unknown
  Bacterial polypeptide expressing nucleotide sequence isolated from the Sargasso Sea
aatgaagtcatctgtaataatttttccagggtctaattgtgatagagatatggatgttgctttaaaaaaatttggttttaaaaatcaaatggtttggcacaatgatcttgaaatacctaaaagtgatttaatcgttcttcctggtggtttttcttacggggactatttgcgatgcggaagtattgccgctaagtcaaaaataatcaaatcaataattgagtttgcaaattctggaggtttgttattaggaatatgtaatggatttcaaatattaacagaaacaggtttgttgccaggcattcttcaacaaaataaatatcaaaaatttatatgtaaaaatgtttatgtgaaagtaaacaataaagaaaataagtactttagaaatattaaaaagaaaatattagaattacatatagctcataatgaaggaaattatttttgctcagaagaagagttaaagtctttaaataataacaatcaaattgcagttacttattgcagtgaggatggtaagaagtctgaagaattcaacccaaatggaacgttaagcaatatcgctggc

SEQ ID NO: 318124 - DNA, 247 bp, Unknown
  Bacterial polypeptide expressing nucleotide sequence isolated from the Sargasso Sea
tttgctcaaagatgagttgaaatcattaaatgacaataatcaaattgcagttactttttgtaacaaaaatggtaacgaaaatgaaaatgataacccatatggagcattaggaaatatagctggaatatttaataaaaacaaaaatatcttaggaatgatgcctcatcccgaaagaatgattgatgaatatctatcaagtaatgatgggagttttttctttgaaaacttaattgaaaatttaaaataa

SEQ ID NO: 318125 - DNA, 247 bp, Unknown
  Bacterial polypeptide expressing nucleotide sequence isolated from the Sargasso Sea
atgattgaagtaaatgaaaaaattgcaatagatcacggtctaaaaaaagatgaatataaaaagatatgtgaacttttaaaaagaaatccaaacctaacagaattgggaattttttctgcaatgtggaatgaacattgctcatataaatcatcaaaaaaacatttaaagaaacttaacacaaaaggtaaaaaagttattcaaggtcctggagaaaatgcaggtgttatcgatattggtgatgatgatg

SEQ ID NO: 318126 - DNA, 314 bp, Unknown
  Bacterial polypeptide expressing nucleotide sequence isolated from the Sargasso Sea
aatgaaatcatctgtaattatatttcctggttcaaattgtgatagagatatggatgtggctcttaagaaatttggttttgaaaatcaaatggtttggcacaacgatgctgaaattcccaaaagtgatttaatagtattacctggaggtttttcttatggtgattatcttagatgtggaagcatagctggaaagtcaaaaattataaaatcagttatagattttgcaaattcaggtggattagtacttggtatttgcaatggttttcaaatttctactgaaacaggtctactccccggaatacttcaacaaaata

SEQ ID NO: 318127 - DNA, 317 bp, Unknown
  Bacterial polypeptide expressing nucleotide sequence isolated from the Sargasso Sea
aatgaaatcgtcagtaataatttttccaggttcaaactgtgatagagacatggatgttgctctcaaaaaatttggttttaaaaataaaatggtttggcatgatgacaatgaattgccaaaaagtgatctaattgtattgccaggaggtttttcttatggggattacctgagatgtggaagtatagccggaaaatcaaatataataaaatctgtaattaaatttgctcaatcaggaggtttagttttaggtatatgtaatgggtttcaaatattaactgagacaggactattaccaggcattttacaacaaaataaga

SEQ ID NO: 318128 - DNA, 226 bp, Unknown
  Bacterial polypeptide expressing nucleotide sequence isolated from the Sargasso Sea
atgaagtcatcagtaattatctttccaggttcgaactgcgatagagacatgcatgttgctttaaaaaaatttggtttcaataataaaatggtttggcacaacgacactggactaccaaaaagtgacttaattgttttaccaggaggtttttcttatggcgattatttaagatgtggaagtattgcgggtaaatcaaaaatcattaactctgttatagaatatgcaa

SEQ ID NO: 318129 - DNA, 508 bp, Unknown
  Bacterial polypeptide expressing nucleotide sequence isolated from the Sargasso Sea
aatgaaatcatctgtcattacttttccaggttcaaattgcgacagagatatgaatgtggctcttaaaaaatttggatttaagaataaaatggtttggcatgacgatactgaacttccaaaaagtgatttgatagtgttacctggtggtttttcatatggtgattatttaagatgtggaagtatggcttctaaatctaaaattatgaaatcagtaattaattttgcaaactcaggtggtatggtaatgggaatttgtaatggttttcaaatattagttgaaacaggtttggttcctggtgtgttattaagaaacaaatatttagaatttatctgcaaaaatgtatttttaaaaattaacaataaatcaaataagtattttaacggtattaaaaatgatgttttagaatttcatattgctcataatgaaggaaattatttttgtacaaatgatcaattgaaagagattgaagacaatgagcaagttgcaataaattactgtgatgaaaat

SEQ ID NO: 318130 - DNA, 464 bp, Unknown
  Bacterial polypeptide expressing nucleotide sequence isolated from the Sargasso Sea
catgagaattgctataattgtttttcctggctctaattgcgaccgtgacatcttggttgcaatagaaaatattacaggcaggaggccagctttaatttggcataaacagaacaatcttgaccctattgatctggctattcttcctggtggattttcttttggtgattatttaaggtgtggcgctcttgctgcacattcgccaattatggattcactacatgaccacgcagctagaggaggctcaatattaggcatttgtaatggttttcaaattttgattgagtcaggtatgttaccaggatatcttgcgcgtaataaagaacttaaatttatttgcaagcaaaccactttatcagtcaatgcggaatcaaattgtgaactaacagcatcacttgatagtaaaaaaaccctaagaattccagttgctcataatgagggcaatttttttgctgattctgaaactc

SEQ ID NO: 318131 - DNA, 289 bp, Unknown
  Bacterial polypeptide expressing nucleotide sequence isolated from the Sargasso Sea
aataatgaagtcataaaattaaatattgcgcacaatgagggtaatttttttactgataaaagacatttaaaagaattagaggataatgatttgataccaataaaatattgtgatgaaaaaggtattgtaaataataaatctaatccaaatggttcattaaataatatcgcagggatttttaataaaaataaaaatatattgggtatgatgcctcatcctgagagaatgtcagatagaatttgctccgacgagaatggtctacctctttttttaagtttgatgaattaat

SEQ ID NO: 318132 - DNA, 793 bp, Unknown
  Bacterial polypeptide expressing nucleotide sequence isolated from the Sargasso Sea
catggttgctgttccacatttttggaatgagccttttgaaaaattaaaaaactatgacgggtatatcatcttggggggtttctcatatgaagatcggtcgcgcgctggaatcattgcgtccttagagccaattatggggcagttaaaaaaagaggtggtgatgggaaaaccgcttttgggaatctgtaatggggcacaaatactcgttgaagctggaatagtcccaggcaacaaagactgtggtacgcttgttggtttaaccgaaaacaagcgcataaaaaacaaccaaattataggaacaggatattataatacgtggtgccacatccaggccaaccaaaaaagtgattctgcgtttattgaaaaggacagttctcctctttgtgtaccaatagcgcacgcagaggggcgttttgtaatggacaaagaaatgttagagattgttacagagcacaacctaatcaactacaaatattgtacagaaagcggggaggttaatgacaactttccaaccaacccaaacgggtcagtgcagaacattgctgcgcttggaaatgttgctggaaacgccatggcaattatgccccacccagaaagaacaaccaacggagggggcgattcggtttttagagcaatgcacagttttataaagaaagaaaaagcttttagctataaggccctacaacattcagcaaaaaaaattgtggtatccccttttgaaaaaaagcctttaacaaaggaggttttgatatcaatggttattgcagacaatgaagccggctcggtagaaaaa

SEQ ID NO: 318133 - DNA, 223 bp, Unknown
  Bacterial polypeptide expressing nucleotide sequence isolated from the Sargasso Sea
atgaagacacatgtaattgttttcccaggttcgaactgcgacagagatgtcgctgttgcaattcaaaatattattggctcttcacctgaaatggtttggcacaaagaatcaacaatacagcaatcagatttgattgttgttccaggtggattttcttacggtgattatctacgatgtggcgcaatggcgtcaacatcacctatcatgaaaagccgtgattgaa

SEQ ID NO: 318134 - DNA, 760 bp, Unknown
  Bacterial polypeptide expressing nucleotide sequence isolated from the Sargasso Sea
gcagattttgttgcacggggtccattaattgataggcaaaaatcaataccaaaatatctatccaacatcacctcatcaccaaagaaaaaaataaaaaaatcattttctaatgttttagcgcaattactctcttctccaaatattgcaagtaaacattgggtgtttcgtcaatatgatcatgaagttggtattcgtactgtggtaaaacctggatttgatagttctgttttacgcttagataatggtaaatcattatctgtaaaaattgatggtaatccaaaacattgctatcttgatcctagacacggtgcaataggctgttttgaggaagcatgtagaaatgtggtctgtactggcgcaaacccaataggaatggttgatcatcttcaatttggtaatccagaagatcctgaaattttttggacgtttatggaatcaattgaaggaataaccgaatatgcaaagtcaatgaagattccatgtgttggtggaaaagtaagtttctataatgaaactagcgaaggtccaatcaaaccaactcctttaatcggtgttttgggattaattgaaaaatctccattattaccatcaccacctatagaaaatgatgtaattatattattgggagaaacaaaagatgaacttggtggttctgaatattatgaatacgtccataattttattggcggaattgtacctaaagttgatattcctacatcaaagaaaaatatgacatctgtgctttccttaatctcgaaga

SEQ ID NO: 318135 - DNA, 187 bp, Unknown
  Bacterial polypeptide expressing nucleotide sequence isolated from the Sargasso Sea
ctgtgatagcaagggtatcgtaaatgaaaattccaatcctaacggttcttctagcaacattgctggaatacttaatgttaaaaaaaatattttaggaatgatgcctcatcctgaaaggttaattgatccattgttatctggagaagacggttcattaatgtttgaaagtttaggacaaagatattaa

SEQ ID NO: 318136 - DNA, 706 bp, Unknown
  Bacterial polypeptide expressing nucleotide sequence isolated from the Sargasso Sea
ccaaacatcttaatgaatattccccttgctcacgccgagggcagatttgttatgccaaatggcttattagaacaattaatcaaaaatgaacagttagtttataaatattctaatgattctggtgatattattgatgaatttccgacaaatcccaatggatctgtgaataatattgccgctattagcaatagcagtggaaacgtaatggcgatgatgccccatccagagcgaactacaaacggtgatgcaattttttcttcaatgaaagaatacattgatgaaaattatcccactattaatcaaccgctaagtttttcaataactaatcataaatcaaaagaattaaatatagatgataaatcgaccgaatggattattgatttaatcattacagacaatgaagcaaagtctattaatacagcattaaatcatcttggttttgatatagaggttaatagacaaatacattgggaaataaatatagatggagaaccaactaatgttttaaataaaataattggttcgggagaactatttaattcaaataaagaatatattgtagataaaaaagaaaagtatgatgcttcatttttagtaagacctaatgaagatatatatggaagggctaaatatgaatcccttacaaatcgatttgatataaaagagatttcttatataaaacgaggagtaatatggaatataaatt

SEQ ID NO: 318137 - DNA, 868 bp, Unknown
  Bacterial polypeptide expressing nucleotide sequence isolated from the Sargasso Sea
aaacgaattcaagatggccatgttgtagggacgggctattacaacacctgggcaaacctaaaggtctctgtccccccagagagcacggcatttactagacacctcgaacatgaagaaataatccatgtcccattcgcacacgctgaagggaggtttataatcccagaagatctgctaaacgaattaattaaaaacaaccaaacagtatttcgatactgtaacgatgacggtgagatactaagccagtttccaacaaacccgaacggctctgattataatcttgctgctgtttccaactctgctgggaatatccttgcgatgatgccgcaccccgaaagaactaacttgggtgataaattattttcttctatgagagagtttataaaacaaaaagttccgataaaaaatggttcgctatcatactctacacctaaaaaaaatattaaaaattatattccagaaagacatgtgtccgagtgggtggttgatatggtaataacagataatgaagcagaaacagttcaaaatgcacttaggagaatagggattgatgtaaccatacaaaggcagcaacactgggaaatatctatctcagataattctagtgctacgctgaaaaaaattgaagatacaggtgagctttttaattcaaataaagaatacataagctctatcaagacaaacgagaatacagcttgtctccttgttagacaaaaagaagacatgttttgccaatctaagtttgaatctttaagagaaagattcagtattaaggaattaattcaacttaagcgtggcatagtctggaacatcaagataaaaaatactaacttccaacctgtcttagataaaattataaacacaaaca

SEQ ID NO: 318138 - DNA, 158 bp, Unknown
  Bacterial polypeptide expressing nucleotide sequence isolated from the Sargasso Sea
aatccaaaacggagcaattaaaaatatagctggaattttgaataaaaataaaaatgttttgggaatgatgcctcatccagagagaatgatagataaatatttatccggtgaagatggttcgttatttttcaaaaatatcttagataattttaaataat

SEQ ID NO: 318139 - DNA, 481 bp, Unknown
  Bacterial polypeptide expressing nucleotide sequence isolated from the Sargasso Sea
atgaattcatctgtaattatttttccaggctcaaattgtgatagggacatggcggtagctcttaaaaaatttggcttcaaaaataaaatggtctggcataatgatactgaattacctaaaagtgatctcgttgttttgccaggagggttttcgtacggcgattatttaagatgtggaagcatggcttcaaaatctaaaattattgactcagtaatcaaatttgcaaagtctggaggattattattgggtatctgtaatggttttcaaattttgactgaaactgaattacttccaggtgtgcttttaaaaaataaatactcaaaatttatatgcaaaaatgtattcgttaaaattaataattctgaaaataaatatttcaaaaatataaaaaaaaatattttagaattacatattgctcataatgagggaaattttttctgttctaatgatcaaattaaggaaattaatgataataatcaaa

SEQ ID NO: 318140 - DNA, 841 bp, Unknown
  Bacterial polypeptide expressing nucleotide sequence isolated from the Sargasso Sea
tactaataaattggagttaaagtttaataataaaaaggttgcagatattcctatttctgcgttgacagaaaaagcaccgatgtatgatagaaagtgggttaaatctaatttatctaaagataaaatcaaaactaaagacttaaaaaaaattagtatggagaatgctctaattaaaattttatcctcaccaaataattcaaataaggactgggtaacgaatcaatatgaccaagtcgtgatgtgcgatactattcaaaaatctggtggggactccgctgttattagaatacataaaaaaaataaggctattgctatatcagtagactcatcagcaaattattgtaaagctgatcctaaaacaggtggaaaacaaattgtttgtgaaaattggaggaatttaatttcagttggagcaaaacctttggctattacaaattgtttaaattttggtaatcctgagaaaccaaaagtcatgggtgagtttgttgagtgtgtcgatgggattaaagaggcgtgcgaatatttaaattttcctgttgtctcaggaaatgtgtctttttataatgagactaattctaaaagtatattccccacaccagtaattggtggcgttggttttattggtgatttaaaaaaagttacaaatattaaaataaaaaataaaggtaatttaattgttgctattggaaaaacggttggtcatctagaacaaagcgtatttctaaaagaaaatttttctattttggatggacctccaccagaaattaatcttgttaatgaaaaaaataatggtttggcagtattaaaattaataaaggaaaatttggtattatctgcacac

SEQ ID NO: 318141 - DNA, 232 bp, Unknown
  Bacterial polypeptide expressing nucleotide sequence isolated from the Sargasso Sea
aatgaaatcatcggttataaccttccctggttcaaattgtgatagagacatggatgtagctcttacaaaatttggatttaaaaataaaatggtttggcataatgatcaggaattacctaaaagtgatttgattgttttgcctggtggtttctcctatggtgattatttacgttgtggcagtatggcctcaaagtcaaagattatgcattcagtaattaatttgcaaaatcgg

SEQ ID NO: 318142 - DNA, 286 bp, Unknown
  Bacterial polypeptide expressing nucleotide sequence isolated from the Sargasso Sea
ttgacacctggagataaagttaatttccccattgcacataatgatggaaattacttttgtgatgatgaattaacaaaaaaacttcataatgaaggacaaattgcatttaaatatttacccaatgataacccaaatggttcagttgataatattgcaggggtattatcagaaaatggtcgtattcttggtatgatgcctcaccctgaaagagccattgaaaactttcactcatctcaagatggaaaacttttttttaatggcttaatcaagcacttattaggataaa

SEQ ID NO: 318143 - DNA, 342 bp, Unknown
  Bacterial polypeptide expressing nucleotide sequence isolated from the Sargasso Sea
ttgtcaaagttaacaatagtgaaaacaaattttttgaaaatatagataaagatgtcttagaacttcacatagcacataatgaaggtaactatttttgtactgaagatgaactaaagtctttagaagataacaatcaaattgcagcttactattgtagctctgatggaaaagtagatgataagtcaaatccaaacggtgcaattaaaaatattgctggaatattcaatgaaaagaaaaatattttaggaatgatgcctcatccagaaagaatgatagatcaaagtttatctggtgaagatggctcaatattttttgaaaatttattaaacaatttaaaataat

SEQ ID NO: 318144 - DNA, 178 bp, Unknown
  Bacterial polypeptide expressing nucleotide sequence isolated from the Sargasso Sea
aatgaaatcatctgtaattatatttcctggttcaaattgtgatagagatatggatgtagctctaaaaaaatttggttttaaaaatcaaatggtttggcacaatgatgctgatataccaaaaagtgatttaattgttctaccaggaggtttttcttatggagattatcttagatgtgga

SEQ ID NO: 318145 - DNA, 879 bp, Unknown
  Bacterial polypeptide expressing nucleotide sequence isolated from the Sargasso Sea
caatgcagctattattaaaatacataataaagataaagcaatagctgtcactgtagactcttccgcaaattactgtaagtctcatcccttaagtggtggtaagcagattgtatgtgaaagttggaggaatttaatatcagtgggtgctaaaccgatagctattacaaattgtttaaattttggaaatcctgaaaaccctgaagtaatgggagagtttgcagaaaatatattgggcattaaagaggcttgtgaatttttagactatccggtcgtatctggtaatgtttcattttataatggaacaaataataataatatttacccaactccagtaatcggcggcgttggtctaattaaaaatttaaaaaaaattcaaaatcacaaacttaaaaaaactaatagccaaataataataatcggaaaaacttttggtcatattgatcaaagtgtctttattaatgaattatatgatctacattatggaatgccgcctgaagtaaatttattaaatgaaaaaaataacggtagtattgttttaaaattaattagtagcggaataataaactctatacatgatgtttcaaccggaggtattattttagcgttagcagagatgtctttgagttcgcagataggtgtgaaaatacataaaccaaaaaagttatcaaatatatttgaatatttttttggtgaagatcaaagcagatatttacttgaaatagataaaaataacttttctaaagtacaaaaaattctaaaagataataatatttattttgatactgtcggtgaaactcaaaaagattattttgaattagataaagacttaaagattagtgtaaaagaactttatgaaattaataatagatggtataataa

SEQ ID NO: 318146 - DNA, 784 bp, Unknown
  Bacterial polypeptide expressing nucleotide sequence isolated from the Sargasso Sea
gtgtgtgaacttggagaatctaatatgtgtaggtgccgagccaatagctataactaattgtttgaattttggaaatcctgaaaaacctgaaaatatgggtgagtttgtagaatgtgtagagggtttaaatgatgctagtaaatatttaaactttcccgtcgtatctggaaatgtttctttttataatgaaactaaggacaagggtattaaaccaacacctactattggtggagtaggattaattaaaaattataaagacatgataacaatggatttaaaagaagctggaaatataattcttgttgttggaaaaactgaaggtcatttagatcaaagtattttcgcaaaagaaattttaaatgagaaaaaaggaccacctccagaaataaatctttttaatgaaaaaaataatggggaaactattttaaaattaattaaagataagttgattaggtcagctcatgatgtgtctcttggtggaataatgacagggattgcaaagatgtgtataaaaggaaaaaagggtataaatttttataagtacaaagggcttatagataaatttgagttcttcttttctgaagaccagggtagatatattattgaagttaaaaaggaaaatgtcgataaagttaaaaaaatacttgataaaaattcaaaccattatgatctaattggtgaggtaattgagggtaatatttcaataaatgatgagccaaatttatcagtagacaaattagcagattacaataaagattggctaaataagtatatggtaaattaa

SEQ ID NO: 318147 - DNA, 226 bp, Unknown
  Bacterial polypeptide expressing nucleotide sequence isolated from the Sargasso Sea
atgaaatcatctgtaatagtttttcctggttccaattgtgatcgggatatggatgttgcattaaaaaaatttggatttcagaataaaatggtttggcataatgaccagcaccttcctaaatgtgacctaatagtgctaccaggtggcttctcatatggtgattatctaagatgtggaagtattgcaggtaaaagtaaaattattaattcagtagtaaattttgcta

SEQ ID NO: 318148 - DNA, 289 bp, Unknown
  Bacterial polypeptide expressing nucleotide sequence isolated from the Sargasso Sea
aagcaaaaagttttaaaatggcgcatagctcataatgaaggtaatttttttgcaaataaaaatataataaaaaaactaccagataacgatcaaattgcactaaaatactgtgatgcgtccggaggtataaaacaagattctaaccctaatggctccatagaaaatattgcaggaattttaaacgaacaaaaaaatattcttggtatgatgcctcatccagaaagagccgttaatgaagatatttatagcaatgatggaaagtttttctttgaaagcctgttaacttaaa

SEQ ID NO: 318149 - DNA, 553 bp, Unknown
  Bacterial polypeptide expressing nucleotide sequence isolated from the Sargasso Sea
gatgaaatcttcagtaattatttttcctggttcaaattgtgatagagatatgcatgttgctttaagtaaatttggttttaaaaacaaaatggtatggcacaacgatatatcaattccaaaaagtgatttgatagtgctacctggtggtttttcttatggagattatctaagatgtgggagtattgcatcaaagtcaaaaataattaaatctgtaattgattttgcaaattctggaggtatggttctaggtatttgcaatgggttccaaatattaacagaaaccggtttactttcaggtatccttcaacaaaacaaatatcttaatttcatttgcaaaaatatttttataaaagttaaagacaaaaaaaataaatattttaataatattaaaaaagatattttagaacttcatatagcccataatgaaggtaattatttctgtacggagagtgaattaaaatctttagtagataataatcaaatagcggttacatattgtgatgctaaaggaattgaaaatgatgaaagcaatcaaaatggtgctgttaataat

SEQ ID NO: 318150 - DNA, 383 bp, Unknown
  Bacterial polypeptide expressing nucleotide sequence isolated from the Sargasso Sea
aatgaactcgtctgtaattgtcttcccagggtctaattgtgatcgagatgttgccgtagctttagaaaaaatgcaatttaaaaataagatggtatggcacaaagataccaccttaccaaaatcagatttaattgtaatacctggaggattttcttatggtgactatttacgttcaggagcaatagctggaaaatcattaatagtaagtgaaattatcaaagcggctaattcgggatgtttaattctaggaatttgtaatggatttcagattttaacagaaacaggtttgttaaagggaactttattgagaaataaaaatctcaaatttattaataaggatgtgaacattaaggtagttaacaatgaaacaaaatttacttcag

SEQ ID NO: 318151 - DNA, 343 bp, Unknown
  Bacterial polypeptide expressing nucleotide sequence isolated from the Sargasso Sea
aatgaaatcatccgttattacttttcctggatccaattgtgatagagatatggatgttgctctaaaaaaatttggatttaagaataaaatggtttggcatgatgatgctgaactcccaaaaagtgatttaattgtattgccaggaggattttcatatggtgactatttaagatgtgggagcatggcatctaaatctaaaattatgaagtctgtaattaattttgcaaactctggtggtatggtgatgggaatttgtaatggatttcaaatattagttgaaagtggactggtacctggtgtgttactaagaaacaaatatttagaatttatttgtaaaaatgta

SEQ ID NO: 318152 - DNA, 508 bp, Unknown
  Bacterial polypeptide expressing nucleotide sequence isolated from the Sargasso Sea
agtgttgcttcaaaatcaaaaatagtgaaatctgttattgattttgcaaattctggtggacttgtgatgggaatatgtaatggttttcaaatattggttgaaactggtttagtgccaggtattttattgagaaataaatatctagaatttatttgcaaaaatgttttcgtaaaaattcataataaagataatccttattttaaaaatcttgataaagaagttttagaactacatatagcccataatgaaggtaattatttttgcacaaatgaccagctaaaagaaattcaagataataatcaaatcgctatttattattcaaatgaaaacggacaaatagatgagaattataacccaaatggttcaactaaaaatattgctggtatttttaataaacacaaaaatgttttagggatgatgccacatccagagagaatgattgataaatatttatctggggaagatgggtctttgttttttaaaaatttgattaagaatattaaataat

SEQ ID NO: 318153 - DNA, 772 bp, Unknown
  Bacterial polypeptide expressing nucleotide sequence isolated from the Sargasso Sea
ttgaagaagattttaagtaattcaaacatttcagacaaaaaatggatatgggatcaatacgatcatacagtaatgggtgatacgattcaaaaacctggaggtgatgctggtgttgttagaattcatgggaccaataaagcggtagcagcatcagtagactcgtccgcattatattgtttctcacatccattaactggaggaaaacaaatagtttgtgagagctatagaaatcttatttcggtaggagctaaacctattgctattacaaattgtttaaacttcggaaatccagaaaaagaaaaaaatatgggtgaattcgtagaatgtattaaaggaattacagaagcaagtaagtatctagattttccagtcgtatctggaaatgtctcgttttataacgaaacaaaagataaaggcataaaacctacaccgacaattggaggtatagggctaatctctgactatcaacaaatgcttacaatggattttaaaactgaaggaaacttagtttatgtaattggtaaaactgatgggcatttagatcaaagtatttttgcaagagagattttaaatgaaaaaaaaggtcctccaccaactgttaatttatttaatgaaaaaaacatcggcgaaactttattagatttatcaagaaaagatcttattgtgagctgtcatgatgtttcgttaggtggaattttaactgcagtatcgaaaatgtgtattaaaggaaaaaaaggaataaaaattaattcacttaagggtttaacaaaca

SEQ ID NO: 318154 - DNA, 400 bp, Unknown
  Bacterial polypeptide expressing nucleotide sequence isolated from the Sargasso Sea
aatggggtttcaaattttgacagaatcagggtttttgcctggtgcccttactgcaaataaaaatcttaatttcatctgtgatgatgttgaacttgatatagtttcttcaaaaggaggttggttcaacaatgtagatgaaaaacaaacaattaagttgccaatagcgcatggggaaggaagatatcattgtgattctgatactttaaagaaacttgtagataatgagttgatcgctttgagatataagaataatcccaatggatcctcattcgatatcgcaggcataactaatgagaagggaaatgttctaggtttaatgcctcatccagagcgagcatgcgacgagacaattggtgggactgatggtctctttacattaaaatcattaatattgaaataa

SEQ ID NO: 318155 - DNA, 601 bp, Unknown
  Bacterial polypeptide expressing nucleotide sequence isolated from the Sargasso Sea
ttgatcagaaaccatggtattacaccccaagaatatgaaataataattaatcttatagatagagaaccaaatattacggagcttggtattttttcagcaatgtggaatgaacactgttcttacaaatctacaaaaaaatggttaaaaactcttcctatttcaggacctagagtaatatgtggcccaggtgaaaatgctggaataattgatattgatgatggctatgctttagttttcaaaattgaaagtcataaccacccatcatttatagatccatttcaaggttctgctactggggtcggtggaattttaagggatatatttacaatgggagctagaccaattgttactatgaatgcattaagctttggaacaaataaaagtaaagtgaaaggccttttgtctggtgttatagatgggataggaagttatggaaatagtttcggggttcctaatctaggaggagagttgagatttgatgcggcatatgagggtaactgcctagtcaatgtctttgctgctgggattttaaaaaaagatagtattttttattctggagcaactgaaagtaacttaccactggtatatttaggggctaaaa

SEQ ID NO: 318156 - DNA, 1364 bp, Unknown
  Bacterial polypeptide expressing nucleotide sequence isolated from the Sargasso Sea
ttcaaaaggaaatcttggaattgaaataaatctaaacaaagttccttgtagagaaactaagatgacaccttatgaaatcatgctctcagaaagccaagagagaatgttaattgttttagaaaatggaaaagaaaaacaagcaaaaaaaatatttgataaatggaatctggactttgcagtaattggcaaaacaactaattcaaaaaaaatccaactttactttgatgatgaaatggtagcagacattccagtaaatacattagttgaaaactcacctatgtatgaccgtaaatggaaaaaggcaaaattaccaaaaaaaaacaaaattaaaaaagaagatttaaaaaatttcaaaattattgatgttctaaaaaaagttttagctaatccaaatatatgtagcaaagaatggatttggcaacagtatgatcatactgttatgggtgatactattcaaaaaccaggtggtgatgctggagttgttagggtacatggaacaaataaagctgtagctgcatcagtagacagttctgcagtttattgttgggcccaccctcttactggtggaaaacaagttgtctgtgaaagttttagaaatttaattgctgttggagcaaaacctatagccattacaaattgtttaaattttggaagccctgaaaatgaagagaacatgggtgagtttgttgaatgtgttcaaggaattagtgaggcaagtgaatatttaaaattcccagtagtttcaggaaatgtttctttttacaatcaaactaaagatgaaggtataaagccaactcctgctattggaggtgtaggtttaataatggactacaacaaaatgatcactatggattttaaacagattgataatgtggttttggttattggaaaaacagaaggacatttagatcaaactttatttgcaagaaacattttagacgaaaaaaatggtcctcctcctgaaataaatttatttaatgaaaaaaataatggagaaactttattaaaactcattcagaataatctcattaaaagtgctcatgatgtttctttaggaggggttattactgctgtagccaaaatgtgtatcaaaggtaaaaaaggaataaatctaaataaaccaaaatatttaattaatgaaatgcagtatttctttagtgaagatcaaggacgttacattgttgaggttggtaaagaagatttaaaaaaagtcacagatattttaaataaaaattcagttcattttgacgaacttggcacaatcaatcaaaatgagatatatattgacgataagacaaaagttacaattgacgaattaacagattcaaatagaaattggctttcagattatatgagcaactaat

SEQ ID NO: 318157 - DNA, 1090 bp, Unknown
  Bacterial polypeptide expressing nucleotide sequence isolated from the Sargasso Sea
aaaaggaaaattaggaatagaaataaatcttaataaagtgccttgtagagaattaaatatgacaccttacgaaataatgttatctgaaagccaagaaagaatgcttatagttttagaaaatggaaaagaaaaagaagctaaaaaaatatttgataaatggaatttagatttttccataattggtaaaacaactgatagtaaaaaaatccagcttttttatgatcgaaaaaaagttgctgatattcctgtagatacactggtagagaattcacccatgtacgatagaaaatggaaaaaagctaaactgcctaaaaaaaataaaattgataaagaaagtttcaaaaatttaaaaattttaaatatattaaataaattattatccaatccgaatatttgtagcaaagaatggatttggcaacaatatgatcataccgtaatgggtgatacaattcaaaaaccaggaagtgatgctggtgttgttcggatacatggaactagtaaagctgtagcagctaccgttgatgcttcagcttcatattgttatgcacacccactaactggaggtaaacaagtagtttgtgaaagttggagaaatttaatatcagtaggatctgagcctattgcgataacaaactgtttaaattttggtaatcctgaaaaagaggaaaatatgggtgagtttgttgaatgtgttcaaggtcttggggaagcaagtaagtttttagattttcctgtagtatctggaaacgtgtctttctacaatcaaacaaaagaaaaaggcattaagccaacaccatcaataggaggaattggtttaataaaaaattataaagaaatgattacaatggatttaaaaaaaactggaaatattgtcttggttattggcaaaactgagggtcatttagatcaaagtattttttctagagatattttaaatattaaaagtggaccccctcctgaagtaaatctatttaatgaaaaaaataatggaaaaacaattttaaatctaatgaataaaaaatttgttaaatctgctcacgatgtttcattaggtggaataattattgcgattgcaaaaatgtgcatcaaa

SEQ ID NO: 318158 - DNA, 457 bp, Unknown
  Bacterial polypeptide expressing nucleotide sequence isolated from the Sargasso Sea
atgaaatcatccgttatagtttttccaggatcaaattgtgatagagacatttctgttgctctagaaaaattacaatttaagaattcaatggtttggcacaaagaaacggaactgccaaaatcagatttaattgtaattcctggcggtttttcttacggagattatttacggtctggagcaatagcggctaaatcaaatattctctcagaagtaataaattctggaaaaaaaggtgctttgattttagggatttgcaatggttttcaaattttaattgagtgcggattgcttaaaggagctttattaaggaattcaggattgaagtttatttcaaaagatatacttgtaaaagttcagtcaaataaaaataatttttttaataaatataaaactggggacatactgaagttgaatattgctcaaaatgaaggaaattattttacagataaaaaacatt

SEQ ID NO: 318159 - DNA, 2057 bp, Unknown
  Bacterial polypeptide expressing nucleotide sequence isolated from the Sargasso Sea
ttacgatgaacactttgataattacccaatcagtttatctttggatattttgtttggaaagcctcctaaaagttcgagatctttctccaccaagaaaaaagattttggcgaattaaaaatacctgaccatgaccttgaagaattattatttaaagttctaagacatcctgctgtagcaagtaaaaattttcttataactataggagatagaaccgtaaccggtttaattaatagagatcagcttgttggcccttggcaggtacctgtatcagattatgcaatgactagatcaggttttataggagtttctggggaggcaatgtccataggagaaagaactcctgcagccataataaaccctgctgcagcagcaagaatttctgtagcggaagcagtcacaaatatattaccctcaggaatatctaagttatccgatgtaaaactttcagcaaactggatgggctcacctgaaaagttagatggtgatcaagacctttacgaggccgttgaagcaataggaatgggtctttgccctcaatgggagatagcaatccctgtaggtaaagattctctttcaatgtctacagaatgggaagataaaggaaaaaataaatcagtaacttctcctctctctttaattgtttcagcctttactgcaattaaagatataaatttatctgttacgccacaattaattgataaagaatctgtattaatattaattgatttatcaaaaggtagttgcagacttggctcaagcatagcctcacaagtaaattctttatttggaggcgaggttccggatgttgaatgtatacaagagatgccaaattttgttaacacgatacatggtttattaaaggataaaaaaattctttcgtatcatgacagatctgacggcggtcttattactacatcgatagaaatggcttttgccggaagattaggagtagatataaagctagatcttttgccatcaaatgcagaagacgtcgtgtcagatttatttaatgaagaacttggagttgttattcaaatagctaaagaagatgaggaattggttatgagggcattagattcttgctctttaaaggaacattcttatgtttttggagttttgaataaggataaagacataaagttaatttctaataataaaaccatccataaatggcctttaaagactctcttaaaagaatggcataaggttagctatgaaatacagtctttacgagataaccccgaaaccgctaagtacgaatacttatatgatattgactcagaaagggaaggaataaaaccctctctctcttttcagattccttctactttttctattagtaaaaccaagcctagtatagctatactcagagagcaaggcatcaatgggcaagttgagatggcagcagcctttgatcgggttgggtttaattgcatagacgtccacatgacggatcttatatccaataattgtcatttagatgaatttcaaggccttgtagcctgtggaggtttttcctatggggacgtacttggagctggaggaggatgggctactaatattatttataaccaagcgcttagagaccaattccaagaattcttttctaatgaagaagttttttctctaggtatatgcaacggctgtcaaactatatctttattatccagtctaattccaggaactgacggatggccaagatttaaacgaaatagttctgagaaatttgaagctagattgagccaagtcttgattcaggaatcaccatcaatttttttcaaagatatggcgggatctataatgcctataccagtagcccatggtgaaggaagggcagaattaagtgagaaaaatttttcagacttaacttcagaaaacctaaaccctgtggtttattcagatgataaaggtaaatctactgaaagctatccagagaatcctaatggttcgccttctggcatagctggagtaacaaataagtcaggacgcgtcaccatcatgatgcctcatcctgagagggcttttttaacttccccagtattcttggcatcctaaa

SEQ ID NO: 318160 - DNA, 1346 bp, Unknown
  Bacterial polypeptide expressing nucleotide sequence isolated from the Sargasso Sea
tattgaaattaatttagataaggttccttgccgtgaaacaaaaatgactccttatgaaattatgctatctgaaagtcaggaaagaatgctaattgttttagaaaatggaaaagaagatttggctaaaaaaatatttgataagtggaatcttgattttgctgtaattggtaagactacaaatacaaagaatattgaattatattttgaaaataaagaagtagcaaatataccagttaatactttagtcgaaaattctccaatgtatgatcgaaaatggaaaaaatccaagataccaaaaaaaaataagattaaaaaagaaatttataatgagcttaaaataaaagatgttttaaaaaaaattttatctaacccaaatgtttgtagtaaggagtggatttggcagcaatatgatcatacagttatgggtgacaccattcaaaaacctggtggtgatgcaggtgtagttagagtacatggaactaataaagcagttgcagcatctgtggactcttctgcagtttattgttgggcccatcctctaactggtggaaagcaagtagtagttgagagttggaggaatttaatttcagttggagcaactcctattgcaataactaattgtttgaactttggaagtccagagaatgaggataatatgggagaattcgtagaatgtgttcaaggaattggagaggcaagtaaatatttaaatttcccagtagtatcaggaaatgtatctttttataatcagacaaaagaaattggaattaaacccactccttctattggtggagttggactaataaaagattataaaaaaatgataacaatgagtcttaaagaggtagataatcttattttaattattggaaaaaccgaaggtcacatcgatcaaagtctatttgctagaacaatattagatgagaataaaggcccgcccccagaagttaatttatttaatgaaaaaaataatggtgagtctttgcttaatctaatagaaaaagatctcattcaaagtgctcacgatgtatctttagggggaataataactgccattagcaaaatgtgtatcaaaggaaacaaaggtattaaattaaagaaacctaaaaatttaataaacaaaattgagtatttatttgctgaagatcaaggaagatatattattgaaataaaaccagaagatttagaaaaagtttctaaaattttgattaaaaattcagtacattatgaggaattgggtattattattgatagtgagatggttattaacgaaaagacaaaagttacaattgacgaattaaaatcatataatagtaattggttaaataactatatggattcataat

SEQ ID NO: 318161 - DNA, 1419 bp, Unknown
  Bacterial polypeptide expressing nucleotide sequence isolated from the Sargasso Sea
taattgcaattcaagatatgggcgcagctggacttacgtcttctagtatagaaatggcatcgaaaggtaatttaggaattgagttaaatctaaataaagttccatgtagagaaggtaaaatgacaccttatgaaattatgctttcagaaagtcaagaaagaatgctgataattttagagaatggaaaagaagatttggctaaaaaaatatttgataaatggaacttagatttcgctgtaatcggtaaaacaactaattcaaaaaaaatcgaattatattttaatgacaatcaagtggccagtataccagtgaatactttagtagaaaattcacctatgtatgatcgaaaatggaaaaaagctaaattaccaaagaaaaatttaattaaaaaagaaacacttaacaaattaaaaattaaggatgtattaggaaagattctatcaaatccaaatgtttgtagtaaagaatggatttggcaacaatacgatcatactgttatgggtgacactattcaaaaacctggaggcgactctggtgttgtaagagtccatggtacagacaaagcggttgcagcaacagttgattcctctgctgtatattgttgggcacacccacttactggaggaaaacaagttgtatgtgaaagttggagaaatcttatttctgttggagcaacaccagttgctatcacaaactgtttgaactttggaagtccagaaaatgaaaataatatgggagagtttgttgaatgtgttcaaggcatcggagaagcctctgaatatttaaaatttccagtagtttctggtaatgtgtctttttacaatcaaactaaagaagtaggaattaaaccaactcctgcaataggtggagtaggtttaattaaaaattacaaacaaatgatcacaatggattttaaagaaattggtaatttggttttaataataggtaaaactgagggacatattgatcaaagtttatttgcaagaactatacttgatgaaaaaaatggaccaccaccggaaattaatcttttcaatgaaaaaaataacggtgaaactttattacaattaatcaagaataattttatcaaaagtgcacatgatgtatctcttggaggaataattgctgcgataagtaaaatgtgtataaaaggaaacaaaggtataaaatttaataagataaaatttcttaaaagcgaaattgagtatttattttctgaagatcaaggcagatatataattgaaataagtgcctcagacttaaattcagttatcaaaattttagaaaaaaattctgttcattatgatgaattaggtaaaatcatcgagaatcatattattatcaataaaaagacaaaggttacaattgacgaattaaaatcgtataatactaattggttaattaaatatatgagttaaa

SEQ ID NO: 318162 - DNA, 469 bp, Unknown
  Bacterial polypeptide expressing nucleotide sequence isolated from the Sargasso Sea
atgaagtcatcagtaattatctttccaggttcgaactgcgatagagacatgcatgttgctttaaaaaaatttggtttcaataataaaatggtttggcacaacgacactggactaccaaaaagtgacttaattgttttaccaggaggtttttcttatggggattatttaagatgtggaagtattgcgggtaaatcaaaaatcattaactctgttatagaatatgcaaaatctggaggtttggttctaggtatttgcaatggttttcaaatattaactgaaactggattacttcctggcgtattacagcaaaataaatacttagaatttatttgtaaaaatgtttatgtcaaaatcaataacactaaaaataaatattttaaaaacattaaaaaagaaattttagaacttcatattgctcataaggaaggaaattacttttgttcaaatgatgaaattaaaattaattgaa

SEQ ID NO: 318163 - DNA, 925 bp, Unknown
  Bacterial polypeptide expressing nucleotide sequence isolated from the Sargasso Sea
tatgggagatacgatacaaaaaccaggtggagacgctggtgttgtaagagttcatggaacaacaaaggctgttgccgcatcagtagattcatcagctaattattgttattcgcatccattatctggaggaaaacaagttgtatgtgaaagttggagaaatttaatttcagttggtgcaaaacctatatctataacaaattgtttaaattttggtaatccggaaaaagaaaaaaatatgggtgaatttgtagaatgtgtagaaggaattactgaagcaagtaaatatttagaattccctgttgtttcaggaaatgtatctttttataatgaaactaaagataaaagtatcaagccaactccaacaataggaggtgtaggtttaattaataactataaaaatatgattaccatggattttaaaaaatcaggaaatttagtttatgtaataggaaaaacagaaggtcatttagatcaaagtgtttttgcaaaagatgttcttaacgaaaaaaaaggtccacctccaagtatcaatttatttaatgaaaagaatattggagaaacaatattaaatttaattgaaaataaattaatatttagctgccatgacatatctttaggcggaattctaacagcagtttcaaaaatgtgtattaaaggaaaaaaaggtttaaaaattaactcgctaaaaactcttataaataaatttgaatatttttttggtgaggatcaaggtagatatattattgaaatatcgaaggaaaattctcaaaaagttaatgaaatattaaataataattcagtacattttgatgatttaggtgctatcgaaggaaaatcattaacttttaatgatgatataaatttacctattgaagaattatcaaatacgcatacatattggttacaaaggtatatgaataactaa

SEQ ID NO: 318164 - DNA, 766 bp, Unknown
  Bacterial polypeptide expressing nucleotide sequence isolated from the Sargasso Sea
tatgaacgtattagtcttatcaggttatggtattaattgtgaaaatgaaacactacatgcttttgaagtagtaggatttaaaggaaaaattattcatattaatgatctgattcaaaatcctaaacaacttaataactatcaagtattcgctatacctggtggtttttcttatggcgatgatacaggttcaggaaatgcaatggcgaaaaaaattatgaccaatttgtatgatcaactaacagatttttcattaaaagataaattaatcataggtatttgtaatggatgccaaatattaattaatcttggattagttccaagcctaaataaaaaagatccagaagtagcattgattgaaaataaatctggtagctatgagtgtcgatgggttgatgtaaaagtaagtaataataaatcaccatggctagaaaatattagtacgctgaacttgcctgttgcccatcaagaagggcaatttatgatacctattaatctactaaaaagtatcaaagctaataaccttattggtttgcaatacattaatcatcgtaaaaaattagcaaaaggtcaatttccttttaatccgaatggatctaaagatgatatcgctgcgctaacaaatcaaaatggtaatgttcttgcaatgatgcctcatcctgaaagagcattttatcattatcatattcccaattggcaaagtaaaaccttaaaaaaatttggggatggatataaaatttttatgaacgcaaaaaaattctttgcataa

SEQ ID NO: 318165 - DNA, 550 bp, Unknown
  Bacterial polypeptide expressing nucleotide sequence isolated from the Sargasso Sea
atgaaatcatctgtaattatttttcctggttcaaattgtgatagagacatggatgttgctctaaaaaagtttggatttaaaaatcaaatgatttggcacaatgataaatctattccaaaaagtgatttaattgttcttccaggtggtttttcttatggagattatttaagatgtggaagtattgcatcaaaatcaaatattataaaatcagttatagattttgctaattctggtggacttgttcttggtatttgtaacggttttcaaattttaacagaaacaggtttattgccaggcatattgcaacaaaataagtatcttaatttcatatgcaaaaatgtttatgttaaggttaaagataagaaaaataaatactttaaagatattaaaagagaaatcttagagcttcatatagctcataatgaaggtaattatttttgctcaaaagatgaattaaagtctttagaagataatacccaaatagccgttacatactgtgatcaaaaaggtttagaaaatgatgaaaataatcctaacggtgcattaaaaa

SEQ ID NO: 318166 - DNA, 1375 bp, Unknown
  Bacterial polypeptide expressing nucleotide sequence isolated from the Sargasso Sea
cgcttgggcgcgagctgcctggcacaagtctatactcagcttggtgatagccccgcagatgtggtttctgcaactcgccttaaagccttctttgacgctatgcaggcgcttatcgagaaaggtttggtatgtgcttatcacgaccgttcagacggtgggctgtttaccaccgttgctgaaatggcctttgccggtaaaacaggcgtaagcattaaccttgatagccttgtcggaaacgacattgccgtattgttcaatgaagaactaggtggcgtcatccaagtgcttgaaagcgatatggatgctgttaacgcagtactgactgaattcggtttaactgaattgactcacgatatcggtacgcttaatagcacagacatgattgagtttagtcgcaacggcgttgctgtacttgcagatagccgcgtatcaatgcgtacgacgtgggcacaaactacgtatgaaatgcagaagcttcgcgataatcctgagtgtgctgaacaagaacacgctgcaaagcaagatgctgccgacccaggtttgcatgctgcgttgtcttatgatgtaaacgatgacgtagcagcgccatatattgccaaaggcgttaagccaaaagtggcgatattaagagagcagggcgtaaactcgcatctagaaatggcggctgcatttacccgtgcaggctttgatgctatcgatgtacacatgagtgacgtgttggcgggtcgcattacccttgaacagtttgcgggtctagctgcttgtggcggtttctcttacggtgacgtgctgggcgcaggtgaaggttgggcgaaatctatattgttcaacagtatagctcgcgaccagtttgaaggcttcttcaaccgtaacgatacgttcagcttaggtgtgtgtaacggctgtcagatgctatcgaaccttaaatcactgattccaggtactgagcattggccacatttcgtgaccaaccagtcggcgcgatttgaagctcgtgttgcaatggtcgaagtgatggagtctaactctgtgctgcttgatggcatggcaggttcgcgtatgcctattgcggtgtcgcacggtgaaggtcaggctgaatttgctaatgacaacgcgctatcacaagtaggcgcgcaggtggcgatgcgttacgtagacaactacggcaagccaactatgcaatacccggcgaaccctaatggatctcctcaggggatcacaggtctaacttcactagacggacgcagcaccatcatgatgccgcaccctgaacgtgtatttagagcggtagcaaactcttggcgtccagacgattggcaagaagacggtgcgtggatgcgtatcttcagaaatgctcgtaaatttgttgggtaac

SEQ ID NO: 318167 - DNA, 915 bp, Unknown
  Bacterial polypeptide expressing nucleotide sequence isolated from the Sargasso Sea
caattaatcaacctggaggtaatgcgtcaataattagagtgcacgatacaaataaagcaattgcagcaactgttgactgtacgcccagatattgtaagagctctccgtttcttggcggtatgcaagcagtgtgtgagacataccgaaatttgtgttcggtaggagctacaccaattgctataacaaattgtttaaactttggtaatcctgagaaaccagaaattatgggacaatttgtggatgtgatcaaaggtattgctgaagcatgtaaaaaattaaattacccagtaatttcaggtaatgtctctttatataatgaaacaaatggaattggtattaatcctacgcccgtaattggtggtgtgggattgataaaaaatattaatcaaacttctaatcacaaatttaaagaagcaggtaatttagtttatattattggagacactgtaggtcacttgggccaaagtattttatgttatgacatacttaatcttaaaaaaggtgaaccaccaccattggaattagaaaaagagataaaaaacggtaaatttataattgaagctataaaacaaaacttaatacaatcttcgcatgatgtttcttctggtggtattattttatctatacttgaaatgtgtattccatctaaaattggtattaatttaaatatagataaatttggctttcaactagttgaatatttatttggcgaagatcaatcaagatatattatagaagttcatccagaaaatgaagctgtgctattgaaaaatatgaaaaataaagcagttagttacgagaaaataggaaagactatcaacgaaaaatatattcatattaatcataaatataaattagatttaaataatttaattgaattacataataaatggtttaaaaattataataaataat

SEQ ID NO: 318168 - DNA, 1372 bp, Unknown
  Bacterial polypeptide expressing nucleotide sequence isolated from the Sargasso Sea
atgggtatgagtatagtttctcagataagtaatgatttttcaggaaactgcccagatgtagagtgtctagaggagatgccaaaactagtagtgctgttctccaagtttataaagcaaagaaaaattctttctatgcatgatcgatcagatggaggtttatttacggcccttttagaaatggcaatttccggtagaaaaggaattaatataaatctagatacttattgcaatcatcaagaggaaataatagaaactttgttaaacgaagaattaggtttagtcattgaagtaaaggatcaagacaaggaagaaattattaaagaaattaatagagttggactggaaggtcattgtcacgaaataggttcaataagtaatcgtaaatgtttcgaaatctcttacctaaacaaaactatttttgatgaaactttaaataaattatcaaaagattggaattcaattaatttacaaatgcaaagcaaaagagagaacccaaacactgcaaaacaagagttccttaatgatatagacatggaaagaggaggtctaaacccaaaccttagcttcaaaataccagataaattaaatatatctaaatccagacctaaactagccattcttagagagcaaggtgttaatgggcatacggaaatggcagctgcctttcatgaagttggattcgagtgtacagatgtccatatgaccgatctatttgaaaaaagaattcttctgaaagactttaatgggcttgtggcatgcggaggcttttcttatggagatgttttaggagcaggaggggggtgggcatcaagcatactctttaacaattatcttagagacgaattttcagaattttttcatagacaagatgttttttcattgggcgtatgcaatggatgtcaaatgatggccttactgaaagatctaattcctggaacagataattggcctagatttattagaaatacttcagaaaaatttgaagctagattaatacaacttaaagtacaaagatcaaattctattttatttcaaggaatggaaggatcgataattactgtccctgtttctcatggagaaggcaaaacagatattgagaagaatgagtctgaaatactattaaaaaacaacttggctccaatagcttatgccaatgatgatggaattccaactgaatcttatcctcagaatcctaatggttcatcaatgggtatagctggcgtaaccaataaacaaggaaatataacaatcatgatgcctcatccagagagagcatttttatcttctcagaattcttgggctccagaaagttggagtaaatattcaccttggattaaattctttgaaaatgctaggaagtttttggattaat

SEQ ID NO: 318169 - DNA, 1486 bp, Unknown
  Bacterial polypeptide expressing nucleotide sequence isolated from the Sargasso Sea
gattcgttatcaatgcggacaacttggagagaggaaggagaagagaaatcagtcctctcacccgttagtttgatagcaagtgctttcgctcctgtgaaagatgtacgtctaacgactacccctgttcttcaggatcgcgagggcactgtcctggttctaataagccttgagggacagagattgggtggaagcgctctagcccaggtctatggtcaacttggagacgactgcccggatctagaagatcctatgagatttagagagttgcttgattggattatctcagctaagcgaaacgggaaaatcatggcgatgcatgatcgttctgatgggggcttactaaccacactcctagaaatggcgtttgccggtcgtcttggtttggatattaaactcgaaaacaatgagcttgacctgccgtatctctttaacgaggaattgggatttgttgttcaggtcttggagagtgacatcggctggattaaagaaacagttgatgctgatgtcaggatagtggcgatgccaagacgcgatgagatcgtgaatctggttaataaagaaaaaacattgcattcgttcacccgcggtgaattgcaacaagaatggtctcgcaccagctattcgctacagaggattcgtgacgatgaagactgttctgatcaagaatttgctcgtattttaatgacgaggaaagatgatcccggagttcattacaccaagggtatgaagttttctgaggcgcctctgattaatgttggcaaggcggcgaagatggccatattgagagagcagggcgtaaacggacagagggagatggctgcagcttttataaatgccggttttgattgttttgatgtacatatgagcgacctagtcaaagatagtctttatctttcgaaatttgatggtctcgcagcgtgcgggggcttttcctatggcgatgttttaggcgctggaggaggatgggctaaagccattttgtttgatgacgaattgcggcgagcgttcgaggatttcttttcgaaacaacttccagtgcttggtgtttgcaacggatgccagatgctgtcgcagcttagagagataataccgggagcggaaaattggcccagcttcgaaaggaacagcagtggtcaatttgagagtcggaccgtgatggtgaaagtgtcaggaaattcttctccatggttagagggcttggctggatgcgtagtgccagttgcagttgcccacggagaagggagagtagagccgaaggatttaaccggggcagtggaaatagattctcttgtcgcgatgcgatatgtcggaccaagtgatgaaccgaccgaagactatccatacaatcccaatgggtcacttggcggtatagccgcaatcaccgctgcctcgggctcaatattagccatgatgcctcatccagaaagaacttttcgttctagccaattaatagtcagtgatccaggtggaaagggtacagcccggg

SEQ ID NO: 318170 - DNA, 561 bp, Unknown
  Bacterial polypeptide expressing nucleotide sequence isolated from the Sargasso Sea
aatgagagtaactataataacttttccaggttcaaattgtgaccgtgatgtttcagttgcaataaaaaaaattactggaaaaaatccatccaatatttggcatcaagaaaatgaagttcctaattgcgacttaataatacttccaggaggtttttcttatggagattacctgcgttgcggagcagttgcagcacactcacctgttatgaaagaagtaaaaaatcatgccgcaagaggaggagccgttctaggaatttgtaatggttttcaaatactgcttgaagcaaagttacttgaaggggctctcatcagaaattcaggattaaaatttgtttgcaaacaaattgccctcaaaattaacaaacaaattaattctccatttctacatcacttcaaacaaaatgacataatccatttgccaatagcacataatgaaggaaattactttgctgacagtgaaacactcaagaaaatagaggataagggccttgtagccttaaggtatcatacttcttcagatggtaattcatttaacccaaatggctcaattaataatattgc

SEQ ID NO: 318171 - DNA, 1212 bp, Unknown
  Bacterial polypeptide expressing nucleotide sequence isolated from the Sargasso Sea
aatgagcacagcggaaattatgctgtctgaatctcaagagagaatgctcatgattataaagccagataaaatggataaggcgaatagtattttcaaaaaatggaatttagacattgctaaaataggtgaaattaccaactctcaaaatcttgaaatatataaaaataatattttagatgcacaaatccctataacttatctagtcgatcaagcacctgaatacgatagagactggacgacaccagaaaaagctcctgaactccaaataaaaaatgctcctattaaatctgtatccaaggttattgagaaacttttcaattctcacaatctttgcagtaggaattggatatgggaacaatatgatacatcagttatgggtgatacagtaatacctccaggtcaaaactctggtgtaatcagagtacacgatacaaataaaaaattgtgtgcaagtgttgactgtacaccgagatatgtgagtgccgatccatttttaggttcaatgcaggcggtttgtgaagcatatagaaatattatctcggttggcggtacaccactcgcgattacaaataatttaaactttggaaatccagagaaaaaagaaattatggggcaaattgttcattctattaaaggtataagcgaagcatctttaaagcttaatatgcctgtaatttcaggaaatgtatcattatataacgaaactaatggtaaagcaattttacctacacctgtcataggcgcagttggcgtaattgatgaaaataaaaattctgtatctttatcaaatgcagttgacggtaacagtatttttgttattggccaagataacagtcatacttacggttgggttgggcaaagtatttacgctcaggaaattttggacatagaaaaagactacgcaccaccacctgtaaatattgatgccgaattagcaaatggtaattttattttaaaagctattgaacagaaactcactaactgcgttcatgatatatcagatgggggactggcaatagcgatttcagaaattcttctttcatctcaaactagaggaattggtgcagtaataaataaaaattatattcataattcagaaagtttttggtttggagaggatcaaggtaggtatttagtatgcacttctaaaaataaagaaatagaagagcttgctgaaagtaataaaattaaaattacgaatatcgctacaat

SEQ ID NO: 318172 - DNA, 878 bp, Unknown
  Bacterial polypeptide expressing nucleotide sequence isolated from the Sargasso Sea
attgaatgatgatcaaattaaagaaaaactatctgagttaaatattgcactgactcctggagaggggcgaaaaatacaggatgaaatgttaggccgccccccttcattagctgagttggtgttattttctatccaaggctcagagcactgctcctataaaagtagccgctctcacttaaaaaagtttgtcactgatggcccagatgtggttttaggtgcaaaagaagatgctggtgtagttgcaataaccaaagataaaaatggaaagcgttggtgcattgtaatgagccacgagtcacacaaccacccttctcaaatagtcccctatgaaggtgcagctacaggcgtcggcgggaacgtaagggatgtgatgtgtatgggggccgaggtcattgcctgtacagactctttccgatttggtaatataaaaaacagtaaaactaagtggatacacgatggggttgtcgctggcgtagctggctacgggaatcctctagggattccaaacatcggtggtgacatatattaccatgatggctactccgaaaactgcctggttacactggtcacccttgggattgttcgcgaagaccatataattcactcatatgccccagaaaatgcagagggctacgatctaatcctcatagggaaaccgaccgacaacagtggctttggaggggctagctttgcttcgctagagctagaagaagataaaaaagaacaaaacaaaggagcggtccaagagccaaatgcattcttagagaggcaccttttaaaatccacttatgctcttttccaataccttcaagaaaacaatctatgtgaaaaggttggatttaaagatctaggtgctggaggggtggcatgtgccagtg

SEQ ID NO: 318173 - DNA, 220 bp, Unknown
  Bacterial polypeptide expressing nucleotide sequence isolated from the Sargasso Sea
aatgagctgagatataaggagttaataccaataaaatattgtgatgaaaatggaaatataaatttagaaagtaatccaaatggttcaataaataacattgcaggaatatttaataataaaaaaaatattttaggaatgatgcctcaccctgaaagaatgtcagataaaattttatcaaatgaaaatggtttgggaatatttttaagtttaatgaattagt

SEQ ID NO: 318174 - DNA, 304 bp, Unknown
  Bacterial polypeptide expressing nucleotide sequence isolated from the Sargasso Sea
aaatattaaaaaaaatattttagaacttcatattgcgcataatgaaggaaactttttttgtaatgatgatgaattgaagactttagaagataataatcaaattgctgtaacatattgcaatgaaaaaggtatagaagatgagaagcacaatccaaatggagcaataaaaaatattgctggaatatttaataaaaataaaaatgttttaggaatgatgcctcatccagaaagaatgatagataagtatctttcgggagaggatggttcaacgttttttgaaaatcttttaggaaatttaaaataa

SEQ ID NO: 318175 - DNA, 289 bp, Unknown
  Bacterial polypeptide expressing nucleotide sequence isolated from the Sargasso Sea
gcctgtaagctttagaactcctgttacaggaggtaatgtatctttatacaatgaatccaaaaataaagataatctaattactcctatcaatcctacgcctgttattggaatggttggaaagttagataatgtcgaaaaagctataagtagtgaatggaaaaatattgaagatcaaatttggttaattggttcttctaaatcagaagtaaaaattgcagctagttcttatcttggaatattttcatggagaaattacaggtcggcctccaaaaatagatttgttggatga

SEQ ID NO: 318176 - DNA, 2956 bp, Unknown
  Bacterial polypeptide expressing nucleotide sequence isolated from the Sargasso Sea
aacaattaaagtcgaaacacataatcatcctacaggcatatctccttttgaaggtgctgcaactggttctggtggagaaataagagattgttctgcaaccggaagagttgctcgaccaaaagcaggctttatggggctgtgtttatctcatttgcgtttatccgacgagttagagagctgggagagtgagcctaataaaccagattttttatcttctccaatggaaataataagagatgctcctattggttctgcatcttataacaatgaatttggtaggccagcaatttttggctatttccggactttagaatacaagaatcatggttatcataaacctattatgctggctggtggggtcggctcaataaaagaagttcatataaataaaggcgctccaaaacctggtgatgtggttgtagttctaggaggtccagcaatgcttattggcttaggaggtggttctgctagctcaactaaaaagacaaatgaaaattcagatttagattttgcttctgttcaaagatctaatccagaaatgcaaagaagagctcaacaagttctcgataaatttaatgaaagaagctcaaagaatccaattactttcattcatgatgttggtgctgggggcatatcaaatgctattcctgaattagctaaagatactaatcttggagttaatattagactcgaagatatctattcaacagatgaaactatgtctcctatggaactttggtgtaatgaatcacaagaaagatatgttttctctattccaaaagaaaaagtgcctgccctaaaacatatttgtgaaagagaaaggtgcccattttcaattgctggagaattaaccattgatagattgataaatgttaaattccataatgatcaagttgttaatcttagcttggatcatctatttggagatattccattaccagaactgatagctcaagattacgatcgaataactgaaaaagaagaattaccaataaaagatttaaaaaaacttatctttaatacaataaaatttccggcagtagcatcaaaaaaattcttaataacgattggagataggactgtaaatggtttagtttacagagatcaactaataggcaataggcaattacctgttagtgattatgccgcaacacttgatgactatgattcttattcaggacaagttgtttcaattggagaaaaacctaatattgctattgagaatcctgaagcttcgacaagaatggcactggcagagtcaataaccaatatttgtggagttaaacatgaatctcttagcaacatctgtttttcagcaaattggatgagtccaacaaaaacagcagatgaaagaggagatcttttaagaggagtgcaaagtttatctaatatggcagattatttaggtttatctattcctgttggaaaagattcgttatccatgaacacttcttggaatagtgaaggcaatgagcattcagttacttcaccaatgacactaaatatatcttctttttccaatgtctccgatttaagaaagtcagtaacgccagaactttcaacaaaagattcaactttattacatgtatggattaatgaaggagaatttcgtttaggtggtagttcattatatttatcaaataatcttttcggtggagctacacctgatgtagaagatccagaaaaatttaaacagttatttgaagcatcgcaagatcttatctctaaaggtttaatagaagcacttcatgatatatcagatggcggattaattacgactttaattgaaatgtcactttgcagcaattcaggccttgatatcagattagattattcagataaagagagcattattcctaaattgttttccgaagaagtcggctatgttatagaaattgataatgaaaagcttacagaagttaaagaagacttaactaagagagggttattttttgatgaagttggaagaaaaaatattgataaaaaaatcaatatattaaattttgatgatgctttattttcatctacattaaataaattattcgatgagtggagttcagtaagccataaaatacaaagaataagagacaatattgaatcagctcaaagcgaaaaagaagtctataagaaatgggatgaaataatcaccccaaaaatagatttttctattccatctccaaataagaacctattttctaaaaaaccaaaaattgcactactgagagaacaaggcataaatggccattatgatatggcagcggctttgatggaggctggctttgaagtacatgatgttcatatgagcgaattgctagataaaattaaaaattttgatttatataatggccttgttgtgccaggaggcttttcatatggagatgttttaggcgcaggctcaggaatgtctaatacaattctgtttaacccaaagattaagaagatttttaagaatttcttagagaatgataagaaatttgcactgggaatatgtaatggatgtcaatttttatctggactcaaagaaattgttccaggagcagataattggccagaatttaaaaagaatctttctaatcaatatgagtgcaggttggtacagttaaaaatagaagatagtccttcaatctttcttggaggtatgaaagacagcattattccagttatggtttctcatggagagggtagagcagatttcaatttagaagaagaaaatgtaatcgctagatatgttgatcctgatcataagattacccaaacatatccgttaaatcctaatgggtctatgaatggtgtggcaggtgtttgcaatgatgatggaagaattactattatgatgcctcatccagaaagaacttatcttactaaacaattctcttggtctccaaaagattgggaagagcattctccatggttcaaaatgtttgataatgcttatttattttctaagaaaaattaa

SEQ ID NO: 318177 - DNA, 781 bp, Unknown
  Bacterial polypeptide expressing nucleotide sequence isolated from the Sargasso Sea
tttggaggggtgcgcaaagactgtttcagttggggctactccgcttgccctaacagactgtctatgttttggcaaccctgaaaagccagaagaaatgtggcagttttcacagagctgtcttgcaataagagaggtttgtgataatatgcgctttaacgaaacaaaaaatttacccattgttgcgggtaatgtaagtttttataaccaaagcggtgatcactctataccggcaagcccaatgattggttgttttggaaagattaaaaagaaaaaagttttaaaaaatgggtttcaatctttatcgtctaatttatttttactgggagaaacgccgacatttcttgggggtagtattgttagcgatgttcttggggttaacaacacaaaaattgaagcgcttgacctcaagaagtataataatatgttgggttgtgttttagaagcaagcgaaaaagcgctgttgcaatcttgctcatatgttgggttgggcggcttagctaccactgttacaaaaatgagctttttaaacaacataggctgtgttgttgagggtctagataaagactgtttgtttagcgaaaacttgtcctttgttgttgaggtttcagaaaaaaactcggaagcttttgaaaaaatccttaacaataaaaactgtagctataaacaaattggtaaaactattgattccaataaggttgctattgaaaatttcatagaattggatataattaaagcaaaaaaagtttggaaaagctcacttaaggaaaggttgcaaaaatga

SEQ ID NO: 318178 - DNA, 520 bp, Unknown
  Bacterial polypeptide expressing nucleotide sequence isolated from the Sargasso Sea
aatgctagataagcttgctagttgggacacgatcgatttttcttctagctcggatgcagaaatcacaaaaactctcaaagagttaaatattgcgctaagcgttgacgaagtaaaaaaaattcaattttcgtttcttaataggccggccactttaacagagcttgttctattttctatccaaggatcagagcacagttcatataaaagcagcaaaaatcatataaaacactttttaacagatggggatcatgtaatcttgggtgctaaagatgatgcgggcgtcgtttcattgtctgtagatgataatggaaacaggtacggtctcgttgtaagtcatgaatcacacaatcaccccagccaaattgtgccttatgagggtgctgctactggagtaggaggaaacgtaagagatgtttgctgtatgggagcggaggtgatgtctttgggtgacagtttaaggtttggagacatcgatagaaataaaacaaaatggattagtgatggtgttgtatctggtatc

SEQ ID NO: 318179 - DNA, 222 bp, Unknown
  Bacterial polypeptide expressing nucleotide sequence isolated from the Sargasso Sea
aatgaaatcatcagtaattatttttccaggttcgaattgtgatagagatatggatgttgctctaaaaaaatttggttttataaaccaaatggtttggcataatgatatcgatttaccaaagagtgatttaattgttttgcctgggggtttttcatatggtgactatcttagatgtggaagtatagctggaaagtctagaataatcagttcagttatagattt

SEQ ID NO: 318180 - DNA, 3652 bp, Unknown
  Bacterial polypeptide expressing nucleotide sequence isolated from the Sargasso Sea
tttgtctgccgatgaatttcaagatgatttttcattttatgttggcccaagattaggcacaatctctccatggtcttcaaaaactgaagacattgtcaaaaacgttggttttaaaaatattaaaagagttgagagattgtatggtttcaagttggatcaacttgtagaggaaagtcatgatttttcaatgttctatgatcgaatgactcaagaagtatataaatcaaaatatgattttgaaaatctatttgctagcgaagagcctagaccattaaattatgtagatatcctaaaaaatggaaaagaagcacttgaacatgccaatacatcttttggctttgcgatgagttctgaagaaattgattatttgtttaatttctataaaaaagaaaatagaaatcctactgatgcagagttgatgatgtttgctcaagcaaactcagaacactgtaggcataaaatatttaatgcaaaatgggatattgatggaaatcaaatgaataattctctttttgatttaattaaagacactagcaaagcatctcctgacggaattatttctgcttataaagataatgcagcaattatagagggggagaaaatagagcgattacatttaaatgaatcgaacacatatgaactgaagcaagatattattaactcaactataaaagtagagactcacaatcatccaactgcgatttctccctatccaggcgcatcaactggttcgggtggagaaataagagatgagggggctactggaagaggagcaaaacctaaaattggtttagtcggatataacgtatctaatttacgcataccaggattgcaaagaagttgggaaaaagaagaaaagaagccatcaagaatagcatctccgttagaaataatgacagatgcgcctattggagcagctgcattcaataatgaatttggtagaccagctacattaggttatttcagatcttttgaaactgaattcaacgaaaatgaggcctatggatatcacaaaccgattatgcttgctggaggaattggtgaagttagaaatgcaaataattttaaattacaaatagcagaagactatttggtaattgttttaggtggaccagcaatgctgataggtcttggtgggggtgcagcatcttctgtttcgtctggtgaaagtgatgttgatttagacttcgcatcagtacagagagataacgctgaaatggagcgaagatgccaagaagttattaacaaatgttcatctcaagaaaataactacattgaatttattcatgatgttggtgctggcggactatctaatgcaattccagagttagctaaagattcagagctaggggtttatatagacctatctaaaataccaaatgcagataaatcaatgtctcctatggaaatttggtctaatgaatctcaggaaaggtatgttttggcaattcataaagataatcaagcatcttttgaaaaaatctgtataagggaaagatgtgaatatgcaattgttggccacactacaaaagaaaaatccgttaaattatttgatgctaacaaaaacaattttccggtcgatgttcccttatcgatgttatttggagacttgcctataactaagatgaaagtttctcaaacacttaaagaagaaataaaagaaattgaacccgatgattatgacttatctgaagtgcttattaaaaccttgcaacatccaacagtagcctcaaaatcttttctaattactattggggatagaacagtcagtggaatggttgccagagatcaatttgtcgggccgtatcaagttccagtatctgattacagtttaagcatgaggtcttatacatctaaaaaaggagaagttgtgtcaattggtgagaagcctaccatagctgtatcaaatgcaggggcttctatgcgtatggcactagcagaagcgttaacaaatatggctggagttgtaataaaaggattaaattatgttcaggtttctgcaaactggatggctgcttcaggagataatcaagaagatttaaatcttagaaatggtgttgaggcattatcaaaattatcatccaagctaaaaatatctataccagtgggaaaagattctctttcaatgaaaactagatggaacgaaagtgatgctgagttcgaagtaaaaagtccattatcaggaatcatcaccgcaatggctccagtggatgacatagctttgtgcgtaactccagaaatagatatcaaggccgaaaccaaactagtcttagtaaaacttaatcagaaaactagactaggcggctctattttttctgaagttatacaagaaacattcaacgagactcctgatattgatgatgcagataaatttaaagatatgttttatttaattcaagatttagtaaaaaacaaaaatattatcgctttacatgatatttcagacggaggacttgttacttcaattgctgaaatgtgctttacaaaaaaaattggagcaactattgatatttcagattttgaaaacataaatcaaactctatttaacgaagaaataggatttgtcattcagattgaaaacagtcaacttgaaaaggttttgaaactctttgaagaaaaaaatctattttctaaagaaatcgcagatttaaataataataattttgttattaaaaggaataaaaaaattattttcgaagaaaaaataattaggctagaaaaatactggcgagaaacatctcatgcaattcaaagtattagagataataaagaaattgcagattccgagttaggattgctagattcatctgaatatactgggctaaattcgaatgtttcttttgatgagtctcaaataataagtttcaaaaacataaaagcaaaacctaaagtagctatattaagagaacaaggagttaatggtcagaatgaaatggccgctgcatttaccttagcaggatttgaagctcaggatgtacatatgcaggatcttttagatggcgaaatttcacttaaaaattttaatgggatggctgtatgtggtggtttttcttatggtgatgtattaggagcaggtggcggttggtcaaaaaccattatttataacgaaaaagtaaaagatcaattccaggcattttttcaggatgcgaataaattcactcttggtgtttgtaatggttgtcagatgctttcaaatctcaaagatattattccaggtggagagaattggcctagtttcgagagaaatttttctgatcaatttgaagctagacttgtgcaggtaaagattgaaaaaactaattcagtgcttctacaagatatggaaggatggactgttccagttgcatctgcacatggtgagggaagagcaaaatttgatgaaaatagtttaataaaattaaagaaaaataatcaaattgcgatgcgctttgtagattctttagggaaagatactgagatttatccgctcaatccaaacggatcacccgagggaattaccggtatcactgctggcgatggaagaataacaattatgatgccacatcctgaaagagtctttaggaaacatcaattgagttggtataaaaaagattggaaagagttctcgccgtggatgcagatttttatcaatgctaataatttcgtaaaatag

SEQ ID NO: 318181 - DNA, 766 bp, Unknown
  Bacterial polypeptide expressing nucleotide sequence isolated from the Sargasso Sea
tatgaacgtattagtcttatcaggttatggtattaattgtgaaaatgaaacactacatgcatttgaagtagtaggctttgaaggaaaaattgttcatattaatgatctaatacaaaatcctaaacaacttaataactatcaagtattcgctatacctggtggtttttcgtatggcgatgatacaggttcaggaaatgcaatggcgaaaaaaattctgaccaatttgtatgatcagctaatagatttttcattaaaggataaattaattataggcatttgtaatggatgccagatattaattaatcttgggttagttccaagcctaaataaaaaagatccagaagttgcaatgattgaaaataaatctgggagctatgagtgtcgatgggttgatgtaaaagtaaataataataaatcaccatggctaaaaaatattagtatcttgaacttgcctgtcgcccatcaagaaggacaattcatgatacctattaatctacttaaaagtatcaaagctaataaccttattggcttacaatacattaataaccataaaaaattagcaaaaggtcagtttccctttaatcctaatggatctaaagatgatatagctgcgttaacaaatcaaaatgggaatgttcttgcaatgatgcctcacccagaaagagcattttatcattatcatgttcctaattggcaaaacaatacttctaaaaaattcggtgatgggtataaaatttttatgaacgcaaaaaaattctttgcataa

SEQ ID NO: 318182 - DNA, 565 bp, Unknown
  Bacterial polypeptide expressing nucleotide sequence isolated from the Sargasso Sea
aatgaaatcatcggttataaccttccctggttcaaattgtgatagagacatggaagttgctcttacaaaatttggatttaaaaataaaatggtttggcatgatgatcaagaattacccaaaagtgatttaattgttttacctggtggtttttcttacggtgattatttgcgttgtggaagtatggcttcaaagtcaaaaattatgcactcagtaattaactttgcaaaatcgggtggattagtgatgggaatttgtaatggttttcaaattttggttgaggctggattggtgccaggagtattattaagaaataagtaccttcagtttatttgtaaaaatgtccacgtaaaagttgacaacaaagaaaacactttttttaaaaacctagataaacaagttttggaatttcacatagcccataatgagggtaactatttttgtaccaacgatcaactcaaagagattgaagataacaatcaaatagccatttattattgtgatcaaaatggtaatacaaatgatcaaaataatcctaatggctcaattaaaatatcgcgggtattt

SEQ ID NO: 318183 - DNA, 1087 bp, Unknown
  Bacterial polypeptide expressing nucleotide sequence isolated from the Sargasso Sea
atgtatgatcgtaaatggaaaaaagcaaaacttcctaaaaaaaataaaattaaaaaagaagatattaaacatttaaaaattattgatgtattgaagaaaattttagcaaactcgaatgtatgcagtaaagaatggatttggcaacagtatgatcatactgttatgggagatacaatacaaaaacctggaggagacgcaggtgttgtaagagttcatggaacggacaaagcggttgctgctacagtagattcttctgcagtttattgctggtcacatcctttaactggtggaaaacaagtagtttgtgaaagtttcagaaatcttatttctgttggtgctaaaccaattgctattactaactgtttaaattttggaagtcctgaaaatgaagaaaatatgggtgagtttgttgaatgtgttcaaggtataggtgaagcaagtgaatatctgaagttccctgttgtttctggaaatgtatctttctataaccaaacaaaagatgcaggtataaaacctacgcctgcaattggtggagttgggttaatcaaaaattataagaatatgatcactatggagtttaaagaagttgacagtttagttttggttattggaaaaactgagggacatattgatcaaagtgtatttgcaagaaatattttagatgagaaaaatgggcctccacccgaggtaaatctatttaatgaaaaaaataatggagaaacattactgaaattgattgataataatttaattaaaagtgcacatgatgtttcgttaggtggcataattactgcagtagcgaaaatgtgtattaaaggaaaaaagggaataaatattaaaaaaccaaaatatttaattaacgaaatagaatacttgtttgctgaagatcaagggagatatattatagaaataaacaaaaaagattttaaaaaagtaaccgatatattgcataaaaatgctgtccatttcgatgatcttggtacaattaatgaaaatgaactatatattaatgataagacaaaagttacaattgacgaattatcaacttctaataaaagttggcttacaaactatatgagtaaataat

SEQ ID NO: 318184 - DNA, 703 bp, Unknown
  Bacterial polypeptide expressing nucleotide sequence isolated from the Sargasso Sea
atgctagataaaattgctagttgggacataattgatttttcttctagctcagatgcagaaatagcgactacgcttaaagagttaaatattccgctaagcgttgaagaagcaaaaaaaattcaattctcatttcttgataggccacctacattaacagaactagttttattctcaatccaaggatcagaacatagttcatataaaagtagcaaaaatcatataaaacattttttgactgatggaaaacatgtaatactcggtgcaaaagatgatgctggggttgtttccttatctgttgataataatggagataggtatggtcttgttgtaagccatgagtcgcacaatcaccctagtcaaattgttccatatgaaggggctgctactggcgttggaggaaatgtaagggatgtttgttgtatgggagcagaagtgatgtctttgggggatagtttaagatttggtgatattaaaagaaataagacaaaatggattagcgacggtgttgtgtcaggtattgcaggatatggcaatccacttggcataccaaatatttgcggtgatttatattttgataaagaatataacgaaaattgtttagtaactgttttaacagcaggaatagttaaagaaaaaagtgtgataagatcaaaggcgccagaaaactctgctggttatgatttaatactcgttgggaaaacca

SEQ ID NO: 318185 - DNA, 3883 bp, Unknown
  Bacterial polypeptide expressing nucleotide sequence isolated from the Sargasso Sea
atggagatcatccgcggagcccctgcactctcgacgtttagagtgcaaaagctaatggaggcctgcgtaaacgctgcgcttccggtacgccaaatctatgctgagtatgttcatttagcggatttgagcgagttgcttgagaccaatgagcgcaagcaacttgaaaaaattctcacctatggacctgctatcgaagcccataccccccaaggttcactcctgtttgttactccccgccccggcacaatttccccatggtcttcaaaagctactgatatcgcccacaattgtggtctcggtaaggtaaagcgtttggaacgtggtgttgcctattatgtggagtcagacactttgactgccgagcagcaacaaaccctcaaagggttattgcacgaccgtatggttgaagtggttctggacgattttgcaaaggccgatgtgctgtttaagcgcactgaacctgcgcctttcaagagtgtgaacgtgttggctgaaggtcgccgtgcccttgaagtggccaacgtcgaaatgggtctggcgctcgctgaagatgaaatcgattatttagtcgaaaactttgtccgtttgaaccgcaatccaaatgatatcgaactgatgatgtttgctcaggccaactccgagcactgccgtcacaagatttttaacgcagattggacaattgatggcgaggcgcagcctaagtctctgttcaagatgattaaaaacacctttgaaaccacaccagaccacgtgttatctgcctataaagataacgccgctgtgatggaaggttcggttgcgggacgtttcttccccgatccaaacggtgtttatagctatcacactgaaccaatgcacgtactgatgaaagtggaaacccacaaccatccaacggcaattagcccatatcctggtgcggcgacgggttcaggtggtgagatccgcgatgaaggtgcaaccggtcgtggctctaaacctaaagcgggtttaactggctttagcgtatcgaatttaaaaatcccaggttttgttcaaccttgggaaggtaattatggtaagccggatcgcatcgttagcgctctggatattatgaccgaaggcccattaggcggcgccgcgtttaacaacgagtttggtcgtccagccctgttaggttacttccgtacctatgagcaagaagtctctagccacaatggcgtagaagtgcgtggttatcataagcccattatgttagcgggtggtttaggtaatattcgcgaagagcatgtacaaaaaggcgaaatcaccgtcggtgctaagctgatcgtactcggtggccctgcgatgaacatcggtctgggcggcggcgcggcttcttcgatggcgtcaggtcaatcgagcgaagatttagactttgcgtcagtacagcgtgaaaacccagaaatggaacgccgctgtcaggaagtgatcgaccgctgctggcagttaggcgataaaaacccaattcaatttatccacgatgtgggcgcgggtggtttatctaacgctttccctgagttagtgaatgatggcggccgtggtggtatcttcaatctgcgcaatgtgccatcggacgagccgggtatgagcccgctggagatctggtgtaacgaatcgcaggaacgttatgtactttcggttgctgccgaagacttgcctttatttactgcgatttgtgagcgtgagcgcgcaccgtttgcggtcgtaggcgaggcgacacaagagcagcatttaaccctagccgacagccattttgataacaatcccatcgatttaccactcgaggtgttattaggtaaagcacctaagatgagccgtaatgtggtgtctaaaaaggcggtttcacctgcacttgagcaaagcaatatcgatattaaagatgcggttaaacgcattcttagcttgccaacagtggcggacaaaaccttccttatcaccattggtgaccgcacagtaacgggtctagtgaaccgtgaccaaatggttggcccatggcaagtacccgttgcagattgcgcggtaactgcggcaagctttgatacctacgccggtgaagccatgtctatgggtgaacgtacgccgctggcactgctcgattttggcgcctctgcccgtatggcggtggccgaatcgattatgaacatcgcgggtgcggatattggttcgttcaaacgtatcaaactgtcggctaactggatgtcggctgcgggtcaccctggcgaagatgcgggtctttatgaagcggttaaggccgtgggtgaagagctgtgtccagaactgagcctcaccattcctgtcggtaaagactccatgtcgatgaaaaccgcatggcagcaagatggtgtgaataaaaccgtgacatcaccaatgtcattggttatcacggcctttggtgtggtgcaggatattcgtaacaccgtgacgccagagctgcgcagcgataaaggtgaaacctctttattgctagttgacttaggcgctggtaaaaatcgtttaggtggttcttgtttagcacaggtttacggtgagttaggcgatatcgcgccagacttagacgatgctgcactgttacgtggtttcttcgaaaccatgcaaaagctagtggctaataagttagtgattgcttaccacgatcgtagcgacggtggtttattcacgaccttggtggaaatggcctttgcgggtaatactggcttagacattgatatagaagatctacagggcactgatttagaaatactctttaatgaagagctcggcgctgtgctgcaagtgagccgcgataacgctgccaaaatcgccgctcagtttgctatcgctggcgtaccttgccatgtgatcggaacgctagccgatgatgaacgcatcaccattaaagagggtgagcgtgaagtgttcagcgagacgcgtgttgcactgcgcactgtgtggtcagaaaccacttaccgtatgcaagcactgcgtgataacccagcctgtgcattagaagaatttaagcttaagcaggatgaaactgacttaggtttaacggttaagttaagctttgacccgagtgaagacgttgctgcgccttatatcctcaaaggtgctgcacctaaaatggcaatcctgcgtgagcagggcgtaaactcccatgtcgaaatggctgctgcgtttgatcgcgcagggtttgaaagccgcgacgtgcatatgtctgacattctgtcaggtcgcattagccttgaagagttccaaggtttggtggcttgtggtggcttctcctacggtgacgtactaggtgccggtgaaggttgggctaagtcgattctgtttaacgagcgtgctcgcgatgagttttcacgtttctttgaacgtgactcaagctttgcgctcggcgtgtgtaacggctgtcaaatgctgtcaaatctgaaggaaattattcctggtagcgagcattggccacgtttcgtgcgtaaccgctctgagcgttttgaagcacgtttcagcttggttgaagtgcagcaaagtccgtcattgttcttccaaggtatggcgggttcacgtatgccaatcgctgtatcccacggtgaaggacatgctgagtttgctagtgcacaggcgctggccttagcagaggcttctggcaccattgcgctgcgttttgtgaatggtaaaggcgagatcgcgactcaatacccacaaaacccgaacggctcgccaaacgggttaaccggtatctgtactactgatggccgtgtgaccttgatgatgccacaccctgagcgtgtatttagaacggttgcgaactcgtggcacccagataactggggtgaagacagcccatggatgcggatgttccgcaatgcgcgagtcaacttaggctaag

SEQ ID NO: 318186 - DNA, 271 bp, Unknown
  Bacterial polypeptide expressing nucleotide sequence isolated from the Sargasso Sea
catgaaatcttctgtaatagtttttcctggctcaaattgtgatagagatattggagttgctttagaaaaaatgcaatttaaaaatcaaatggtttggcataaagaaaccaaattacctaaatcagacttaatagttatccctggcggtttttcttatggtgattatttaagatcaggagcgattgctggaaaatctttaataatagaagaagttgttaaagctgctaattcagggtgtttaattttgggaatttgtaatggatttcaaatt

SEQ ID NO: 318187 - DNA, 1492 bp, Unknown
  Bacterial polypeptide expressing nucleotide sequence isolated from the Sargasso Sea
gaagcaattaaaatacaaaacgatatgcttggaagagcaccctcgctggccgagctgattttattctcgattcaaggatctgaacactgtagctacaaaagcagcagaaatcacctaaagaaatttgtgaccgatggaccagatgtaattcttggcgcaaaggaagatgccggggttgttgctgttgcaaccgataagcaaaatcggaaatggtgtgttgttatgagtcatgagtctcacaaccacccttcacaacttgttccatatgaaggtgcagcgacgggcgtgggtggaaatgtgcgcgatgtaatgtgcatgggagcagaggttattgcgtgtacggactcttttaggtttggcaatataaacaacaacaaaacaaaatggatacacaacggagtggtagacggcattgcgggctattccaacccacttgggattcctaatattggtggtgacatatactataatgatggctataatgaaaactgtttggttaccctagttacgcttggaatagttagagatgatcttatcatacattcatacgccccagaaaatgcagagggctatgatcttatattaataggaaagccaacagataacagtggttttggcggggcaagctttgcatctcttgaactagaggaagacaaaaaagagcaaaataaaggcgcagtacaagagccaaatgcttttttagaaagacatttgttgaaatctacgtatgcattgtttgataagttaaaagagaaaaagctaattaataaagttgggtttaaagacttaggagctgggggagttgcgtgtgcaagtgttgagcttgctgaaacttcgggctatgggtcagaagtttggatggataaaatacacataggaatggaaaacctccaccccagtgtttatttatgtagcgaaacccaggaaagattcatgtgggtttgccctcccgatataacacaaatgatactagaacattataatgttatttatgatttgcccaatgttagcactggcgcaatggcttcagctataggaaagatacgaggcgatggattatatattatacataacgaaaacgatgaaatagcgcatgcacctgccagtcaagttacaaaaggttttttatatgatcggaagtttgaaaacccacagagtttacatgaagaaccgaatttagaaaccgaaaaagatatgaatgatgttttgttaagaattcttgaacatgaaaatatagcaagtcgcgaaccagtatatgaaaaatatgacaaacaagttcagggtcgaatttatactgaaacgggctgtgcagatgcaggtgtgctcgccccatttaactcaaatgactatcctgaagaaattcggaatatcggaatcgccttgtctactgatcacaatcctcgatacagtgaaataagtccatattggggtggtgttaatgctgtcgtcgaggcaatgcgaaatattgctgccgttggagccacaccgcatg

SEQ ID NO: 318188 - DNA, 874 bp, Unknown
  Bacterial polypeptide expressing nucleotide sequence isolated from the Sargasso Sea
gcatgccgcccgtcaggacgcagccgatcctggcctgcaggccaagctcagctacaacccggccgaggacgtggctgcaccctacattgcccgcggggtctccccccgtctggcggtgctgcgcgagcagggggtcaactcccacgtggagatggcggcggcgtttgaccgcgccggctttgcggcggtggacgtgcacatgagcgacattctcgaggggcgcatcaagctggatgcgttccagagcctggtggcctgtggtggcttctcctacggcgacgtgctgggggcgggcgaaggctgggccaagtccatcctgttcaacgacggtgctcgcgagcagttccagcgcttcttcgagcgcggcgacaccctctccctgggtgtgtgcaacggttgccagatgatgtccaacctgcgggatctcatcccgggggccgatctgtggccgcgcttcgtgcgcaaccgctccgagcgcttcgaggcccgcttcagcctggtggaagtgcaggactccccgtcggccttcttcgccggcatggcgggctcggtgatgccgattgccgtctcccacggggaagggcgagtggaggtgcgcgatgccgctcacctggctgcgctgcaacagagcgggctggtggggctgcgtttcgtcgacaaccgcggtcaggtgaccgagcagtacccggccaacccgaacggcgcaccggcgggtatcaccgcagtgaccaccaccgacgggcgcgccaccatcatgatgccgcacccggagcgggtgttccgcaccgtggccaactcctggcacccggacaactggggcgaggatggcgcctggatgcggatgttccgcaacgcccgggtacgtctgggttaa

SEQ ID NO: 318189 - DNA, 1072 bp, Unknown
  Bacterial polypeptide expressing nucleotide sequence isolated from the Sargasso Sea
ttggaaaaaaactaaattaccgcaaaaattaaaatttgataaagatgaatttaaatcattaaaattatcagattgtctaaagaagattttaagtaattcaaatgtttcagataaaaaatggatatgggatcaatatgaccatacagtaatgggtgatacaattcaaaaacctggtggtgatgctggtgttgtaagggtacatgggaccaataaagcggtagcagcatcagtagattcatccgcattatattgtttctcgcatccattaactggaggaaaacaaatagtttgtgagagctatagaaatcttatttcggtaggagccaaacctattgctattacaaattgtttaaacttcggaaacccagaaaaagaaaaaaatatgggtgaatttgtagaatgtgttgaaggtattacagaagcaagcaagtatctagattttccagtcgtatctggaaatgtatcattttataacgaaacaaaagataaaggtatcaaacctacgccgacaattggaggtgttggactaatccctgactatcaacaaatgcttactatggattttaaaactgaaggaaacttagtatatgtaattggtaaaactgatgggcatttagatcaaagtatttttgcaagagagcttttaaatgaaaaaaaaggtccaccaccaactgttaatttatttaatgaaaaaaacattggtgaaactgtattagatttatctagaaaaaaacttattgtgagttgccatgatgtatcattaggtggaattttaacagcagtatcaaaaatgtgtattaaaggaaaaaaaggaataaaaattaatacacttaagggtttaacaaataaatatgaatatttttttggtgaagatcaggctcgttatattatcgaaatacctaaagctagtttgaagaaagtaaatgagattttagacaaatattcagtacattttgacgaattaggaataataaatggcaattccattaaatataatgatgatatcaatttgcctattgaagaattagcagatgcacataaatattggttaaacaagtatatggatagctaa

SEQ ID NO: 318190 - DNA, 766 bp, Unknown
  Bacterial polypeptide expressing nucleotide sequence isolated from the Sargasso Sea
tatgaacgtattagtcttatcaggttatggtattaattgtgaaaatgaaacactacatgcatttgaagtagtaggctttaaaggaaaaattgttcatattaatgatctgattcaaaatcctaaacaactaaacaattatcaagtattcgctatacctggtggtttttcatatggcgatgatacgggttctggaaatgcaatggcaaaaaaaattatgaccaatttgtatgatcacctaataaatttttcactaaaagataaattaatcataggcatatgtaatggatgccaaatattaattaatcttggtttagttccaagcctaaataaaaaagatccagaagtagcaatgattgaaaataaatctgggaactatgagtgtagatgggttgatgtaaaagtaagtaataaaaaatcaccatggctaaaaaatattagtaccctgaacttgcctgttgcccatcaagaggggcaattcatgatacctgttaatctacttaaaaatatcaaagctaataatcttattggtttgcaatacattgatcaccaaaagaaattagcaaaaggtcaattcccttttaatcctaatggatctaaagatgatatagcagcgctaacaaatcaaaatgggaatgttcttgcaatgatgcctcaccctgaaagagcattttatcattatcatattcccaattggcaaaatagtaccttaaaaaaattcggtgatgggtataaaatttttatgaatgcaaaaaaattctttgcataa

SEQ ID NO: 318191 - DNA, 193 bp, Unknown
  Bacterial polypeptide expressing nucleotide sequence isolated from the Sargasso Sea
atgaaatcttctgtaattatatttcctggctctaattgtgatagagacatggatgtagctctaaaaaaattcggttttaaaaatacgatggtatggcacaacgatgataaacttccaaaaagcgatttaatagttcttccaggaggcttttcatatggtgattatttaaggtgcgggagtatagctggtaaaa

SEQ ID NO: 318192 - DNA, 949 bp, Unknown
  Bacterial polypeptide expressing nucleotide sequence isolated from the Sargasso Sea
aagttgggttactaatcaatatgatcagatggtaatgggcgatactgttcaaagatctggttctgatgcagcaataattagaatacataataaagataaagctatagctgttacggtagactcttccgctaattattgtaaatcccagccaaaaatcggtggaaaacaaatagtgtgcgagaattggagaaatttaatttctgttggcgcaaaaccattggcaattaccaattgtttaaattttggtaacccagaaaatgaggaagttatgggagaatttgctgagtgtttagagggaattaaagaggcgtgtgagtttttgaactatccagttgtctcaggaaatgtatctttttataacggaactaataaaaaaaatatatatccaactcctgtaatcgggggagttggcattataaaaaaattatcaaatacaatcaaccataagttaaaaaaagaagagagtttgatattattaataggaaaaacttttggacatattgagcaaagctgttttcttaaagaaaatttttctataactgatggtaatccacctgaaataaatttttttaatgaaaaaaataatggagaagctgttttaaatttaataactttgggtttggccaattccgttcatgatgtttctaatggtggattaattgttgcattatgtgaaatgtcaatgagctctaattatgggattaaaattgaaaagcctaaaaaaataaggaacccggttgagtatttttttggagaggatcaaggaagatatattgttgaaataaacaatgataatttaattaaagttgagaaaattcttcaaaaaaataacgtttattatgaactaatcggtgttactcaaaaaaaatattttgaaatcgagggtttaatgaagtcagacgtaaatgacctctttaaaattaataatcaatggtataacaaatactga

SEQ ID NO: 318193 - DNA, 405 bp, Unknown
  Bacterial polypeptide expressing nucleotide sequence isolated from the Sargasso Sea
aatgactttccaagaacatgaaaaattacacattgaaaaaaatgttaaacgagaattaacttccactgaatctcaaattcttgcagcagaatggtcagaacattgttcgtacaaatcttcaaaacaacatctcaaaatgcttccgactacaggtccaaatgttattgtagaaaaaggctatgattcaggtgttttagatgtaggtggtggttatgttgtaactgttcatattgaaagtcataaccatccttctgcagtagagccatttggtggtgctgcaactggtgttggtggtgtcattcgtgatattttatctgcaggtacaagacctgttgcactttttgatggtttacgatttggaaatatagaaaatgattcacatgctagatggttattcaaaaatgc

SEQ ID NO: 318194 - DNA, 1082 bp, Unknown
  Bacterial polypeptide expressing nucleotide sequence isolated from the Sargasso Sea
ggctggggtgatagcagctcaagatgagattattaaagaaattataatccaatcagaatcgggaaaacctgtattaggtatctgtaatggggctcaaattttagttgaaagtggaatggtgcctggattaagaaactatgagatcggagcagctttaacagaaaataaacgagttaaatctggaaggatcttagggcaaggctattacaatgtttggacaaatcttaaaatgaacgttgatccggcgagatcagcatttacaaagcatttacaaaaaggtgagattatcagaatacccttagctcatggcgaaggaagatttgttatacctgagactctactaaatgaaatggtcgaaaacgaacaagagctatataagtattgtgatgaaaatggtagcactataaatgaatttccaactaaccctaacggttctataaacaatatagcagctatttgcaatagtgctggaaatgtaatggccatgatgccgcacccggaaagaacgccaaaaggagatgcaattttttcatcaatgaaaaagtatattgatgataagagtaaaccaagattcaaaacgctaaaatttaaaccagcgaaattaaaacaaaataaataccccaaagattcatcaaaaatcatgtggctaattgatatgttcataactgataatgaagctatcagtgtagaaaatgctttacaacaaattggttttgatgtacgaatcaaacgacaaataatgtgggagattgaaatagaaaaaggcagcatagacacattagaaaaaataaaaaaaagcgggacactgtttaatcccaataaagaatttattaaaaaacaaaccgaaccagatcttaatgttgcatcaattttagtctgtcaaaaagagaatataaaaggtagagcagcttatgaaacattaaaaagcagtatgggcattgataaagttttacaaataaaacacggtgtattgtggaatctgaaaattaatggaagtaattttgaaaacgatttagaaagaattttaaaaacaaatatattatttaaccaaatatcatatgaatactatagaattaaatgaa

SEQ ID NO: 318195 - DNA, 1261 bp, Unknown
  Bacterial polypeptide expressing nucleotide sequence isolated from the Sargasso Sea
atgacgataaacatcggtgtaattcagttcccaggatcaaacacagaaagagaaactggccttgcaataaaacgcgggcacatgaatccagtagaaattctatggaactcagatactgagtcagtagcaaattgtgatgggtatattatcaccggaggattttcttttgaagatagatctagagctggcattatcgcctctcttgacccgataatgaaaacaataaaggaggaagcagaaaatggtaaacctgtatttggaatttgtaatggcgcccaaatactggtggaatcaggactggtcccaggtgttaaaaacagccaaactgcaatcgcattaactgacaacaaacgaattcaagatggccatgttgtaggaactggctattacaatacatgggcaaatctgaaagttactgtccctccaaatagcacggcatttaccaggcaccttgaccatgaagaaataatctacgttccatttgcacatgccgaaggaaggtttatcattccaggagagctgttagatgaactgatagaaaacaaccagacagtatttcgatattgtaacaacgatggagaaacattaagtcagttcccgacaaaccctaacggttctgattataatcttgctgctatatccaactctgctggcaatgtcctcgcgatgatgcctcaccctgaaagaactaatctgggggacaaattattttcttctatgagagaattcattgaacaaaaaatctcaagtaagaatggctctctatcatactctccgcctggcaaacgtattaaaaaatatactccaggaaaagatgtatcagagtgggtggttgatatggtaataacagacaatgaagcagaaacagttcaaaacgcactcaaaagaacagggattgatgtaaccatacacagacagcaacactgggaaatatccacctcaggaaattcaagtaatacactgaaaaagattgaaaatactggtgaactttttaattcgaataaagaatatataagctcaatcaaaagaaaaaagaatactgcatgcctccttgttagacaaaaggaagacatgcattgccaggctaagttcgaatctattagagaaagatttaaaattgatgaattaatgcaacttaagcgcggcatagtctggaacatcagtgtaaaaaatactaacttccagcctgttttagataaaattttagatacaaacatactctttaatccattatcgcatgaatgttttagaatcagttagc

SEQ ID NO: 318196 - DNA, 421 bp, Unknown
  Bacterial polypeptide expressing nucleotide sequence isolated from the Sargasso Sea
atatgtaatggatttcaaattctaatcgaaagtggattattggatggagcacttatgcgaaacagtagtctaagcttcatatgccaagatgttttaattaaatctaaaaataaaagttcagtttttacaagaaagtctaagttagcaaagatgcctattgctcataacgaaggcaacttttttgcaacatccgaacaattaaaaaaaattgaagacaatgatcaaattgcatttcaatattgtgatgaaactggaaacgtcgagcaaagttctaatcctaatggttcgttggctaatattgccggaattttgaatgaaaataaaaatgttttagggatgatgcctcacccagagcgtgcagctgagaagatacatggctgcgatgatggaaaaataatttttgaaagtatttttaattaaa

SEQ ID NO: 318197 - DNA, 508 bp, Unknown
  Bacterial polypeptide expressing nucleotide sequence isolated from the Sargasso Sea
aatgaaatcatctgtaattatttttcccggttcaaattgtgatagagacatggatatagctttaaaaaaatttggttttaaaaatcaaatggtttggcataatgacaaagctattccaaaaagcgatttaattgttttaccaggtggtttttcgtatggtgattatctgagatgtggaagtatagcttctaaatcaaatattattaaatctgtaatagactttgcaaattcagggggtttagttttaggtatatgcaatggctttcaaatattaactgaaacaggtttattgccaggtatacttcaacaaaataaatatcttaattttatctgtaagaatatttttgtaaaagttaaaaataaagaaaataaatattttaaaaatttaaaaaaagatatcttagaacttcatatagcacataatgaaggaaactatttttgttcagaagatgaattaaaaaatttagaagataataatcaaattgctgtagtatattgtaatgaaaaa

SEQ ID NO: 318198 - DNA, 919 bp, Unknown
  Bacterial polypeptide expressing nucleotide sequence isolated from the Sargasso Sea
gatgcagtctatgcgcgatgaagaaaactgcgctcgcgaagagcattcgctgattaccatggctaaagaagatgatcctgggttgtcttgttccgtaacatttgatgttaacgaagacatttgtcggccatttattggtggattagagcgacctaaggtagctgtgctcagagaacaaggagttaacggacatattgagatggctgcggctttcgagagagccggatttgattgtgtcgatgttcatatgacggacttgtcagagtctagaaggacgctctctgaatttgatgttttggcagcatgtggaggcttttcctatggagacgtcttaggcggtggtggtggttgggcgaagagcatcctgtttaactctatattgcgagatcaattttcagaattttttgaatcagacaagctggtgctgggcgtctgtaatggctgtcagatgatttctcaaatcaagcctatcctgccagacagccagaacttgcctcggttcgttagaaaccggtcagaacaatttgagagcagaacagtgatggttaaagtgaacgtgacaaagtctccatggttatcaggtatggaaggaagtgttctacccgtagcggttgctcacggggagggtaaggtcgagtttgatttgtcggaacagttaaactgcttgtacgataaaaatcaggtggctttacaatacgtggactctcatcatcaggtcacagagcgctacccttacaatcctaatggagcaccgaaaggaatagccggggttcttgcaaatgaagggaaaacgttgatcatgatgccccaccccgaacgagtttttcgtgtttgtcagaatgtttttcaggatgacggattagaagaagatggcccttggttgcgtcttttcagaaacgcccgcgcacagctagattag

SEQ ID NO: 318199 - DNA, 3901 bp, Unknown
  Bacterial polypeptide expressing nucleotide sequence isolated from the Sargasso Sea
atgattgtaaaagagggacccgcatcgcattccccatttaagcttgaatcattgctcatacgtctgcaaagcattgatgaaaacatcagcggtttaggcgcaagatttatccatctgattgactcaaagaaagagttggatcagctgcaagacgatgttttggagtcaattttagagtatggacccaattggcctcttggagtaaacgaaggatctaaaatattcattttacctcgttttggaacgacatcaccttggtccagtaaagcctcagacattgcgaaagtatgcggattaacctccattgaaaagattgagagaggagtcgcatttacttttgctttaaacgataaagatttaatgccaaatagtgaagcagtagagctgctttacgatcgaatgacggaagttgccataactgatttaggtcaagcaaaagagatcttttcatcattgaaaccaaaaccattttctgagattgatattttatctgatggtaagaaggccttagagagtgcaaatatagaattgggattggcattgaatgacgatgaaattgaatatctcttggatcaattcacaaaattatacagaaacccaacggatgctgaactcatgatgtttgcgcaagcgaactcggaacattgcagacacaaagtctttaatgccgattggacaattgatggcgttgaaaaagaaagaagcctttttcagatgatcaaaaacacgtatgagtcgagctcgagaaacgtattatccgcctacaaagacaatgcagccgttatttctggcaatgaagcagattggttcttgccgaatcacaatgatcaaaaatacggaagaatccatgatcaaattcatacgatgatgaaagtggagacgcataatcatccaacagcaatttctccataccctggagctgcgactggctctggcggtgagatcagagacgaagcagcaaccgggagaggcgcaatgcctaaagcgggtttaactggctttagtgtctcacatctttttattccagacgatgttcaatcttgggaggaaacaatcggtaagcccgatcatattgcctcagcactcgatatcatgctggatggccccattgggggtgcagcatacaacaacgagtttgggcgacccaatattcttggatattttagaacttttgaggaaagaaacagggagcaggaaaattcatcttggggttttcataagccgatcatgatcgttggaggcatgggcaatatttcagattcatcggtcaataaaaatgacatcgccgccggttctctgataattgttttgggaggcccagccatgttaattggcttgggtggcggctcagcatcttctttgaatgccggttcaagcgatagtgatttggattttgcctcagttcaaagagacaatgccgagctcgaaaggagagctcaggaggtcatcacacgctgtttttcaatgggagttcagagcaatcaggaaaatactaatccgatcatattgattcatgatgtgggagcgggcggtctttccaatgccattccagaggtcgcagaccacagtaaaatgtccgcagatatcaacttgagggaaatcgacaatgccgaacctggtatgacgcctttggaaatttggtgcaatgaggcacaagaaagatatgtcttatccattcatcctgatgatctggaactttttgatcagatttgcaagcgggagcgatgtccatatgctgtggtaggggaggtagcaactcatggcaatttgaaacttaaagacaaagtttttgacaattatccaatcgacatgcctatggatgttttattcggcaagccaccaaagacaaagcttgagattgcaactagggaaaaagcgatcattgatgatgggatgaatggcattgatatagaagaggcgtgtttaaaaattttaagatttcccaccgttgccgacaaaaccttcctcatacatatcggcgatagaacggtcggcggtttggtcgcacaggatcaattcgtaggcccatggcaagttccagtaagcgatgtcgctgtcacattgaaagatcactttggaagtcaaggtgaagccatggcaatgggtgagcgttcccccattgctgtatacaacgctgctgcatccggaagaatagccgtaggcgaagcaatcactaatattctctctgcgcccataaatcatatttctgatgtaaagttttctgcaaattggatgtcttcaataatgacagaccggcttaaacaggatctttatgaaacggttgaggcaatttcggttgacttctgcagcaagattggaatcactattcctgtaggcaaggattcactctcgatgcagacttcatggacgagtgaagaaaataaattcatcaataccgctccattatcactcgtcatttctgcattctctcctgtcgacgatgtcaataaagtcatcacgccacaattaaaaaacataaatgagagcatcttattgttgattgatctgggtgaaggccagaatcgaatgggaggctcttgcttttcacaaatatacaatcgaaaccttggagaaacgcccgatattgaggatccagaacttcttaaaagattctttaatttaattggaacaatgaaatcaaaaaacctgattcaggcgtaccatgatcgttccgatggcggcctttttgcgtgtgtttcagaaatggcctttgcaggcaatatgggcgttgagctttcgcttcatgctaggaatcaagaggagatgcttcaattgctctttaccgaagaattgggatgcgtcattcaaatctataagaaggatttagaagttgttttagaaatattgaatgatgcctcattgtcagattgttcctacgaaattggaaatgtatcgaaggataagagaatcactatccaagatacgaatcggttttcaaaatcgtttgatctgatgatgctcaggcaagcttggtcaaaaatgtcttatgagatgcaaaaaattagggataacccagaaacggcagaggaagggtttaggaaacagttggatgaagaagatcctggattaaatcctgtcatcagcttcgacacacctaagattgattacaaacgccttacaaaatcaagtcctaaagtagccatactgagagatcaaggagtcaatagtcaaattgaaatggcagttgcattcaataaagctggtttcaatgcgtatgacattcatatgactgacttgcttaatggccgagtgaatcttgaagaatatcgtggtttggttgtatgcggtggattttcatatggcgatgttttgggtgcaggaggcggttgggctaaatcagttttgttcaatgaaaatgcaagaaatcaatttcactctttttttcaccgagaggaaacattcagtcttggcatttgcaatggctgccagatgatgtctcagttaaaagaactgattcccggcgccgaacattggccaagatttgttagaaatctctctgagcaatttgaagcaaggcttaatacggtagaagtcttggagtcaaattctatttttcttaaaggaatggagggatcacggattccaatagcaacatcccatggagagggccgagttcagtatcttcataccgatgacaaggatgctcttataaagtccaatactgtggccataaggtatgtcgataaccatggaaaaccagcaattcattatccagataatccgaatggttcagagtccggttttgctggattttgttcaaaagatggaaggtcaaccattatgatgcctcaccccgagagagtcatgagagctgagcagttttcatggtgcccagatgactggaaggatcatggaccatgggctaaattctttatgaatgcaagagactggattgattagc

SEQ ID NO: 318200 - DNA, 1066 bp, Unknown
  Bacterial polypeptide expressing nucleotide sequence isolated from the Sargasso Sea
gcgttacattttttgaaacaaaaaaatatcgaatatcgaaagtgtgcaacacaaaagtctgatgcaaagatttcaatttcttcaaacaatcaaattgaattttctgattcagtaataaatttagaaaaagtctggaatgaaacctcttactcaatcaaatcgtctagagataatcctgatagtgcaaaagaagagcacgatctaattgaaaaatttgatgatcaaggtttggttgctagagataattttaaattttctgctaagttacctgcattaaataaacatttaaagcctaaggtagcaatttttagagagcagggagttaatggtcaaaatgaaatggctgcagcatttatgttggctggttttgatgcttttgatgttcatatgcaagatcttcttgataatccaagcatgctttcagaatttcagggtctggcagcatgcggtggcttttcttatggtgatgtgcttggagctggaggaggctggtcatcaagtattagctataacaatgctgtcagagattcatttgaacaattttttaatcgagatgaaacatttacttttggtgtttgtaacggatgccaaatgctatctaatttaaaggacttaatcccaggtgccgaaaattggcctgagtttttatggaatgaatctgatcaatttgaggcacgtttatctcaagtcaccattgctgaatcgccatctgttttgttggctggtatggcaggttggcaaattcctgtcgctgttgcccatggcgagggtcgagcttcattcaaaggagagtcactgaaaagcctttcagagcaaaatcagatagcagttcagttcacagatcatcatggagccgtggcttcttcatatccattaaacccaaatggatcgcctaaaggtattactggtcttacttctagagatggaagggcaacaatcatgatgcctcatccagaaagagtgttcagatctcaacaattatcttggaaatcatcaagatggaaggagtattcgccttggatgcaaatttttataaatgcatacaagttttgtcaagagacttaaa

SEQ ID NO: 318201 - DNA, 386 bp, Unknown
  Bacterial polypeptide expressing nucleotide sequence isolated from the Sargasso Sea
aggagctttattaagaaataaaaatttaaagtttttgtctaaagatgtttctctgaaaataataaataataataataacttttttaaaaaatataaaaaagagagtataataaaacttaatatcgctcacaatgaaggaaattattttacacaacaagaccatttaaaagagctagaagatgaaaatttaatacctcttaaatattgtgatgaaaatggtgtgataaatgaaaataataatcctaatggatcaataaataatattgcaggtatcttaaactccaaaaagaatattcttggaatgatgccccacccagaaagaatggtagataactttataagtagtgctgatggcgtagaactttttacaagtattttaaattaat

SEQ ID NO: 318202 - DNA, 991 bp, Unknown
  Bacterial polypeptide expressing nucleotide sequence isolated from the Sargasso Sea
caatactatatttaagccaggagatgcagatgcagcgttaataagacttagacggcaagacgagaaaaataaaaataatgaattttctggtgtagctgcttctgtagattgtaatagtagatgggtattattagatccatatagaggaactattgcagcagttgcagaatctgctagaaatgtaagttgtgttggtgctcagccaatagctataacaaataatttaaatttttcttcacccgaaactgaaataggatattggcaactttcatcagcatgtgatgggatttccaaggcttgtattgctttagagacacctgtaacaggaggaaatgtttctttatataacgaatcaaaaaaacaaaacaatcaagtaactcctattaatcccactcctgttattggaatggtaggaactattaaaaatgtagataaagctattagttcaggatggaagaatataaatgatcaaatttggataattggttcaaatgcttctgaatcctcaatagctgcaagttcttatttagaatattttcatgatttagtaacaggaagacctcctaaaattcatttacaagatgaaaaatgctgtcaaagttttttaagagattcaattcaaaaaaattatattgcttcttctcatgatgttagtgatggaggtttagctgtcgccttatcagaatgttgtattctttcttctaagggagcttatattcaattagaagaaaaaaatgctcgtcaagataatttattatttagtgaaggaggatcaagaataatattttcagttaataaaaaagaagaacaaaactttttgaattttctggaaattaagagcaaagattttggaaaaaatgtatacgttaaaaaaattggatttgtttctgaacataatcttgatataactctccaagatcaaatactttgtaatttaagggttgatgaattaaccgaaaaatttaataatagtatttctaactgtttttaa

SEQ ID NO: 318203 - DNA, 496 bp, Unknown
  Bacterial polypeptide expressing nucleotide sequence isolated from the Sargasso Sea
taaatcaaaaataatgcagtctgtaattaattttgcaaattctggtggtatggtcatgggtatctgtaatggatttcaaatattggtagaaactggtttagttccaggtgtcttgcttcgaaacaaatatttagaatttatttgtaaaaacgtttttataaaaattaatgacaaaaaaaatagatattttaaaaatattgataacgaagttttagaacttcacatagctcataatgaaggaaattatttttgcaccaatgatcaattaaaagaaattgaagataataatcaaatagctattaattattgtgataaaaatggaaaaattgaagatcaatttaatcctaatggatcaataaaaaatattgccggtatatttaataaagaaaaaaatgttctaggaatgatgccccaccctgaaagaatgattgatacatcattatctggtgaggatggatcattattttttaaaaatttaataaataattataaatga

SEQ ID NO: 318204 - DNA, 1066 bp, Unknown
  Bacterial polypeptide expressing nucleotide sequence isolated from the Sargasso Sea
attgatatattaaaaataatttttaaaaatccaaatatagccactaagaaatggatttgggaacaatatgatagctcagtaatgggcgatacaatttttgcaaatggtgatagtgatgcttcattagtaaaaattcatggaacagaaaaaaaaggatctttcggaaaaggccttgctataacaactgattgcacaccacgttatgttaagtcagatcctataattggaggtatgcaagcagtttgtgaagctgcacgaaatatagcttcgtctggggcaaaaccactggcgataacaaacaacttaaattttggaaatcctgataaaaaaaatgttatgggagaaattgtaggatctataaaaggaatttcagaagctgcttcttatctaagtactccaattgtatcaggaaatgtttctctttataatgaaactaatggtaagagtattcttcctactccagtcattggtatggtaggagcaatagatgaggttgaaaattctctaaagataagtgcagaaccagataatgtcttgattgcccttggacaatctgaaaattttaaagcaggttgggttggttgtagtatctatcaagaaattattaataaaaaatacgacggagcacctccaccaataaatttagaaaatgaaaaaaaagttatcgaaattatattaaaattgaatgaacaaaaacttctgacagctgcccatgatatttcagacggtggcttgctgacaacagtttgtgaaatgttatttaaatataatttaggattagatattaatttacctagcaacctaattaattgtgatagttatgaccccttacttcaatcatggtgttttggagaagatcaagcaagaataattattgcaacaaaagatatcaaaaaagtacaactaatattaaaagaaaataatattgacttctttgttcttggagaaactaattcaagcagtaacttgaatttaaaagatattactactatatctataaaggacataaaaaacttaaatgaaaaaaccatcccatcaatgatgggtgatcaacaacaaggttaag

SEQ ID NO: 318205 - DNA, 526 bp, Unknown
  Bacterial polypeptide expressing nucleotide sequence isolated from the Sargasso Sea
tgattatcttagatgcggaagcatggcctctaaatctaagattatgcaatcagtaattaattttgcaaattctggtggaatggtaatgggtatttgtaatggttttcaaattttagttgaaacaggattagtgcctggggttttgttaagaaacaaatatttagaatttatttgtaaaaatgtttttgttaaaattagtgataaaaataatgcttactttaaaaacattaaaaataatgttttagagcttcacatcgcacataatgaaggaaactatttttgtacaaatgatcaattaaaagaaattgaagacaatgctcagattgcaatcaattattgtgataaccagggtaaaattgaaaaatcattcaatcccaatggatcaataaaaaatattgccggaatttttaataaagaaaaaaatgttctaggaatgatgccccatcccgaaagaatgatcgacccttctttatcaggtgaagatggatctcttttttttaaaaacctaatcaataatattaaatga

SEQ ID NO: 318206 - DNA, 1261 bp, Unknown
  Bacterial polypeptide expressing nucleotide sequence isolated from the Sargasso Sea
aatgggtgttgatgttgccattgtacagttcccaggttcaaacactgaacgtgaaacatttatggcttgtgaaagagttgggttgaatccaattgaatttttatggaacgaaaatcatgatactcttaaagattttgcaggatttataattgtcggtggattttcatatgaagacaggtctcgctctggggttatcgcttcattagaccctattgttgatctaattaaaatagagtctgaaaaaggaaagccggttttaggaatatgtaatggagcacaaattttggtagagtcgggaatggtccccggcacaaacaaatattctttgtcttcttctttaacaaataacaagcgtattattggtggaaaagttcttggtaccggatattacaatgattgggcatatttatcatgcacgtctaaaccaagcaaaagcgtatttacaagattcttaaatattggtgaaataattcatatcccctttgcgcatgctgaaggaaggtttgtaattccaaaagatttattagaaatattaataaataataatcaaataccttttcgatattgtgataataatggaaatataattaatgaatttccaacgaacccaaatggatcaatgtataatattgcagccctaagtaacccggatggaaatgtgatggcaataatgccgcacccagaaagaacgcataatggtgataaaatatttttatctatgtatgactatattaaaagaaataacaataagaatatttcatttctggattacggtattagcaataacgatattaatatttataaatctgaaaataatagtttagagtgggttgttaatatgataattacagataacgaggcaagctctgttcagtctgcgctaagccaagctggggttgatgtgaaaataacacgtttgacacactgggaaataacaggggcaaacaactctagccttaataaaatagaaaaaaccggtgagctgtttaatagcaacaaagaatacatatatgattataaaactgaaaaaaatgaaagctctattacttttttaattagacaaaaagaagacatgttgggaagacaaaaaatgcagtctttagcagaccgctttaacatacaaggtttaaaagaaattcggcatggagtcttgtggaacataaaatcaaaaagcagtaactttgatcttgtaatacaaaaagttttagatagtaaaatcttattcaacccgttttcacaagagtgttataaatatgaatga

SEQ ID NO: 318207 - DNA, 3778 bp, Unknown
  Bacterial polypeptide expressing nucleotide sequence isolated from the Sargasso Sea
aatgaaaaaagaaataattttttttcaaggtgaagaaatattaaataagtttgatgagaagagaatatttggtaaagagctaactaatgcacagaataaatatattttttcaatcctatttcaaaaaaaaccaacagaagatgaattaaagagaattaaatctattctttctgcaactgaactcgactttaatccaaatatagtacttacacctagggctggaactcagagttcctggtcaagtaaagctcaagatatttttcataacattggaatagattcaataaaaaggattgagaggttcaaaggttttaatcttttaaatgaagattcttcaatgattgaaaataaggtcttcgacagaatgactgaatcttcattttctaatcttgatgaaactagaataatcttcaaatcagcaaaaaggaaagaaagcagaaaatacaatattaatgaagacacagatctgctcaacaaattaaataatgatttaggtctagcactaaatgaatttgaaatttcttacttaaattcagtttttcaagagcttggaagaccaatttctgattcagaactgatgatgttctcgcaaatcaattctgaacattgtagacataaaatcttccgatcaaaatggaagacagatattccatttggtcatgattctctttttgatgcaattaaatcaacaactaaagaaaaaatgagtcatgttttatctgcttatcatgataattctgctgtaattagctctttcggaaagaaatttctagaaattgatggcaaaaatatttttaagaattatgaaggcaatatacatacgaccatcaaagtagaaacacacaatcatcctacaggtatatctccttatgagggagctgcaactggttctggtggagagattagagattgttcggcaacaggaagagtcgcacgaccaaaagcaggttttatggggctatgtctatctcatttacgcctatctgaaaagctagaaagctgggaaactgagctcaataaaccagactttttatcatctccaatggagataattagagatgcccctataggttctgcatcttacaataatgaatttggtagaccagcaatttttggttattttcgaactttagaatacaaaaatcatggctatcataagcctataatgcttgctggtggcattggctcaattaaagaagtgcatataaaaaaaggcactccaaaacctggtgatgtagtagtcgttttgggaggtcctgcaatgcttattgggctaggaggaggctcagcaagttctactaaaaagacaaatgaaaattcagatttagattttgcttctgttcaaagatccaacccagaaatgcaaagaagggctcaacaagttcttgataaatttaatgagagaagttcaaaaaacccaatttctttcattcatgatgtaggtgctggaggcatatcaaatgctattcccgaattagctaaagatacaaacctcggagtcagtattagattagaagacatttattcaactgatgaaactatgtcacctatggagctttggtgtaatgagtctcaagaaaggtatgttttttctattccaaaagaaaaagtgcctgcattaaaacatatttgtgaaagagaaaggtgcccatattcaattggcggtgaattaactgatgataaatttataagtgttaaatttcatgatgagcaagttgttaatcttagcctagatcatctatttggagatattcccttaccagagcttattgctcaagattatgatcgagtgacagaaaaagaagagctgccaaccaaagatctaaataaacttatctttaatacaataaaattccctgcagtagcttcaaaaaaattcttaatcacaatcggagatagaacagtgaatggtcttgtttaccgagaccagcttatagggaataggcaacttcctgtaagtgattatgctgcgacacttgataattatgattcatatacaggacaggttatttcaatcggagaaaagcctaatgttgcaattgagaatcctgaagcatcagcaaggatggcattagcagagtcaataactaatgtttgtggagttaagcacaattctcttagcgatatctgtttttcagcaaattggatgagctcaacaaagacagcagatgaaagaggggatcttctaagaggagttcagagcttaacaaacatggcagatgtgcttgacctatcaatacctgtaggaaaagactctctctctatgaatacttcttggaagactaaagataatgaacattctgttacttcaccaatgacactgaatatctcttctttctcaaatgttccagatttaaggaaatcagttactccagaactttcgacaaaagattcaactttattgcatgtatggattaatgaaggggaatttcgtttaggaggaagttcattgtacttatcaaataatctttttggtggagctacacctgatattgagcatccagaaaaatttaaacagttgtttgaagcatcacaagagcttatttctaaagatttagtagaggcacttcatgacatatcagatggtggcttgattacaaccttaattgaaatgtcactttgcagtaatttaggtcttgatattaggttagattactcagataaagaaagcatcattccgaagttattttctgaagaaactggctatgtaatagaaattaataatgagaaacttgcagaagttaaggaaactttaactgaaaaaggtctattttttgatgaggttggaaagaaaaatgctgatacaaaaattaatttatttagttttgatgatgttttattttcctcttcacttgataagttattcgatgaatggagttcagtaagttataaggttcaaaagataagagataatcttgaatcagcagatagcgagaaacaggtttataaaaaatggggcgatatgattaccccaaaaattgatttcccaattccaactcctaataagaatttattttctaagaaaccgaaaattgcgttattgagagagcaagggataaatggtcactatgatatggccgcagctttaatagcagctgggtttgaagtaaatgatatacatatgagtgaactaccagataagattaaaaatcttgattcatatagtggtcttgttgtgcctggaggcttttcatatggagatgttctaggtgcaggttctggaatgtctaatacaattttatttaatccaaaaattaagaaaatttttaaaaatttcttagaaaatgataaaaaatttgcgttaggtatatgtaatgggtgccaatttttatctggtcttaaaaaaattattcctggtacagaaaattggccaaaatttaaaaagaatctgtctaatcagtatgagtgtaggctagtccagctccaaatagaggatagcccttcgatcttatttagagatatgaagaacagtgtcattcctgttatggtttctcatggagaaggtagagcagattttgatttaaaagaagataatgtaattgctaggtatgtcgatcctgaccacaaggtaactcaaaaatacccattaaatccaaatggttctatgaatgcagcagctggtgtttgtaatgatgatggaagaataactattatgatgcctcaccctgaaagaacttaccttactaaacaattttcttggtcaccaaatgattggggagagtattctccatggttcaagatattcgataatgcttatttattttctaagaagaactaa

SEQ ID NO: 318208 - DNA, 193 bp, Unknown
  Bacterial polypeptide expressing nucleotide sequence isolated from the Sargasso Sea
tattgtgatgagaatgaaaatatgaagatcaattttaatcctaatggatccataaaaaatattgctggtatttttaataaagagaaaaatgtcctaggaatgatgccacacccagaaagaatgattgatacctgcctatcaggtgaggatggatcattattttttaaaaatttaattaacaacttaaaatgat

SEQ ID NO: 318209 - DNA, 283 bp, Unknown
  Bacterial polypeptide expressing nucleotide sequence isolated from the Sargasso Sea
gaacttcatattgctcacaatgaaggaaattacttttgtagcaaagatgaattaaaatcattggaggataataatcaaatagcagtaacttattgtggggaagatggtacagaaaatgaaacaactaatccaaacggagcgattaaaaatatagctggaatatttaataaaaataaaaatgttctaggaatgatgcctcatccagaaagaatgatagataagtatttatcaggtgaagatggttcattatttttcaaaaatattttagataattttaaataat

SEQ ID NO: 318210 - DNA, 1240 bp, Unknown
  Bacterial polypeptide expressing nucleotide sequence isolated from the Sargasso Sea
gatcgctccgacggtggcttgctggtgacgctggcggaaatggccttcactggtcactgcggtattgaagctgatatccactctctgggggaagatcgtctggcggcgctgtttaacgaagagctgggcgcggtgattcaggttcgcgcaggtgatcgtgaagcggttgaggcgttgctggctcaacatggcctggccgattgcgtgcactatctggggaaagccgtgcagggcgaccgcttcgtggtcgaagcagatggtcatgcggtgttcagcgaaagtcgcaccacgatgcgtatgtggtgggcggaaaccacctggcagatgcaacgtctgcgcgataacccggaatgcgccgatcaggaacacgacgctaaaaccaacgatgccgatccgggtatcaacgtcaaactgacgttcgatattaacgacgatgttgccgcgccgtatatcgccaccggtgcgcgtccgaaagtggccgtgctgcgcgagcagggcgttaactcccacgtcgaaatggcggcagctttccaccgtgcgggctttgacgccatcgatgtacacatgagcgatctgctggggggacgcatcggcttgggtaacttccaggcgctggtagcctgcggcggcttctcttacggcgatgtactcggcgcaggggaaggttgggcgaagtcaattttgttcaacaaccgcgtgcgtgatgagttcgaaaccttcttccatcgcccgcaaaccctggcgctcggggtgtgtaacggttgccagatgatgtctaacctgcgtgagctaatcccaggaagcgacctgtggccgcgctttgtgcgtaaccactccgaccgctttgaagcccgcttcagcctggtcgaagtgacgcaaagcccgtctttactgcttgccgatatggtggggtcgatgatgccgattgccgtttctcacggtgaaggtcgtgtggaagtgcgtgacggtgcgcatctggctcagcttgagagcaaaggtctggtggcactgcgctacgtcgataacttcggtaaggtgaccgaggcttacccggctaacccgaacggttcgccgaacggtattactgctgtgaccactgaaaatggtcgcgtcaccattatgatgccgcacccggaacgcgtgttccgtaccgtgagcaactcctggcacccggaaaattggggcgaggacagcccgtggatgcgtatcttccgcaacgcgcgtaaacagcttggataat

SEQ ID NO: 318211 - DNA, 247 bp, Unknown
  Bacterial polypeptide expressing nucleotide sequence isolated from the Sargasso Sea
ttgtactagtgatcagctcaaagagattgaagacaataatcaaattgcaatttactactgtgatcatgagggtaacttaaatgaccaaaataaccctaacggctcaattaagaatattgcaggtatttttaacaaggaaaagaatgttcttggtatgatgcctcatccagaaaggatgatcgatcaaagtttatcaggagaagacggagctatttttttcaaaaatctaattaataatatcaaataa

SEQ ID NO: 318212 - DNA, 508 bp, Unknown
  Bacterial polypeptide expressing nucleotide sequence isolated from the Sargasso Sea
agtatagcatctaaatcaaatattattaaatctgtaatagattttgcacattctggaggtttggttttaggaatatgtaatggatttcaaatactaacagaaacaactttattaccaggcatacttcaacaaaataaataccttaattttatttgcaaaaatatatttgtgaaagttaaaaacaaagaaaataaatattttaaaaatattaaaaaagatattttagaattgcatattgctcataatgaaggaaattatttttgttcgaaagatgaattaaaatctttggaagacaataatcaaattgcagttacttattgtgatgaaaaaggattagaggaagaaacgcataatccaaacggagctcttaacaatatagcgggcatattcagcaaaaacaaaaacgttctaggaatgatgcctcatccagaaagaatgatagacaaatatttatctggagaagacgggtctttattttttgaaaaccttttaggaaatttaaattaat

SEQ ID NO: 318213 - DNA, 331 bp, Unknown
  Bacterial polypeptide expressing nucleotide sequence isolated from the Sargasso Sea
atgaaatcatctgtaattatatttcctggttcaaattgcgatagagatatggatgtagctctaaaaaaatttggttttaaaaatcaaatggtttggcacaatgatgctgaaattccaaaaagtgatttaattgttctgccgggtggtttttcttatggggattatcttaggtgtggaagtatagctggaaaatcaaaaattattaaatctgtcattgattttgctaattcaggtggattagtgcttggtatttgtaatggctttcaaattctaacagagacaggattgttgcccggaatacttcaacaaaataaatacttaaatttttatt

SEQ ID NO: 318214 - DNA, 3034 bp, Unknown
  Bacterial polypeptide expressing nucleotide sequence isolated from the Sargasso Sea
catgtcttcagatgaacatgtgaggatattcgaagtcactacaaaggatctcgaaggtcttccggattctaggggtgagaacgtccgctccatgctaaagactgaccatggaatcaaagtagactccgtcagggtcatcatgggatatcaggttagatctacaatctctgatgcacaggcagaaactctgacctatgacttgtttgcagacccggtaatcgagatcgctacaacgggttcaaggatactagacgacttctcggacccaccagaggtggcgattcagataggattcaagccaggcgtcacggataactccgctcaggcgggtttggacggactgaccacgctctttccagatcagaaagaagctagagttgcaacatataggacctatgcgttctggggagtacaaggcacagtttccccctcagagttggccacgactctacacaacccaatgattgagagggcgtccgtggcagacagaaacgggtgctcaaagggacactggccggaactcggatttccagttgtccctccaaacatattcaaggaaccgacgacgatagatttggaggttagtgacgacgaactgcttgaaatcagcgaaagaggactgcttgctctaaacttagaagagatgaaagccatccagggccactacagagatcctgctgttagggccgaaagaaccgaacagggactacaatcggacagaccgaccgacgcagagctagagtgccttgcccagacatggtcagagcactgttcgcacaagatattcgctgcgaagatcagacacgtggacaaagcaacggatgaggacacgacaatcaactccctattcaagacccacataatgcagccaacgctggatatccaaaaagaggtagattggctactaagcatattccatgacaactcgggcgtcatctcctggaatgatgaatggagtgtttgcataaaggccgagacgcacaacagccccagtgctctagacccattcggtggtgctattacaggaattgtgggggtgaacagagatatccttggaaccggattgggggctaggcccatagccaatacagatgtcttctgcttcgggccccccgactactcaggcacaatcccccccggacttttccatccctcaagagttttcagaggagtccactcaggagtaagatcgggtggaaacgagtcaggaatccccacagtcaatggagcaatagtgttcgacgagagatacatcggaaaacccctggtcttctgtggtacagttggaatcatgccccgcaccctcccagacggaagagagagccacgtgaagacgcccaagccaggggacgtcgtctacatggtagggggcagggttggaagcgatggaatccacggagcgacattctccagcctcgaactaaccgaagagagccctagctcagcagtccagattggagaccccatcacccagaagaagatgctagacatgattctggaagctagggacgagggtcttatccaagtaatcacagacaacggcgcaggaggcctttccagtagcgtcggggagatggccgaactcacaggcggagcaaaactcgacctagggaaggtccccctcaagcaagcaggcctctcatcctgggagatactggtctcggagtcccaggagaggatgacagtgggagtcagaccagacgactgcgagaagttcgagaccttagccagtctacatgaggtcgaagcaacaccagtcggagagttcaccgattccggggcattcgtggtccatcatggacagactcccgttgcacacctgcccattcatttcctattcgacggatgtccgcaactcaatctagattccgagtggagccccccgactcacttaccggtagagacgcccgaactggatgaggaaggaatggggaaactcctcgcccggctcctagccagacctaacgtagccagcaaggaatggtgggtccgttcctatgaccacgaggtgatagcccagagcgtgatcaagccattctgtggcattaaccatgatgctccaggggatgctgctgtgatagcgcccatccaaggagggactcaggggctagttatctcgaacggtattgctcctagatactccgatatagattcctatgcaatggcggcggcctccgtcgatgaggccctaaggaacgccgtatgtgtgggggtggatttagatctcattgcaggtctcgacaacttctgctggcccgacccaatcgagtcatccaagacccctgatggacggtacaaactggctcaactggtgagagcgaacagagcattggatgacgtctgcagggcatacaggctaccatgtatcagcggcaaggactccatgaagaacgatgccatgatgggaggagagaagatcagcgtcccaccaaccctgctattcagtctgctcggaaatcacgaagacgtccggaaagcagtctcgtcggacttcaagaaacccggagacgcgatattcctagtcggagagactcaccaggaactcggcgccagcgaattggcattcatgctgagggacgagggctcaggagggatagggggagccgtaccggaaatcgaaccagagaggaacatgacagtctacagggcccttacttcatccatgaagagcggactagtgtcaagcgcccatgactgcagcgatggtggcttggccgtggctctggcggagtgctgctttggcgctgactccggagcttcaatcgacatatcccctctccaatcagactgctcggatctcgatgattggggggccctattcggagagagcctcggcaggatacttgtcagcgtcaggccctctgacaaggaggccttcgaggaatccatggagggcgtatgctgtcactacctaggactggtctccgagggagacgccatctccgtatctagggacggagaaaaagtcctcttgggctcaatgtcggagatgagggactcttggaaggacacactacatggaggggggctctga

SEQ ID NO: 318215 - DNA, 1058 bp, Unknown
  Bacterial polypeptide expressing nucleotide sequence isolated from the Sargasso Sea
agaccctattgttgatctaattaaaatagagtctgaaaaaggaaagccggttttaggaatatgtaatggagcacaaattttggtcgagtcgggaatggttcccggtacaaaaaaatactctttgtcttcttctttaacaaacaataagcgagttgttggtggaaaggttcttggtaccggatattataatgcttgggcatatttatcatgcacatctaaaccaagcaaaagcgtatttacaagattcttaaatatcggtgaaatagttcacatcccctttgcgcatgctgaaggaaggtttgtaattccaaaagatttattagaaatattaataaataataatcaaataccttttcgatattgtgataataatggaaatataattaatgaatttccaacaaacccaaatgggtcaatgtataatgttgcagccttaagtaaccccgatggaaatgtgatggcaataatgccgcacccagaaagaacgcctaatggtgataaaatatttttatctatgtgcgactatattaaaagaaataataacaagaatatttcatttctagattacggtgttagcaataacgatattaatatttatgaatctgaaaacaatagtttagagtgggttattaatatgataattacagataacgaggcaagctctgttcaatctgcgctaagccaagctggtgttgatgtgaaaataacacgtttgacacattgggaaataataggagcaaataactctagccttaatgaaatagaaaaaaccggtgagctgtttaatagcaacaaagaatacatatatgattataaaactgaaaaaaatgaaagctctgttacttttttaattagacaaaaagaagatatgttgggaagacaaaaaatgcagtctttagcagatcgctttaacatacaaggtttaaaagaaattcggcatggagtcttgtggaacataaaatcaaaaagcagtaactttgatattgtaatacaaaaagttttagatagtaaaattttattcaacccgttttcacaagagtgttataaatatggatgat

SEQ ID NO: 318216 - DNA, 1663 bp, Unknown
  Bacterial polypeptide expressing nucleotide sequence isolated from the Sargasso Sea
atgggttctcctggtaaattagaggggaataaagatctattgaaagccgtagaatctgttggaattgatttatgtcccaaatggaacatggcgataccggttggaaaagactctctatctatgtctacagaatggagtaaaaatggagaggataaatcagtagtatcacctctctcattaattgtttctggctttgctcctattcaagatatatctattgctgttactccagaattaaagaaaagcaaaaaatcttcattactttttatagatctatcaaaaggccatactagattggggggtagtatcctagctcaattaaataatcagctttttggagagtcacccgatgtcgagtgtgaaaaagagatgccagcttttgttgattcaattcataaactgttgtctcacagaaagatacttgcttaccatgatcgttctgatggtggtctaattacaactcttgccgaaatgtcatttgctggaagattgggtttagaaattaacctagattcagctataaaagatggaggggccttattagagttcctcttcaatgaggaattaggagcagtaatacaagttttagatgaagatctagattacgttcaggaagctttaagtgatgctggtttaaacgaatttgttcacaatataggttctttatcagactcagcagacatagtgatcaattttcaagaagaaaatttactttctcttcctataaaagacctgttacaaaactggaatagggtaagttatgagatccagtccttgagagataacccggatactgcaaaagcggaatacataaatgatactaaaattaagaatcccggattaagacctaaaataaccttttctgtacctgagaaaattgatttgaatagttctaggcctaggattgcgattctcagagagcaaggagttaatggtcaaaatgagatggctgcagctttccatgaagtagggtttgattgcatagatgtccacatgactgacttaatagacaaaagacaaaacttacaagactttcaaggtctggtagcttgcgggggattttcttatggagatgtccttggagcaggagggggttgggcaaatagtattttatttaatgaagaactaagaaatcaatttggtgatttctttcaaaatgagaatgttttttcattaggagtctgtaatggttgtcaaatgctatctaaattgagaggtttgatccccggaactgataattggccaagctttaaaagaaatatctcagagaagtttgaagctaggctagtacaagtcattgtaaaggattcaccttccatactatttaaaggcatgaaggattcagttataccagtccccgttgctcatggtgaaggcagagtagaggcttcaaatgagtcattaaaaaacttagacaaaaaatttactaccatttcttatgcagacagctttggagaagatactgagacctatcccttaaatcctaatggttctcctcatgggattgcaggagtaacgaatgaaaacggaagagttactatcatgatgcctcatccggaaagagcttttttgaacgatcaatattcttggtgtccagaagactggttaaattatagcccgtggataaagttatttcagaacgcgaaagattttattgattgag

SEQ ID NO: 318217 - DNA, 3883 bp, Unknown
  Bacterial polypeptide expressing nucleotide sequence isolated from the Sargasso Sea
gatggagatcatccgcggagccccagcactctcgacgtttagagtgcaaaagctaatggaggcctgcgtaaacgctgcgcttccggtacgccaaatctatgctgagtatgttcatttagcggatttgagcgagttgcttgagaccaatgagcgcgagcaacttgaaaaaattctcacctatggacctgctatcgaagcccataccccccaaggttcactcctgtttgttactccccgccccggcacaatttctccatggtcttctaaagccactgatatcgcccacaattgtggtttaggtaaagtgaaacgcttagagcgtggtgttgcctattatgtggagtcagacactttgactgtcgagcagcaacaaaccctcaaagggttattgcacgaccgtatggttgaagtggtactggacgattttgcaaaggccgatgtgctgtttaagcgcactgaacctgcgccgttcaagagtgtgaacgtgttggctgaaggtcgccgtgcccttgaagtggccaacgtcgaaatgggtctggcgctcgccgaagatgaaatcgattatttagtcgaaaactttgtgcgtttgaaccgcaatccaaacgatattgaactgatgatgtttgctcaggccaactctgagcactgccgtcacaagatttttaacgcagattggacaattgatggcgcggtgcagcctaagtctctgttcaagatgattaaaaacacctttgaaaccactccagaccacgtgttatctgcctataaagataacgcggctgtgatggaaggttcggttgcgggacgtttcttccccgatccaaacggtgtttacagctatcacactgagccgatgcacgtgctgatgaaagtggaaacccacaaccatcctacggcaatcagcccatacccaggtgcggcgacaggttcgggtggtgagatccgcgacgaaggtgcaaccggtcgtggctctaaacctaaagcgggtttaactggttttagcgtatcaaatttaaaaatcccaggttttgtacaaccttgggaaggcaactacggtaagcctgagcgtatcgtcagcgcgctggacattatgaccgaaggcccacttggcggcgcggcgtttaacaacgagtttggtcgtccagcccttttaggttacttccgtacctatgagcaagaagtctcgagccacaacggcgtagaagtccgtggttatcacaagcccatcatgttagccggtggtttaggtaacattcgcgaagagcacgtccaaaaaggcgaaatcaccgtcggtgctaagctgatcgtactcggtggccctgcgatgaacataggtctgggcggcggcgctgcctcttctatggcgtcgggtcaatcgagcgaagatttagactttgcgtcggttcagcgtgaaaacccagaaatggaacgtcgctgtcaggaagtgatcgaccgctgctggcaattaggcgataaaaacccaatccaatttatccacgacgtgggcgcgggtggtttatctaacgctttccctgagttagtgaacgatggcggccgtggtggtatcttcaatctgcgcaacgtgccatcggacgagccgggcatgagcccgttggagatctggtgtaacgaatcgcaggagcgttatgtgctttcggttgctgccgaagacttgcctttatttacggcgatttgtgagcgtgagcgcgcaccgtttgcggtagtgggcgaggcgacgcaagagcagcatttaaccctagccgacagccatttcgataacaatcctatcgatttaccactcgaggtgttattaggtaaagcacctaagatgagccgtaatgtggtatcagctaaggcagtttcaccagcacttgagcaaagcaatatcgatgtgaaagaagcggttaaacgcattcttagcctgccaaccgtggcggacaaaaccttccttatcaccattggtgaccgcacggtaaccggcctagtgaaccgtgaccaaatggttggcccatggcaagtacccgttgcagattgcgcggtaacggcagcaagctttgatacctatgccggtgaagccatgtctatgggcgaacgtacgccgctggcactgctcgattttggcgcctctgcccgcatggcagtggccgaatcgattatgaacatcgcgggcgcggatattggttcgttcaaacgtatcaaactgtcggctaactggatgtctgccgcgggtcacccaggcgaagatgcgggtctttatgaagcggttaaggccgtgggtgaagagctgtgtccagaattgagcctcaccattcctgtcggtaaagactccatgtcgatgaaaaccgcatggcagcaagacggcgcgaacaaaaccgtgacggcacctatgtcactggtgatttctgccttcggtgtggtgcaggatatccgtaacacggtaacgccagaacttcgcagcgataaaggcgaaacctcgctgttattagtcgacttaggcgctggcaaaaaccgtttaggcggttcttgtttggcacaggtttacggtgagttaggcgatatcgcgccagacttagacgatgctgctctgttacgtggtttcttcgaaaccatgcaaaaactggtggcgaagaagtcggttattgcataccacgaccgcagtgacggtggtttattcacgacgttagtggaaatggcctttgccggtaacacgggtcttgctatcgacttaagtgcactgcaaggtaccgacgttgaacgtctattcaatgaagaactcggtggcgtactgcaagtgagccgcgcggatgccgagcttatcgctgcccaattcgcccaagcaggcgtaccttgccatatgattggctctttagcgaatgaccaacgcatcaccattaaagatggtgcgcgtgaagtgttcagcgagacgcgtgttgcactgcgtactatctggtctgaaaccacttaccgcatgcaagcactgcgtgataacccagcctgtgcattagaagagttcaaacttaagcaggatgaaaccgacttagggttaacggttaacttaagcttcgatccaagtgaagacgttgctgcgccgtacatcctcaaaggtgctgcacctaagatggcgattctgcgcgagcagggcgttaactctcatgtggaaatggcggctgcgtttgaccgtgcaggttttgagagccgcgacgtgcatatgtctgacattctgtcgggccgcattagcctcgaagagttccaaggtctggtggcctgtggtggcttctcctacggtgacgtattaggtgcgggtgaaggttgggctaagtctatcctgttcaacgcccgtgctcgcgatgagttctcacgcttcttcgagcgtgattcaagctttgccctcggggtgtgtaacggttgccaaatgctgtctaacctgaaggaaatcatcccaggtagcgagcactggccacgtttcgtgcgtaaccgctctgagcgttttgaagcgcgtttcagcttagttgaagtacagcaaagtccatcactgttcttccaaggtatggctggctcacgtatgcctatcgccgtgtcccacggtgaaggccatgcagagtttgccaacgcgcaggcgctcgcgttagctgaggcctctggcactatcgcgctgcgttttgtgaatggtaaaggggaaattgccacccaatacccacaaaacccgaacggttcgccaaacggtttaaccggtatctgtactaccgatggccgtgtgaccctgatgatgccacatcctgagcgtgtatttagaacggttgcgaactcttggcatccagataactggggtgaagacagcccatggatgcgcatgttccgcaatgcgcgagtcaacttaggctaa

SEQ ID NO: 318218 - DNA, 229 bp, Unknown
  Bacterial polypeptide expressing nucleotide sequence isolated from the Sargasso Sea
aaacgaaattaaagataataatcaaatagcaatttattattgtgataaaaacggtcaaacagaagaacaacataaccctaacggttcaataaaaaatattgcaggtatattcaataaagaaaaaaatgttttaggaatgatgccacacccagagagaatgattgatcaaagtttatcaggtgaagatggttctttattttttaaaaatctaattaataatttaaaataa

SEQ ID NO: 318219 - DNA, 437 bp, Unknown
  Bacterial polypeptide expressing nucleotide sequence isolated from the Sargasso Sea
gatgaaatcttcagtaataatttttccaggctcaaattgtgatagagatatggatgttgctcttaaaaagtatggttttaaaaatcatatggtatggcacaatgacttgaaattaccgaagtctgacttggtagttcttccaggaggtttttcttacggagactacctgagatgtggaagtattgctggaaaatcaaaaattattaagtctgtaatcgattttgcaaattctggtggtttagttttaggaatttgtaacggttttcaaattttaaccgaaacaggtttattgccaggagtattacaacaaaacaagtttctaaattttatttgtagaaatgttcatgtaaaaataaatgataaagataacaggtatttcaaaaatataaaaaaaaatattttagaattacatattgctcataatgaaggaaattatt

SEQ ID NO: 318220 - DNA, 265 bp, Unknown
  Bacterial polypeptide expressing nucleotide sequence isolated from the Sargasso Sea
atgacttcatccaattggcattttgatacagaaaaatcacttgtagaaagtcacggtcttaaacttgacgagtttgaaaaaattgttgagggacttgggcgtgaacccaatcttactgaacttggaatatttagtgcaatgtggaatgaacattgctcctataaatcgtctaaatattggctaaaaaaattaccaacctcaggggaacgagttattcaaggaccaggtgaaaacgcgggtgttattgacatcgacgatggagatg

SEQ ID NO: 318221 - DNA, 1069 bp, Unknown
  Bacterial polypeptide expressing nucleotide sequence isolated from the Sargasso Sea
ttgctgaggtcttctgcaaagcagatgaacatcagtatgtgccaagtaggcaaaccagtaggcaaaagaatttctatcaaaactgaaaataataatataattttagacaaatgtatcactgacttggaaagagcttggagtcaaaccagttatcatattaaggcaatgcgagataataaagatgatgcattagcagagtatgatttaatttcagacaccgatcataaaggattatttacaagtgatacatttcagatgtcacaacccaaaaattccatttttaattttttaaagcaaaaaccaaaggttgcgattctgagggagcaaggtattaatggtcaatttgaaatggcagctgcttttatggcagcaggtttcgaagcagttgatgttcatatggatgatcttattaaaaataggatgactcttgaagattttcagggccttgcagcatgcggtggcttttcgtatggggatgttttaggtgcgggtaaaggttgggcaaactcaattttattcaatgacagattgaatgatgaatttgcatcattttttcataatgataagaaatttactttgggagtatgtaatggctgccaaatgctatcaaacctaaaaagtattattcctgggacccaatattggccaacttttgtaaaaaatcattcagatcaatttgaagcacgcttgacacaagtcaaaatacagaaatcaagttcaatattatttgctggcatggaagattggtccttaccaatagcatgcgctcacggagagggacaagtagcttttaatgaatctaatgatttcaaaatactggatgagcaaaaccaagtctttatgaattttgtaaattcaaatgggaattcaactgagcagtaccctctgaatcctaatggttctgtcatgggaataaccggtgtagcaaatcaagatggaagagtttctattttgatgccgcacccagaaagagtgttcagaagcatacagttttcatggaaacccagtcattggaaagaatattctccatggatgcaaatctttatcaatgccaaaaaattctgctaga

SEQ ID NO: 318222 - DNA, 652 bp, Unknown
  Bacterial polypeptide expressing nucleotide sequence isolated from the Sargasso Sea
aaatttaaacgactttcagggcatggcagtatgtggtggtttctcatacggtgacgttcttggtgctggaggaggctggtcaagaacgattttgtacaacaatcttgttaaagatcaatttcaagaatttttcaatgatgaaaaagttttcacattaggagtatgtaacggatgccagatgctttcaaatttaaaagatattattccaggtgctgaattttggccaagttttgaaagaaatttatcagatcaatttgaagcccgattggctcaagtaaaaatatcaaaaacagaatccattcttttagatgggatggaggattgggtgataccagttgcatcagctcatggagaaggaagagctcaatttaataacaatgatcttgaggaattagaaaagtccaatcaaatagcgatgcattttgttgattcatcagaaaattcatctgaaaagtatcctattaatccaaatggctcacctaatggcataacaggaattacagcttctaatgggagagttaccattatgatgcctcatccagaaagagtttttagaaaagttcaactaagttggcacagaaaagattggaatgagtactcgccatggatgcaaatttttataaatgcaaaaaaattcagtgataaaaattaa

SEQ ID NO: 318223 - DNA, 221 bp, Unknown
  Bacterial polypeptide expressing nucleotide sequence isolated from the Sargasso Sea
agatgacaatgatcaagtagcagtcaaatattgtagtaaaagtggtgaggtaaatgaaaattttaatcctaatggatccttaaaaaatatagctggaatatttaacaaaaataaaaacattttgggaatgatgcctcatccggaaagagttatagatcaaagtttatcaagtgatgacggatctttctttttcaaaaatttaatagagaatttaaaataat

SEQ ID NO: 318224 - DNA, 478 bp, Unknown
  Bacterial polypeptide expressing nucleotide sequence isolated from the Sargasso Sea
atcagtaattaattttgcaaattctggtggaatggtaatgggtatttgtaatggcttccaaattctagttgaaacaggattggttcctggtgctttgctgagaaataagtacttagagtttatttgcaaaaatgtttttgtaaaaattaataacaaagataatgcgtattttaaaaatattgataatacagtattaaaactacatatcgcacataatgagggaaactatttttgtacaaatgatcaattgaaagaaattgaggataatgctcaagttgcaatcaattactgtgatccaagtggaaaaataggacaactctataatcctaatggatctataaaaaatattgctggaatttttaataaagcaaaaaatgttttaggtatgatgcctcatccagagcgaatgattgatacttctctttcaggtgaagatggatctcttttttttaaaaacttaattaataatttaaaatga

SEQ ID NO: 318225 - DNA, 2257 bp, Unknown
  Bacterial polypeptide expressing nucleotide sequence isolated from the Sargasso Sea
ggaaatctggtctaatgaatctcaagaaagatatgtattagcaattcataaagataataaaaatgcttttgaaaagatatgtcaaagagagagatgtgaatatgcaattgttggacatacaacaaaagaaatgtctgtaaaactttatgatgataaaaacaaaaactatccggttgatgtgccattatcaatgctattcggcgatcttccaattacagaaatggaagttaaagaagaatttgttaaaacttttaatgaagataattctgaagacattgatctgagtgattcaattactaaagttcttcaacatccgactgtttcatcaaaatctttcttaataacaattggtgatagaacagtaagtggaatggttgcaagagatcagttcgtgggaccatatcaagttcctgtttctgactattcactaagcttaagatcttatacatcaaataatggagaagttctaagtattggagaaaagcctaccattgctcttataaatcctgccgcatctatgagaatggctcttggcgaagctttaaccaatatgtcaggggttgttattaaaggattaaataatgttcaagtgtctgcaaattggatggcagcatctggagaaaattcagatgattttgccttgaggtctggagttgaggccttgtcaaaaattgcggtcgatttaaaagtttctatccctgttggaaaagactctttatctatgagaactaagtggtcagaaaataattcagattatgaggtatcaagtcccttgtctggagttattacagctatggcaccagttgatgatgttacagagtcagttactccagaattaaacacttctgatgatttcagcattcttttaattaagttaaataacaaaaataggttggctggatcaatattctctgaaattactgaaacaaaatatcaacataccccagacatagatgatattgaggtatttgaaaaactgttttcaagtattcaaaatcttttgaaaagtaaaaaaatactagcaatgcatgatatttctgatggaggtcttataacaacattgttagaaatgtgctttaccaaaaaagttggtatgagattgaatttagatgattcatcaggcgtcaatgaattccttttctctgaggaaattggctttgcaattcaaattaagaaaaataatcttgatgaagttacaaatactctaacgaatgaaaatatttatgtaaaaaatatagctgaaataatagatgatgagcaattttcaatttttaaaaatgattcagagctttttagtaagtcagttattgaattagaaaaaaattggcgagagacttctcatgctatccaatccataagagataacgaagaaattgcaaactctgagctgagtttgcttgatgatagaaattttaaaggacttaaaagcaatatctcgtttgatgaggatgaacttaaacatatcagtgtcaaaagaacaaaacctaaagtagcgatcttaagagaacagggcgtaaatggacaaaacgaaatggcagctgcttttaccctggcaggcttcaatgcttttgatgttcatatgcaagaccttcttgatggaaatacaaacttaaaggactttcagggcatggcagtatgcggtggtttttcatacggtgatgttctgggtgccggaggaggctggtcaaaaactattttgtataacaatcttgttaaagatcaattccaagaatttttcaatgataaaaaagttttcacattaggtgtatgtaacggatgtcagatgctctcaaatttaaaagatattattccaggagctgaattttggccaagttttgaaagaaatttgtcagatcaatttgaagcccgtttggctcaagtaaaaatatcaaaaacagagtcggttcttttagatgggatggaagattggatgataccagttgcatcagctcatggagaaggaagagctcaatttaataataatgatcttcaggaattagaaaaatccaatcaaatagccatgcgttttgttgattcatcagaaaactcatctgaaatatatcctattaatccaaacggctcacctaatggcataacaggtattacagcttctaatggaagagttaccatcatgatgccccatcccgaaagagtttttagaaaagttcaactaagttggcacagaaaagactggaatgagtactctccttggatgcaaatttttataaatgcaaaaaaatttagcgataaaaattaa

SEQ ID NO: 318226 - DNA, 1387 bp, Unknown
  Bacterial polypeptide expressing nucleotide sequence isolated from the Sargasso Sea
tacttcatctagtattgaaatggcatctaaaggaaatcttggaattgaaattaatcttaataaagttccttgtagagaagcaaagatgacaccatacgaaattatgctttcagaaagtcaagagcgaatgttgattgttttagaaaatgggaaggaagaacaagctaaaaaaatatttgataaatggaacttagattttgccgttattggtaaaactactaagtccaaaaaaattgaactttattttgatgaagaaaaagttgcagatattccagttaatactttagttgaaaattcacctatgtatgaccgtaaatggaaaaaagcaaaactacctaaaaaaaataaaattaaaaaagaagatcttaaaaatttaaagataattgatgtcttaaagaaaattttagcaaatccaaatgtttgtagtaaagaatggatttggcaacagtacgatcatacagttatgggagatactattcaaaaaccaggtggagattcaggagttgttagagttcatggaacagataaagctgttgcagcatcagttgatagttctgctgtttattgttgggcgcatcctttaacaggtggaaaacaagttgtttgtgaaagttttagaaacttaatttctgttggagctaaaccaattgctattacaaactgtttaaattttggtagccctgaaaatgaagaaaatatgggtgagtttgtagagtgtgttcaaggtataggtgaagcagctgaatatttaaaattcccggttgtttcaggaaatgtatctttttataatcaaacaaaagatgaaggtatcaagcctactccatcgattggtggcgttggattaattaaagattataaaaaaatgatcacaatgaaacttaaagaggttgataatatagtgttagttattggtaaaactgaaggtcatatagatcaaagtttatttgcaagaaatatattagatgaaaaaaatggaccacctccagaaataaatctattcaatgaaaaaaataatggagaaactttactaaaattaataaatagcgacttagttcaaagtgctcatgatgtatcagttggtggaataatcactgctgttagcaagatgtgtattaaaggaaataaaggtatcaatctaaaaaaaccaaaatatttaattaatgaaattgaatacttttttgctgaagatcaaggtcgatatataattgagattaccaaaaaggatcttaaaaaagtaactgatatacttaataaaaatgctgtccatttcgatgaattaggaacagtgaatgaaaacgagctatttattaatgaaaagacaaaagttacaattgacgaattaaaaacatctaatacaagttggttaactaaatatatgagtaaataa

SEQ ID NO: 318227 - DNA, 1344 bp, Unknown
  Bacterial polypeptide expressing nucleotide sequence isolated from the Sargasso Sea
gctgctgggttgacttcatcaagtgttgagatggcctctaagggaaaactaggaattgaacttaatttaaataaagttccttgcagagaagaaaatatgacaccttacgaaataatgttatcagaaagccaggaaagaatgcttatagttttagaaaatggaaaggaagaaaaagcaaaaaagatttttgataaatgggatcttgactttgcgataattggtaaaacatcaaattcaaaaaaaattgaaatctattttgatgaaaaaaaagttgctgatataccaatagatttattagctgaaaatgcaccaatatatgatagaaaatggaaaaaaattaaactcccccaaaaaattaaatttaaaatacaagattttaaagcacttaatattgatgattgcttaaaaaaattattatctaattctaatgtatgtgacaaacagtggatatggaatcaatatgaccacactgttatgggtgatacaatacaaaaaccaggtggagattctggtgttgtaagaattcatggaactaataaagctgtagcagcatcagtagactcatcagctttatattgtcatgctcatccactaactggtggtaaacaagtagtttgtgaaagttggagaaacttaatatctgttggtgcagaaccaatagcaatcactaattgtttaaattttggtaatcctgaaaaagaaaaaaatatgggagaatttgttgagtgtgtaaaaggtattagtgaagcaagtaaatatttagattttccagtagtttctggaaatgtttctttttacaacgaaacaaaagataaaggtattaagcccacccctgttataggtggagtgggattaattaaggattataaaaaaatgataacaatgaactttaaaaaagaagaaaatatagtactcgttgttggaaaaactgaaggtcatttagctcaaacaatttttgctagggaaatattaggtaacaaaaatggtcctcctcctgaaataaatctatttaatgaaaaaaatataggtgaaactctattgaaacttattgaagagaaattaatagtttcttctcatgatgtttctttaggaggtattttatgcgctgtagctaagatgtgtataaaaggaaataaaggaattaaaatcagtaaattaaataatttaacaaataaatttgaatattttttcagtgaagaccaaggtagatatataattgagataaataaggaaaatgttgaaaaagttgaagtatatttaaataaaaattcaataaactttgatcatttgggcattgtaactaatgatgatatagtaattgataatgagacaaaaatctcaatt

SEQ ID NO: 318228 - DNA, 265 bp, Unknown
  Bacterial polypeptide expressing nucleotide sequence isolated from the Sargasso Sea
aatggttgaagttaatgaaaaaatagcaatagagcatggattaaaaagtgacgaatataagaaaatctgtgatcttttaaaaagatcaccaaatataacagaattaggtattttttcagcaatgtggaatgaacattgttcttataaatcgtccagaaaacatcttaaaaaattacacaccaaaggtgaaaaggttatccagggtccaggagaaaatgctggagttgttgatattgaagatgatgatgcaattgtattaaaatag

SEQ ID NO: 318229 - DNA, 674 bp, Unknown
  Bacterial polypeptide expressing nucleotide sequence isolated from the Sargasso Sea
aatgcttattatactagacgataaaaaagaaaatgaagcaaaaaagatatttgataaatgggatctagattttgtagttattggaaaaaccacagacacaaataaattagttttaaattttaataacaaaaaggttgcagatataccaatcactgcattagcagatgaagcacctcaatatgataggaagtggaagaaattaaaagtaaaaaagaatgattttaaaaaaaaagagttaaaaaaaataaaaatagatgaagctttatttaaaattttatcctctccagaccattcaaacaaaagctggattacagatcagtacgatcaagttgttatgtgtgacacaatacaaaaatctggtggggatgctgcagttgtaagagtgcataaaaaagaaaaagcgatatctatatctgtagactcctcggcgaactattgtgtagcggatcctagaactggcggaaaacaaattgtttgtgagaattggagaaatttaatttcagttggttcaaaaccattggctataacaaattgtcttaattttggaaatcccgaaaaacctgaggtcatgggagaatttgttgaatgtattgagggtatgaaggaagcatgtgagtttttagattatcctgttgtatctggaaatgtttctttttataacgagaccaatcaaa

SEQ ID NO: 318230 - DNA, 628 bp, Unknown
  Bacterial polypeptide expressing nucleotide sequence isolated from the Sargasso Sea
ggctgtatgcggtggattttcctatggtgatgttctgggagcaggaggaggttggtcaaaaactattctgtataacaacaatgttaaaaatcagttcgaagaattctttaataaccaaaaaacttttacacttggggtctgtaatggttgtcaaatgctttcaaatttaaaagatattattcctgatgcagattattggcccagttttgaaagaaatttttctgatcaatttgaggctagattaattcaggtaaaaattaacaatactaactcagttttattaaatgatatggatggatggacagttccaattgcttcagctcatggagaaggaagggctaaatttttaggtaatagtttagaagaattaaaaaaacaaaaccaagttgcaatgacttttgttgattctaatcaagaccctacagaaaaatacccattaaatccgaatggatcaattgaaggtattacaggagttacagcttccaatggaagagttaccattatgatgcctcatccagagagagtatttagaaagcatcaaatgagctggcattcaaaagattggaatgaattttctccatggatgcaaatatttattaatgctagaaattttagtgataataattaa

SEQ ID NO: 318231 - DNA, 259 bp, Unknown
  Bacterial polypeptide expressing nucleotide sequence isolated from the Sargasso Sea
aggaaattatttttgttcagatgaagaattaaaagccattaatgaaaacaatcaagtggcactaacatattgtggttttgacggaacagacaatgaagaatttaatccaaatggagcaattaaaaatatagctggagtatttaataaaaataagaatgtcttaggtatgatgccacatcctgagcgaatgatagataaatacctgtctggaaaagatggatctatcttttttgaaaatcttttaaaaatcaataattaa

SEQ ID NO: 318232 - DNA, 1258 bp, Unknown
  Bacterial polypeptide expressing nucleotide sequence isolated from the Sargasso Sea
atgataaatatagcaattatccaattccccggatcaaacacagagcgtgaaacactcatggcttgccgccgggtggggttgaatccggtagagtttttatggaatgagccggctgaatctttgtctgaccttgacggctttgtgatcgtgggtggattttcttacgaagaccgttcccgctccggtgttattgcagcgctagaccccatcatgaaacagatcaagatcgaagctgcaaaaggtaagcctgttttagggatctgcaatggagcgcaaattttggtagaaagcggactggtccctggactggacgaccatcgtgttggtttggctcttacggataacaagcgtgtaaaagacggacatgtagtgggcgtaggctactataatacttgggcgaatttaaagatgtctatacccagcaatagatgtgcattcacaagacacctggatataggaggcgttatcaatattcctttggcacatggtgagggccggtttgttatccccaataaactattagaaaaaatgatcaccaatgatcagactgtttaccgatactgtgatgatgatggcaaagtggtgggtgaattccccacgaatccaaatggctctatatataatctagcagcagtctgtaatcctgctggtaatgttatggcattgatgccgcacccagaacgaacaacaaatggcgatccaatattttcttctatgaaagaatttattgaactaggaaatccagtcgtggaccacagcctgtcttttgaacgctttaactatgacctagaaaagtatatacctggggcggatgcaacacagtggattattgatatggttattacagataacgaagcagcctctgttaacaatgcattaaaccacctaggatacgatgtgtctattacgcgtcagacccattgggaaatatcaaccaatgaaggtcataatgactccctagagaaaatcgatgcctcgggagagctctataattcaaacaaagaattcataagtaatataagatctgctgagaacacagtttcttttttggtccgtcaaaaagaggatatgcatggacgaataaaatacgagtctttaaaagaaaggtttgaaattgaagaattaaaagaaataaagcgcggcgtcatctggaatctgtcaattaacagcggtaatattgatactgttataaatgatattttaaacactaacatactatttaacccattatctcatgaatgctataaaatcaactgaa

SEQ ID NO: 318233 - DNA, 215 bp, Unknown
  Bacterial polypeptide expressing nucleotide sequence isolated from the Sargasso Sea
catgaaatcttctgttattgttttccctggttcaaattgtgatagggatatagctgtcgccttagaaaaattacagttcaagaataaaatggtttggcacaaggactcggagctccctaaatcagatctaatagttatacctggaggattttcttacggtgattatttaagatcgggtgcgattgcagctaaatcaaaaatcttaaatgaagtta

SEQ ID NO: 318234 - DNA, 832 bp, Unknown
  Bacterial polypeptide expressing nucleotide sequence isolated from the Sargasso Sea
catgcaggtaaaattgacttttgatttagaaaaaagaaacaatcccacaaaaatttctggcaacaaacctcgggttgccatattgcgggaacagggagtaaacagtcaatatgaaatggctgcggtatttatgcgggccggttttgaggccattgatgtgcatatgagtgatctcttatccggtgtggaccaattggataattaccagggcatcgtagcttgtggaggtttttcttatggcgacgttttgggtgctggtggaggatgggcgaaatccatcctttacaataatcaattgagcgaccaattcgctgagtttttcaatcgcaaaaatactttttcgctgggtgtttgtaatggatgtcagatgatgagccatcttaaaaccatgatacctggagctgagtgttggccagaatttaaaagaaataaatctgaacagtttgaagcccgtttcagtctggtaaaaatcgagtcaaccaaatcaatctttttggcagaaatggcaggttctcaaattcccattgccacctcgcatggcgagggaagagctgtattttcaagctcggaggttcgccaacatgctaaacctcaaattgcagttcgctatatcgataattacggcaacattgcagaaaggtatcctgaaaatccaaacggatccattgagggtgtatgtggattaacctcgagcgatggcagagccacaattatcatgcctcacccagagagggtatcaaaaaccacacaaaactcatggcaccccaatgattgggaagacgaaggaccgtggtttcaaatgtttaaaaacgcaagaaaatacttagcttaa

SEQ ID NO: 318235 - DNA, 517 bp, Unknown
  Bacterial polypeptide expressing nucleotide sequence isolated from the Sargasso Sea
aatgaagtcacacgttatcgtttttccaggatcaaattgtgatcgtgatgtagcggtagctatcaaaaatatttctggtcatcaaccgcaaatgatatggcacaaagaaacatcaattaatcaatcggatctgatcgttgtaccaggagggttctcttacggcgattatttgagatgtggcgccatggcatcaacatctcctatcatgcaagatgttgtaaaaaaggcaaaagaaggtgttcctgtattgggaatttgtaacgggttccaaattctgatcgaaagtggattgttagatggtgcgttgatgagaaatagtagtttgagctttatatgcagagacatattaattaagcccaaaaatcaaagttcagtattcacaaaaaaaactcaagttgcgaaaatgccaatagcacataatgaaggtaatttttttgtaacctctgaacaattaaaaaaaattcaagataacgaccaaatagccttccagtattgtgatgaaaatggaaatatcagt

SEQ ID NO: 318236 - DNA, 301 bp, Unknown
  Bacterial polypeptide expressing nucleotide sequence isolated from the Sargasso Sea
ataaaaaagaatatcttagaattgcatattgcgcataatgaaggtaattatttttgctcacaagatgaattaaaatcaatagaagataatgatcaaattgctgctacctattgcgatcaaaatggtaaaattaataaagaaaataatcctaacggagcaattaaaaatatagctggcatatttaataaaaaaaagaatgtgttaggtatgatgcctcatcctgaaagaatgattgataaatatctttcaggtgaagatggttcaatttttttcacaaatctcttaaataatttaaaataat

SEQ ID NO: 318237 - DNA, 565 bp, Unknown
  Bacterial polypeptide expressing nucleotide sequence isolated from the Sargasso Sea
aatgaaatcagcagttattacttttcctggttcaaattgtgacagagatatggatgtcgctttgaagaaatttggatttaaaaataaaatgatttggcatactgatgctgaattaccaaaaattgatttagtagtattaccaggtggattttcatatggtgattacttgagatgtggaagcatggcatccaaatcaaaaataatgcagtctgtaattaattttgcaaattcaggtggtatggttatgggtatatgtaatggatttcaaatattagtggaaactggtttagttccaggtgttttgcttagaaataagtatttagagtttatttgtaaaaatgttttcgtaaaaattaataataaaaaaaataaatattttaaaaatgttgaaaatgaagttttagaatttcatatagctcataatgaaggaaattatttttgtacaaatgatcagttaaaagaaattgaagataataatcaaatagctatcaactattgtgatgaagatgggaaaatagaagatcaatttaatcctaatggatctataaaaaatattgctggtata

SEQ ID NO: 318238 - DNA, 1267 bp, Unknown
  Bacterial polypeptide expressing nucleotide sequence isolated from the Sargasso Sea
gatgaccacagctccaaaggtcggtgtcattcaatttcctggatcaaatacagaaagggaaactgttatggcctgccatcgtgttggacttgagccaatagaatttttatggaaccagccccataaggaattaactgaactggatgggtatattattgttggtggattctcatatgaagacaggtctcgctcgggggtcattgcagcgctagagccgatcatgaaacaaatacggatcgaagcaggcaaagggaaacctgtattaggaatatgtaatggggctcaaatattagtagaaagcgggctggtgcctggccttaaagataaccgtgttggcttggctcttacagataataaaagagtacaaaaaggacatgttgtgggagttgggtactataatacctgggctaacttgaagttgtctagtccttcgaagcggtgtgcttttactcggcacttaaaaccaggtgagcatataaacatccccttggcccatggcgaaggtcgatttataataccagaagaacttttgggagaaatggtcaggaacggacaaactgtctatagatattgcaacgatgatgggcagaccattgatgagttcccaaccaaccccaatggctctatatataacttagcagccgtttgtaattcacctggcaacgtaatggcaataatgccccatccagaaagaacaaaaagtggagatgttattttttcttcaatgaaggattttatcgaagatggcaacccaactactgagggttcattaaattttcaggtctctgaacatcatatcaaaaatctaccacaagaaaacgatactacagaatgggtcatagatatgatcattacagataatgaggccgcttctgtaaacaatgcccttaagcgacttggccatgatgtttctataacaagacaaactcattgggaaataaaaaccgatggagaccatgatcatattttgagaatgatcgatgattcaggagagctctataattcaaacaaagaatatattggagagatcatatcaaataataagacagtatcatttcttgtaaggcaaaaagaagatatgcatgggcgaattaaatacgaatctttaaccgaaaggtttgagatcgaaggattaaaaaaattaagacgaggcgtagtctggaatctctcaattaacagcggtaatattaatactgtcgtaaacgatattttgaacactaacatactatttaacccattatctcatgaatgctataaaatcaactga

SEQ ID NO: 318239 - DNA, 1352 bp, Unknown
  Bacterial polypeptide expressing nucleotide sequence isolated from the Sargasso Sea
tgaaccgtttgggggggctgcaactggtgtaggtggcgtaattcgtgatatcttatctgcgggaacaagaccaattgcattgtttgatggattaaggtttggtgatatagaaactgatgcacatgcacggtggttattcaaaaatgcagtatcaggaattgcagattatggaaattgtcttggcattccaacaattggtggtgaggtagaatttgatacatgctatacaaattatgcattagttgatgtggcagcagtaggatttggaaaaaaatcaaaattaattaaaaatcacgcaaacattaatgacttggttttactaattggcggttcaactggtcgtgatggtgtaggtggttcacaatttgcatctgatgcattagagggagaagatcgttcagctgtacaaatacctgatccatttattgaaaaattaatcattgaagcaattttagaatgtcgtgatgaaaattgcattaatgcaatgaaagatttaggcggtggtggtctttcttgtgcaatttctgaaactgcagaaagtttgggaatcggtattgaacttgacgtaaaaaatgttcatttacgtgagtctgacttgtcccctgatgaaataatgatttctgaatctcaagaaagaatgcttgtaatatcttctccagataatctctcaaaaattgaaaaaatttgtgataaatttagaattcaatgttctgtaattggtaaagttaaagaggataaaatgatgcatgtgaaaaacggtaatgataccttggcattacttcctgcagattttgttgcacgtggtcctttaattgaccgaccaaaatcaaaaccagaatatctttcacaacttccatcttctcctccatctgaaaatcaattaccattatctgaaattttactcaaattactctcttcgccaaatattgcaagtaaacattgggttttccgtcaatatgatcatgaagttggaattagaactgtcataaaacctggttttgatagttctgtcttacgtctggacaatggaaaatcattatctgtaaagattgatggtaatccaaagcattgttacattgatcctcggcaaggtgcaatcggatgctttgaagaagcatgtagaaatgttgtttgtaccggtgcaactcctatggggatggttgatcatttacaatttggtaatcctgaagatcctgaaatattttggacatttatggaatctatagagggaattactgattttgcaaaatttcttaatgttccatgtgtagggggtaaagttagtttctataatgaaacttctaaaggcccaatcaaaccaactccactgattggtgtgcttggattgattg

SEQ ID NO: 318240 - DNA, 1798 bp, Unknown
  Bacterial polypeptide expressing nucleotide sequence isolated from the Sargasso Sea
ggttatctgttttctaaaaaattagataatcgtaaatttaaacagattagcagaattttatctaatcaagtttcacaaaaaatcttaactaaagataatgtggtaaaggtattatcaaattactctaattttaattgggtagtggaaataaattttttacccggagtaactgataacttaggtagtacagctaaagaaatcattagtgataatttaaaaaatagttttaaaaaatttcatctaggatctactaaaataatcttaatcaaaggtaataaaaaaaatatttataatatatcaaaaaaagaagctaatcctcttattcaaacaattaaaatttatccatttaaaaaatatattgatttttttaaaaaaaatagatttgaactacaagaagtaaaattaataaataaaaaatatataaaaagagaagtagatttaaatatttccgatcatgaacttaatatgattggcaaacttggaattgaagaaaaaaataaatcaagaagaggaacactaggcttagatatcgagtcacttaaaactattagaaattattttaataaaattaaaagaaaaccttcagatgtagaaattgaaacattagcacaaacttggtcggagcattgtaaacacaaaatcttttcatctaaaattgataatataaaagaaggtatttttaaaaaatatatacgaggagcaactgaaaatattatcaaattaagaaaggataatttttgtgtttcattatttacagataatgcaggaggaattgaatttaataaagattggatagtttgtcataaagttgaaacacataatacaccatctgcacttgacccttttggaggagctataactggaattgttggtgtaaatagagattgtcttggttttggaaaaggtgctaaaccaatagctaatacctacgcttattatcttgctcttccaaataaagattatcaactgttcagacaaaaaaataaaaaagatccaatgctgccagcaagttatattgctaatggtattattagtggtgtgcgagttggtggtaattgttctggtatcccaactcctcaaggtaatatttactttgacgaccgttttgcagggaaacctctggtattttgcggtactgtaggtttaataccaaaaaaaataaaagggaaattatcacacaagaaaaaagctaattcaggagattttatactaatggttggtggcaaagttggtaaggatggaatacacggtgctacattttcatctgaagaacttgatcctaacagccctgtaacagcagtgcaaataggtgatccaataacacaaaaaaaattgtcagatgtaattattacagaacttcgtgataaagatctttatactagcataactgataatggagctggaggtttatcatcatctataggcgaaatggcaaaagaaagtggtgggtttgttgttgatcttgaaaaggtacctttaaaatatccaggtctatatccttgggaaatttggatatcagaatctcaagaaagaatgactttagctgttaagcctaaaaatttaaaaaaagttataaaaatttttaataagagaggcgttgatgctactttaattggaaaatttacaaaagaaaaaaaagccattgttaagtataataatatagaagttttaaatcttaatatggattttcttcatgaaggttatccaaagttaaatttaaaaacgtctttaccaaaaaataatatacttagaaaaaaacaaattaaaaatgtaaatttaatcaataaattacataaat

SEQ ID NO: 318241 - DNA, 301 bp, Unknown
  Bacterial polypeptide expressing nucleotide sequence isolated from the Sargasso Sea
aatgaattcatcggtcattatattccctggatctaattgtgatagggatatggatgttgcattaaaaaaatttggttttaaaaataaaatggtctggcatgatgatgataaattaccccaaagtgacttaattgttttgcctggtgggttttcttatggagattatcttagatgtggaagtatagctggcaaatcaaaaattattcaatcggtaatcgattttgcaaactctggaggtttagttttaggtatttgtaatggatttcagatcttaacagaaacaggcctattaaaaggtgtt

SEQ ID NO: 318242 - DNA, 1123 bp, Unknown
  Bacterial polypeptide expressing nucleotide sequence isolated from the Sargasso Sea
catgttaaaaaattatgctggatatattattcttggcggcttttcctttgaagacagatctaggtcgggaataattgcatcccttgagccggttatgcaagaggttaaaaaacactccttgcttggcaagccggttttgggtatttgtaatggggctcaaatcttagtcgagtcggggctggtcccgggcaatcagagttttaacactctggtttctttaacagacaataaaagagtggtcggaaatagaattgttggaactggttattacaataagtggtgttatataaaacctaacgaggcctcgttgtctgcgttcactaaaaaaggcggtaagcctttgcgcgtaccaatagcgcacgccgaaggtcgctttgtttttgataaagatgttgaaaaagaaatattgaacaacaacttgataacataccagtattgtgatagcagcggcctgctttctgaagacttccccacaaaccccaacgggtctttgttttctgcggccgcattaagcaatccgtctggcaacgtaatggctatgatgccccatcccgaacgaactctaaacaatgaagctggggatattttttcaagcatgaaggaatatattgagtctgataagtcttttagctacaaagccctaagctttgagtctaaaaaaatagaggttaaaaaatttgaaaaaaataaaggcaaaacagaggttcttgtttcgacaatcatcgcagacaatgaagcagactctgttgaaaaatgcattaatgggcttggggttaatgctaaaataaaaaaatatgttcattttgaaattgacggcgatatagatcttaacagccttcttgcaacagatgtcttatttaatcccagcaaagaatatatgaccaagatagacaaaaactgtgacgttgacaggtttctagttagaaacaatgatgatattcacggtcaaagcataacacaaacattgcgcgatcgttttaattttacggggctaagttcggttcaaaggagcgttgtttgggaagttaaaattaattcaggctcaagaaaaaaagacgtggatttaattttaaatagtcatatttttgctaatcccatttcacagaaatgtcatgaatattga

SEQ ID NO: 318243 - DNA, 787 bp, Unknown
  Bacterial polypeptide expressing nucleotide sequence isolated from the Sargasso Sea
gaatataccacttgctcatgtgaaaggaagatttgtccttccaaaaccattgttaaaagaaatgattgatagccaacaaacagtatatagatattgtgataatgatggtaatgtaatagatgaattccctactaatccaaatgggtcggagtatagcttagctggagtctgtaatccacagggaaatgttatggctattatgccgcatccagaacgcaccccaaatggagacgcaattttttcatctatgttggaatatgttaatgaaggaaacccaagaacaaatcatcaattaagttcaaaaaaagtacccttagaaattaatgattataaaaacaataataatactgagtggataattgatatgataattaatgataacgaagcatcttcggtccaaaatgccctcacacaaaaaggatacgatgttttattatcaagacagacacattgggagatagaaattgatgaaaacattgatgaaatattaacaaaaatagacacaacgggtgaattatataattctaataaagaatacttgagtgaaattaagtcaaacgagaatacagtatcttttttaatccgacaaaaagaagacatacatggtcgagctaaatatgaatctcttacagaaaaatttggaataagtgaaattttaaatattaaacacggagtaatatggaatgtaattgtaaacagcggtaattttgaatcaacaataaacagtattttagaaacaaacatattatttaacacattatcttatgaatgctatagaatcaaataa

SEQ ID NO: 318244 - DNA, 970 bp, Unknown
  Bacterial polypeptide expressing nucleotide sequence isolated from the Sargasso Sea
gtcaggcctaattccaggcattaaaaacaaccaaacctcaatcgcattttctgacaacaaacgaattcaagatggccacgttgtcggaacaggctattacaacacttgggcacatctaaagacctctgttcctccagaaagcacggcatttaccagacacctcgaacatgaagaaataatctatgtgccattcgcacatgctgaggggaggtttatcatcccagaagacctgctaaaagaattaattaaaaataaccaaacagtgttccgatactgtgacaatgacggcgagataataagccagttcccaacaaacccgaatggttctgattataatcttgctgctatttccaaccctgctgggaatatccttgcgatgatgccacatcctgaaagaactaacttgggtgataaattattttcttctatgagagagtttatcaaacaaaaaatttcgataaaaaatgattccctatcatactctccacctaacaaaaatattaaaaaatatactccagaagaacatgtgtccgagtgggtcgttgatatggtgataacagacaacgaagctgaaacagttcaaaatgcacttaggcgaataggcattgatgtaaccataaagaggcagcaacactgggaaatatctacctccgataattctagtgctacgctgaaaaaaatcgaagatacgggtgagctttttaattcaaataaagaatatataagctctatcaggtcaaacgagaatacagcgtgtctacttgttagacaaaaagaagacatgttttgccagtctaagtttgaatctataagagagagattcagtattaatgaattaattcaacttaagcgtggcatagtctggaacatcaagataaaaaatactaacttccaaccagtattagataaaattatagacacaaatatactttttaatccattatcgcatgaatgttttagaatcagttag

SEQ ID NO: 318245 - DNA, 2006 bp, Unknown
  Bacterial polypeptide expressing nucleotide sequence isolated from the Sargasso Sea
tcaagattacgatcgaataactgaaaaagaagaattaccaacaaaagatttaaaaaaacttatctttaatacaataaaatttccggcagtagcatcaaaaaaattcttaataaccattggagatagaactgtaaatggtttagtttacagagatcaactaataggcaataggcaattacctgttagtgattatgccgcaacacttgatgactatgattcttattcagggcaagttgtttcaattggagaaaaacctaatatcgctattgagaaccctgaagcttcgacaagaatggcactggcagagtcaataaccaatatttgtggagttaaacatgaatctcttagcaagatctgtttttcagcaaattggatgagttcaacaaaaacagcagatgaaagaggagatcttttaagaggagtgcaaagtttatctaatatggcagattatttaggtttgtctattcctgttggaaaagattcgttatccatgaacacatcttggaatagtgaaggcaatgagcattcagtcacttcaccaatgacactaaatatatcttctttttccaatgtttccgatttaagaaaatcagtaacgccagaactttcaacaaaagattcaactttattacatgtatggattaatgaaggagaatttcgtttaggtggcagttcattatatctatcaaataatcttttcggtggagctacgcctgatgtagaagatccagaaaaatttaaacagttatttgaagcatcgcaagaccttatttctaaaggctcaatagaagcacttcatgatatatcagatggcggattaattacgactttaattgaaatgtcactttgcagtaattcaggtcttgatattaggttagattattcagacaaagagagtattattcctaaattattttccgaagaagtcggctatgtcatagaaattgataatgaaaaacttacagaagttaaagaagacttaactaagagagggttattttttgatgaagttggaagaaaaaatattgataaaaaaatcaatatattaaattttgatgatgctttattttcatctacattaaataaattattcgatgaatggagttcagtaagccataaagtacaaagaataagagacaatattgaatcagctcaaagcgaaaaagaagtctataagaaatgggatgaaataatcaccccaaaaatagatttttctattccatctccaaataagaacctattttctaaaaaaccaaaaattgcactactgagagaacaaggcataaatggccattatgatatggcagcggctttgatggaggctggctttgaagtgcatgatgttcatatgagcgaattgctagataaaattaaaaattttgatttatataatggccttgttgtaccaggaggcttttcatatggagatgttttaggcgcaggctcaggaatgtctaatacaattctatttaacccaaagattaagaagatttttaagaatttcttagagaatgataagaaatttgcgctgggaatatgtaatggatgtcaatttttatctggactcaaagaaattgttccaggagcagataattggccagaatttaaaaagaatctttctaatcaatatgagtgcaggttggtgcaattaaaaatagaagatagctcttcaatctttcttgaaggtatgaaagacagcattattccagttatggtttctcatggagaaggtagagcagatttcaatttagaagaagaaaatgtaatcgctagatatgttgatcctgatcataagattacccaaacatatccattaaatcctaatggatctatgaatggtgtggcaggtgtttgtaatgatgatggaagaattactattatgatgcctcatccagaaagaacttatcttactaaacaattctcttggtctccgaaagattgggaagagcattctccatggttcaaaatgtttgataatgcttatttattttctaagaaaaattaag

SEQ ID NO: 318246 - DNA, 3353 bp, Unknown
  Bacterial polypeptide expressing nucleotide sequence isolated from the Sargasso Sea
aatgatgagattgattacctttttggaacaatttacaaaattgaatcgaaatccaaccgatgctgaactcatgatgtttgcacaggcgaattcagaacattgcaggcataaagtcttcaatgcagattgggtcattgatggcgttgataaagaaagaagtctttttcaaatgatcaaaaatacctatgaggccagttccaggaatgttctatctgcttataaagacaatgctgctgttatcgctggacataaagcagattggtttttgccctatctcgatgatcagaaatacggaagattccatgatgaaattcatacgatgatgaaggttgagacgcacaatcatcccaccgcaatttcaccatatcccggagccgctactggctcaggtggggagatcagagatgaagcagcaacaggcaggggagcaatgccaaaagccggtttaactggttttagtgtttcgcacctatttataccaggggatcttcaatcctgggaaaagacaatcggtaaacccgatcatattgcatcagcactcgatattatgctcgatggaccgattggtggtgctgcatacaataacgagtttggtcgacccaatattcttggttattttagaacctttgaggaagaaaataaggaagagtcgaatacttcttggggttttcataagcccatcatgattgttggtgggatgggtaatatttcagattcatctgtcaaaaaaaatgacatcgatgccggttctttgatcatcgttttgggtggaccagccatgttgatcggattgggtggcggttcagcgtcatctttgaatgccggtagcagcgatagcgaattggattttgcatctgtgcaaagagacaatgccgaactggaaaggagagcacaggaagtcattactcgttgttttgcaatgggtgtccaaaataaagaagacaatgctaacccaatcatactcatacatgatgttggagctggaggtctttcaaatgccattccagaagttgctgatcacagcaaaatgtccgcagacataaacttgagagatatcgacaatgctgagcctggaatgagccctttggaaatctggtgtaatgaggcccaagagagatatgttctctccattcaccccgatgacttggaagtttttgatcaggtttgtaagagagaacgatgtccatatgctgttgttggagaagttgcaacacatggcaacttaagattgaaagacgaagtttatgataattatccaatagatatgccaatggatgttttattcggcaagcctcccaaaacaaaactagaaattacttcagagcaaaaatcgatcattgatgatggcctaaaaggcattgatattgaggaagcagctttaaagattttaaggttcccaactgttgcagataaaacttttttgattcatatcggagacagaacagttggtggtttggtctcacaagatcagtttgttggtccatggcaagttcctgtgagtgatgttgcggttacattgaaagatcactttggtgtacaaggtgaagccatggcaatgggtgaaagatctccaatcgcagttcataacgcagcagcttcaggaaggattgctgtgggagaagcaatcacaaatattctctcagcgcccattggtgatattgcagatataaaactttctgcaaattggatgtcttcaatcatgactgacagactcaagcaggatctatatgaaacagtcgaagccatttcagttgatttttgtagcaaaattgggatcaccatccctgtaggaaaggattcactctccatgcaaacatcatgggtaaacgaagaaaaacaatataaaaacactgctccactctctttagttatttctgcattttctcccatcgatgatgtgaataatgtcatcacaccacaattgaaagataaaagtgagagcatcttattgttgattgatctcggacaagggcaaaatcgaatgggtggttcatgcttgtctcaaatttacaaccgcagtctaggcgaaacgccagatatcgagaacccagaggttcttaagaaatttttcaatgcgattacaaaattaaaatccagaatgctgattcaggcataccatgatcgatctgatggaggcctttttgcatgtgtctcagagatggcgtttgcaggtaacatgggccttgatttgtcacttgaagcagcaaatcaagaagagttgcttaaattgttattttctgaagagttgggttgcgtcattcagattcaaaatggtgatctagatgatgttttagatattctgaatgaagcttctttatcaaattctatatatccaatcggaacagttgtaaaagataagcaaatcagtattaagaataatgaatttaaccattcatttgacctaaaaacactccggcaagcttggtcaaaaatgtcttatgaaatgcaaaaactcagagataacccagagaccgctgaggaaggatttaaaaaaatattagatgtaaatgacccaggattaaatcctaagattaaatttggtccaactcagattgactataaacgtctaactaaatcgagtccaaaagtagcaatactcagggatcaaggggtcaatagccaaattgagatggcagtcgcattcaataaagctggtttcaatgcatatgatattcatatgactgacatattgaatggtcaagtcaatttagatcaatacattggtttggttgtatgcggaggattttcatatggtgatgttttaggtgctggaggtggctgggcaaagtcagtgttattcaatgaaaatgcacaaaatcaatttaaaactttctttcatagggaggaaacattcagtcttggcatatgcaatggttgccagatgatgtctcagctgaaagatctgattccaggtgcagatcactggcccagatttgtcagaaacctgtctgagcagtttgaagcaaggctgaatatggtagaagttttagaatcaaattcaatttttctgaatggaatggaaggctcaatgattccaattgcaacatcacacggagaaggacgcgttcagtattcaaatgatggcgatatgaatgcattgatagaggcaagcggtgtgaccataaggtatgttgataattttggccaaccagctataaattatccagacaatcccaatggttcagagtcaggctttgcaggattttgttccgaggatgggcgatctacaatcatgatgcctcaccctgaaagggtaatgagaacagaacagttttcatggtgtccagatgattggaaagatcatggaccttgggctagattttttgtcaatgcaagagattggatcggttagc

SEQ ID NO: 318247 - DNA, 118 bp, Unknown
  Bacterial polypeptide expressing nucleotide sequence isolated from the Sargasso Sea
ataactaatgaaaagggaaatgttctgggtttaatgcctcatccagagcgtgcatgtgacaagacaattggtgggactgatggtctatttacattaaaatcattaatattgaaataaa

SEQ ID NO: 318248 - DNA, 853 bp, Unknown
  Bacterial polypeptide expressing nucleotide sequence isolated from the Sargasso Sea
attgctatacaagacatggggggctgcaggattaacttcatcaagtgttgaaatggcttcaaagggaaaactaggtatagaacttaatttagattacgtgccatgcagagaagaaaatatgtcaccgtatgaaataatgttatctgaaagccaagagagaatgttgattgttcttgaaaaaggaaaagaaaatgatgcaaaaaaaatatttgataaatggaatttagattttgcagtaataggaaaaacaactaactcaaaaaaaattgaattattttttaataataaaaaagttgtagaaataccaattgacctacttgcagaaaatgctcctatttatgatcgaaaatggaaaaaaactaaattgcctcaaaaaattaaatttaataaaagtgaatttaaatctttaaaattatctgattgcttaaaaaaaatattaagcaactcaaatatttgtgacaaacaatggatttgggatcaatacgatcatacagtaatgggtgatacaatacaaaagcctggcagtgatgctggtgttgttagagtgcatggaacaataaaggctgtagctgcatctgttgactcctctgcctcatattgtttttcacatcctcttactggaggaaaacaaattgtatgtgaaaattggagaaatttaatttcagttggagccaaacccattgcaatcacaaactgtttaaactttggaaatccagaaaaagaaaaaaatatgggtgaatttgttgaatgtgttgaaggtataacagaagcaagtaaatatctagattttccggttgtttcaggaaatgtatctttttataacgaaacaaatgataaaggtattaaaccaaca

SEQ ID NO: 318249 - DNA, 988 bp, Unknown
  Bacterial polypeptide expressing nucleotide sequence isolated from the Sargasso Sea
aattctatctaatcccaatatctgtaacaaaaatgggatatgggagcaatatgatcatacagttatgggtgacacaatacaaaaacctggaggagatgctggtgttgttaaagttcacggaactaataaagcagtcgcagcttctgttgactcatctgcaacctattgttggtcacatccattaacaggtggaaaacaaatagtttgtgaaagttggagaaatttgatttcagttggcgctgaaccaattgctataactaattgtttgaattttggtaatcctgagaatgaggaaaacatgggagaatttgtggaatgtgttcagggattaggcgaggctagtaaatatttagattttccagttgtatcgggcaatgtttctttttacaaccaaactaaagataaaggaattaaacctaccccatcaattggaggtgttggtataattaaagactatcaaaaaatgattacaatgggttttaaaaaagatgaaaacttagttttagttattggaaaaactgatggtcatatagatcagagtatttttgctagagattttttaaatgaaaaaaatggcccaccaccagaaataaatttatttaatgaaaagaataacggtgaaacagttttaagtttaataaaaaaagatttagtcaaaaccgttcatgatatttccttgggtggaataattacagcaatagctaaaatgtgtattaaaggaaaaaaaggtattaaattaaagaaaccaaaacatttaattaatcaatttgaatatttctttggtgaggaccaaagtcgttatattgttgaggtcgaaaaagagaatttaaaaaaggttgaggaaatattgaaaaaaaactcagtacattttgacgaaattggtgaaatatcaaatgatgatttaacttttgatgataagacaaaagtatcaattgacgaattatatattagtaataataattggttaactagttatatgaacaaataa

SEQ ID NO: 318250 - DNA, 3283 bp, Unknown
  Bacterial polypeptide expressing nucleotide sequence isolated from the Sargasso Sea
aaaaatatttttaaaacactaaagagaaatcctacggatattgagttaatgatgttctcgcaaataaactctgagcattgcaggcataaaatattcaattcaataatgattgattctgaaaacaaagaaaaaacttcattattttctctcataaaatcaacacatcagaataataaaagcgatattatttctgcttataaggataactgctcaatagtaaaatcttataatgaggaaatattaattacgaaaaacaaaaaatatttaaataaaaaagaatcaagtgcatacattataaaagcggaaactcataatcatccaactgcaatctctccatttgaaggagcagcaacaggttctggtggagagataagagatgaaggcgctactggtattggctcaatacctaaagttggattttctgggtatacgctatccaatctctctatcaagggtgatataaaaacttgggagcaagaggaacaaaagaaatcagatagaataaaatcatctcttgaaataattttggatgcacctattggcgctgcatcatataataatgaatttggtagaccaaatatttttggctattttagaacgtttgaacatttaataagcaaatctgcttctacaaatgaatactacggttatcataaacccatcatgattgctggaggtataggccaaatcagatcaatacatactgagaaacaaaaattaaatgatggcgactgtattatagtccttggcgggtcttcgtatttaattggcttaggtggtggagcagcatcctctttatcatctggttcaagttccgaaaatttagattttgcatctgttcagcgagataatcctgaaattgaaagacggtgtcaagaagtcattaatcattgtatttatctaggctctaacaacccaatacttagtatccacgatgttggcgcgggtggtctaagtaacgctgtaccagaaattgtcaatgattcgaatatgggtgctgaaatatatcttgaaaatgttccgctagcagaaaaatctatgtcgccgctagagatatggtgtaatgaatcacaagaacgttatgtgcttgtattaaaggaaaaagattttcctacgttttctaaaatatgttctcgagaaaactgcccattcagtaaaattggttacgtaaaaaagaaaaaacaattgattgtatttgataaaaaaaataaaaaagtgataaatatgccaatgaaaagtcttctcggaaaaccacctatacccacagtaaatattgatgggtttgaaaaaaaatacactaaaaataaaactaaattcaaaagctttattgaatctactaagatggtactagagttgccatcagtatcagacaaaagttttcttatcacaattggtgataggtctgtatcgggattagttgcaagagatcagttggttggtcaatttcaaactccagtggctaatgctgcagctacttttacaagtttaggttcaaaatctggtcaagtcatgtctataggcgaaaggccttccctggcaatatcatcgcctgaggcatcggtagaaatttcacttggagaattaattacgaatattgcatcttgtaatattggaaaattatctaacattaaattatctgcaaattggatggcatcttcgaatgataataatgagttaaataaattatattatgcggttaagaaacttacagacctttgtaaggaacttgatattgccataccagttggaaaagactctttatctatgaattcgacttggaaaactaataaaaaaaataatattgtcaaaagccctgtgagtcttgtgttatcaggatttagcaatataaataatattgaggatattatgacaccagaaattatagaacatggacgaatatttttaattgatatatcaaatggcaagaatagacttggtggctctgcatattatcagacacataatattatttgttctaatgtgccgcgtttagataaccttgataatgttaaaaagttttttaaactaattcagactcttattaagaataaaatcataagttcctatcatgataaatcagatggcggattaataacaacattagcagaaatgggttttgcaactaattgctcactagtcattaataaaaatagtcatttatataaaaatgatgatagcttaagatcgttcttcttcaatgaggaattgggtgcaattgttgtagtaccgaaatctaaaattgatagtttttcagatattgttaaattaatgaaattagataatatgatttatgatttaggattcactaaaaatcagagcataccatcgatcactataaattctcaaaaaaatattactatacctcttcatatattgagaaaatcatggagtaaattatcgtatgagatacaaaaaatccgagataacagtaaacttgcccaagatgattataaatcaaaaattaatatacataaaagtaatataaaaataaaaaataaaattaaaatacagaaaataaaaaaagtatttaagagtagaaaaccatcaattgcgattctaagagagcagggaataaatggacataaagaaatggcagatgcttttatgaaggctggttttaattcatttgatgttcatactaatgataaaactattaattattccaaatttgatggtttagttgcatgcggaggattctcatatggggatgttcttggagcaggaagaggttgggctaaaaaaatattatttgacgatagaattagaatctcgcttgagaaattttttaatgatacaaacaaatttgctcttggagtttgtaatggttgtcaaatgctctcacaaatcagagatatcatacccggttctgaatcatggcctgaatttatacaaaatgactctaatcaatttgaggcaagacttgtccgcgtaaagattaaaaaaaataattctgtttttctgcataaaatgtcaggttcaattttgccactgatagtctcacatggcgagggcaaagttagatattcaaataaaaaaaataaagattccgcaatcatgaattatattgacaatagcaacaaagtaacatctaaatatccttataatccaaatggttctaaaaatggtgctaccgcttttactaatttggatggtagaataactattatgatgccacatcctgagagattgttttatctaaatcaattttcatacaagccgtcagactggatgacctcaccttgggaaaacttttttatgagcgcaagggagtgggttaaatgat

SEQ ID NO: 318251 - DNA, 1078 bp, Unknown
  Bacterial polypeptide expressing nucleotide sequence isolated from the Sargasso Sea
aaaaagaataaggatgatgttctagaagcattggattcttgtcaattaacagaacacatttatccctttggaaatttaaatcaagataggagtattaatttaatcataggagaaaaaattattcaccaatggtcactaaagactttattaaagcaatggcataaggttagttatgagattcagtctttaagagataatccaaaaaccgcaaaatctgaatatatttatgatcttaatacagaaagaaaaggactaaagcctctcatttcatttgatattcctgcaaagttcaatattaaaaaaactaaaccaagtatagctatcctaagagaacagggcataaatgggcaagttgagatggctgcagccttccatcgagttggctttgaatgcatagatgttcatatgactgatttgattgctggtgacttccacttaagtaattttcaaggtcttgttgcttgtggaggtttttcatatggagatgtactaggagctggaggcggttgggctacgaatattctttataacgatatgctgagagagcaatttaaagaattttttctaaacgaagaagttttctctttgggaatttgtaatggctgtcaaacattatctttactatcaagcttaattccaggtacagataattggcctaaattcaaacgaaatatttctgaaaaatttgaagctagattgagccaagtgttaattaaagactcaccatcaatcttttttagggatatggctggatctatgatccctatacctgtagctcatggagaagggagagctgaatttgcgaataaagaagagggcaagttggttgcagagaagctgaaccctcttgtttacgctgatgatacaggtaaattaacggagaattatcctgaaaatccaaacggctctccaggcggcatagctggagtcactaatgagtctggtcttgtgactattatgatgcctcatccagaaagagccttcttaagctctcagtattcttggcatcctaaaaactggggtgagtatggaccttggattaagtttttcgctaatgcaaaagattttgttagttaac

SEQ ID NO: 318252 - DNA, 2613 bp, Unknown
  Bacterial polypeptide expressing nucleotide sequence isolated from the Sargasso Sea
ttagaaataaaaataatttcaaactccaaataagcgaagactatttagtaatcgtgcttggaggtccagcaatgttaattggtcttggtggaggtgcagcatcttcagtttcttctggcgaaagtgacgaagatttagattttgcatcagttcaaagagataatgcagaaatggaaagaaggtgccaagaagttattaacaaatgttcgtctcaggataatagttatatagaatttattcatgatgtcggggcaggaggtttatcaaacgcgataccagagcttgctaaagattcagaattaggtgtttacattgagctttcaaaaataccaaatgctgatcggtctatgtcaccaatggaaatctggtcgaatgaatctcaggaaagatatgttttagctataaataaaaaaaatcaagctgcctttgaaaaaatatgtaaaagagaaagatgtgaatatgcaattgtagggaaaactactaatgaaaaatctgtaaaactatatgatgaaagtaacaataattttccagtaaatgttccattatcaatgctttttggtgatttgccgataacagagatgaccattaaacataagacaattaatgccctaccagacagtattgctgaagactttgatcttaaaagttcaattatcaaaacactccaacatccaactgttgcttcaaagtctttcttaataacaataggtgatagaactgttggaggtatggttgctagagatcaatttataggtccatttcaagttccagtttcagattattcattaagtttgagatcctttacatcaataactggagaagtattatctatcggtgaaaaaccaacattagctataacaaatccagctgcttcgatgcgaatggcattagcagaagctttaacaaatatgataggagttgcaatcaagggtctaaattatgtccaggtctctgctaattggatggcagcttcaggacaagagagtcaagacgttgcattaagagatggagtagaagcattatcaaaaatgagtattgatttaaagatatcaattcctgttgggaaggattctttatcaatgaaaacaagatggaaagataatgagaatgaattagaagttataagtccattatcaggtgtaattactgcaatggctccagttgaagatatcactttatcagtaacaccggaattaaatttagatgaagactccacaatattattagttaaattaaacaataaaaatagattagcaggttcaatcttttctgaagttaatgagtgtgactataaagatactccagatattgatgatatagataaatttaaaactatgtttgaagtcattcaaagcatgattaagaataaaaaaatattagcattgcatgatatttcagatgggggattaattaccacattgcttgagatgagctttactaaaaaaattggtatgaagttagatttaaatcaatcaaataatatatatagagagctattttctgaagaaattggatttgtaattcaagttaaaaaagatgaagaaaatgaaataaaaaattgtttaaaagaaaaaaatatatatgtagaacaaatagctaccttagcaatggataattttttaattattaaagatgataaagaattatttaatgaatcaataaaagacctagagaaatattggagagaaacctctcatgctatacaaagcattagagataataaaaaaatagcagattcagaactgagcttattagatgacaaaaatttttcaggacttttttcaaatgaggcctttgacgaagaagaattaaaaaagattaattttaaagcagttaaacctaaagttgctgttttaagagaacagggagttaatgggcaaaatgagatggctgcagcatttactatagcaggatttgaggcaatcgatgttcatatgcaggatttgcttgagggtaatgtttttctagaagatttcaatgggatggcagtatgtggtggtttttcttatggcgatgttcttggtgcaggcggtggctggtcaaaaactattctatataatgaaaatgttaaagatcagtttgaagaattctttaataatcaaaaaacttttacacttggcgtttgcaatgggtgtcaaatgctttcatctttaaaagacattattccggatgcagattattggcctagttttgagagaaatctttccgatcaattcgaagcaaggttagttcaagttgagattaaaaataccaattcaattctattagaagatatgcatggatggagcactccaattgcttcagctcatggagaaggcagagcaaaatttttaaataatgactttaaagaaataaaaaaacaaaatcaaattgcaatgacttttgtagattcaaatcaaaatccgacagaaaaatatcctttaaatccaaatggatcagcagatggaatcacaggtataacagctgccaatggaagagttactataatgatgcctcatcctgagagagtatttagaaaacatcaaatgagttggtattctcgagattggaatgaatattctccttggatgaaaatttttattaatgcaagaaaatatagcgatagcaattaac

SEQ ID NO: 318253 - DNA, 2289 bp, Unknown
  Bacterial polypeptide expressing nucleotide sequence isolated from the Sargasso Sea
tttcaaatgcagataagtccatgtcacctatggaaatttggtctaatgaatctcaagaaaggtatgtattagcaattcataaagataataaaaatgcttttgaaaagatatgccaaagagagagatgtgaatatgcaattgttggacacacaacaaaagaaatgtctgtaaaactttatgatgagcaaaacaaaaactatccagttgatgtgccattatcaatgctattcggcgatcttccaattacagaaatggaagtcaaagaagaatttgttgaaacatttaatgaagataattcagaagatattgatctgagtgattcaattactaaagttcttcaacatccgactgtttcatcaaaatctttcctaataacaattggtgatagaacagtaagtggaatggttgcaagagatcagttcgtgggaccatatcaagttcctgtttctgactattcactaagcttaagatcttatacatcaaataatggagaagttctgagtattggagaaaagcctaccattgctcttataaacccttctgcatctatgagaatggctcttggcgaagctttaaccaatatgtctggggttgtcattaaaggattaaataatgttcaagtgtctgcaaattggatggcagcatctggagaaaattcagatgactttgccttgaggtctggagttgaggccctatcaaaaattgcggtcgatttaaaagtttctatacctgtcggaaaagattctttatctatgagaactaagtggtcagaaaataattcagattatgaggtatcaagtcccttgtctggagttattacagcaatggcaccagtagatgatgttacagagtcagttactccagaattaaacacttctgatgatacatgcattcttatgattaagttaaataataaaaatagattggctggatcaatattctcagaaatcactgaaacaaaatatcaacataccccagacatagatgatattgaggtattcgaaaaactgttttcaggtattcaaaatcttttgaaaagtaaaaaaatactagcaatgcatgatatttctgatggaggtcttataacaacattgctagaaatgtgctttaccaaaaaagttggtatgagaatggatttagatgattcatcaggcgttaatgaattccttttttctgaagaaattggctttgcaattcaaattaagaaaaataatcttgatgaagttacaaatactctaaagaatgaaaatatttatgtaaaaaatatagctgaaataatagatgatgagcaattttcaatttttaaaaatgattcagagctttttagtaagtcagttattgaattagaaaaaaattggcgagagacttctcatgctattcaatctataagagataacaaagaaattgcaaactctgaactaagtctgcttgatgatgaaaattttcaaggacttaaaagcaatatctcgtttgatgaaaatgagcttaagcatatcaacatcaaaagaacaaagcctaaagtagcaatcttaagagaacagggcgtaaatggacaaaatgaaatggcagctgcttttacccttgcaggcttcaatgcttttgatgttcatatgcaagaccttcttgatggaaatacaaatttaaaggactttcagggtatggcagtatgtggtggtttctcatacggtgatgttctgggtgccggaggaggctggtcaaaaactattttgtacaacaatcttgttaaagatcaatttcaagaattttttagtgatgaaaaagttttcacattaggtgtatgtaacggatgccagatgctctcaaatttaaaagatattattccaggagctgaattttggccaagttttgaaagaaatttatcagatcaatttgaagcccgtttggctcaagtaaaaatttcaaaaacagagtcggttcttttagatgggatggaggattggatgataccagttgcatcagctcatggagaaggaagagctcaatttaataataatgatcttcaggaattagaaaaatccaatcaaatagccatgcattttgttgattcatcagaaaactcatctgaaatatatcctattaatccaaacggctcacctaatggcattacaggtattacagcttctaacgggagagttactgttatgatgcctcatccagaaagagtttttaaaaaaattcaactaagttggcatagaaaagactggaacgagtactcgccttggatgcaaatttttataaatgcaaagaaattcagcgataaaaattaat

SEQ ID NO: 318254 - DNA, 898 bp, Unknown
  Bacterial polypeptide expressing nucleotide sequence isolated from the Sargasso Sea
cagtctctaagagataaccctgtcacagcagaggcggagtttagaaacgacactgatatcaataattcaggattgagaccgaaaataaatttttctatacctaaaaaaattcaattaaatagtactagacctagagttgccatactaagagaacaaggagttaatggtcaaaacgagatggctgctgcttttaatgaagttggttttgactgcattgatgtacatatgactgatttgattgcagctagacacaccctatctgaatttgaaggtttagttgcttgtggaggattttcatatggtgacgtcctaggtgcagggggtggttgggcaaatagtatcctctttaatgaagacttaaggaaacaatttggagacttttttcataatgaaaatgtattttcactcggagtatgtaacggatgtcagacattgtccttattaaaatctttaataccgggagcgactaattggccagatttcaagagaaataaatcagagaaatttgaagcgagattagtgcaagtttctgtaaaagaatcgccttcaattttctttagagatatgggagattcgattatcacagttccagtggctcatggagaaggtcgggtagatgcatctgtcagtgatatttctgaattaaataacaatcatcaaacgacgattacttattcagatgataaagggagctttactgaagattatcccgcgaatcctaacgggtctttaaatggtatcgcaggtgtaactaatatcagtggaacggtcactattatgatgccccatcccgaaagagcatttctaaaagatcaatattcttggagtcctgatgaatggacacattacagtccctggataaaattctttaataatgcaagagagtttattaactgag

SEQ ID NO: 318255 - DNA, 991 bp, Unknown
  Bacterial polypeptide expressing nucleotide sequence isolated from the Sargasso Sea
acggtggtgtcctccggagcagcggatgccgctgtggtgcgcttgcggccgcagcagggccagggatccatggactctgtgcagcggggtgtggcagccactgtggattgccccaaccgttgggtggctttggatcctgagcgtggtgctcaggcggccgttgctgaagctgcccgcaacctgagttgcgtcggtgcagaaccattggcgatcaccgacaacctcaatttcccttcgccggaaacacccaaggggtactggcagctggccatggcttgccgtgggatcgcggaggcctgccgtgctctgaacacaccggtcaccggcggcaacgtctccctctacaacgagacccgccgtgatgacggcacgcttcaacccatccatccgaccccggtggtggggatggtcggcttggtggaggacatcgagcgggtcgttggtctgggttggcgacaacccggtgatgctgtgttgttgctgggtgtggcgccggatgaacagggcgatgaccgccttggtcttgccggcagcagctatcagatgctggtcagcggggtgttggcgggtcggccaccacgagtggatttcgagttggaacgtggggttcaggagttgttgcggcaggcgattgctgctgggttgttggcctctgcccacgacagcagcgatggcggtctcgctgtagccctggcggaaagcagcattgcctcaactcttggcgttgaactgaagctcaatgggcgacctgagggcttggcgcgaacgttgtttgctgaaggtggtgcccgggtggcgatctcagtgaaagctgaatgccggcagcagtgggatcagcttgcggctgagtcgacggttcccatcactgaactcggtgtggtgagcgatggttcaacattccggatccaatgcggtgacaaggatgtccagctgtcgttggttgatctgaagcgggcccatcaggagggttgccgcgccggatgggagtgag

SEQ ID NO: 318256 - DNA, 907 bp, Unknown
  Bacterial polypeptide expressing nucleotide sequence isolated from the Sargasso Sea
cccactaaaggtaaaaatgttttagttggacctggagaaaatgctggcgttattgatgttggaaataatcaaaaacttgtttttaaaatagaaagtcataatcatccttctgctattgaaccttttcaaggcgcagcaacaggtgtaggaggaattttaagagatatatttacaatgggcgcaaggccaatcgcagtgttgaattcattgagattcggcaaccttgataaattatcaaatgttgatttactgcgaggagttgtatccggtattgcacattatggaaattgtgtaggtgtgcccactgttggaggtgaaattgacttcgatgatagttactctggaaatcctctagtgaatgttatggctttaggacttttagagaccgaggaaatcgtttgttctggcgctaaaaatgtaggatcaccagtgttatatgttggtaatacaactggtagagacggtgttggtggggctagttttgcaagttcagaattaactacaacttcattggatgataggcctgcggttcaggtaggtgatccatttattgagaaaagtcttattgaagcttgtttggatgctttcaagacaggggatgtaattgcagcacaagatatgggtgcagcaggtttaacatgcagcagcgcagaaatggccgctaatggaaatttagggatatctattgatttagatttggttccttctagagaagatgatatgtcctcataccaatatttattatctgaatcgcaagaaagaatgctgtttgtcgttaaagaagaaaaaattaataatcttattgaaaaatttaataaatggggattatatgccagtgttataggtgaagtgatagaaaataatgaggtaattatttctcataaaggtaaaattgtggcccaaatac

SEQ ID NO: 318257 - DNA, 883 bp, Unknown
  Bacterial polypeptide expressing nucleotide sequence isolated from the Sargasso Sea
aaaaaaccaactgtgcaagtaggagatcctttcactgaaaaacttttaatggaggcttgcttagaattaatgaaagataattcaattatatctatacaagatatgggcgctgcgggattaacttcctcaagtgttgaaatggcttctaaaggggagttgggaattgaacttgaactagacaaagttccttgtagagaagaaaatatgacaccatatgaaatgatgttatctgaaagtcaagagagaatgcttataatattagaggacggaaaggaaaaagaagcaaaaaaaatattcgataaatgggatttagactttgtggttattgggaaaactactaatacaaataatcttacattaaaatttaatggggaagttaaaggttcaatacctatagaagcgttatcatccaaggcacctatttatgatagaaaatggattaaaaaaaaacctttaaaagaaaaagtggatttaaaagatttgaaaaaaataaaaattgaagatgctttgataaaaatattatcaagcccaaatcattcaaataaaagttggatcacagatcaatatgatcaaagtgtgatgtgtgacactgcacaaaaatctggttcagatgctgcaattattagaattcacaataaagataaagcaatagccgtatctgtagattcctcagcaaattattgtaagtctcacccaataactggtggcaaacaaatagtttgtgaaaattggagaaacctaataacagttggtgcaaatccgttggctataactaattgtttaaattttggcaatcctgaaaacaaagaaattatgggagagtttgctgagtgtttagaaggaattaaagaagcttgtgaatatttgaattatcctagtggtc

SEQ ID NO: 318258 - DNA, 941 bp, Unknown
  Bacterial polypeptide expressing nucleotide sequence isolated from the Sargasso Sea
ttaaaaaaattacacaccaaaggtgaacaggtaattcagggtccaggagaaaatgctggagttgtagatattgaagacgatcatgcaattgtatttaaaatagagagtcataaccatccttcatttattgagccctatcaaggggcagctacaggtgttggtggaattatgagagatgtattcacaatgggtgccagacccattgcaaatttaaactctattcattttggctcgccaaaccatgaaaaaacaagaaatttattaagaggtgttgttaaagggattggtggatatggtaactgtattggtgttccaacaatagctggtcaaacctgctttgatgaatcttataatggaaatattttagtaaacgcaatgacattgggtttagttaataaaaataaaatattttattcaaaagctgctggaattaacaaaccagtaatctatgttggctcaaaaacaggaagagatgggatacatggagcaagtatggcatctgctatttttgatgacaaaatagaagaaaaaaaacctactgttcaagttggtgatccattcacagaaaaacttcttcttgaggcttgtcttgaactaatggctggtaaatcaataatatcaattcaagatatgggtgctgcaggtttgacatcatctagtattgaaatggcatctaaaggtgatttgggtattgaaatagatttaacaaaagttccttgtagagaggaaaatatgacaccttatgagataatgctatcagaaagccaagagagaatgcttatagttttagaagaaggaaaagaaaatgaggcaaaaaaaatatttgataagtggaacttagactttgcagtaattggaaaaacaacaaatagtaaaaatattgaattgtttttcaagaataaaaaagttgctcaaataccaattgattttttagcggagaa

SEQ ID NO: 318259 - DNA, 697 bp, Unknown
  Bacterial polypeptide expressing nucleotide sequence isolated from the Sargasso Sea
actgggaacagctgctggtcagtcccgcgtgtcctcccctgcctacgacgtcaatgcggctctgaaacaggaaggtctgaaaccgtcggattggcaggagatctgtcggcggcttggacgggagcccaaccgtgccgagttggggatgttcggggtgatgtggtccgaacactgctgctatcgcaactccaggccgctgttgcgggggtttccaacggaaggtccccgaattttggtgggtcctggtgaaaatgccggtgtggtcgacctgggggaaggccatcgcttggctttcaagattgaaagccacaaccacccctcggcggtggagcccttccaaggtgccgccaccggcgtcggcggcatcctgcgggacatcttcaccatgggagctcgcccgatcgcgttgctgaatgcattgcgtttcggccccctggaggaccccgtcaacgttgggctgatcgaaggcgttgtggccggcatcgcccattacggcaattgcgttggtgtgcccaccgttggtggtgaagtggctttcgatccctcctacggggggaatcctctggtgaacgccatggcgttgggtttgatggagaccgaagagatcgtcaagtccggcgcccagggggtggggaatcctgtggtttatgtgggcagcaccaccggtcgggatggcatgggcggcgccagcttcgcc

SEQ ID NO: 318260 - DNA, 642 bp, Unknown
  Bacterial polypeptide expressing nucleotide sequence isolated from the Sargasso Sea
aatgaaaattacatctgaaataataaacaaacatggaattaagccagaagaatataaaaaaatagtgagcttaattggaaaagaaccgaatatgttagaattgggtatcttttctgctatgtggaatgaacattgttcatataaatcttcaaaaaaacatttgagtaaactaccaacaaaaaatgaaaaagttattcaaggtccaggcgaaaatgctggtgttgtagatattggagacaatgatgcgttggtatttaaaatagaaagccacaaccatccttcgtttatagaaccttatcaaggcgcggctactggcgttggtggaatactaagagatatttttacgatgggcgcaagacctatagctactttaaactcaattcattttggtgaccaaaatcatcctaaaacaaaaaatctcttaaacggtgttgtttctggaattggtggttatggcaactgcataggcatacctaccgttggtggagaagttaaatttaactcatcttacaacgaaaatattttggttaatgccatggctgtaggtttagcaaaaaaaaataaaatattttattcaaaagcaaagggtattaatcaacctgttatttatgtgggttcaaaaactggcagagatggaataca

SEQ ID NO: 318261 - DNA, 775 bp, Unknown
  Bacterial polypeptide expressing nucleotide sequence isolated from the Sargasso Sea
cgtttgttctggagctaaaaacgtaggatcaccagtgttatatgttggtaatacaactggcagagatggtgttggtggtgctagttttgctagttcagaactaactacaacttcattggatgatagacctgctgttcaggtaggtgatccatttgttgagaaaagtcttattgaagcttgtttggatgcttttaagacaggggatgtaattgcagctcaagatatgggtgctgcaggtttaacatgcagtagcgcagaaatggccgcaaatggaaatttagggatatcaattgatttagatttggttccttctagagaagatgatatgtcctcataccaatatttattatcggaatcgcaagaaagaatgttatttgttgttaaagaagaaaaaattaatgatcttattgaaaaatttaataaatggggattatatgccagtgttattggtgaagttataggaactaatgaggtaattatttctcataaaggtaaaattgttgcccaaatacctactgctgccttatctgatgatactccagtgaattttcacaatgtgattaataatccacccgatgatcttttaaataaatgggaatggaaagaaaatgatttgccagaaattcatgatcaaaaaatattttcattgaaggaaaataagaatttctctttttccgaaatcattttaaaactactctctaatccatcaatagcttctaaaagatggatttttaaacaatatgactctcaagttcaagtcaaatacagtttttaa

SEQ ID NO: 318262 - DNA, 853 bp, Unknown
  Bacterial polypeptide expressing nucleotide sequence isolated from the Sargasso Sea
aaaatagaaagccataatcatccttctgctattgaaccttttcaaggcgcagcaacaggtgtaggaggaattttaagagatatattcacaatgggtgcaaggcctatcgcagttttgaattcattgagattcggcaaccttgataaatcatcaaatgttgatttactacaaggagttgtatctggtattgcacattatgggaattgtgtaggtgtgccgactgttggaggtgaaattgacttcgacgatagttattcaggaaatcctttagtgaatgttatggctttaggacttttagagactgaggaaatcgtttgttctggagctaaaaatgtaggctcaccagtgttatatgttggtaatacaactggtagagatggtgtcggtggtgctagttttgctagttcagaattaacgacaaattcattggatgatagacctgctgttcaggtaggtgatccatttattgagaaaagtcttattgaagcttgtttggatgctttcaagacaggggatgtaattgcagctcaagatatgggcgctgcaggtttaacatgtagtagcgcagaaatggccgctaatggaaatttaggtatatctattgatttagatttggtcccttctagagaagatgatatgtcctcataccaatatttattatcggaatcgcaagaaagaatgttgtttgtcgttaaagaagaaaaaattaatgatttaatagaaaaatttaataagtggggattatatgccagtgttatcggtgaagtgataggaactaatgaggtaattatttctcataaaggtaaaattgtagcccaaatacctacttctgccttatctgatgatactcctg

SEQ ID NO: 318263 - DNA, 868 bp, Unknown
  Bacterial polypeptide expressing nucleotide sequence isolated from the Sargasso Sea
aataaaatattttattctaaagccgcaggaataggtaagccagttatttacgttggatcaaaaacaggtagagatggaattcatggcgccagtatggcttctgctacatttgatgatgaagttgaagaaaaaaaaccaacagtccaagtgggagatccattcactgaaaaattattattggaagcttgtttagaacttatggctgacaattctattatagctattcaagatatgggtgctgcaggattaacttcatcaagtgtcgaaatggcttcaaaaggaaagttgggaatagagcttgatttaaataaagtcccttgtagagaagaaaaaatgactccttatgaaattatgttatctgaaagccaagagagaatgttaattgtacttgaaaatggtaaagaaagtcatgcaaaaaaaatatttgataaatggaatttagattttgctgtaataggtaaaacaactaacacaaaaaatattgagttaatatttgatagtaaaaaagttgcagaaatacctattgacctacttgcagaaaatgcccctttttatgatcgaaaatggaaaaaaactaaattaccacaaaaaataaaatttaataaagatgagtttaaatctttaaagttatcagattgtttaaaaaagttattaagtaactctaatatatgtgacaaacaatggatttgggatcaatacgatcatacagtaatgggtgatactatacaaaagccaggcggtgattctggaattgtaagagtccatggaactaaaaaagctattgcagcatctgtagactcttcggcatcatattgtttttcacacccacttactggtggaaagcaaattgtatgtgaaagttggagaa

SEQ ID NO: 318264 - DNA, 490 bp, Unknown
  Bacterial polypeptide expressing nucleotide sequence isolated from the Sargasso Sea
tatgccgattacaaaagcgcaaatagaatctcatggtttaaaaatagaagaatacaaaaaaataaaagaattgttaggtagagagtctaatttattagaattgggaattttttcagcaatgtggaatgagcactgctcatataaatcctcaaaaatacatttgaaaaaattaccaacagaaaataaaattgttattcaaggtcccggtgaaaatgctggtattgtagacattggagatgacgatgcaatagtttttaaaattgaaagtcataaccacccatcttttatagagccttatcaaggtgcagcaacaggtgttggtggaatattacgagatgtatttactatgggtgctaggcccattgctttaatgaattctattcattttggttcaccagagaatgaaaaaactcaaaatcttttaagtgggagttgtgtcaggaattggagggtatgggaattcagttggtattccaactgttggtggtga

SEQ ID NO: 318265 - DNA, 466 bp, Unknown
  Bacterial polypeptide expressing nucleotide sequence isolated from the Sargasso Sea
tataattctgggaaaaaaggtgctttgattttagggatttgcaatggttttcaaattttaattgagtgcggattacttaaaggagctttattaaggaattcaggattgaagtttatttcaaaagatatacttgtaaaagttcagtcaaataaaaataatttttttaataaatataaaattggggacgtgctgaagttgaatattgctcataatgaaggaaattattttacagataaaaaacatttgatggaattagaaagcaatgaattaatacctctcaaatattgtgataaaaatggaaatattaataatgaaaccaatccaaacggttctataaataatattgcaggtatttttaatgctaataaaaatattttaggaatgatgcctcacccagaaaggatggcagataaaatgatgtctggtgaagatggtttggggctatttttaagtttgatgaattaat

SEQ ID NO: 318266 - DNA, 685 bp, Unknown
  Bacterial polypeptide expressing nucleotide sequence isolated from the Sargasso Sea
gatgaaatcctgtgtaataacctttcctggttcaaattgtgatagagacatgaatgttgcacttaataaatttggtttcaaaaataaaatggtttggcataatgataatgagttaccaaaaagcgatttggttgtcttacctggtggtttttcttatggagattatcttagatgtggaagtatggcttcaaaatcaaaaataatgcaatcagtgataaattttgcaaaatcaggtggtctcgtaatgggtatatgcaatggatttcaaatattagtcgaagcaggtctggttcctggcgtcctactgagaaatagatatttaaagttcatttgtaaaaatgtttttcttaaagttaataataaagaaaatctttattttaaaaatcttgataaagatgtttttgaatttcatattgcccataatgagggtaattatttttgtacaaatgaacaacttaaagaaattgaagataataaccaaattgcaatttattattgcaataatgaaggtcaaattgatgaacgacttaatcccaatggatcaattaggaatattgcaggaatttttaataaaacaaaaaatgttttggggatgatgccgcatcctgagagaatgattgataagagtctatcaggtgaagatggatctctgttttttaagaacttactaaataatattaaataa

SEQ ID NO: 318267 - DNA, 681 bp, Unknown
  Bacterial polypeptide expressing nucleotide sequence isolated from the Sargasso Sea
aatgataaatcaagaaaataatgatctatatgatcttaatgaagcactacaagttgaaaatttaacacttaaagattacgaagaaatttgcaaaagattaaagagaaaacctaacagaacggaattaggtatgtttggcgttatgtggtcagaacattgttgttatagaaattcaaaacctttactatctaagtttcccactaaaggtaaaaatgttttagttggacctggagaaaatgctggcgttattgatgttggaaacaatcaaaaacttgtttttaaaatagaaagtcataatcatccttctgctattgaaccttttcaaggcgcagcaacaggtgtaggaggaattttaagagatatattcacaatgggtgctaggccaatcgcagttttgaattcattgagattcggcaaccttgataaatcatcaaatgttgatttactacgaggagttgtatccggtatttcacattatgggaattgcgtaggtgtgccgactgttggaggtgaaattgacttcgatgatagttactctggaaatcctctagtgaatgttatggctttaggacttttagagactgaggaaatcgtttgttctggagctaaaaatgtaggatcaccagtgttatatgttggtaatacaactggcagagatggtgttggtggtgctagttttgc

SEQ ID NO: 318268 - DNA, 967 bp, Unknown
  Bacterial polypeptide expressing nucleotide sequence isolated from the Sargasso Sea
gaatttgatgatgactctgaagaaaaaaaacccactgttcaagttggtgatccttttactgaaaaattattacttgaggcttgtctagaacttatgaaagaggatgcaattatagcaattcaagatatgggagcagcaggtttaacttcatcatctattgagatggcatctaaaggaaatgtagggattgatataaatttatcaaaggttcctatgcgagcagctaacatgactgcctacgagctcatgctatcggagagtcaggaaagaatgttaatgattattcaacccaaaaaagaagagcttgcccgaagcatttttaaaaaatgggatcttgaatttgaaataattggtgaagttacagatacaaaaaaattaatattacatatggatggtgaagagcaggcaagtataccaattaatattttggtagaggatgcgccagagtatcagcgagattatattgtcaatgacccttctcccctaattaatttcgaaagtaaggattttgaagataaagatatcttaagcgatttattaaaaatgatcagccatccaaatttatgcagcagaaaatggatatgggaacaatatgatcacatggtcatggcagatacagttgtacgacctggttctgatgcagctgttgtcagagtgcatggaaccaacaaaggaatagcgatcagtacagactgttcacccacatactgcagacataatccatatgaaggaggaaagcatgcggttgttgaaacttggcgtaatattgttgcatccggagctgaaccaattgcaattacagattgtatgaattttggaaatcctgaaaagccagaaatcatgggacaatttgttgaatgcattcgtggcatgggagatgcttgcagtaagcttaattatcctgtcatttcagggaatgtatcactctataatgaaactaatggtgaggggatttatcctactcccg

SEQ ID NO: 318269 - DNA, 818 bp, Unknown
  Bacterial polypeptide expressing nucleotide sequence isolated from the Sargasso Sea
gccaaaaagagacttgagtattaatgcttatgaaatgttgttgtctgaatcacaagaacgaatgctattagtaatgaaagaaaaatcttcgtctaaaataaataaaattttcaagaaatggcatttagattcaatcgagataggaaaggtgatcaaagagaaaaactttatagtcaaatttaaagggaaaactgtagtaaacattccagtttctattcttactgaagattctccagtatataaaagacctattaaatcgccaaaagttataaaacttaaagagggaaaaacactgaaacttaaatttcctaaaaagaatttagctactatctttaagaaaattattaaggatgaaaatatatgctcaagaagatgggtgtatgaacagttcgattacatggttgggactaacacaattactgaacctggatcagattccgctgttattaggatcaagaatacaaaaaaagctttggctctaacaacaaattgtaattcatcatattgtaaaataaatccaaaaaaaggttcaagcattgcagttgcagaatgtacaagaaacataatcgcatctggtgcggaaccacttgcaattacaaattgtttaaattttggtaatccagaaaaaaaagaaataatgtggcaatttgcaaaagctattgatggtatttctcaagcagtatttcaattcaatactccagtggttagtggtaatgtaagcttatataatgaaaataagtcagattcaattaacccaacccctgtaattagtatggttggcttaattaaagacatcaaatataagagagaccaatttt

SEQ ID NO: 318270 - DNA, 985 bp, Unknown
  Bacterial polypeptide expressing nucleotide sequence isolated from the Sargasso Sea
aatggaagtaaatgaaaaaattgccatagaacatggtttaaaaaaagatgaatacaaaaaaatttgtgatttattaaaaagagttcctaatttaactgaacttggtttgttttctgcaatgtggaatgaacattgttcatataaatcttcaaaaaaacatttaaaaaatttaaatactaaaggaaaaagagttattcaaggacctggggaaaatgcaggtgttgttgatatagatgatgaagatgcaattgtttttaaaatagaaagtcacaatcacccatcttttatagaaccttatcaaggtgctgccacaggagttggtggtattatgagagatgtttttacaatgggagcaagaccaatagcaaacttaaattctattcattttggttctccacaacataaaaaaacaaaaaacttattaagaggagttgtcaaaggcataggaggatacggaaattgtattggagtcccaaccataggtggtcaaacattatttgatgaatcttataatggaaatattttagtcaatgcaatgactctaggtttggtaaataaaaaaaaaattttttattctaaagctgctggcttaaacaaacctgttatatatgttggttcaaaaactggtcgcgatggcattcatggtgctagcatggcatcagctatttttgatgaaaaaattgaagaaaaaaaaccaaccgttcaggttggtgacccctttactgagaaattattgcttgaagcatgtttagaattaatggctgacaactctataattgcaattcaagatatgggtgcagctggtttaacctcttcaagtgtagagatggcttcgaaaggaaagctaggagtagaactaaatcttaataaagttccttgcagagaagaaaagatgacgccttatgaaattatgttatccgaaagccaagaaagaatgttaataattttagaaagcggaaaagaagaaaaagctaaaaaaatattt

SEQ ID NO: 318271 - DNA, 700 bp, Unknown
  Bacterial polypeptide expressing nucleotide sequence isolated from the Sargasso Sea
aatgatagattcttcaagtaacaatacttatgatgttaatgaatcacttaaagttgaaaacttaactcgtaatgattatgaagagatatgtaaaagactaggaagaaaacctaatagaacagaattgggaatgtttggagtaatgtggtctgagcattgctgttatagaaattcaaaaccattattagctaattttcctactacaggaaaaaacgtattggttggtccaggagaaaatgcaggtgttattgatgtaggaaacgatcagaaacttgttttcaaaattgaaagtcacaatcatccttctgctattgaaccttttcaaggagctgcaacaggagtgggtggcatattaagagatatttttacaatgggtgcgagacctatagcggttttaaactctttaagatttggtaatcttgataaatcatctaatatttctttacttcgaggagtagttgcggggatatctcattacggtaattgtgttggggttcctactgtcggaggagaaatagattttgatgacagttattccggcaatcctcttgttaatgttatggctttaggtttattagaaactgatgaaatcgtttgttcaggggcaaaagaagtaggctctcctgttttatatgtaggaaatacgacaggaaaggatggagtaggaggtgctagttttgctagttcagaattaaccact

SEQ ID NO: 318272 - DNA, 679 bp, Unknown
  Bacterial polypeptide expressing nucleotide sequence isolated from the Sargasso Sea
aatgagatcatctgtaatagtttttccaggttcaaattgtgacagagatattgctgttgctttagaaaaattgcaattcaaaaattcaatggtatggcataaagaaactgaacttcctaaatcagacttaattgtggttccaggtggtttctcttatggagattatttaagatcaggtgctatagctgcaaaatctaatatattatcagaagtaataagtgctggcaaaaatggatctttaattttgggaatctgtaatggatttcaaattttaattgaatgtgggttattaaggggtgcattgctaagaaattctggattaaaatttatatcaaaagatattctagttaaagtgcaatcaaataaaaataaattttttaataaatataaatctggcaaaatattaaaattaaatattgctcataatgaaggcaactattttactaataaagaacatttagaagaattagaatacaatgatttaatacctcttaaatactgtgataaagaaggtgtaattaatactaaatcaaatccaaatggatctataaataatattgctgctatttttaatagcaataaaaacattctaggtatgatgcctcatccagaaagatctgctgataaaattttatctggtgaagatggtttaagtttatttttaagtttaatgaactaa

SEQ ID NO: 318273 - DNA, 929 bp, Unknown
  Bacterial polypeptide expressing nucleotide sequence isolated from the Sargasso Sea
tttcgcagtgatcggccgggttactgacaccaaccgccttgtcctgaaatggcacggagacaccgtctgcgacgtacccgtcccgcctttggtcgcggaagcgccggaatacgaacgcccctggaccctcacccctaaggcgccggaaatatcggcggatgcagcccttgaagggatcgacgcaaccccgctaaacgcgcttgcacagctagtcggttctcccgatctctgttcccgccgctgggtgtgggaacaatacgaccacatggttatgggcgacacggttcagcgtccgggcggggatgccgcagtgatacgcattcacggcacggaccgtgcccttgccatcaccaccgattgcacgccgcgatactgcctagccgatccggtcgaagggggaaaacaggcggtcgcggaggcctggcggaacctgaccgccgtcggcgcccaaccgctcgctctgaccgacaatatgaatttcggcaatcccgaacgcccggaaatcatgggccagtttgccggatgcatccagggaatggtggaggcgtgtaatacgctggatttcccggtcgtttccgggaacgtctctctctacaacgaaactagcggcgccggcatcatgccaacccctgccattggcggtgttggactgatccaggatctgaacgccggcatgacgacggcggcctttgacgaatccgggctgaccgtcatctctatcggtgctacccagggacatcttggaagatcgacactgctaaggctcatagccaaccgagatgatggaccgccgccccccgtcaatctcgccgtagagcgacggaacggcgatttcgtcagaaacctgattgcggaatccctggtgacctgctgccacgacgtatcggacggtggcctgctaatcgcagtggcggaaatggccttggcgg

SEQ ID NO: 318274 - DNA, 382 bp, Unknown
  Bacterial polypeptide expressing nucleotide sequence isolated from the Sargasso Sea
atgaaaattacaaatcaaattattgaaaaacacggacttaaattagaagaatataaagttattcaaaaacttttaaaaagggaccccaatttacttgagttaggtattttttcagctatgtggaacgaacattgttcctataagtcatctagaattcatttaaaaaaattaccaactaaaggaaaaaaagttatacaaggtccaggtgaaaatgctggggtgattgatatcggggataatgatgcgattgttttcaaaattgaaagccataatcacccctcttatattgagccgtaccaaggagcagctactggtgttggtggaattttaagagatgtttttactatgggagctagaccaatagcattattaaattcaatcc

SEQ ID NO: 318275 - DNA, 982 bp, Unknown
  Bacterial polypeptide expressing nucleotide sequence isolated from the Sargasso Sea
taccttgtagggaaaaataatatgtcaccttatgagatgatgttatcggaaagccaagaaagaatgcttataatactagatgataaaaaggaaaaagaggcaaagaaaatatttgataaatgggatttagattttgtggtcattggaaaaaccacagatacgaatagattagttctaaattttgataatgaaaaagtagcagatattccaatacctgcattagcagatgaagcacctcaatatgatagaaagtgcaaaaaatttaaaattaaaaaaaataatttaagaataaaagatttaaaaaaaataaaaattgaggaagctcttacaaaaatactatcttccccagatcattcaaataagagttggattactgatcagtatgatcaagtggttatgtgcgatacaatacaaaaatctggtggggatgcagctgttattagggtgcacaataaagaaaaagcgatatcaatatcagtcgactcctctgctaactattgtagtgcagatcctagaactggtggaaaacaaattgtttgtgaaaactggcgaaacttaatttccgtaggttcaaaaccactagcgataacaaattgccttaattttggaaatccagaaaaaccagaagttatgggtgaattcgttgagtgtttagagggtatgaaggaagcatgcgaatttttaaatttcccagttgtttcaggtaacgtttctttttacaatgaaacaaattcaaaaagtattttaccaacaccagttattggaggaataggaatttttgataatttaaataaaattatcaatatgaaaactaaaaaagttgggaatataattattgttattggaaaaacttttggtcacctaaaccaaagcgcttttataagagatctttatttaattaatgatgggcctccacctgaaataaatttaactaatgaaaaaaataatggagactcagtttcggatttaattaaaaaaaatt

SEQ ID NO: 318276 - DNA, 892 bp, Unknown
  Bacterial polypeptide expressing nucleotide sequence isolated from the Sargasso Sea
gttcaggtaggtgatccatttattgagaaaagtcttattgaagcatgtttggatgcgttcaagacaggggatgtaattgcagctcaagatatgggtgctgcaggtttaacatgtagtagcgcagaaatggccgcaaatggaaatttagggatatcaattgatttagatttggtcccttcaagagaagatgatatgtcctcataccaatatttattatctgaatcgcaagaaagaatgttgtttgtcgttaaagaagaaaaaattaatgatcttattgaaaaatttaataaatggggattatatgccagtgttattggtgaagtgataggaactaatgaggtaattatttctcataaaggtaaaattgtggctcaaattcctacttctgccttatctgatgatactcctgtaaattttcacaatgtgattaaaaatgcaccagatgatcttttaaaaaaatgggaatggaaagaaaatgatttaccagaaattcatgaccaaaaaatattttcattaaaggaaaataagaatttttctttttcagaaatcattttaaaactactctctaatccatcaatagcttctaaacaatggatttataaacaatatgactctcaagttcaggcaaatacagtatttacacctggaaaatcagatgcagccgtagtaagactaagggaacaaaataaaaaaaataaaagtaaagtattttctggtgttgctgtttcagttgattgcaatagtagatgggttgcgcttgatccttttagaggatctatcgctgccgttgcagagtctgctagaaatgttagttgtgttggggctgaaccagtagcaattacaaataatttaaatttttcgtctccggagaatgaaataggatattggcaac

SEQ ID NO: 318277 - DNA, 819 bp, Unknown
  Bacterial polypeptide expressing nucleotide sequence isolated from the Sargasso Sea
tcacggtttaacacatgatgaatataaaaaaattaaagaatatttaggtagagattcaaatttgttagaactaggaattttttcagcaatgtggaatgagcattgttcatacaaatcttcaaaaatacatctcaaaaaacttccaacgaaaaataatattgtgatccaaggtccaggggaaaatgctggtgtcattgatataggggatgatgatgcagttgtctttaaaatagaaagtcataatcatccttcttttattgaaccatatcagggtgcagctacaggtgtcggtggtatattgcgcgatgtatttacaatgggtgctagaccaattgctttgatgaattctatacattttggatcacctaaaaatcataaaaccaaaaacttattaaatggcgttgtttctggaattggtggttacggaaattctgttggaataccaaccgtaggaggagaaactaaatttaatgatacatataatgaaaatattttagtcaatgctatggcagttggtttggcaaataaaaataaaattttctattcaaaagcaaaaggtttaaataaggctgtagtatatgtgggttcaaaaactggacgagatggtatccacggagctacgatggcgtctgcagaattcgatgataactcagaagaaaaaaaacctactgttcaagtcggagatccttttacagaaaaattacttttggaagcatgtttagagttaatgaaagataactcaattatatcaatacaggatatgggagcggcaggtcttacttcgtcaagtatagaaatggcttcaaaaggaaaacttgg

SEQ ID NO: 318278 - DNA, 925 bp, Unknown
  Bacterial polypeptide expressing nucleotide sequence isolated from the Sargasso Sea
tatgacaccatatgagatgatgttgtctgaaagtcaagaaagaatgcttataatacttgatgacaaaaaagaaaaagaagcaaaaaaaatttttgataagtgggatcttgactttgtcgtaattggaaaaacaactgatactaataaactcgttctatattatgacgaaacaaaagtagcaaatatccctatatctgctttggctgataaagctccacaatatgatagaaaatggtcaaagacaaaaacaaagaaaaataaagttaaaataaaagaattaaaaaaaattaaaatagatgaagctcttttaaaaattctttcatcacccaatcactcaaataaaagttggattaccaatcaatatgatcaaatggtaatgtgcgacactattcagaaatctggaggtgactctgctgtggtaagggttcataaaaaaaacaaggctattgctatatctgtagactcctcagctaattattgtaaatcagatcctaagttaggtggaaaacaaattgtttgtgaaaattggagaaatttaatttcagttggggccaaacctctggcaattacaaattgcttaaatttcggaaatccagaaaaaccagatgttatgggagaatttattgggtgtatagaaggaatgaaagaagcttgtgaatttttaaattttccagtcgtatctggtaacgtatctttttataatgaaactaaggctaaaagtattaatcctacaccagttattggaggtataggtataattagtaatttagaaaaagtaattgacttaaaaattaaaaaaaaaaataatctgatactggttataggcaaaacaatagggcacttagatcagagttctttcttgcaggaaaattactcaatttatgacggtccaccgcctgaaatcaatctgttaagaaaaaaacaa

SEQ ID NO: 318279 - DNA, 412 bp, Unknown
  Bacterial polypeptide expressing nucleotide sequence isolated from the Sargasso Sea
atgacttcatccaattggcattttgatacagaaaaatcacttgtagaaagtcacggtcttaaatttgacgagtttgaaaaaattgttgagggtcttgggcgtgaacccaatcttactgaacttggaatatttagtgcaatgtggaatgaacattgctcctataaatcgtctaagtattggctaaaaaaattaccaacctcaggggaacgagttatccaaggaccaggtgaaaacgcgggcgttattgatatcgatgatggagatgttgcagttttcaaaatggaaagtcataatcatccttcatttctagagccttaccaaggagctgcaactggtgtagggggtattttgagagatgtatttactatgggcgcaagacctgtagcaaacatgaatgcacttcgatttggag

SEQ ID NO: 318280 - DNA, 682 bp, Unknown
  Bacterial polypeptide expressing nucleotide sequence isolated from the Sargasso Sea
atgagttttaagtctgctgtcattacatttccgggatctaattgtgatagagatgctttatgttacttacaagatttaacaaaaggtgttgtttataatatttggcatgaggaagcatctttaccacaagttgatttggtaatattacctggaggttttagttttggtgattatttaagatcgggggccatggcatcaaagagtaaaataatcaatgatgttataaaacatgcaaatgatgatagatatttattaggtatttgtaacggttttcaaattttaactgaaattgggctccttgagggagccttgatacaaaacaaaaaccttaaatttttgggcaaaaactgttttattaaaaaaaaatttaaaaataatttcaatttatccattaaagaagatcaagtacttcaaatacctgtggcacacaatgagggaaatttttattgcgataatgaaactttaaaatcacttaaaaataatgaacaaattgcatttgaatactgcaaaggtgaattctcaaatagtgaagaaaatattaacggctcaatagaagctattgcgggcatcacaaacaaaaagaaaaatattcttggtatgatgcctcaccctgaaagggcctattctgactttcatcaatcacaagatggtaaactaatcatagagtcattaatatcatgaa

SEQ ID NO: 318281 - DNA, 562 bp, Unknown
  Bacterial polypeptide expressing nucleotide sequence isolated from the Sargasso Sea
tttttagttgtattaccaggtgggttttcatatggggactacttaagatgtggaagtatggcatctaaatcaaaaataatgcagtctgtaattaattttgcaaattcaggaggtatggttatgggtatctgtaatggatttcaaatattagtagaaactggtttggttccaggtgttttgcttagaaataaatatttagaatttatttgtaaaaatgttttcgtaaaaattaacgataaaaaaaataaatattttaaaaatgttgataacgaagttttagaatttcatatagctcataatgaaggaaattatttttgtactaacgatcaattgaaagaaattgaggacaataatcaaatagctattaattattgtgatgaaaatggaaaaatagaagatcaatttaatcccaatggatccataaaaaatattgctggtatatttaataaagaaaaaaatgttctaggaatgatgccccaccctgaaagaatgattgatacatgtttatctggtgaggatggatcattattttttaaaaacttaataaacaacttaaaatgat

SEQ ID NO: 318282 - DNA, 354 bp, Unknown
  Bacterial polypeptide expressing nucleotide sequence isolated from the Sargasso Sea
aatgattgtaaacgaacaagtagcagttgatcacggtttaaagaaaaatgaatacgctaaaatttgtgagctattaaagagaacccctaatatcacagaactagggattttttctgcaatgtggaatgaacattgttcttataaatcatcaagattacatttaaagaagctacctactaaaggaaagaaagttattcaaggtccaggagaaaatgctggagttatcgatattgaagataacgatgcaatagtttttaaaatagaaagccacaatcacccttcatttattgaaccatatcaaggtgcagctaccggtgttgggggaataatgagagatgtatttacaatgggtgc

SEQ ID NO: 318283 - DNA, 881 bp, Unknown
  Bacterial polypeptide expressing nucleotide sequence isolated from the Sargasso Sea
tttttactctaaagcagctgggttaaataaacccgttatctatgttggctctaaaacaggaagagatggaattcatggtgcaagtatggcctcagcaagctttgatgataaaattgaagaaaagaaacccacagttcaagtgggagatccatttacagaaaaacttttacttgaggcttgtttagaactgatggcaggagactcaattattgcaattcaggatatgggtgcagctggattaacttcatccagtatagaaatggcctctaaagggaaattagggatagagattaatttagataaagtaccttgtagagaaactaaaatgactccatacgaaataatgctgtcagaaagccaagaaagaatgttgattgtattagagaacggcaaagaggatttagctaaaaagattttcgataaatggaaccttgattttgcagtcattggaaaaacaacagatacaaaagatattgaacttttttttaataatgaacaagtagcaaaaatacctgttaacatacttgtagaaaacgctccaatgtacgacaggaaatggaaaaaatcaaaattaccaaaaaaaaataaaattcaaaagaaagatcttaaaaatttaaaaatcctaaatgttttgagaaagattttatcaaatcctaatgtatgcgataaaaaatggatttgggaacagtatgatcatacagtaatgggagacacaattcaaaaaccagggggtgattcaggcgtcgttagggttcatggaacaaataaagctattgctgcagctgttgactcttccgctgtttattgttgggctcatcctcatacaggaggaaaacaaattgtttgtgaaagttggagaaatttgatttctgttggagcta

SEQ ID NO: 318284 - DNA, 582 bp, Unknown
  Bacterial polypeptide expressing nucleotide sequence isolated from the Sargasso Sea
aatgaaaattactaatcaagttgtagaaaagcatggtctaaaaatagaagaatattctaatattaaaaagcttcttaaaagagaacctaatttacttgagctaggaattttttctgctatgtggaatgaacactgctcctataagtcatcaagaaaacacttaaaaaatttacctactaaaggaaaacaagttatccaaggtcctggtgaaaatgcaggagttgtcgatataggagataatgatgctattgtttttaaaatagaaagtcataatcacccttcttatattgagccttatcaaggagcggcaacgggtgttggtggaattctaagagatgtttttaccatgggcgcaagacctattgcccttttaaactccatacattttggatcaccagatcattttaaaacaaaaagtttattgaacggagttgtgtctggcattggaggatatggaaattgtattggaataccgacagttgctggagaaacaaaatttaatagcacatataatgaaaatattcttgtcaacgcaatggccgtaggtcacgcaaaaaaggataaaattttttactctaaagc

SEQ ID NO: 318285 - DNA, 685 bp, Unknown
  Bacterial polypeptide expressing nucleotide sequence isolated from the Sargasso Sea
aatgaagtcatctgtaataacttttcctggttcaaattgtgatagagatatggatgttgcgctcaagaaatttgggtttaataataagatggtttggcatgatgatgatgaactccctaagagtgatttggtagtacttccaggtggtttttcctatggagattatttacgatgtggaagtatggcttcaaagtctaggataatgcaatcagttataaattttgcaaaatctgggggattggtcatgggaatttgtaatggatttcaaatactggttgaaacaggtttagtgccgggagttttgttgaggaataaatatttggagtttatatgtaaaaatgtctttgtgaaattggacaacaaagaaaatgcatattttaaaaatcttaataaagatattttagaatttcatattgctcataatgaaggaaattatttttgtaccaaagatcaattgaaagagattgaggataataatcaaatagcaatttattattgtaataaagaaggcaagatagaagaccaatataatccaaatggttcaattaaaaatattgcaggcatttttaacaaagaaaagaatgtattaggaatgatgcctcatcctgagagaatgatagaccaaagtttatctggagaagatggctcaatttttttcaaaaacttaattaataacatcaaataa

SEQ ID NO: 318286 - DNA, 673 bp, Unknown
  Bacterial polypeptide expressing nucleotide sequence isolated from the Sargasso Sea
tataaacaatatgattctcaagttcaggcaaatacagtttttaaacctggaaaatcagatgcagcagtagtaagactaagagaacaaaataaaaaaaataaaagtaaattattttctggtgtcgctgcttcagttgattgcaatagtagatgggttgcgcttgatccttttagaggatctatcgctgccgttgctgagtccgctagaaatgttagttgtgttggtgctgaaccagtagcaattacaaataatttaaatttttcttcccctgagaatgaaataggatattggcaactttcatcttcatgtaatggaattgctgaagcctgtaaagctttagaaactcctgttacaggaggtaatgtatctttatataatgaatcaaaaaataaagataatctaattactcctatcaatcctacacctgttattggaatggttggaaagatagataatgtcgaaaaagctataagcagtgaatggaaaaatattgaagatgaaatctggttaattggttcttccaaatcagaaataaaaattgcagctagttcttatttggaatattttcatggagaaattacaggtcggcctccaaaaatagatttgttggatgaaaagttttgccagagttttttaagaaatgcgattttaaatagttttgtagtttcttcgc

SEQ ID NO: 318287 - DNA, 843 bp, Unknown
  Bacterial polypeptide expressing nucleotide sequence isolated from the Sargasso Sea
aataatgagagatgttttacaatgggagctagaccaattgcaaatttaaattcaattcattttggctctccccagcacaagaaaactaaaaatttattaagaggagttgttcaaggaataggtggatatggtaattgtataggtgtgccaacgatcgctggacagacatgttttgatgagtcttataacggaaatatattagttaatgctatgactcttggtttggttaaaaaaaataaaattttttattcaaaagctactggtattaataagcctgtaatttatgttgggtcgaaaactggaagagacggtatccatggcgctagtatggcttcagctatttttgatgaaaaaatcgaagaaaaaaaaccaaccgttcaagttggagatccttttacagaaaaactattactagaagcttgtttagaattaatgtctggaaactcaattatttccattcaagatatgggagcagccggccttacttcttcaagtattgaaatggcatcaaaaggaaaattaggtattgaaattaatctgaacaaagttccttgtagagaattaaatatgactccttatgaaataatgttgtctgaaagccaagaaagaatgttgatagttttagaaaatggaaaagaagaatctgcaaaaaaaatttttgataaatggaatttagattttgcaataattggtaaaacaacaaatagtaaaaaaatagaactttattttgatgataaaaaagttgcagatatacctgtaaacactttagtagaagatgctcctatttatgatagaaaatggaaaaaaagcaaactccctaaaaaaaataaaatcaacaaagaa

SEQ ID NO: 318288 - DNA, 946 bp, Unknown
  Bacterial polypeptide expressing nucleotide sequence isolated from the Sargasso Sea
gagttatccaaggggaccaggtgaaaacgcaggtgtgattgatattgatgatggagatgttgctgttttcaaaatggaaagtcataatcacccttcatttttagagccttaccagggagctgcaactggtgtaggtggtattttaagagatgtttttactatgggtgcaagacctgtagcaaatatgaatgcacttcgatttggagatcccaatcatccaaaaacaaagcatttagtctcaggcgttgtcggtggtatcggaggttatggaaattgtattggaattccaactgttggaggtgaagtaaactttcatccatcctacaacggcaatatattggttaatgctatgacagttggcatcgcaaaaaaagataaaattttctattcagcggctgcaggaataggaaatccagtagtgtatgttggttcaaaaacaggtagagatggtattcatggtgcaactatggcatcagcagaatttgatgatgactctgaagaaaaaaaacccactgttcaagttggtgatccttttactgaaaaattattacttgaggcttgtctagaacttatgaaagaggatgcaattatagcaattcaagatatgggagcagcaggtttaacttcatcatctattgagatggcatctaaaggaaatgtagggattgatataaatttatcaaaggttcctatgcgagcagctaacatgactgcctacgagctcatgctatcggagagtcaggaaagaatgttaatgattattcaacccaataaagaagagcttgcccgaagcatttttaaaaaatgggatcttgaatttgaaataattggtgaggttacagatacaaaaaaattaatattacatatggatgatgaagagcaggcaagtataccaattaatattttggtagaagatgcgccagagtatcagcgagattatattgtc

SEQ ID NO: 318289 - DNA, 685 bp, Unknown
  Bacterial polypeptide expressing nucleotide sequence isolated from the Sargasso Sea
aatgaaatcatcagtaataacctttcctggttcaaattgtgatagggacatggatgtagctttaaagaaatttggctttaataataaaatggtctggcacaatgacactcaattaccacaaagtgatttggttgttcttccgggcggtttttcttatggagactatttaagatgtggaagtatggcatcaaaatcaaaaataatgagctcgattattagttttgcaaattctggtggaatggttatgggcatttgtaatggttttcaaatcttagttgaaacaggtttggttcctggtgttctattaagaaataaatatcttcaatttatatgtaaaaatgtatttgttaaaattcacaataaacaaaatactttttttaaaaacatcgataatgatattttggaattgcatatagcacataatgaaggaaattatttttgtacaagtgatcaattaaaagaaattaatgataatgatcaaattgcaattaattattgtgataaaaatggaaaaatacaagatgaatttaatccaaatggatcaattgaaaatattgctgggatatttaataaaaaaaaaaatgttttaggaatgatgccccatcctgagagaatgatagataaatcattatcaggtgaagatggatctattttttttaataatttaataaacaacattaaatga

SEQ ID NO: 318290 - DNA, 811 bp, Unknown
  Bacterial polypeptide expressing nucleotide sequence isolated from the Sargasso Sea
tgctaatttaaattcaattcactttggttctcctcaaaacaaaaaaactaaaaactttttaagaggtgttgttcaaggaattggtggttatggaaattgtataggcgttcctaccattgctgggcaaacaagttttgatgaatcttataatggaaatattctggtcaatgctatgactttaggtttggttaataaaaaaaaaattttttattcgaaagccgctggaataaataagcctgttatttatgtgggttcaaaaacggggagagatggaatacatggcgcaagcatggcttcagctatttttgatgaaaaaatagaagaaaaaaaaccaactgttcaggttggagatccatttactgaaaagcttttacttgaagcttgtttggaattgatgtcagaaaactctatcatagctatacaagacatgggtgcggctggtctcacttcgtctagcgttgaaatggcttctaaaggaaaattgggaattgagttagatttaagtttggtaccttgtagagaagcaaaaatgactccttacgaaattatgttatctgaaagccaagaaaggatgttaattattttagaaaatggaaaagaagaaaaggcaaaaaaaatatttgataaatggaatttagactttgcaataataggaaaaacaacaaacagtaaaagaatagagattttttttaaaaaagaaaaaatggcagatattcctttgaatattttaacggataatgcacctatatatgaaagaaaatggaaaaaaactaaactacctaaaaaaaataatataaataaaaatgatttt

SEQ ID NO: 318291 - DNA, 776 bp, Unknown
  Bacterial polypeptide expressing nucleotide sequence isolated from the Sargasso Sea
ggacggaatacatggtgcaagtatggcgtcagctatttttgacgacaaaatagaagaaaaaaaacctaccgttcaagttggtgatccatttacagaaaaacttcttcttgaagcttgtcttgaacttatggcaggtaaatcaattatatcaattcaggatatgggagctgcgggtttaacttcttctagcattgaaatggcatctaaaggtgatttaggtattgaaatagatttaacaaaagttccttgtagagaagaaaacatgacgccttatgagataatgctctcagaaagccaagagagaatgcttattgttttagaggaaggaaaagaaaatgaagcaaaaaaaatatttgataagtggaacttagactttgcggtaattggaaagacaacaaatagtaaaaatattgaattgttttttaaaaatgaaaaagttgctgaaattccaattgattttttagcggagaatgcacctatgtatgatcgtaaatgggtaaaagcaaaacttccaaaagaaaataatttttcaaagaatcaatttaaatcttttaaactaagtgattgtttaaaaagaattttaatagatccaaatattgcagataaagaatggatctggaaccaatatgatcatacggttatgggtgatactatacaaaaacctggagggaatgctggtgttgttagagttcatggtacaaataaagctgttgctgcatctgttgactcatcggcaacgtattgtcatgctcatccattaacaggtggtaaacaag

SEQ ID NO: 318292 - DNA, 712 bp, Unknown
  Bacterial polypeptide expressing nucleotide sequence isolated from the Sargasso Sea
gggggtataatgagagatgtttttacaatgggtgcgagacctatcgcaaacttaaattcaatacattttggttcaccacaacaccctaaaacaaaaaatttattaagaggagttgtaaaaggtataggtgggtatggtaattgtataggtattccaactattggtggtcaaacaagttttgacgattcctataacgggaatattttagtcaatgcgatgactctaggcttagttaataaaaacaaaattttttattcaaaagctgctggtatagataaaccagtgatttatgttggttcaaaaacaggacgtgatggaattcacggtgctagtatggcgtcagcgatttttgatgaaaagatagaggaaaaaaaaccaacagttcaagttggagatccttttactgaaaaattattattagaagcctgtttagagttgatggcaggaaaatcaattatatctattcaagatatgggtgctgctggattaacttcatcaagtgttgaaatggcttcaaaaggtaatttgggtatagagttagatctaaataaagttccatgtcgtgaagagaaaatgacaccttatgaaattatgctttctgaaagtcaagaaagaatgttgattgttttagaaaatggaaaagaagaagaagcaaaaaagatttttgataagtggaatttagattttgcagttataggaaaaactacagata

SEQ ID NO: 318293 - DNA, 772 bp, Unknown
  Bacterial polypeptide expressing nucleotide sequence isolated from the Sargasso Sea
taaatcatcaagattacatttaaagaaactacctactaaaggaaagaaagttatccaaggacctggagaaaatgcaggtgttatcgatattgaggataatgatgcaatagtttttaaaatagaaagtcacaatcatccttcatttattgaaccttatcaaggtgctgctaccggtgttggaggaataatgagagatgtatttacaatgggcgcaagaccaatagctaacttaaactctattcattttggatcaccacaacataaaaaaacgaaaaatttattaagaggtgttgttcatggaataggtggttatggaaattgtatgggtgttcctactattgctggccaaacaagttttgatagctcctataatgggaatattttggttaacgctatgacattaggattggtcaaaaaagataagattttttactctaaagcagctggcttaaataagcctttgatttatgttggatctaaaacagggagagatggaatacatggtgcaagtatggcttcagctagttttgatgaaaaaatcgaggaaaaaaaaccaacagttcaagttggagatccgtttactgaaaaacttttgcttgaagcttgtttagagctaatggctggagattctattatagctattcaagatatgggtgctgccggattaacttcttcaagtattgaaatggcatctaaaggaaacctcggaattgaaatcaatttaaataaagtaccatgtagagaaaccaaaatgacaccatacgaaattatg

SEQ ID NO: 318294 - DNA, 643 bp, Unknown
  Bacterial polypeptide expressing nucleotide sequence isolated from the Sargasso Sea
aatgaaggcatctataattgtctttcctggatcaaattgcgatagagatattgctgtatctattaaaaaactcacagatctagaaccaattatggtctggcataaagaaacttccatacctgattcagatttaatagttattccaggcggatttacatttggagattatttaagatgtggttctatcgcagcaaatagcccaattatgaatgatgtcattaaaaaagcaacaggcggattaccaactttaggaatatgtaatggttttcaaattcttacggaatcaggattgctacctggaacactcattaaaaatgattgtctttcctttttatgtaagactgtttcaataagggttgagaataatggaacaattttttctaaaaaatataagcaaaatgaagtgataaatatacctattgctcacaatgaaggtaatttctttgctaatgaagatacattaaaaaaaattaaagactcaaatcaaataatttttaagtattgcaatcaaaatggagaggtaaataatgaaacaaatccgaatggttcaatcgaaaatattgccggtataacaaatgaacaaggtaacgttttaggtatgatgcctcatcctgaaagagcaacatgtgaaattacaaaactt

SEQ ID NO: 318295 - DNA, 871 bp, Unknown
  Bacterial polypeptide expressing nucleotide sequence isolated from the Sargasso Sea
agaggaggtgtcgggatggatttcagtgtttcagctgttccccaaagagaaacggggatgcaaccattcgagattatgacaagtgaatctcaagaacggatgctggcaatagtagagccagataatctagagcaagtttttgaaatatgccgaaagtgggaaattcggtcatccgttgtcgggaaagtaacatcctcgggaacgcttcgaattgttgatgaatttgatggagacgtgctgggagaggttcccgcttcttctctccatgatgatgccccactctacgaacggccgatggctcagccagagacgttagctgaccaagaaatacaattagctccaccagatggaatcgaagaagatctcattgatttgctgatgagcccgcaatgggcaacttctcagtacgactcacaactttttctcaacacagttgtgggccctggaagcgatgcagctgttttacggttgaagcatccaacatcaggcgcagatacggggagaggcatagcgcttactacagacggtaatcacagatggtgcgctgttaatccacgaatcggagcggctatgactgttgcagaatcggttttgaacctagcttgtgtaggagctattcctcaagctctggttaattgtttaaatttcggaaatcctgaaaatccttctgttatgtggcagctgagcgaagcagttgatgggatggctgaagcctgcactgcctttgaacttccagtagtaggtggaaatgtttcgctatataacgagagccaaggaaaaaatattgatccaaccccaattgttggcgtcattgggttgattgatgatttagctaaaccccctccaggactcgcatggaacgatggtgatc

SEQ ID NO: 318296 - DNA, 652 bp, Unknown
  Bacterial polypeptide expressing nucleotide sequence isolated from the Sargasso Sea
atgattgtaaacgaacaagtagcagttgatcacggtttaaagaaagatgaatacgctaaaatttgtgaactattaaagagaactcctaacatcacagaactgggtattttttctgcaatgtggaatgaacattgttcttataaatcatcaagattacacctaaaaaaactacctactaaaggaaagaaagttattcaaggtcctggagaaaatgcaggtgttatcgatattgaggataatgatgctatagtttttaaaatagaaagtcataatcatccgtcatttatcgaaccttatcaaggtgctgctaccggagttggaggaattatgagagatgtatttacaatgggagcaagaccaataggtaacttgaactctatacattttggatcaccacaacaaaaaaaaacaaaaaatttattaagaggagttgttcatggaataggtggttacggaaactgcatgggtgttcctacaattgctggccaaacaagttttgatagctcgtataatggaaatattttggttaacgctatgacattaggattggtaaaaaaagataagattttttactctaaagcagctggcttaaataagcctgttatttatgttggatctaaaactgggagagatggaatacatggtgcaagta

SEQ ID NO: 318297 - DNA, 665 bp, Unknown
  Bacterial polypeptide expressing nucleotide sequence isolated from the Sargasso Sea
ttttccaggttcaaattgtgatagagacatggatgtggcactaaaaaaatttggctttaaaaatgaaatggtatggcatgatgacgaaaaacttcctgaatcagatttaatcgttctaccaggaggattttcatacggtgattatcttagatgtggaagtatagctggtaaaagtaaaattattaaatctgtaatagattttgcaaacaaaggtggattggttcttggaatttgtaacggttttcaaatattaactgaaacaggtctcctgcctggtgttctccaacaaaataaaaatattgaatttatatgtaaaaatgtgttcgtaaaagttaacaacaaaaataataaatattttaatagtatagataaagatgttttagagctccatattgcccacaatgagggtaattatttctgtactagtgatgagctaaaaatgcttgaagataataatcttatagcagtttcttattgtaatgaaaaaggtgaagtaaatgagaaatcaaatccaaatggagcactacaaaatattgctggtatttttaataaagaaaaaaatattttaggtatgatgcctcatcctgaaaggatgattgataagtatctttcaggtgaagatggatcaattttttttaaaaatttattaaataatattaaatgac

SEQ ID NO: 318298 - DNA, 848 bp, Unknown
  Bacterial polypeptide expressing nucleotide sequence isolated from the Sargasso Sea
aatgatagattcttcaagtaacaatacttatgatgttaatgaatcacttaaagttgaaaacttaactcgtaatgattatgaagagatatgcaaaagattaggaagaaaacctaatagaacagaattgggaatgtttggagtaatgtggtctgagcattgctgttatagaaattcaaaaccattattagctaattttcctactacaggaaaaaacgtattggttggtccaggagaaaatgcaggtgttattgatgtaggaaatgatcagaaacttgttttcaaaattgaaagtcacaatcatccttctgctattgaaccttttcaaggagctgcaacaggagtgggtggcatattaagagatatttttacaatgggtgcgagacctatagcagttttaaactctttaagatttggtaatcttgataaatcatctaatatttctttacttcgaggagtagttgcggggatatctcattacggtaattgtgttggggttcctactgtcggtggagaaatagattttgatgacagttattctggcaatcctcttgttaatgttatggctttaggtttattagaaactgatgaaatcgtttgttcaggagcaaaagaagtaggctctcctgttttatatgtaggaaataccacaggaaaggatggagtaggaggtgctagttttgctagttcagaattaactagtaattctttggataatagaccggcagtacaagtaggtgatccatttattgaaaaaagtcttattgaagcttgtttagatgcttttaaaacaggcgatgtactcgctgctcaagatatgggagctgcgggattaacgtgtagtagtgctg

SEQ ID NO: 318299 - DNA, 364 bp, Unknown
  Bacterial polypeptide expressing nucleotide sequence isolated from the Sargasso Sea
atggaagttaatgaacaaattgctatagatcatggtcttaagtctgatgaatataaaaagatttgtcaattacttaagagaactccaaatattactgaacttgggattttttctgcaatgtggaatgaacattgctcatataaatcatcgcgactacacttaaaaaaacttccaactaaaggaaaaaaagtaattcaaggtccaggagaaaatgcaggtgttattgatattgaagatggagatgcaattgtttttaaaattgaaagccataatcatccttcatttatagaaccttatcaaggagctgcaactggtgttggtggaattatgagagatgtatttacaatgggagcaagaccaatag

SEQ ID NO: 318300 - DNA, 589 bp, Unknown
  Bacterial polypeptide expressing nucleotide sequence isolated from the Sargasso Sea
aatgatagttaataaacaaattgctatagaacatggtctaaagtatgaagagtataaaaaaatttgtaaattactgaagagaactccaaatattactgaacttgggattttttctgcaatgtggaatgaacattgttcatataagtcgtcacgacttcacttaaagaagcttccaacaaaaggaaaaaaagtaattcaaggtccgggagaaaatgcaggtgttattgatattgaagatggtgatgcaatcgtttttaaaattgaaagccataatcatccttcatttatagaaccttaccaaggtgctgcaactggtgtcggtggtatcatgagagatgtatttaccatgggagcaagaccgatagcaaatttaaattcaatacattttggatcaccacaacataaaaaaacaaaaaatcttttacggggggttgtgcatggcattggtggttacggaaattgtatgggtgtgccaactatagctggacagacctcatttgatagttcttacaatggaaacattttagttaacgcaatgacacttggtttagtaaaaaaaaataagattttttactcaaaggctgcaggt

SEQ ID NO: 318301 - DNA, 853 bp, Unknown
  Bacterial polypeptide expressing nucleotide sequence isolated from the Sargasso Sea
gaagaaaaaatgacaccttacgaaataatgttatctgaaagccaagaaagaatgttgatagttttagaaaatgggaaggaagatagtgcaaaaaaaatatttgataaatggaacctagattttgcagtaatagggaaaactacaaacaccaaaaatattgaacttttttttgaaaaagaaaaagtagcaaatgtaccaattaaatttttagcaaatgaggctccaatgtatgatagaccttggaaaagaaccaaacttcctcaaaagattaaattttcaaataatgaattaaaaaaattaaagtttaatgatgtcattaaaaaaatgatttctcatccaaatatttgttctaaacaatggatatgggaacaatatgatcatactgttatgggagatacaattcaaaaacctggtggtgatgcaggagttgtaagagtgcatggtacaaaaaaagcagtagcttcatctgttgactcatcagcctcttattgtcatgcacatccattcactggcgggaaacaagttgtatgtgaagcttggagaaatctaatttcagttggtgcagaacctatagcaatcacaaactgtttaaattttggaaatccagaaaaaaaagaaaatatgggtgaatttgttgaatgtattgatggaattaatgaagcaagtaaatatttaagtttccctgtcgtttcgggaaacgtatcattttacaatgagacaaaagataaaggaattaaacctacgccaacaattggaggagttggtttaataaaagactataaaaatttaatgaccatgaggtttaaatcgaaagaaaacttagttttggttatggaaaaacagaaggaaattt

SEQ ID NO: 318302 - DNA, 899 bp, Unknown
  Bacterial polypeptide expressing nucleotide sequence isolated from the Sargasso Sea
tcgtataacggcaatatatttggttaatgctatgacagttggtatcgcaaaaaaagataaaattttctattcagcggctgcaggaataggaaatccagtagtgtatgttggttcaaaaacaggtagagatggtattcatggcgcaactatggcatcagcagaatttgatgatgactctgaagaaaaaaaacccacagttcaagtcggtgatccttttactgaaaaattattacttgaagcttgtctagaacttatgaaagaggatgcaattatagcaattcaagatatgggtgcagcaggattaacttcatcatctattgagatggcatccaaaggaaatgtagggattgatataaatttatcaaagatccctatgcgagcagctaacatgactgcctacgagctcatgctatcagagagtcaggaaagaatgttaatggttattcagcccaaaaaagaagaacttgcccgaagcatttttaaaaaatgggatcttgaatttgaaataattggtgaagttacagatacaaaaaaattaatattacatatggatggtgaagagcaggcaagtataccaattaatattttggtagaagacgcgccagagtatcagcgagattatattgtcaatgacccttctcccctaattagtttcgaaagtaaggattttgaagataaagatatcttaagcgatttattaaaaatgatcagccatccaaatttatgcagcagaaaatggatttgggaacaatatgatcacatggtcatggcagatacagttgtacgacctggttctgatgcagctgttgtcagagtgcatggaaccaacaaaggaatagcgatcagtacagactgttcacccacatactgcagacataatccatatgaaggaggaaaac

SEQ ID NO: 318303 - DNA, 979 bp, Unknown
  Bacterial polypeptide expressing nucleotide sequence isolated from the Sargasso Sea
gtcgtagatatcgaggacgacgacgcgattgtatttaaaatagaaagtcataaccacccttctttcattgaaccatatcaaagagcagccactggagttggtggtataatgagagatgtatttactatgggcgcaagacccatcgcaaatttaaattctatccattttggctcaccagatcatgaaaaaacaagaaatttattaagaggagttgttaaaggtattggtgggtatggaaattgcattggtgttccaactattgctggtcaaacctgttttgatgaatcttataatggaaatattttagtcaatgcaatgacattgggtttggtaaataaaaataaaatattttactcaaaggctgctggtataaataagcctgttatttatgttgggtctaaaactggaagggatggaatacatggggcaagtatggcttcggctatttttgatgatcaaattgaagaaaaaaaacctactgttcaagttggtgatccatttacagaaaaattacttttagaagcttgtcttgagcttatggctggaaaatcaatcatttcaattcaagatatgggagcagctggtttaacatcctctagtatcgaaatggcatcaaaaggcaatttgggtattgagatagatttaactaaagttccttgtagagaagaaaaaatgtcaccctatgaaataatgctctcagaaagtcaagagagaatgttgattatactagaagaaggcaaagaaaatgaagctaaaaaaatatttgataagtggaatttggattttgcagtcattggaaaaactacaaacagcaaaaatatagaattattttttagaaatgaaaaagttgctgaaatcccaattaattttttagctgagaacgctcctatgtatgatcgaaaatggatcaaagcaaaacttcctaaagaaaaaaaattttcaaaagattgtttcaaatcattaaaactaaaaaattgct

SEQ ID NO: 318304 - DNA, 760 bp, Unknown
  Bacterial polypeptide expressing nucleotide sequence isolated from the Sargasso Sea
aatgataaatcaagaaaataatgatctatatgatcttaatgaatcactactagttgaaaatttaacacttaatgattatgaagaaatttgcaaaagattaaagagaaaacctaacagaacagaattaggtatgtttggcgttatgtggtcagaacattgttgttatagaaattcaaaacctttactatctaagtttcccactaaaggtaaaaatgttttagttggacctggagaaaatgctggcgttattgatgttggaaataatcaaagacttgtttttaaaatagaaagtcataatcatccttctgctattgaaccttttcaaggcgcagcaacaggtgttggaggaattttaagagatatatttacaatgggtgcaaggccaattgcagttttgaattcattgagattcggcaaccttgataaatcatcaaatattgatttactacgaggagttgtatccggtattgcacattatggaaattgcgtaggtgtgccgactgttggaggtgaaattgacttcgatgatagttactctggaaatcctttagttaatgttatggctttaggactcttagagaccgatgaaatagtttgttctggagctaaaaatgtaggatcaccagtgttatatgttggtaatacaactggcagagatggtgttggtggcgctagttttgctagttcagaattagatacaagttcattggatgatagacctgcagttcaggtaggtgatccatttgttgaaaaaagtctt

SEQ ID NO: 318305 - DNA, 546 bp, Unknown
  Bacterial polypeptide expressing nucleotide sequence isolated from the Sargasso Sea
aatgaatgagcctggcataaccaaagaacttattgaattgcatggtttaaattcagatgaatacgaattaattttatcaattatcaacagaattcctacattcacggaattaggtattttttcagcaatgtggaatgaacattgttcctacaaatcttcaaaaaaatggcttcgaactctaccttctaagggttctcaagttatttgcggaccaggagagaatgcagggattgttgatattggtgataaccaagctttggtttttaaaatggagagccacaaccatcccagctatatagagccataccaaggagcggctacgggcgttggaggaattctccgagatgttttcacgatgggtgctcggccaatcgcagtaatgaattctttgagttttggtgacgtaaatcattataaaacaaatcaacttgtcaacggtgtagtatccggcataggaggatatggaaactgctttggcgtgcccaccgttggaggcgaaacgagatttgactcgtcttataatggaaattgtttggtcaatgcgtt

SEQ ID NO: 318306 - DNA, 868 bp, Unknown
  Bacterial polypeptide expressing nucleotide sequence isolated from the Sargasso Sea
ggagcaaggccaatcgcacttttaaattcaatacattttggttcaccagatcattttaaaacaaagagtttattgaatggagttgtttcaggaattggaggatatggaaattgtattggtataccaacaatagctggagaaacaaaatttaatagtacctataatgaaaatattttagttaatgctatggctgttggtcatgcaaaaaaagataaaattttttattcaaaagctaaaggtttgaataaatctgttgtttatgtaggatctaagactggtcgagacggcattcatggtgcttcaatggcttctgcagaatttgatgaaaattctgaagaaaaaaaacctacagtacaagttggtgatccttttacagaaaaattattaatggaagcatgcttagaattaatgaaagataattctattatttcaattcaagatatgggtgcagcaggacttacatcttctagtgttgaaatggcttcaaaaggtgaattaggtattgagctacatttagacaaagttccttgcagagaagataatatgacaccttacgagatgatgttatctgaaagtcaagaaagaatgctaattatcttagaagatgaaaaagaagatcatgcaagaacaatattcaaaaaatgggatcttgattttgttgttataggtaaaacaacaaatacaaaaaaattaactcttaaatataataataagattgaaggtgaaattcctatagatttattagcttccaaagctcctgtgtacgatagaaaatgggtaaaaaagaaattacctaaaaacaaaattgattttaaaaatttaaaaaagattaatattaagaatgctttaattaaaatactatcttcag

SEQ ID NO: 318307 - DNA, 367 bp, Unknown
  Bacterial polypeptide expressing nucleotide sequence isolated from the Sargasso Sea
atgaatgtaactgaaataatagccatagagcatggtcttaaaaaagatgaatataaaaaaatttgcgatttgttaaaaagagttcctaatattactgaacttgcaattttttctgctatgtggaatgagcactgttcatataaatcatcaagaaaacatttaaaaaaacttcacactaagggagacaaggtaatacaaggacctggtgaaaacgcaggtgttattgacattggagatgaagatgcaattgtttttaaaatagaaagtcacaaccatccatcttttattgaaccatatcagggagccgcaacaggtgtgggaggaatcaaaagagatgtattcacaatgggtgcaagaccaattgcta

SEQ ID NO: 318308 - DNA, 685 bp, Unknown
  Bacterial polypeptide expressing nucleotide sequence isolated from the Sargasso Sea
aatgaattcatcggtcattatattcccaggatctaattgtgatagggatatggatgttgctttaaaaaagtttggttttaaaaataagatggtatggcatgatgatgataaattacccaaaagtgatttaattgttttgccaggtggattttcttatggggattatctgagatgtggaagtatagctggaaaatctaaaattattcaatcagttatagattttgcaaattctgggggtttagttttaggaatttgtaatgggtttcaaatcttaacggaaacaggtctattaaaaggggttcttcaacaaaataaaaatattgaatttatttgtaaaaatatatttgtcaaaatcaataatagtgaaaacaaattttttgaaaatatagataaagatgttttagaacttcatatagctcataatgaaggaaattatttttgtactgaggaagaattaaagtcattagaagataacaatcaaattgcagcttattattgtagctctgatggaaaagtagatgataaatcaaatccaaacggtgcaataaaaaatattgctggaatattcaatgaaaagaaaaatattttaggaatgatgcctcacccagagcgaatgatagatcaaagtttgtccggtgaagatggctcaatattttttgaaaatttattaaagaatttaaaataa

SEQ ID NO: 318309 - DNA, 895 bp, Unknown
  Bacterial polypeptide expressing nucleotide sequence isolated from the Sargasso Sea
ttgatgaattcaattcattttggttctcctgaaaacaaaaaaactcaaaatttattaagtggtgtcgtgtctggaattggtggttatggaaattcagtaggaatacctactgttggaggcgaaactaaatttaatagcacatacaatgaaaatattttggtaaacgcaatggcaattggccacgcaaacaaaaataaaatattttattcaaaagcaaaaggtgtaaataaatctgtggtctatgttggttcaaaaactggaagggatggtattcacggggctacgatggcttcagcagaatttgatgaaaactctgaagaaaaaaaaccaacagttcaggttggggatccttttacagaaaaattacttttagaagcctgtttagagctaatgaaagataattctattatatccatacaggatatgggtgcggctggcttgacgtcatccagtgtggaaatggcctcaaaaggcaaactcggaattgaattaaacttaaataaaataccttgccgtgaaaacaacatgactccttatgaaatgatgttgtccgaaagtcaggagcgaatgttgattatacttgatgataaaaaagaagaagaggcaaaaaaaatatttgataaatgggatttagattttgttgtgataggaaaaacaactgatactaataaattaatattaaattttgataataaaagagtagcagatatacctattgtagcattggccgaaaaagcccctttgtatgacaggaaatgggtcaaatccaaattgtcaaaggataaagtaaaaataaaaaatttaaaaaaaattaaaattgaagatgctcttattaaaatactgtcttcaccaaatcattccaataaaaactggattacaaaccaaatacgaccag

SEQ ID NO: 318310 - DNA, 808 bp, Unknown
  Bacterial polypeptide expressing nucleotide sequence isolated from the Sargasso Sea
accaacggttcaagtcggagatccttttactgaaaaattattacttgaggcgtgcttagaattaatggctgacaattctattattgcaattcaagatatgggtgcagcaggattaacatcttcgagtgttgaaatggcatcaaaaggaaatcttggaattgaattaaaccttagcgaggttccttgtagggaagaaaaaatgacaccttatgaaattatgttgtctgaaagtcaagagagaatgcttattgtacttgaaaaaggaaaagaagaacatgcgaagaaaatatttgataaatggaacctagattttgcagttataggtaaaacaacggactcaaaaaaaattgaattaatatttgataataaaaaagttgctgaaataccaattgatcttcttgctgaaaatgctccaatttatgatcgtccttggaaaaaaactaaattacctcaaaaattaaaatttgataaagatgaatttaaatctctaaaactatcagattgtctaaagaagattttaagtaattcaaatatttcagataaaaagtggatatgggatcaatacgatcatacagtaatgggtgatacaattcaaaaacctggaggtgatgctggtgttgttagagtgcatgggaccaataaagcagtagcagcatcagtagactcgtccgcattatattgtttctcacatccattaactggagggaaacaaatagtttgtgagagttatagaaatcttatctcggttggagctaaacctattgctattacaaattgtttaaattttggaaatccagaaaaagaaaaa

SEQ ID NO: 318311 - DNA, 972 bp, Unknown
  Bacterial polypeptide expressing nucleotide sequence isolated from the Sargasso Sea
gaacattgttcctataaatcttcaaagattcatttaaaaaaattaccgaccaaaaataaagttgtaattcaggggccaggtgaaaacgctggtgttatcgatataggagatgatgatgcaatagtttttaaaatagaaagtcacaaccacccatcattcattgaaccatatcagggtgcagcaactggtgttggaggaatattaagagatgtttttaccatgggagccagaccaatcgctctaatgaactcaattcattttggctcgcctgacaataaaaaaactcaaaacttattaagcggagttgtatctggaattggtggttatggtaattctgtaggtatacccaccgttggtggcgaaactaaatttaatagtacttacaatgaaaatattttagttaatgcaatggcaataggccatgcaaataaaaacaaaatattttattctaaagccaaaggtttgaataaacctgttgtatatgtcggttctaaaacaggcagagatggtattcatggggctactatggcctcagctgaattcgatgaaaattctgaagaaaaaaaaccaacagttcaagttggagatccttttacagaaaaattactactagaagcctgtttagaattaatgaaggacaattccattatatcaatacaagatatgggtgcagcaggtttaacttcatctagtattgaaatggcatcaaaaggtaaacttgggattgaattaaatttgaataaagtaccttgccgagaaaataatatgagtccctatgaaatgatgttatcagaaagtcaggaacgaatgctgataatacttgatgataaaaaagaagaagaggcaaaaaaaatatttgataaatgggacttagactttgttgtcattggaaaaacaactgacacgaatagattaatactaaattttgataataaaaaagttgcagatattcctattacagctttagctgat

SEQ ID NO: 318312 - DNA, 673 bp, Unknown
  Bacterial polypeptide expressing nucleotide sequence isolated from the Sargasso Sea
aatgaactctgcagtaattgtttttcctggatcaaactgtgacagagatgttgcaaccgctcttacaaatcttcaatttaaaaataaaatggtttggcataaagatagcgaacttccaaaatcagatttaattgttattcctggtggtttttcatatggagactatttaagatcaggtgcaatagctgcaaaatcaaatattttgaaagaagttataaaagcagcgaactcaggttgtcttgtactgggtatatgtaatggatttcaaatacttatagaaactgggcttctccaaggagcattattgaggaataaaaatcttaagtttgtgtcaaaagatattaatttaaaaataattaataatgagaataaattttgtaataattataaaaaaaatagcgtaattagcttaaatatagcgcataacgagggtaattattttactcaaaaagatcatcttaaagaattagaagataataatcttattcccttcaagtattgcgacatggaaggttcagtaaatgaaagcagtaatcctaatggttctttaaacaatatagctgggattttaaataataataaaaatattttaggaatgatgcctcatcctgaaagaatggtgacaaatttattagtaactcaaatgggtatgagttgtttacaagtattttaa

SEQ ID NO: 318313 - DNA, 685 bp, Unknown
  Bacterial polypeptide expressing nucleotide sequence isolated from the Sargasso Sea
aatgaaatcagctgttattatttttccaggctcaaattgtgatagagacatggatgtagcgctaaaaaaattcggctttaaaaatgagatggtatggcacgatgatgaacaattacctaaatcagacttaattgttctaccaggaggattttcatatggtgattatcttagatgtggaagtatagctggtaaaagtaaaattattaaatctgttatagattttgcagcaaaaggtggattagttctaggtatttgtaatggttttcaaatattaacagaaactggtctgctccctggtgttctacaacaaaataaaaatattgaatttatatgcaaaaatgtatttgtaaaagttaacaataaaaataataaatattttaatagtatagataaagacgttttagaacttcatattgctcacaatgagggtaattatttctgtacaaatgacgagttaaaaatgcttaaagataacaatcttatagcagtttcatattgtaatgaaaaaggtgaagtaaatgagaaatcaaatcccaatggagcattgcaaaatattgctggtatttttaataaagaaaaaaatattttagggatgatgccccatcctgaaaggatgattgataaatatctttcgggagaagatggatcaattttttttaaaaatttaattaataatattaaatga

SEQ ID NO: 318314 - DNA, 901 bp, Unknown
  Bacterial polypeptide expressing nucleotide sequence isolated from the Sargasso Sea
attcattttggctcaacacaacataaaaaaactaaaaatttgttgaggggagttgttaaaggaattggaggctatggaaattgtattggggtcccaactatagctggtcaaacttgctttgatcaatcttataatggaaatattttagtaaatgcaatgactttaggtttggtaaataaaaataaaattttttactcgaaagctgcaggtataaacaaaccagttatttatgttggatcgaaaactggaagagatggtattcatggagcaagcatggcctcagcaatatttgatgacaaaatagaggaaaaaaaaccaaccgtccaagtcggagatccttttactgaaaaacttcttttagaagcttgcttagagttaatgtctgataaatcgattattgcgatacaagatatgggtgcagcaggtttaacttcttctagtattgaaatggcatcaaaagggaacttaggaattgaattacatttagataaagttccttgcagagaagaaaaaatgactccatatgaaattatgttatctgaaagtcaagaaagaatgttgatagttttagaaaatggtaaagaagatagtgcaaaaaaaatatttgataaatggaatttagattttgcggttattggcaaaacgactagctctaaaaatattgaattatattttgaaaaagaaaaggttgctaatgttcctataaaaattttagcaaatgaagctcctatgtacgataggccttggaaaaaaacaaagctacctcaaaaaatcaaattttcaaacagtgattttaaaaaattaaaatttgatgatgtaataaaaaaaataatttcgaatccaaatatttgttcaaagcaatggatatgggaacaatatgatcatactgtaatgggtgaca

SEQ ID NO: 318315 - DNA, 613 bp, Unknown
  Bacterial polypeptide expressing nucleotide sequence isolated from the Sargasso Sea
catgaatgaagagttaatacttcaacacggtttaactttagatgaatttcaggtcattaggaaatatctaaaaagagacttaagtattgaggaattgggtattttttctgctatgtggaatgaacactgttgttataaaacttcaaaaaaatggcttaagaaactccctacagataatgaaattgtaattcagggaccaggagaaaacgctggtgtaattgatttgcaagataacgatggtattgcgtttaaaatagaaagccacaatcatccaagttacatagaacctttcaacggttcagcaactggtgttggaggtatactacgagatatatttacaatgggagcaagaccaattgctactcttgactcaattagatttggtttaatagaaactgaaaagacaaaatacttgttaaatggtgtggttcatggaattggacactatggtaactgtattggaattcctaatattggtggtgagtgtgagtttgagtcaacatatgattttaataatttggttaatgctatggctgtgggacatgttcaaaaagataaaattttttactctaaaccaaaatctattggtggccttattgtttacattggatct

SEQ ID NO: 318316 - DNA, 823 bp, Unknown
  Bacterial polypeptide expressing nucleotide sequence isolated from the Sargasso Sea
tatggcctctgctagtttcgatgacaaaattgaggaaaaaaaaccaacagtacaagttggtgatccctttacagaaaaacttttgcttgaagcgtgtttggaattaatggctggagactcaataattgctattcaggatatgggggcagcaggtttaacttcttcaagtattgaaatggcctcaaagggaaatcttggaattgaaattaatttaaataaagtgccatgtagggaaacaaaaatgactccttatgaaattatgctttctgaaagtcaggaaagaatgttgattgttttagaaaatggacaagaagagcaagctaaaaaaatatttgataagtggaatttagattttgctgtaattggaaaaacaactaaatcgaagaaaattgaactttactttgatagtgaaaaagttgctgacattccagttaacactcttgttgaaaattcaccgatgtatgatcgtaaatggaaaaaagcaaaacttccaaagaaaaataaaattaataaagatgatataaataatttaaagataattgaagttcttaaaaaaattttagcaaatccaaatatctgtagtaaagaatggatttggcaacagtatgaccatacagtgatgggagacactattcaaaaacctggaggcgactctggtgtggtgagagttcatggcaccaataaagcagttgcagcatctgtagattcttcagcagtttattgttgggctcatcctcttacaggtggaaagcaagtggtgtgcgaaagttttagaaatttgatatccgtcggagcaaaaccaattgctattacaaattgttta

SEQ ID NO: 318317 - DNA, 892 bp, Unknown
  Bacterial polypeptide expressing nucleotide sequence isolated from the Sargasso Sea
gcaatatttgatgacaaaattgaagaaaaaaaacctaccgtccaagttggagatccttttactgaaaaacttcttttagaagcttgcttagaattaatgtctgataaatcgattattgcaatacaagatatgggtgcggcaggtttaacttcttcaagtattgaaatggcatcaaaaggaaacttgggaattgaattacatttagataaagttccttgcagagaagaaaaaatgactccatatgaaatcatgttatctgaaagccaagaaagaatgttgatagttttagaaaatggtaaagaagatagtgcaaaaaaaatatttgataaatggaatttagactttgcggtaataggaaaaacaaccaactccaaaaatattgaactttattttgaaaaagaaaaagtagcaaatgtaccaattaaatttttagcaaatgaggctccaatgtatgatagaccttggaaaaaaactaaacttcctcaaaagattaaattttcaaataatgattttaaaaaattaaaatttaatgatgtaataaaaaaaatgatttctaatccaaatatttgttctaaacaatggatatgggaacaatatgatcacactgttatgggagatacaattcaaaaacctggtggtgatgcaggtgtcgtgagagtacatggtaccaaaaaagcagtggcttcttcagttgattcatctgcttcctattgttatgcgcatccatttacaggaggaaaacaagtagtttgtgaggcgtggagaaatttagtttcagttggagctgaacctatagcaataacaaattgtttaaactttggaaatccagagaaaaaagaaaatatgggggaatttgttgaatgtattgacggaattaatgaggcaagtaagt

SEQ ID NO: 318318 - DNA, 584 bp, Unknown
  Bacterial polypeptide expressing nucleotide sequence isolated from the Sargasso Sea
aatgaatgaggttaatgaacatattgcaattgatcatggtttaaaaaaggaagaatttagtaaaatctgtgatttattaaaaagaacgccaaacctaactgagctcggaattttttcagcaatgtggaatgaacattgctcttacaagtcatcaagacttcatttaaaaaaacttaacacaaaagggaaaaaagtaattcagggtccaggagaaaatgctggagttattgatattgaagatgacgatgcgatagtttttaaaatagaaagtcataatcacccttcatttattgaaccatatcaaggagcggcaaccggcgttggtggtataatgagagatgtttttacaatgggtgcaagacctattgcaaatttaaattcaattcactttggctctccacaacatcctaaaacaaaaaatttattaaggggagtggttaaaggcattggtggttatggaaattgtatgggtataccgactgtaggtggtcaaactagctttgatgactcttataatgggaacattttagttaatgcaatgactttgggattagtaaataagaataaaattttttattcaaaag

SEQ ID NO: 318319 - DNA, 568 bp, Unknown
  Bacterial polypeptide expressing nucleotide sequence isolated from the Sargasso Sea
aatgaaagttacagaagctgtagcaatagaccatggtttaaagaaagaagaattttctaaaatatgtaaattattaaaacggatccccaatattactgaacttgcaatattttctgcaatgtggaatgaacattgttcttataaatcgtctagaaaacatctaaaaaaacttcacactaaaggaaaacaagtgattcaaggccctggtgaaaatgctggggtgattgacataggagatgatgatgcaattgtatttaaaatagaaagtcacaatcatccatcatttattgaaccctatcaaggtgcagcaacaggtgtagggggtataatgagagatgtttttacaatgggtgcaaggcctatagctaatctgaattctattcactttggttcaccacaacataaaaaaactaaaaacttattaagaggtgtagtgaaaggaattggtggatatggaaactgtatcggtgttccaactataggaggacaaacatcttttgatgagtcttacaatgacaatattttagttaatgcgatgacactaggcttagtaaataaaaataaaata

SEQ ID NO: 318320 - DNA, 779 bp, Unknown
  Bacterial polypeptide expressing nucleotide sequence isolated from the Sargasso Sea
tgttgttggtgaaactatctcagaggacagatttcttataaaattagacggtgttgtgaaagctgatcttcctttaaaggcactggcgggtaatgcgcctgaatacgatagaccatggattgaagtccaaccaaatagcgagttaaaagacgttgtagaggtgaacgcaattgatggtttaaaaggtttaatttcgtccgcgaattactgttcaaaaagttggatttacgaacaatatgacagtcaggtaatggccgatactattgagcgaccaggttttggcgcgggcatcgttagggttcatggaacaaaaaaatcaatcgcatttacgagtgacgtaactccgagatatgttcgggcaaatccatttgaaggcggaaagcaggcagtagcagaggcatttagaaatttagtttccgttggtgcaaaaccactcgcctctacagataacttaaactttggaaaccctgaaaagccagaaataatggggcaatttgttcaagcaattaaaggcatctctcaggccgtaaaagagctaaacatgccaattgtttcaggtaacgtgagtttatataatgaaacagatggagtatcaataaatccaacaccaacaattggggcggtgggaataattaatgaagcggaaaatcctataaatggtagggcttatgaaggaaatattgctgttctaataggggaaactcaaggtcatctaggccaaaccgctttactccaggaggtcttcaatagaagtgatggagacgcccctaaaagttaat

SEQ ID NO: 318321 - DNA, 779 bp, Unknown
  Bacterial polypeptide expressing nucleotide sequence isolated from the Sargasso Sea
aatggaagttacagaagcagttgcaatagaccacggattaaaaaaagaagagttttctaaaatatgtgaacttcttaagaggacacctaatttaactgagcttgcaatattttcagcaatgtggaacgaacattgctcatataagtcttctagaaaacatttaaaaaaaatgcacaccaaaggaaaacaggtcattcaaggacctggagaaaatgctggtgtcattgatattggagatgacgatgcaattgtatttaaaattgaaagccacaaccacccttcgtttattgaaccttatcaaggagcagcgactggagttggtggaattatgagggatgtatttacaatgggagcaagaccaatagcaaatctaaattcaattcattttggttcaccacaacataaaaaaacaagaaacttattaagaggagttgttaaaggcatcgggggttatggaaattgtattggagttccaacgattgctggtcaaacaacttttgatgagtcttacaatggcaatatattagtaaatgccatgactcttggtttagtaaataaaaataagattttttactcaaaagcagctggattagataaaccagtaatatacgtaggttcaaaaactggaagagatggaattcatggtgccagtatggcttctgcaactttcgatgacaaaattgaagaaaaaaaaccaacagttcaagttggtgacccatttactgaaaaattattacttgaagcgtgtctagaattaatggctgataattcaattattg

SEQ ID NO: 318322 - DNA, 646 bp, Unknown
  Bacterial polypeptide expressing nucleotide sequence isolated from the Sargasso Sea
aatgaaaatttctaataaaataattgagcgtcatggtttaaaaattgatgagtataaaaagattaaattactattagagagagaacctaatttacttgagctaggtattttctctgcaatgtggaatgagcattgctcatataaatcctctaaagttcatctaaaaaaattaccaacaaaaaataaatatgttattcaaggcccgggagaaaatgccggtgtgattgatattggagatgatgatgctatcatcttcaaaatagagagtcacaatcacccatctttcatcgaaccttatcaaggcgcggcaacaggagttggtggaattctcagagatgtttttacaatgggtgctcgaccaattgccttattaaactcaattcattttggtgaggaaaaaaataaaaaaaccaaaaatttattaaacggagtagtttcaggtattggtgggtatggaaattgtattgggataccaactgttgcaggagagacaaaatttaatgaaacttataatgaaaatattttagttaatgccatggcggtaggtcatgctaataaaaacaaaattttttactccaaagctaaaggattaaacaaacctgtagtatatgtcggttcaaaaacagggcgggatggtattcatggt

SEQ ID NO: 318323 - DNA, 951 bp, Unknown
  Bacterial polypeptide expressing nucleotide sequence isolated from the Sargasso Sea
agcagggttaacatcttctagtgttgagatgtcatttaaaggaaacttaggaatggaaataaatttagatcttgtgccttgcagagaaagtaatatgtccccttatgagatgatgctttcagagagtcaggaaagaatgttattgataattaatgataataaaaccacacatgcaaaaaaaatatttgaaaaatgggatctggattttgtagttattggaaaaactatcaaggaaaaacaattaattttgaattataaaggcaatgaggttgccaatctgccaattgaagctttatcgtctcaagctccagtatacgacagaaaatggaaaaagataactttacctaataaggagcccagacttgaaaaactaaaaaaaataaaatttgaagactcctttttaaaaattttatcttctcctaatttttctaataaacaatgggtaacaaatcaatatgatcaaatggttatgggtgataccattcaaagatcaggatcagattcagcgataataagaatccacaaaaaaaataaagcaatagctataaccgtagactcttcgtctaattattcaaaggcacaccctcttacaggtggcaaacaaatagtttgtgagaattggagaaatcttattagtgctggatcaaaacctttagccataacaaactgtttaaattttgggaatcctgaaaatgaggaaatcatgggtgaatttgcagagacaattcaaggtatgaaagaagcatgcgaatatttaaatttcccggtggtttctggaaatgtttctttttataatggtacaaataaaaaaaatatatttcccacaccagtgattggtggaattggtttgatagaaaatgttaagttttctacaaacaataattttcaaaaaattggtaatagaataatcttaataggaaaaacttttggacacttatatcaaagcgcttt

SEQ ID NO: 318324 - DNA, 628 bp, Unknown
  Bacterial polypeptide expressing nucleotide sequence isolated from the Sargasso Sea
gatgcatataaagtgatcgagggattggatggagctacaccacgctttgtttggcataaagaaaatgatttatctgattatgattgcataattgtaccaggtggattttcttatggtgattatttgagagctggtgctattgcaagattttctcctataatgaatgcattggtgaatgagtcaaaaaaagggaaacttatcattggtatatgcaatggatttcagattctattagaagcaaatttgctcgaaggtgcattaattaataattctggtgttaaatttaaaagtaggaatgtgtctctttctgctgagaactataatacggtatttactaagttaattcctaaagacaaacaaattgtaatgccaatagctcatcgccaaggaaattatagtgcttcagatcaacttataaagaaattggatgataataaccaaatagcttttagatatagttccaaaatgggtgggaatccaaatggatcatgctctgatatcgcaggggttttaaatcaaaacaggaatgttcttggtatgatgccacatccagagagagcagctgattctatacttggctctaatgatggtttatatatttttcaatctatgttagagagtttttaaa

SEQ ID NO: 318325 - DNA, 784 bp, Unknown
  Bacterial polypeptide expressing nucleotide sequence isolated from the Sargasso Sea
aatgataaatcaagaaaataatgatctatatgatcttaatgaagcactacaagttgaaaatttaacacttaatgattacgaagaaatttgcaaaagattaaaaagaaaacctaacagaacggaattaggtatgtttggcgttatgtggtcagaacattgttgttatagaaattcaaaacctttactatctaagtttcccacaaaaggtaaaaatgttttagttggacctggagaaaatgctggcgttattgatgttggaaataatcaaaaacttgtttttaaaatagaaagtcataatcatccttctgctattgaaccttttcaaggcgcagcaacaggtgtaggaggaattctaagagatatattcacaatgggtgctaggccaatcgcagtcttgaattcattgagatttggcaaccttgataaatcatcaaatgttgatttactacgaggagttgtatccggtatttcatattatgggaattgcgtaggtgtgccgactgttggaggtgaaattgactttgatgatagttactctggaaatcctctagtgaatgttatggctttaggacttttagagactgaggaaatcgtttgttctggagctaaaaatgtaggatcaccagtgttatatgttggtaatacaactggcagagatggtgttggtggtgctagttttgctagttcagaattaactacaacttcattggatgatagacctgctgttcaggtaggtgatccatttgttgagaaaagtcttattgaagcttgtttggatgctttt

SEQ ID NO: 318326 - DNA, 810 bp, Unknown
  Bacterial polypeptide expressing nucleotide sequence isolated from the Sargasso Sea
gctgcaggtgtcaataaaccggtaatatatgtaggttcaaaaactggccgagatggaattcatggtgcaagtatggcttcggcaatttttgatgacaaaatagaagaaaaaaaaccaacagttcaagttggagatccttttacagaaaaattgttactagaagcttgcttagagttaatggcaggaaaatcaattatatctattcaagatatgggtgccgcaggtttaacttcatctagcattgaaatggcttcaaaaggcaatttaggcattgagttaaatttaaataaagttccatgtcgtgaagaaaaaatgacaccatacgaaattatgctttctgaaagtcaagagagaatgttgattgttttagaaaatggcaaagaaggagaagcaaaaaagatttttgataaatggaatttagattttgctgtaataggaaaaactactgacacaaaaaaaatcgaattattttttaataataataaagaagcagaaattcctataaatatactggcagaaaatgctcctgtttatgatagaaaatggaaaaaaacaaaacttccacaaaaaataaaatttaataaagataattttaagaaattaaaaattactgaagttcttaaaaaaatattaagcttgccaaatatttcaagtaaggaatggatctggcaacaatacgatcatacagtcatgggagatactatccaaaaacctggctcagactctggtgtagtaagagtacatggtaccaataaagctgttgctacaacggtagattcttctgctgtgtattgttatgcccatcccctt

SEQ ID NO: 318327 - DNA, 871 bp, Unknown
  Bacterial polypeptide expressing nucleotide sequence isolated from the Sargasso Sea
aataatatagtcgtcttacacaaagggataatggaagccgatatcccaatcaaatttctcacagataatgccccaatgtacaagagaaaaacaattagcaaaaataaacgaaatcagaaaaatcaattaacttctgatgttaaagtaaaagatgcaatcctaaaattgctaaactctccaaatatatgttcaaaaaaatggatctgggaacagtacgatagaacgataatggcaaacacactaaatgaggcaggcggagatgctggtattgttcgtattgaaaatacgaaaaaggccatagctatgtcgtgcgatgtaacaccaagatattgtaatgcagatgcaaagaaaggtgcatcacaagccgtagctgagtgttggcgtaatataatatcaatgggggccaaacctcttgcaataacgaattgtcttaattttgggaatccagaaaaacctgaaataatgaacgattttgttaaaactattgacggtataagagacgcatcaattgcactcgattttcctgtagtctcaggtaatgtatctctctacaatgaaacaaatggtgatccaataaaaaatacacctacaattggaggcgtcggtctgatagaaaatattgacatattagaaaactttggctctttaaatattgatgactcaatctacatgcttggtaaaaagggtgaacacctcagctgctcagccttcgaagaagtctattataacactgcgtcaaataacccgccagaaatagacctgaatcaagaacagcgaaacggagaagcaatactttcgctaattcaagaaaaaattatcgcatcttgccacgatatatcagacggcggcatgatagttgccatatgcgaaa

SEQ ID NO: 318328 - DNA, 445 bp, Unknown
  Bacterial polypeptide expressing nucleotide sequence isolated from the Sargasso Sea
gatgagaataactaacaaaattatagaaaaacacggtcttaagttagaagagtttgaaaatattaaaaagctaatgaaaagagatcctaatttgctagagcttggaattttttcagctatgtggaacgaacactgttcatataaatcatcaagaatacatctaaaaaaattaccaactaaaggaaaacaagttattcaaggtcctggtgaaaatgctggtgtggttgatattggtgataatgatgcaatagtatttaaaattgaaagtcataaccatccttcatacattgagccttatcaaggggcggctacaggagttggaggtattcttagagatgtattcacaatgggtgctagaccaattgctttattgaattccattcactttggttctccatctcatcctaaaacaaaaagtttattaaatggtgtagtttctgggatc

SEQ ID NO: 318329 - DNA, 541 bp, Unknown
  Bacterial polypeptide expressing nucleotide sequence isolated from the Sargasso Sea
tcagttatatgcggaccaggtgaaaatgcaggtattgtagatgtgggtgataatgattcaattgtttttaaaattgaaagccacaaccatccctcttatttagaaccttttcaaggagccgctactggagttggaggtattttaagagatatttttacaatgggagcaagacctatagcaatactagactccttaagatttggagatataaaagataaaaaacaaagatatttattaaacggtgtggtttcgggtatttcgaattatgggaattgtatgggaattccaactgtcggcggcgaatgttattttaataatgattataataagaatattttagttaatgcaatggcagtgggtttggctaaaagaaacaaactatttttttctaaagcagccggaatcaataatcctgtcatttatgtaggcgctaaaacaggaaaagacggtattcacggagcaacaatggcatctgctgaatttgatgataactcaaagcaaaaaaaaccaactgttcaagtaggtgatccgtttactgaaa

SEQ ID NO: 318330 - DNA, 433 bp, Unknown
  Bacterial polypeptide expressing nucleotide sequence isolated from the Sargasso Sea
aatgaactcgacagtaatagtttttcctggatctaattgtgatagagatatagcggttgccttggaaaaattaaattttaaaaataaaatggtttggcacaaggatacgactcttcctaaatctgatttaattgtaatacctggtggtttttcttatggagattatttaagatctggtgcgatggcggccaaatcaaatattcttaaagaggtggtgagatttgcaaataacgggtgtttaattttaggggtttgtaacggttttcaaattttaattgaagcaggacttttaccaggtgctttattaagaaacaaagaattaaaatttttatcaaaaaatatttttgttaaaattttagataataaaaataaattttgtaataaatataaaaaaaatcaagttattaatttaaatatcgcacataatgaagaa

SEQ ID NO: 318331 - DNA, 673 bp, Unknown
  Bacterial polypeptide expressing nucleotide sequence isolated from the Sargasso Sea
agatggaatacatggtgcaagtatggcttcagctagttttgatgaaaaaattgaggaaaagaaaccaactgttcaagtaggagatccgtttacagaaaaacttttacttgaagcttgtttagagttaatggcaggagactcgattatagctattcaagatatgggtgctgccggcttaacttcttcaagtattgaaatggcatcaaaaggaaaccttggtattgaaattaatttaaacaaagtcccttgtagagaagccaagatgacaccttatgaaattatgctttccgagagccaagaaagaatgttgatagttttagaaaaaggtaaagaggaagatgcaaaaaaaatatttgaaaaatggaatctagattttgcagtgattggtaaaactactaattcaaaaaaaatagaactttattttgatcaagaaaaggttgctgatattccaattaatatcttagttgaaaactctccaatgtatgatcgtagatggaaaaaagcaaaactccctaaaaaaaataagattaaaaaagaagatattaaacatttaaaaattattgatactttaaaaaaaattttagcaaatcctaatgtgtgtagtaaagaatggatttggcaacaatatgatcatactgttatgggagatacaatacaaaaacctggaggagat

SEQ ID NO: 318332 - DNA, 466 bp, Unknown
  Bacterial polypeptide expressing nucleotide sequence isolated from the Sargasso Sea
catgggtctcagcaaaaaagaatatgatttaattttacatttattaggccgtaaccctaatgatactgaacttggaatcttttcagtcatgtggtcagagcactgctcttataagtcttcaaaaaaatggctcaaaaaactgccggttgaagggtcacatgtaatacaaggccccggagaaaacgcaggtgtagttgatataggggatggattagccgtggtttttaaaattgaaagtcataatcatccaagctttatagagccttttcagggagctgctactggagtgggtggcatcttacgcgatgtattcacaatgggtgcacggccaattgcaaatctaaacgctctacgttttggaagcatagaaaatgaaaaaactcgtcatttattaggtggtgttgtcgctgggattggagggtatggcaactgcgttggagtacccaccagttggcggagagatcaa

SEQ ID NO: 318333 - DNA, 387 bp, Unknown
  Bacterial polypeptide expressing nucleotide sequence isolated from the Sargasso Sea
tgcgtaatgcaaatctgaaatttatatgtcgagatataactctgaaagtcgaacaaaacacaaacttatttactagtgaatacaaaagtggtgaaattttaactattcctgtagctcatcatgatggaaattattttgccgaccctgaaactattaattttttagaaaatgatgagcgagtggcctttcgttactgcgactctgaaggtcaaataactaaaagctcaaatccaaatggttcgataaataatattgcgggcatacttaatcgggagggaaatgttttgggaatgatgcctcaccccgaacggctaacagaaaaactattaggtgggatagatggcaaaccttttttttctgctattgctaaggcaattaacttatgac

SEQ ID NO: 318334 - DNA, 693 bp, Unknown
  Bacterial polypeptide expressing nucleotide sequence isolated from the Sargasso Sea
tatggatcttacaggtgacaaagaatttatttatcagcagtatgaccatcatattggtgcaaagacagtattagggcctgaaacccaaggagcatgtgttctttctttagagaattatttaagtcagaatgactatacagctcttgttgttgcaagcagttgcgatcaagattattgtcgcttagaccctaaacaaggtgcttctcatagtgtcgctaaagctgcacgaatgatttcagctactggtggaaagcctttagcaatgactgattgtttgaattatgggaatccagaagatccagaagtaatgtgggagttttctgagggtatagatggaatgagtgaagcctgtgaacaactcggggttcccgttgttagtgggaatgtgagcttatataatgaaaccgatggaaaaagtatttttcctacaccaatgattggtatggtgggtttgcatcacgatagtcgtaaatcagtgagtgctgttgttaagggagaggggacaatatggttattaaagcctaagaatcaaagtcctttttttgcaggttcgctagtagcaaaagtttttaatatcgatgatcagggagagataccaaagattaattgggatgcagaaaaagaatcgcaggagttcttacagcaattgtgtaagcaagaatgtcttatttctgctagagacattggaaaagg

SEQ ID NO: 318335 - DNA, 766 bp, Unknown
  Bacterial polypeptide expressing nucleotide sequence isolated from the Sargasso Sea
ttaaattcaatacattttggatcaactcaacacaaaaaaacaaaaaatttattaagaggagttgttaaaggaattggtggttatggaaattgcattggagtaccaacaattggtggtcaaacctgtttcgacgagtcttataatggaaatattttagtaaatgcaatgacacttggattagtaaataaaaaaaagatattttactcaaaggcagctggtattggtaaacctgtaatttatgttggatcaaaaactgggagagatggaatacatggtgctagcatggcctcagcagtatttgacgataaaattgaggaaaaaaaaccaactgttcaagttggagatccgtttacagaaaaacttttacttgaggcatgtttagaattaatggctgacgattctattatatcaattcaagatatgggtgctgctggattaacatcatcaagcattgaaatggcttcaaaaggtaaattgggaatagaactagacttaagcaaagttccatgcagggaagaaaaaatgacaccttatgaaattatgctatctgaaagtcaagagagaatgcttattgtgcttgagaatggaaaagaggaaaatgcgaaaaaaatatttgataaatgggatttggactttgctgtaattggaaaaacaacaacttcaaaaaaaattgaactttatttcgatagtaaaaaagttgcggatattccaattgattttttagctgaagatgcaccagagtatgatcgtaaatggaaaaaaacaa

SEQ ID NO: 318336 - DNA, 802 bp, Unknown
  Bacterial polypeptide expressing nucleotide sequence isolated from the Sargasso Sea
ggtttaaaatcagaagaatattcaaaaattaaatccttattaagtagagaacccaattatttagaattaggtattttttcagcaatgtggaacgagcattgctcttataaatcatcaaaagtccatttatcaaaattaccaactaaaaacaaaaacgtaatacagggtcctggagaaaatgcaggagtgatagatgtaggtgacgatgatgcaatagtatttaaaatagaaagtcataatcacccatcttttattgagccatatcagggagctgcaacaggtgtaggaggtattttaagagatgttttcacgatgggagcaagacctatcgcattacttaattcaatccactttggtgatccaaataataaaaaaacaaaaaatctacttaatggagttgtttcagggattggtggttacggaaattgtattggaatacctacagtggcaggagaaacaaaatttaatagtacttacaatgaaaatattttagtcaatgcaatggctgttggattagcaaataaaaagaaaattttttattctaaagcaaaaggtataaataaatcagttgtttacgttggatctaaaacaggcagagatggaattcatggtgcatcaatggcatcagctgaatttgatgaaaattctgaagaaaaaaaacctacagttcaggttggggatccttttactgaaaaattactaatggaggcctgtttagagttaatgaagaaggagtcaattatttctatacaagatatgggtgcagcgggcttaacatcatcaagtgtagaaatggctcaca

SEQ ID NO: 318337 - DNA, 898 bp, Unknown
  Bacterial polypeptide expressing nucleotide sequence isolated from the Sargasso Sea
ggtcaaatagataatgtaaaaacgcctcatcttgtttctggtgtagcatctggtattggtagttatggcaattgtatcggaataccaactgtaggtggtgaagttgagtttgacagctcttataatggaaatatccttgtaaatgctatggcagttggtttagcgcatactgacaggattttctattctgctgcatctggtagtggaaatccagtaatctacgtaggagcaaaaactggccgtgatggaatacacggtgcaacaatggcttcaaccgagtttaatgatgaaacagaatcaagacggccaaccgttcaagttggagatccatttaaaggtaaattacttatggaggcatgtctggaattaatggctgcaaatgctgttattgcaattcaggatatgggtgctgcaggactcacttcctcttctgttgaaatggcctcaaaaggcggattgggtatggaaattgaccttgatctggtacctgttagagaaacagagatgtctgcatatgaaataatgctatctgaaagtcaggagcgtatgttgatggtgatagatcctagtcaggctgaaatggctagacaaatatttgataaatgggatcttgattttatgcctatagggcaagttactgaaacaaagagactggttctcattaaagatggactggtaacctgcgatattccgcttgaacccttagtgaataatgcaccagaatatgacagacctcattttacttcaaggatcgagcctcaagcaaacgtggaggaaactcctcaagacgtatcaatttcaaatgccctaagaattcttatcggaagtgaagatttatgttcaagaaaatggatatttgagcaatttgatagccatggttatggcagataccattata

SEQ ID NO: 318338 - DNA, 912 bp, Unknown
  Bacterial polypeptide expressing nucleotide sequence isolated from the Sargasso Sea
gagaaaatgctggtgttattgacattgaggataatgatgcaatagtttttaaaatagaaagtcataatcacccttcatttattgaaccgtatcaaggtgctgcaactggtgttggaggaattatgagagatgtgtttacaatgggtgcaagaccaatagctaacttgaactccatacattttggctctccacaacataaaaaaactaaaaatttattaagaggtgttgttcatggcataggaggttatggaaactgtatgggtgtaccaacaattgccggccaaacaagttttgatagctcttataatggaaatattttagttaatgcaatgacattaggattagtaaaaaaagacaagattttctactctaaagctgctgggctaaacaaaccggttatatatgtaggatctaaaactggtagagatggaatacatggtgctagtatggcttcggctagttttgatgaaaaaatagaagaaaaaaaaccaacagttcaagttggtgatccctttactgaaaaacttttacttgaagcctgtttagagctaatggctggagactcaattatagccattcaagatatgggtgccgctgggttaacatcatcaagtattgaaatggcatctaaaggaaaccttggaattgaaatcaatttaaataaagtaccatgcagggaaactaaaatgacaccttacgaaattatgctctctgagagtcaagaaagaatgttgattgttttagaaaacggcaaagaagaacaagcaaaaaaaatatttgataaatggaacttagattttgcagtgattggaaaaactactaagtcaaaaaaaatagaactttattttgatgaagaaaaagttgcaaacattccagttaataccttggttgaaaactctccttatgtatgat

SEQ ID NO: 318339 - DNA, 658 bp, Unknown
  Bacterial polypeptide expressing nucleotide sequence isolated from the Sargasso Sea
tttacggtaggaattgttgtctttcctggttctaattgtgatcgtgatgtttcatgggcattggaaggttgtttagacataagaacaaaatacttgtggcatgagtcctcagatttaagcgatgtagatgcaatagttttacctggaggatttagctatggtgattatttaagatgcggcgcaattgcaagattctctccattaataaatgccttggatgagtttgttaaaagcggaaaaagagttttaggaatttgtaatgggtttcaaattttgacagaatcaggctttttgcctggtgcccttactgcaaataaaaatcttaatttcatctgtgatgatgttgaacttgatatcatttcttcaaaaggaggttggtttaataatggaggtgaaaaacaaacaattaagttgccaatagcgcatggggaaggaagatatcattgtgattctgatactttaaaaaaacttgtagatgatgaattgatcgctttgagatataaaaataatcctaatggatcctcattcgatattgcaggtataactaatgaaaagggaaatgttctaggtttaatgcctcatccagagcgtgcatgtgacgagacaattggtgggactgatggtctctttacattaaaatcattaatattgaaataaa

SEQ ID NO: 318340 - DNA, 679 bp, Unknown
  Bacterial polypeptide expressing nucleotide sequence isolated from the Sargasso Sea
aatgaaatcttctgtaatagtttttccaggatctaattgtgatagagatattgcagttgctttagagaaaatgcaatttaaaaataagatggtttggcacaaagagagaagcttaccaaaatctgatttgatagttatacctggtggtttttcctatggagattatttaaggtctggagctattgctggtaaatctgaaataattgatgaagttgttaaagttgctaattcaggatgtttagtattgggagtctgcaatggatttcaaattttaacagagacgggtttgcttaaaggaacattacttagaaataaaaatttaaaatttatcaataaagatgtgaatataaaggtaattaataatcaaactaaatttacgaaaaaatataaatcagatcagattttgaaaattaatatagcgcataatgaaggtaattattttacagataaaaatcatttaaaagaattaaaagaggaaaacttaattgcgtttaaatattgtgacaacaaaggtactattaataaagattctaaccctaacgggtcaatagaaaacattgctgggatttttaattcaagaaaaaatatattaggtatgatgccccatccagaaagaatgattgatggtcttatctcaaatactgacggtgaaaatttattttcaagtttacttaattaa

SEQ ID NO: 318341 - DNA, 881 bp, Unknown
  Bacterial polypeptide expressing nucleotide sequence isolated from the Sargasso Sea
agatggtattcatggcgcctcaatggcatccgcagaatttgatgaaaactctgaagaaaaaaaaccgacagttcaagttggagatccttttacagaaaaattacttttagaagcttgcttagaattaatgaaagatgactcaattattgccattcaagacatgggagctgcaggattgacatcttctagcgttgagatggcttcaaaaggttctcttggtattgaacttgagttggacaaagttccttgcagagaggagaatatgacaccttatgaaatgatgttgtcagagagccaagaaagaatgttaattattttagaagacggtaaggagagtcatgcaagaaaaatttttgaaaaatgggatttagactttgtagtaattggaaaaactacaaatacaaagaatttaattatgaaatttaaaaataaaattgaaggaattatacctatagaggctttagcttcaaaagcaccaatttacgacaggaaatggagtaaaaaaaagcaatcaaagaaaaaaatagaattaaaatctttaaaaaaagttggattagaagagggtttaattaaaattttatcgtctccaaatcactctaataaaagttgggtaacaagccaatatgatcagatggtcatgtgtgatactgcacaaagatcaggttcggatgcggctgtaataagaattcacaaaaaaaataaagcaatagctgtttcagtagactcctcagctaactattgtaaatcccatccgataactgggggaaaacaaatagtttgtgaaaattggagaaatatcatttcagtaggagcaagacctcttgcaattactaattgcttaaattttggtaatcctgaaaatagtgaagttatgggtgaat

SEQ ID NO: 318342 - DNA, 307 bp, Unknown
  Bacterial polypeptide expressing nucleotide sequence isolated from the Sargasso Sea
acaattacaaaagatcaaatagaatcacatggtttaaaacttgatgaatataataagataaaaaaactgttaggtagagaggctaatctattagagctgggaattttttcagcaatgtggaatgaacattgctcttacaaatcgtcaaagatacatcttaaaaaattacccacaaaaaataaaattgttatacaaggtcctggagaaaatgctggggttattgatattggagatgacgatgcaattgtttttaaaataaaaagtcataaccatccttcgtttattgagccttatcaaggagcggcta

SEQ ID NO: 318343 - DNA, 640 bp, Unknown
  Bacterial polypeptide expressing nucleotide sequence isolated from the Sargasso Sea
tatcaaggtgctgccacaggagttggtggaataatgagagatgtgtttacgatgggggcaagaccaatagctaatttaaattcaatacactttggttcaacacaacataaaaaaaccaaaaatctccttagaggtgttgtgcatggaataggaggctatggaaactgcatgggagttccaaccattgcaggacaaacaagttttgatagctcttataatggaaacatcttggttaacgcaatgaccttgggattagtgaagaaagataagattttttactcaaaagcagctggtttaaataaacctgtaatatatgtaggatctaaaacaggtcgtgatggtattcatggtgcaagtatggcgtctgctagttttgatgataaaattgaggagaaaaaaccaacagtacaagtcggtgatccctttacagaaaaacttttgctagaagcatgtctagaattaatggcaggagactcaataatcgctattcaggatatgggagcagcaggtttaacttcttcaagcattgaaatggcttcaaagggaaatcttggaatagaaattaatttaaataaagtgccatgtagggaaacaaaaatgaccccttatgaaatcatgctttctgaaagtcaggaaagaa

SEQ ID NO: 318344 - DNA, 574 bp, Unknown
  Bacterial polypeptide expressing nucleotide sequence isolated from the Sargasso Sea
atgcccaaaagtgacttaattgtcttgccaggtggattttcttacggggactatcttagatgcggaagtatagctggaaagtctaaaattattcaatcagttatagattttgcaaattctggaggtttggttttaggaatttgtaacggatttcaaatcttaacagaaactggtctgttaaagggagttctccaacaaaataaaaatattgaatttatttgtaaaaatgtatttgttaaaattaacaatagtgaaaacaaattttttgaaaatatagataaaagagtcttagaacttcatatagctcataatgaaggtaactatttttgtagtgaagacgaattaaagtcattagaggataacaatcaaattgcagcttactattgcagctctgatggaaaagtagacgataagtcaaatcctaatggtgcaataaaaaatattgctggaatatttaatgaaaagaaaaatattttaggaatgatgcctcatcctgaaagaatgatagataaatatttgtctggtgaagacggttcaaaattttttgaaaatttaattagaaatttgaaataat

SEQ ID NO: 318345 - DNA, 334 bp, Unknown
  Bacterial polypeptide expressing nucleotide sequence isolated from the Sargasso Sea
atggaagtaaatgaaaaaattgctgtagaacatggtcttaaacctgatgaatatcaaaaaatttgtgatttattaaaacgtgttccaaatttaaccgaacttggaattttttcagcaatgtggaatgaacattgttcttataaatcttcaagattacatttaaagaaattaaatactaagggtaaaaaagtaattcagggcccaggtgaaaatgctggtgtgattgatattggagatgaagatgcaatagtttttaaaattgaaagtcataaccacccatcgtttatagagccctaccaaggtgctgcaacaggtgttggtggaattatgagag

SEQ ID NO: 318346 - DNA, 661 bp, Unknown
  Bacterial polypeptide expressing nucleotide sequence isolated from the Sargasso Sea
tatctgagtctgggtctgagcgattctgaatatcaacttgtttgtgaattgctgggccgaaaaccgaatcttaccgaaactgggatctacggggtaatgtggtcggaacactgcagctacaaaacatctaagatgcaactctcccgcttccccaccgagggaccgaatgtacttcaaggtcctggtgaaggtgccggagtcgtcgatttgggagatggctgggccgtggttttcaaagtcgaaagtcataatcatccctcggcaatcgaaccctatcagggtgcggctactggagtcggtggaatcctgagggacatttattccatgggagcaaggccggttgcttttctcaattcattgcgtttcggacccttgtccgacaaaaaagatccaggctctccgaccagcaaacgcaaccaatacctttttgctggagtggtagcaggaatcgctggatacggcaactgtatcggagttccaactgttgcgggagaagtcggcttcgattcatgctactccgggaatcctctggtgaacgcaatgtgtgtgggagtgatccggcatgaggacttgcagcatggccgagccgagggcatcggcaatcctgtgatttatgtgggtgctgctactggaagagatggaatccatggcgctacgttcg

SEQ ID NO: 318347 - DNA, 858 bp, Unknown
  Bacterial polypeptide expressing nucleotide sequence isolated from the Sargasso Sea
ccgtttactgaaaaactattattggaggcctgccctgagctgatggctggtaactctataatagcaatacaagatatgggcgctgcaggtttgacatcatcaagtgttgaaatggcatcaaaaggtaaattaggaattgaacttaatctaaacaaagtaccttgtagagaggaaaagatgacaccatacgaaataatgctttcagaaagtcaggagagaatgttaatcgttttggaaaatggtaaggaagatcatgcaaaaaaaatttttgataaatggaatttagattttgctgttataggaaaaacaacaaatacaaaaaaaatagatttatttttcaacaataaaaatgttgcatctataccaattgattttcttgcagaagatgcgcctgtctatgatagaaaatggaaaaaaacaaaattacctcaaaaattaaaatttgataaacaacaatttaaatctttaaatttatcagattgtttaaataaaattttatctagtccaaatgtttcagataaaaaatggatttgggatcaatatgatcatacagtaatgggtgatactatacaaaaaccaggtggagatgctggtgttgtaagagtacatggtacttcaaaagcagttgctgcatctgtagatgcgtctgcaacatactgcttttcacatcctttaacaggtggaaaacaaattgtatgtgaaagttggagaaatctaatatctgttggtgcaaaaccaatagcaattacgaattgtttaaactttggaaacccagaaaaagaaaaaaatatgggagaatttgttgaatgtgtagaaggtataactgaagctagcaaatacttagattttcctgtcgta

SEQ ID NO: 318348 - DNA, 365 bp, Unknown
  Bacterial polypeptide expressing nucleotide sequence isolated from the Sargasso Sea
aatggaagtaaatgaacaaattgcaatagatcatggtttaaagcccgatgaatacaaaaaaatttgtgatttgttaaagcgcgttccaaatttaacagaacttgggattttttcagcgatgtggaatgaacattgctcctataaatcttcaagattacatttaaaaaaattaaatactaagggtaaaaaagtaattcaaggcccaggtgaaaatgctggaattattgatattggggatgacgatgcaatagtttttaaaatcgaaagtcataaccacccctcatttatagaaccttatcaaggtgcagcaacaggagttggtggaataatgagagatgtttttacaatgggtgcaagaccaattg

SEQ ID NO: 318349 - DNA, 841 bp, Unknown
  Bacterial polypeptide expressing nucleotide sequence isolated from the Sargasso Sea
tctgaaaggcacttgctttccaaccgatgtaacaccccggtactgttacgcaaacccatacgagggaggaaaacaggcggtcgctgaggcatataggaacttaatcgccagcggagcagagccgatggcacttacagacaatttaaattttgggaaccctgaaaataaaaaagtaatgggacaattagtgttttgtgttaaaggtattgccgaagcatcacgtgaattaaatatgcccgtagtttcaggtaatgttagtttatataacgaaactgatggtaaagcaattatgcctacgccaaccattggtgctgttggattaatcaacaactatcttgaaagaatacccatgtataaaacaggagagaatgttttaattatgcttgggaaaactagcggccacataaaccaatcggcgctaaaaacagaaattttaaatgatcgtattggggatgctcccagagtaaatttacgggatgaaaaaaaagcaggtattttcattttgaaatgtaataaattaggtttgatcgaagcagcacatgatttgagtgatggcgggttaatactagccgcagcagaaatggcaatttcaggaaatgttggtctacacttatattccagcgatatatccttgtgctttgctgaggatcagagcagatatctattagcatgcactcaagaaaatttaaataaaatttatcaacttgccgccgaaagtgagattaatatagaagaaattggtgttaccggaggagagtttttcatggttgggcgagaaaaaatctgtcttcaaactttgaaagaagcttatgccacagggttaacaaaattaattaattaa

SEQ ID NO: 318350 - DNA, 847 bp, Unknown
  Bacterial polypeptide expressing nucleotide sequence isolated from the Sargasso Sea
tatggctttaggacttttagagactaataaaattccgtttgttcttggagctaaaaatataggatcaccagtattatatgttggtaatactactggcagagatggagttggtggcgctagttttgctagctcagaattaactgcaaactcattagatgatagaccagcagttcaggtaggggatccattcattgagaaaagccttattgaagcttgtttggatgcttttaaaacgggagacgtaattgcagctcaagatatgggtgctgcaggtttaacatgcagtagtgcagaaatggctgcaaatggaaatttaggtatatctattgatttagatttagttccctctagagaagatgatatgtctccataccaatatttattatctgaatcgcaagagagaatgttgtttgtcgttaaagaagaaaaagttaatgatctcattgaaaaatttaataaatggggattatttgccaatgtaattggtcaagtaataggaactaatgaggtagttatttctcataaaggtgaaattgttgcccaaatacctacttctgccttatctgatgatactcctgtcaattttcacaatgtaatgactaatccacctgatcatcttttaaagaaatgggaatggaaagaaaatgatttaccagaaattcatgagcaaaaaatattttcattaaaggaaaataagaatttttcttattcagaaattattttaaaactactctctaatccctcaatagcttctaaacgatggatttataaacaatatgactcgcaagtgcagtcaaatacagtttttaaaccaggaaaatcagatgcagctgtaataagattaagg

SEQ ID NO: 318351 - DNA, 955 bp, Unknown
  Bacterial polypeptide expressing nucleotide sequence isolated from the Sargasso Sea
atggataaaacctaagaaagttaaggatttaaaaagaattatttttccaaaaaaaaataaacttaaagaggtaattttaaaactgttaaaaagtccgaatttaactagtaaaaaatggatttgggaacaatacgatcatatggttatgtgtgataccattaaacctcctagttatggtgctgcaataataagagttcatggtacagagaaatctttagcaattacaactgattgcaactcaaattattgtaaacatgatccttttataggtactgaacatgcagtaagtgaagctagaagaaatattatatctacaggggctactcctttagcaataaccaataatttaaatttcggtaatccagaagataaaagtatcatggggcaatttgttatgagtgttaagggaatgataaattcatgcaaaaaatattctcttccagttatttcaggaaatgtttcattgtataatgaaactaatggtattggaatttcaccaacgccagttatcggtatggttgggttactaaaaaataaaaattatgtagacaatatcttgcttaaagaaaatgataaaatttatttaattggaaaaaaaacaaataatatttcatgttcaaactttttagaaataatttaccaaaaaaataataaaaatctcggacctccgccaaaagttaattataatgaagaaataaataatggtaattttgttacaaacttgttcaaaaataaattaattaaatgttgtaatgatatttctagtggaggactaattacatctttattaaaaatgttaattaataaaaaatttggagctgaaattaataaaaattttgtaaataaaaatataagcaatgaaactttttataaattattatttggtgaaaattctggaaattatgttgtggtaactaataatgaagtagaaattaaagaagcagcgaaaaagaat

SEQ ID NO: 318352 - DNA, 673 bp, Unknown
  Bacterial polypeptide expressing nucleotide sequence isolated from the Sargasso Sea
aatgaatgagcctggcataaccaaagaacttattgaattacacggtttaaagtcagacgaatacgatttaattttaactattattaatagagagcctacattcacggagttaggtattttttcagcaatgtggaatgaacattgttcttacaaatcttcaaagaaatggcttcgaactttacctactgagggccctcaagttatttgtggaccaggagagaatgcaggaattatcgatattggtgataaccaggctctggtttttaaaatggagagccacaatcatcctagctatatagagccataccaaggagcagcaacgggcgttggaggaattctccgagatgttttcacgatgggtgctcggccaatcgcggtcatgaattctttgagttttggtgacataaatcattataaaacaaatcaacttgtgaacggtgtagtatccggcattggtggatacggaaactgttttggtgtccctacagttggaggtgaaacaagatttgactcatcttataatggaaattgtttagtcaatgcatttgcagcaggtttggttgataaagataaaatattctactcagcagcttctgggatcggtatgccagttgtatacctcggagcaaaaactggacgcgacggagtgggtggcgcaaccatggcgagtgct

SEQ ID NO: 318353 - DNA, 595 bp, Unknown
  Bacterial polypeptide expressing nucleotide sequence isolated from the Sargasso Sea
gtttggcatgatgaaataaatttaccaaaaagtgaccttatagtattacctggtggcttttcttatggcgattatttaagatgtggaagtattgctggaaaatcaagaataattaaatctgtcatagattttgctaattctggtgggttggtattaggaatttgtaatggttttcaaatattaacagaaactggtttattgccaggtgttctccaacaaaacaaaaatttagaattcatatgtaaaaatgtttttattaaaatcagtgatttaaataataaatattttaaggatatcaaaaaagaaattttagaacttcatatagcacataatgaaggtaattatttttgtagttctgatgagctaaaatcaattcaggataattcccaaatagcagtaaaatattgtgataagaatggcaaaacctcggaggatagcaatccaaatggtgctttaaataatatagcaggaatttttaataagaaaaaaaatatacttggtatgatgccacatcctgaaagaatgatagataaatatttatctggtgaagatggatcattattttttaaaaatcttttaggaaatttaaaatgaa

SEQ ID NO: 318354 - DNA, 604 bp, Unknown
  Bacterial polypeptide expressing nucleotide sequence isolated from the Sargasso Sea
tattttttcggctatgttttcagaacattgttcttacaaaagttcaaaaaaatggcttaaaactatgcctactaaagcaaagcacgtaattcaaggaccaggtgaaaatgctggggtcatcgatattgggaacaacttagctgctgtctttaaaatagaatctcataaccatccgtcatttatagagccttatcaaggagctgcaaccggtgttggggggattttaagagatgtttttactatgggtgcaagacctattgctttattaaatgcattaagatttggttctccatcagaactcttaacaaaacatcatgtgtcaggagtagtaaaaggaattggaggatatggaaattgtattggtattcctacagttggaggagaaacaaactttgataaatcatatgatggaaatatcttagtaaatgcaatggcagttggcctcgcaaataaaaatagaatattttactcagcggcaactggggccggcaaccctgttatttatgtaggagccaaaactggaagagatgggatacatggcgccacgatggcatcaactgaatttacagataatagttctgaaaaaagaccaacagttcaagta

SEQ ID NO: 318355 - DNA, 826 bp, Unknown
  Bacterial polypeptide expressing nucleotide sequence isolated from the Sargasso Sea
aatgaatgtgaacgaacaagtagctattgatcatggtcttaaaaaagaagagtacgcaaaaatttgtaaacttcttaaaagaactcctaatattactgaacttggtattttctcagctatgtggaatgagcattgctcgtacaaatcatcaagacttcatttaaaaaaacttccaactaaaggtaaacatgttattcaaggcccaggagaaaatgcaggtgttgttgatattggtgataatgatgcaatcgttttcaaaatagaaagtcacaatcatccatcatttatagagccttatcaaggagcagcaactggagttggtgggattatgagagatgtatttacaatgggtgcaagacctattgctaatttaaattctattcattttggttctccacagcataagaaaactaaaaatttacttagaggtgtagttcatggtattggtggttatggtaattgtatgggggtaccaacaatcgcagggcaaaccaatttcgatagctcctataatggtaacatcttagttaacgcaatgactttaggcctagttaaaaaagataaaattttttactcaaaagcagctgggttaaataaacctgtaatttatgttggttcaaaaactggtcgagatggaattcatggtgcaagtatggcttcagcaaattttgatgaaaaaattgaagaaaaaaaacctactgtacaagttggtgatccatttacagaaaaactattgttagaagcatgccttgaattaatggcgggagactcaattattgctattcaagatatgggtgcagctggtttaacctcttctagtattgaa

SEQ ID NO: 318356 - DNA, 825 bp, Unknown
  Bacterial polypeptide expressing nucleotide sequence isolated from the Sargasso Sea
aagggaaaaaaagtaattcaaggccctggtgaaaatgctggtgtcattgatattggagatgatgatgcaatagtttttaaaattgaaagtcacaaccatccttcatttatagaaccctaccaaggtgctgcaactggtgttggtggtataatgcgagatgtttttacaatgggtgcaagacctattgcaaatttaaattcaattcattttggttcgacacaacataaaaaaactaaaaatttattaagaggtgttgttaaaggtattggcggctatggaaattgtataggagttccaactatagctggtcaaacttgttttgatcaatcttacaatggaaatattttagtaaatgcaatgacattgggattagttaataaaaataaaattttctactcaaaggcagcaggaataaataagccagttatatatgttggatcaaaaactggaagagatggtattcatggagcaagtatggcatcagcaatatttgatgacaaaattgaagaaaaaaaaccaaccgttcaagttggagatccttttacagaaaaacttcttttagaagcttgcttagaattaatgtctgataaatcaattattgcaattcaagatatgggcgctgcaggtttaacttcttcgagcattgaaatggcatcaaaaggaaacttaggaattgaattaagtttagataaagttccttgcagagaagaaaaaatgacgccctatgaaattatgttatctgaaagtcaggaaagaatgttgatagttttagaaaatggtaaggaagatagtgccaaaaagatatttgataagtggaatttagat

SEQ ID NO: 318357 - DNA, 843 bp, Unknown
  Bacterial polypeptide expressing nucleotide sequence isolated from the Sargasso Sea
attgaaccataccagggtgctgcaactggagttggtggtataatgagagatgtttttactatgggtgctaggcctatcgcaaatttaaattctatccattttggttcaccagatcatgaaaaaacaagaaatttattgagaggagtcgttaagggtattggtggatatgggaattgcattggtgttccaactatagctggtcaaacttgttttgatgagtcttacaacggaaatattttagtaaatgcgatgaccataggtttggtcaataaaaataaaatatttttttcaaaagctgcgggtataaataagcctgttatttatgtagggtctaaaactggaagagatggaatacatggtgcaagtatggcttcagctattttcgatgataagatagaagaaaaaaaaccaactgttcaagttggtgatccatttactgaaaaacttcttcttgaggcatgtcttgaactaatggctggaaaatcaataatttcaattcaagatatgggagcagccggtttaacatcttctagtattgaaatggcttctaaaggggatttaggtattgaaattgatttaacaaaggttccttgcagagaagaaaatatgacgccttatgaaattatgctatcggaaagtcaagagagaatgttgattgtattagaggaaggtaaagaaagtgaagcaaaaaaaatatttgataaatggaatttagattttgctgttataggaaaaactacagacagcaaaaaaatagaattattttatgaaaatgaaaaggttgctgaaatcccaattaattttttagctgagaacgctcctatgtacgatcgagaatgggct

SEQ ID NO: 318358 - DNA, 571 bp, Unknown
  Bacterial polypeptide expressing nucleotide sequence isolated from the Sargasso Sea
attccaaagagtgatttaattgttttgccaggaggtttttcttacggagattatcttagatgtggaagcattgctggtaaatcgagaattattaaatctgtgattgattttgcaaattctgggggattagtgcttggtatctgtaatggctttcaaatactaactgaaacaggcctactacctggaatacttcaacaaaataaatacctaaactttatttgtaaaaatgtttttgtaaaaattaaaaataaagaaaataaatattttaaaaacattaaaaaagaagttttagaacttcatattgctcataacgaaggaaattacttttgttcaaatgatgaattaaaatcaatagaagataatggacaaatagcggttacctattgtgacgataaaggaaatgataatgaaaataataatcctaatggggctattcaaaatatagctgggatattcaataaagataaaaatattttgggaatgatgcctcatccagaaaggatgattgatcctttcctttcgggtgaagacggatcactattttttgaaaatttaataggtagtatgtaat

SEQ ID NO: 318359 - DNA, 757 bp, Unknown
  Bacterial polypeptide expressing nucleotide sequence isolated from the Sargasso Sea
atggaagtgaatgaaaaaattgctatagaacatggtttaaaaaaagaggagtttaaaaaaatttgcaatcttttaaatagaaatccaaatattacagaacttggcatattttctgctatgtggaatgaacactgttcttataaatcttcaaaaattcatttaaaaaaactaaacacaaaaggtaaaaaagtgattcaaggacctggggaaaacgcaggtgttatagacataggtgatgatgatgcaatcgtatttaaaattgaaagccataatcatccttcttttattgaaccttaccaaggtgctgctactggagtaggaggaattatgagagatgtgtttacaatgggtgccagacctattgcaaatttaaattctatacattttggatcacctcaacataaaaaaacaaaaaatttgttaagaggagtagttcagggaattggtggctatggaaactgtatcggtgtaccaacggttgctgggcaaacatgttttgatgaatgctacaatggaaatatattggtaaatgccatgaccgtaggtttggtaaataaaaataaaatattttattctaaggccgctggcataaataagcctgttatttatgttggttcaaaaactgggagagatggaatacatggggctagcatggcttcaactatttttgatgagaagattgaggaaaaaaaaccaactgttcaggttggagatccttttactgaaaaattactattagaagcttgcttagaactta

SEQ ID NO: 318360 - DNA, 906 bp, Unknown
  Bacterial polypeptide expressing nucleotide sequence isolated from the Sargasso Sea
taagttggtaggaaatcttccaattaaacctcttgctgactcttctccagaatacgatagaccatctgaaaagccaaaattgaaaaaaaaaagaagaaatcaaaaaaatctttcaattgaagaagccttaattaaaattatctctagtccaaaccactcatctaaagaatgggtatataatcaatatgacagatcagtaatgtgcgacactattctctcttctgaacaaggtgatgctgctgttgttagagttcataattcaaataaagctatatccataacatgtgactgtaatccagtgttttgtgaatctgatcctttattaggtgctgctataggagtagctgagtcgtggagaaatcttattgcttctggagcagaaccaattgctattacagataatttaaattttggaaatcctgaaaaaaaagagatcatgtatcaaattaaacaatcgataaaaggaattaaaatagcatgcgaagctttgaattatccagttgtttcaggtaatgtatctttgtacaatgaaaccaaaaaaaaatcaatttttcctactccagtaattggtggagtaggtttaataaaaaatataaatcatgccaagggtttcagaataaatgaacgagataaaatttatctagtgggtgaatcaagtggtcatttagaattatcagaatataatagaatgtgtaataactttgatggttgtccaccttcattaaatttaaaaaaagaacttaaaaatggtctttttgttcaaaagtttattcaaaaatacaataatattgtgagcggttgtcatgatatttcagatggtggaataattttagcacttgctgaactagccatcaggaataaaaaaggattaagaatccaatcaaagaagagcctcaaagatctaaa

SEQ ID NO: 318361 - DNA, 685 bp, Unknown
  Bacterial polypeptide expressing nucleotide sequence isolated from the Sargasso Sea
atgaaatcatcggttataacctttcctggttcaaattgtgatcgagacatggatgtagctcttacaaaatttggatttaaaaacaaaatggtttggcataatgatcaagaattgcccaaaagtgatttaattgttttgcctggtggtttctcttacggtgactatttacgttgtggcagcatggcctcaaaatcaaaaataatgaattcagtaattaattttgcaaaatctggtggattggtaatgggaatttgtaatggttttcaaattttggttgaggctggattagtaccaggggtattattaagaaataaatatcttcagtttatttgtaaaaatgtccacgtaaaagtagataataaagaaaacacctttttcaaaaatcttgataaaaaagttttggagtttcacatagcccataatgagggtaactatttttgtacaaatgatcaactaaaagagattgaagataataatcaaatagcaatttattattgtgatcaaaatggcaatacaaatgatcaaataaatcctaatggttcaataaaaaatattgcaggtatttttaacaaagaaaaaaacgttttaggaatgatgcctcatcctgagagaatgatagatgaaagtttatctggagaagatggatccatcttttttaaaaatcttttaaataatattaaataat

SEQ ID NO: 318362 - DNA, 757 bp, Unknown
  Bacterial polypeptide expressing nucleotide sequence isolated from the Sargasso Sea
atggaagtaaatgaaaaaatagcaattgatcatggtttaaaaaaagaagaatttaaaaaaatttgtgatctattaaaaagaacaccaaatataactgagcttggaatattttcagcaatgtggaatgagcattgttcttataaatcttcaagaaaacatttaaaaaatcttcatacaaaaggaaaaaaagtaattcaaggacctggtgaaaatgctggtataatagatattggtgacgacgatgcaattgtatttaaaattgaaagtcataaccacccatcatttatagaaccttatcaaggtgcagcaacaggtgtaggtggtattatgagagatgtttttactatgggtgcaagacctatagcaaatttaaattctatacattttggttcaccacaacataaaaaaactaaaaatcttttaagaggtgttgtaaaaggaattggtggatatggaaattgtattggagttcctactatagctggtcaaacttcttttgatgaatcttataatggtaatattttagttaatgcgatgactttaggtttagtaaataaaaaaaaaattttttattctaaagccgcaggtatagataagtctgtaatatatgttggatctaaaactgggagagatggcatacacggtgctagtatggcatcagcaatttttgatgataaaatagaagaaaaaaaacccacagtccaagttggagacccatttacagaaaaattattattagaagcttgttttggagtta

SEQ ID NO: 318363 - DNA, 700 bp, Unknown
  Bacterial polypeptide expressing nucleotide sequence isolated from the Sargasso Sea
ttgataaaagataaaatattctactcagcagcttctgggatcggtatgccagttgtatacctcggagcaaaaactggacgcgacggagtgggtggcgcaaccatggcgagtgctgaattcgatgatacaattgaggaaaagcgaccgacagttcaagtaggtgacccttttaccgaaaaacgtttgatggaagcctgcctagaacttatggcgacaggtgcggttatttcaattcaagatatgggagctgcaggcctcacttgttcggctgtagaaatgggagacaaaggcgatttaggaattagtttagatctagaaaaagttccaactcgagagcctaatatgagcgcctatgaaatgatgctttctgaaagccaagagcgaatgctgatggttttggacccaaaaaaagaaaacatagcaaaaacaatttttgataaatgggatttagattttgctattgtaggtgagactatttcagaggacaggtttctcataaaattagacggtattgtaaaagctgatcttcctttaaaggcactcgcaggtaatgcacctgagtacgacagaccatggattgaagcgcagcctagcaatgagttaaaggatgttgtggagataaacgcaattgatggcttaaaggctttaatttcatccgtaaattactgttcaaaaggttggatttacgaacaatatgaca

SEQ ID NO: 318364 - DNA, 769 bp, Unknown
  Bacterial polypeptide expressing nucleotide sequence isolated from the Sargasso Sea
acaaaattcaacagcacatacaatgagaatatacttgttaatgcaatggctgttggtttggtaaataaaaaaaagattttttattctaaagccaaaggtattaataaagctgtagtttatgttggatctaaaacaggaagagatggaattcatggagcctcaatggcatcagcagaatttgatgaaaactctggggataaaaaaccaacggtgcaagtaggtgatccatttactgaaaaacttctaatggaagcttgtttagaattaatgaaaaaggactctataatctctattcaagacatgggtgcagcaggtttgacatcgtcaagtgttgaaatggcttacaaaggaggtttaggaatagaattagatttggacaaaattccttgtagagaagagaatatgagtccctatgaaatgatgttatctgaaagccaagaaagaatgttaattatcttagaagacggtaaagaaaatgaggcaagacaaatatttaaaaaatgggatttggactttgtcgtaattggtaaaacaactgatactaaaaatttatctttaaaatttaagaatgaggtcgtagcatcaattcctataggagcattgtcttcaaaagcgcctttatatgacagaaaatgggtcaaaaaaaaattagataaaaaaaaaattaatataaaagaacataaaaaaattaaatttgataaagctttttttgaacttatatcttcccctaatcattcaaacaaaaaatgggtgaccgagcaatatgatc

SEQ ID NO: 318365 - DNA, 898 bp, Unknown
  Bacterial polypeptide expressing nucleotide sequence isolated from the Sargasso Sea
tataaatcatcaagattgcacttaaaaaatttacccactaaaggaaaaaaagttattcaaggaccaggtgaaaatgctggggttattgatattggagatgatgatgcaatcgtcttcaaaattgaaagtcataatcacccatcatttatagagccgtatcagggtgctgccaccggtgtcggtggtattatgagagatgtttttacaatgggtgctaggcctatagcgaatttaaattctatacactttggttcacctcaacataaaaaaactaaaaatttattaagaggtgttgtccaaggaattggtggatatggaaattgtattggtgttcctacagttggtggtcaaacctgctttgatgagtcatataatggaaatatcctggtaaatgcaatgactttaggattggtaaaaaaaaataaaatattttattcaaaagcagcaggtataaataagccggtaatttatgttggatcaaaaactggacgagacggaatacacggagcaagtatggcctctgccgtttttgatgaaaaaatagaggaaaaaaaacctacagttcaagttggagatccttttacagaaaaacttcttcttgaagcttgcttagaattaatggctggtgactcaataatatctattcaagatatgggtgctgctggtttgacttcatcaagtatagaaatggcttctaaaggtaaattaggtattgaacttaacttaaacaaagtaccatgtagagagtctaacatgacaccctacgaaatcatgttgtcagaaagtcaagagagaatgttaattgttttagaaaaaggtaaagaaaatcaagcaaaaaagatttttgataaatggaatttagatttttctgtaattggaaaaactactaacactaaaa

SEQ ID NO: 318366 - DNA, 751 bp, Unknown
  Bacterial polypeptide expressing nucleotide sequence isolated from the Sargasso Sea
ggtgtaggaggaattttaagagatatatttaccatgggtgccaggccaatcgcagtattgaattcattgagattcggaaaccttgatagatcatcaaatgttgatttattgcggggtgttgtatcaggtattgcccattatggaaattgtgtcggtgtaccgactgttggaggtgaaatcgacttcgatgatagttattctggaaatcctttagtgaatgttatggctttaggtcttttagagactaatgaaatcgtttgttctggagctaaaaatataggatcaccagtattatatgttggtaatactactggcagagatggagttggtggtgctagttttgctagctcagaattaacttcaacttctttagatgatagaccagcggttcaggtgggtgatccatttattgagaaaagtcttattgaggcttgtttagatgctttcaaaacaggagatgtaattgcagctcaagatatgggtgctgcaggtttaacgtgcagtagtgcagaaatggctgcaaatggaaaattaggtatatctattgatttagatttggtcccttctagagaagatgatatgtcctcataccaatatttattatctgaatcgcaagaaagaatgttgtttgtcgttaaagaagaaaaaattaatgatcttgttgaaaaatttaataaatggggattatatgccagtgttattggtgaagtaataggaactaatgaggtcattatttctcataaaggtaaaa

SEQ ID NO: 318367 - DNA, 477 bp, Unknown
  Bacterial polypeptide expressing nucleotide sequence isolated from the Sargasso Sea
tatggttaatgaaaaaattgcaattgaacatgggttaaaaaaaaaggagtacagtaaaatttgtgatttattaaaaagaacacctaatattactgaacttggaattttttcagcaatgtggaatgaacattgttcctacaaatcatcaaaaattcatttaaaaaatttacccacaaataatgataaagttattcaaggtcctggggaaaatgcaggcataatagatattaacgataatgatgctatcgtatttaaaatagaaagtcataaccatccatcttttattgaaccataccaaggagcagctactggcgttggtggaattatgagagacgtatttacaatgggagcaagacctatagcaaatcttaattcaattcattttggatctcctgaacacaaaaaaactagaaatttgttaagaggtgttgttcgtggaataggtggatatggaaactgtatgggtattccaacaat

SEQ ID NO: 318368 - DNA, 886 bp, Unknown
  Bacterial polypeptide expressing nucleotide sequence isolated from the Sargasso Sea
aatgccgtttgatgtggccgccgctctccgccaggagggacttaccgaggacgattacctggagattcagcgtcgtcttggtcgagatcccaaccgtgcggagctggggatgtttggcgtgatgtggtcggagcactgctgttatcgcaattcccggcctctgctcagtggtttccctacggaaggaccgcgcatcttggtggggcctggagagaacgcaggagtggtggatctcggtgatggccatcgccttgccttcaagatcgaaagccacaaccatccctctgctgtggagcccttccaaggcgcagccactggtgtgggtggcattctccgagacatcttcaccatgggtgctcgcccgatcgccctgctcaatgcccttcgcttcgggcccttggaggaaaccagcacccgcggtctcgttgagggtgtggttgccggcattgcccattacggcaactgcgttggcgtgcccaccgtgggaggagaggtggcgttcgatgcctcctacagcggcaatcccctggtgaatgccatggctttgggcttgatggagaccgacgacatcgtcaagtccggcgcctccggtgtcggtaatcccgtcgtctatgtcggcagcaccaccggtcgtgatggcatgggtggagccagtttcgccagtgctgaactaagtgctgcttctttggatgaccgccctgctgttcaggtgggtgatccttttctcgagaaaggtttgattgaagcttgtctggaggcgttccagagtggagatgtggtggctgcccaggacatgggggcggccgggttgacctgcagctgttcagagatggctgcgaagggggatgtgggcgtggagctcgacctcgacaaggttcctgcccgt

SEQ ID NO: 318369 - DNA, 842 bp, Unknown
  Bacterial polypeptide expressing nucleotide sequence isolated from the Sargasso Sea
tttagttggtcctggagaaaacgcaggtgttattgatgttggaaataatcaaaaacttgtttttaaaatagaaagtcataatcatccctctgcaattgaaccttttcaaggagcggcaacaggtgttggaggaatattaagagatatttttacaatgggggcaagaccaattgcagtattgaattcactgagatttggaaatattgataaattatcaaatgtgaatttacttcaaggagttgtttcagggattgcgcattatggaaattgcgttggtgttcctactgttggaggtgaaattgactttgatgatagttattctgggaatcctttagtcaatgtcatggctttaggacttttagagactgatgaaatagtttgttctggagctaaaaatgttggatcaccagtactttatgttggaaatacaaccggtagagatggtgttggtggtgccagctttgcaagttcagaattaactactacttcattagatgacagacctgcagtgcaagtaggtgatccattcattgagaaaagtcttatagaagcttgtttagatgcttttaagacgggagatgtaatagcagctcaagacatgggtgcagcaggtttaacttgcagtagcgcagaaatggctgcaaatggaaatttaggtatatcgattgatttggatttagttccttctagagaagataatatgtcttcataccaatacttattatctgaatcacaagagaggatgttattcgtcgttaaggaagaaaaagtaaataaccttattgaaaaatttaataaatggggattaaacgcaaatgtaattggtgaagtaatagaagcta

SEQ ID NO: 318370 - DNA, 654 bp, Unknown
  Bacterial polypeptide expressing nucleotide sequence isolated from the Sargasso Sea
caaattgtgatagagatatggatgttgcgctcaaaaagtttggttttaaaaataaaatggtatggcatgatgacgaaaaacttcctgaatcagatttaatcgttctacctggaggattttcatatggtgattatctaagatgtggaagcatagctggcaaaagtaaaattattaagtctgtgatagattttgcgaaaaaaggtggattggttcttggtgtttgtaatggttttcaaatattaactgaaacaggtcttctacctggtgttcttcaacaaaataaaaatattgaatttatttgtaagaatgtatttgtaaaagtgaacaacaaaaataataaatatttcaaaaggattgataaagacatattaaaacttcatattgctcacaatgagggtaattttttctgtactgatgatgaattaaaaatgcttaaagataataatcttatagcagtttcttattgtaatgataaaggtgaaataaacgaaaaatcaaatcctaacggggcgttgcaaaatattgctggtatttttaataaagaaaagaatattttaggaatgatgcctcatccggaaaggatgattgataaatatctttcaggtgaagatggatcaatttttttcaaaaatttaataaataatcttaaatgac

SEQ ID NO: 318371 - DNA, 487 bp, Unknown
  Bacterial polypeptide expressing nucleotide sequence isolated from the Sargasso Sea
aatgtggaatgaacattgttcttataaatcttctagacttcatttaaaaaaattacctactaaaggaaaaaaagttattcaaggaccaggtgaaaatgctggggtaattgatattgaagatggagatgcaatagtatttaaaattgagagccataatcatccatcatttatagaaccttatcaaggtgctgctacaggtgtaggtggaattatgagagatgtatttacaatgggagcaagacccatcgctaacttaaattcaatacattttggatctccacaacataaaaaaactaaaaatcttttaagaggagtggttcatggaattggaggctatggaaattgtatgggtgtacccacaatcgcgggtcaaacatcttttgatagttcgtataatggaaatattttagttaatgcaatgactttaggattagttaaaaaaaataagatattttattcaaaagccacaggtttgaacaaacccgta

SEQ ID NO: 318372 - DNA, 808 bp, Unknown
  Bacterial polypeptide expressing nucleotide sequence isolated from the Sargasso Sea
acagaaaaattattacttgaagcatgtttagagttaatgactgacaactcaattattgcaatacaagatatgggtgctgccggcttaacttcttcaagtgttgaaatggcatcaaaaggaaaattaggaatagaaataaatttaaataaaattccttgtcgtgaagaaaaaatgacaccttatgaaataatgttatctgaaagccaagaaagaatgttgattgttttacaaaatggtaaagaagatcatgctaaaaaaatatttgataaatggaatttagattttgcaattataggaaagactacaaattcaaaaaaaattgaattaatttttgaaaataataaagtagctgaaattccaattaatctattagcagaaaatgcacctatttatgatcgtaaatggaaaaaaacaaaacttcctcaaaaattaaaatttaaaaaagatgaatttaaatcactaaatttatctgattgtttaaaaaaaattttaattaatccaaacatttctgacaaacagtgggtttggaatcaatatgatcatactgtaatgggagatactatacaaaaacctggtggtgacgcaggcgtaataagagtgcatggaacaaaaaaagctgtagctgcttccgtggattcatccgcttcatattgctattcacatccatttactggaggaaaacaaattgtttgtgaaagttggagaaatttaatttcagttggtgcaaaaccagttgcaattacaaattgtttaaactttggtaatcctgaaaaagaaaaaaatatgggagaatttgttgaatgtgttg

SEQ ID NO: 318373 - DNA, 517 bp, Unknown
  Bacterial polypeptide expressing nucleotide sequence isolated from the Sargasso Sea
atgcaagtaacagaaaaattagcaattgagcatggtttaaaaaaagaagaattttcaaaaatatgtgatttgttaaaaagaatacctaatttaactgaacttgcaattttttcagcgatgtggaatgaacattgctcttataaatcttctagaaaacatttaaaaaaattacacactaaaggaaaacaagttattcaaggaccaggggaaaatgctggtattgttgatattggagatgatgatgcaattgtttttaaaatagaaagtcacaatcacccttcatttatcgaaccttatcaaggagcagcaactggagttggtggaattatgagggatgtttttacaatgggtgccagacctatagcaaaccttaattcaattcactttggttctcctcaaaacaagaaaacaagaaatctcttaagaggtgttgttaaaggaattggtggatatggtaattgcataggtgttccaacaattgctggccaaacatcttttgatgagtcttataacggaa

SEQ ID NO: 318374 - DNA, 823 bp, Unknown
  Bacterial polypeptide expressing nucleotide sequence isolated from the Sargasso Sea
tgatagctcttataatggaaatattttagtcaatgctatgactttgggattagtgaaaaaaaataaaatattttactccaaagcagcaggtttaaataaaccagtgatatacgttggatctaaaaccggtagagatggaattcatggagcaagtatggcatcagcaagttttgatgacaagattgaagaaaaaaaacctactgttcaagtaggtgatcctttcactgaaaaacttcttcttgaagcttgtttagagttaatggcgggtgactcaattattgcaattcaagatatgggagccgcaggtcttacatcatcaagtattgaaatggcttctaaaggaaatttaggaatagaaataaatttaaataaagttccttgtagagaaacaaaaatgtcaccttacgaaatcatgctttctgagagtcaagaaagaatgttgatagtattagaaaatggcaaagaggacttggcaaaaaaaatatttgataaatggaacttagattttgctgtaatcggtaaaactacaaattcgaaaagtatagagttattttttgataatgagcaaatcgcaaatataccagttaatactttggtagaaaattctcctatgtatgatcgaaaatggaaaaaagctaaattaccaaaaaaaaataagataaaaaaagaagttattaataaatttaagattaaagatattctgaaaaaaattttatctagtccaaacgtttgtagcaaagaatggatttggcaacaatacgatcacacagtaatgggagacactatacaaaaacctggtggagattctggtgtggtaaaaata

SEQ ID NO: 318375 - DNA, 418 bp, Unknown
  Bacterial polypeptide expressing nucleotide sequence isolated from the Sargasso Sea
cgcgtgctcgggatctgcaacggattccaagtactgacggaacttgggctgctgcccggagcactgaccagaaaccgggatctgcacttcatctgtgaggacgcgcccctcaaggttgtgagtcagcgctcggcctggatgcaggggtacagcgacgggggcggaacgctgaccttgccgatcgcccacggggaaggccgttatcagtgcagtgatgacacgttgaaaaagcttcaggacgaagacgccattgccctcagctacggcaacaatcccaatggatcagtcgcagatatcgccggcatcaccaaccccagcggcaacgttttgggcttgatgccccacccggaacgggcctgtgatcctgcaactggaggaaccgacggccgatgcatgctggaagccctgctgggctgat

SEQ ID NO: 318376 - DNA, 553 bp, Unknown
  Bacterial polypeptide expressing nucleotide sequence isolated from the Sargasso Sea
ttaccaggcggcttttcttatggcgattatctccgcgcgggctgtatggcggcgaaatcgccaatcatgcaagaggttatcaagcgcgccacaaagggcgtgccggtgcttggcgtatgtaacggcttccagatcttgactgagtcgggcattcttccgggagcgctaatgcggaacgcggcgttgaaatacgtctgccgggacgtgcacctaaagatagccgtgaacgacacggtgtttactgaccaatacacgccaaaccaattgattcgtattcccatcgcgcaccacgacggaaactatttcgccgatgacgaaaccttaatggaactggaggacacgggccgggtcgccttctactattgcgatgaaacaggggccgtgaccgacgcagcgaatcccaacggatcgcgcctcgggatcgctggcatctacaacaaatgcaagacagtactgggtatgatgccacacccagaacgcctagccgactccgaattaggcggcgctgacggccggcccatgtttgaaggattggtccaggccctctcttaag

SEQ ID NO: 318377 - DNA, 821 bp, Unknown
  Bacterial polypeptide expressing nucleotide sequence isolated from the Sargasso Sea
tgtcggaaaagtaacatcctcgggaacgcttcgaattgttgatgaatttgacggagaggtactgggagaggttcccgcttcttctctccatgaggacgccccactctacgaacggcctatggctcagccagataaattagctgatcaagaaatgcaatcagctacaccggaagggatcgaaaaagatctcattgatatgctcatgagcccgcaatgggcaacttcccagtacgactcacaactttttctcaacacagttgttggacctggaagcgacgctgctgttttacgattgaagcatccgacatcaggcgcagatacgggaagaggcatggcgcttactacagatggcaatcacagatggtgcgctgttaatccacgaatcggagcagctatgacagtggcagaatcggttttgaacctagcttgtgtaggcgcagttcctcaggctctggttaattgtttaaacttcggaaatcctgaaaatcctgctgttatgtggcagctgagcgaagcagttgatggaatggctgaagcctgcactgcctttgaacttccagtagtaggtggaaatgtctcgctatataacgaaagccaagggaaaaacattgatccaaccccaattgttggtgtgataggtttgatcgatgatttagctaaacctcctccaggactcgcatggaatgatggtgatcggatcattctgctcggcccagaagctcgtgctttagatggaagcgcatgggcatttaaaaatgggtataagggtggttcgcttgagccaatcgatttcgatcttcaccgacaagtatgtgcatgac

SEQ ID NO: 318378 - DNA, 691 bp, Unknown
  Bacterial polypeptide expressing nucleotide sequence isolated from the Sargasso Sea
gaaggttgcagtgatcacctttccagggtcgaactgcgactacgacctgttcaaggccgctcaacaggttggtggggacgccaagtttatctggcaccgtgagcgaggtctcaagaattacgatgctgttttactccctgggggtttctcatacggagactaccttcgagccggggctattgcgcgtatgagcccgatcatggaagacgtcatcgcattcgctaagaccggaaggccggtcctaggcatctgcaacggatttcagattctttgcgaatcaggacttctgccaggtgcattgatgcacaacatctcactcaaattcgagagcaaggatgtaatgcttcgtgttgaccgcaccgatacgatgttcaccaaagactacaagacagggcaagtcctgcgcatcccaatcgcacacggagagggcaactacggggcagacaatgagactcttaaggccctcgaagaccaaggacgggtcgttttcaggtacgtagaccgcgatggtgaactaagtgacgaagcaaaccccaatggatcttggaacaacattgccggcatcactaatgcaactggtaatgttctggggatgatgccccatcctgagcgcgccatggagaagctgctcggttctactgacggcttggcacttttcacgtccatggtagggagcatgcaaccatcatga

SEQ ID NO: 318379 - DNA, 676 bp, Unknown
  Bacterial polypeptide expressing nucleotide sequence isolated from the Sargasso Sea
tatcgtctttcccggatccaattgcgatcgcgatatgcaagtggcgctcaggaatgccatggattccgagccggtgatggtttggcacggagattccgagatgccggacgttgacctgatcaccgtaccaggcggcttttcctacggcgattatctccgcgccggctgcatggcggcaaaatcgccaatcatgaaagaggttgtcaaccgggccaccaagggagtgccggtgcttggcgtatgcaacggctttcaggtcttgaccgagtcgggtctcctgcccggcgcactaatgcggaacgcagcgttgaaatacgtgtgcagggatgtgcacctaaaggtcgccgccaacgacacggtttttaccagccaatacagaccggaccagttgatccgcattcccatcgcgcaccacgacggcaactatttcgccgatgacgagaccctgaagaaactggaagacacggaccgcgtcgccttccactattgcgatgaaacgggtgccgtgaccgatgctgcaaatcccaacggctcgcaacttggaatcgccggtatttataacaagcgtaaaactgtgcttggcatgatgccacacccggagcgcctggccgatgcggagttgggaggcaccgacggtcagtccatgttcaagggattggtccaagccctctcctaa

SEQ ID NO: 318380 - DNA, 822 bp, Unknown
  Bacterial polypeptide expressing nucleotide sequence isolated from the Sargasso Sea
tggttcaacacaacataaaaaaacaaaaaatttattaagaggtgtggttaagggaattggaggatatggaaattgtattggtgtgccaacaataggaggacaaacttgctttgatagttcatacaatggaaatattttggtaaatgcaatgactttaggtttagttaacaaaaacaaaatattttattctaaagctgctggtttaaataaaccagttatttacgtcggatctaaaactggaagagatggtattcatggtgcaagtatggcatcagcgatttttgatgataaaattgaagaaaaaaaaccaactgttcaagttggtgatccatttacagaaaaattattattggaagcatgtttagagttaatgtctgatgactccataatagctatacaagacatgggtgcagcgggactaacatcatctagtgttgaaatggcttctaaaggtaatttgggtatagaattagtgttagataaagttccgtgtagagaagaaaaaatgactccatatgaaataatgttatctgagagtcaagaaagaatgttaattatacttgaaaatggcaaagaagaaaaagcaaaaaagatttttaataaatggaatttagatttctctattataggtaaaacaaccgacagtaagaaaatagaaatttattacaaagaatcaaaagtagcagatattccaattgattttttatctgagaaagcacccgaatacgatagaaagtggaaaaaaactaaaattccacaaaaaattaagtttgaaaaaaaaatcttcaaaccttttaaattattcgattgtttaaaaaaaat

SEQ ID NO: 318381 - DNA, 772 bp, Unknown
  Bacterial polypeptide expressing nucleotide sequence isolated from the Sargasso Sea
tggttctacgcaacacaaaaaaacaaaaagccttcttcgtggtgtagttagaggaattggtggttacggtaattgtattggcgtaccaacaattgcagggcagactacttttgactcatcctacaatggaaatattttagttaacgccatgacattaggtttagtaaaaaaaaataagatattctattcaaaagcagcgggtattaataaatcagtaatatacgttggatcaaaaactggaagagatggtattcatggtgcaagcatggcttctgcagtctttgatgataaaattgaggaaaaaaaaccaacggttcaagttggagatccgtttaccgaaaaacttcttttagaagcttgtttggaattgatggctgataactcaataattgctattcaggacatgggggcagctggcttaacgtcatcaagtgttgagatggcatcaaaaggaaatcttggaattaaattagaccttagtaaagtaccttgtagggaaaaaggaatgacaccatatgaaataatgttatctgaaagccaagagcggatgcttattgttcttgagactggaaaagaagataaagccaaaaaaatatttgataaatggaatttagatttctctataattggaaaaacaactaattcaaaaaatatagaaatttattatgagaaaaaaaaatacgctgatattccagtcacttttttgaccgaaaatgcacctatgtatgaaagaaaatggaaaaaaagaaaacttcctcagaagataaaattt

SEQ ID NO: 318382 - DNA, 607 bp, Unknown
  Bacterial polypeptide expressing nucleotide sequence isolated from the Sargasso Sea
atgagcatttctaattggaaatataataccgagcagtcactagttgaaaatcatggcctgaaacatgatgaatttgaaagcattgtagaaggtcttgggcgtgaaccaaatttaactgagctaggaatcttctcagcaatgtggaatgagcattgttcttataaatcttcaaaatattggctaaaaaaacttccaacttcaggtgacagagtagttcaaggtcctggagaaaatgcgggtgttattgatattgatgatggagacgttgcagtatttaaaatggaaagtcataaccacccctcttttattgaaccttatcaaggcgctgcaactggtgtcggtggaatactgagagatgtatttacaatgggagcaaggcctgtagctaatttaaatgcattgagatttggtgagatagatcaccctaaaacaaaacatcttttatctggagtcgttgaaggtataggaggctatggaaattgtattggtattccaactgttggtggagaagttaatttccacccttcttacaatgggaatattttagtcaatgctatgactattggaatcgctaaaaaagataaaattttttattcagctgcagcag

SEQ ID NO: 318383 - DNA, 629 bp, Unknown
  Bacterial polypeptide expressing nucleotide sequence isolated from the Sargasso Sea
agctctaaaaaagtttggtttcaaaaaccaaatggtttggcacaatgacaaatcaataccaaaatgtgatttaatagtactcccgggtggtttttcttatggagattatttgagatgtggaagtattgcttcaaaatcaaaaataattaattctgtaattgattttgctaattcaggagggcttgttataggtatttgtaatggattccaaatattaactgaggctggtttattaccaggtattcttcaacaaaataaatatcttaattttatttgcaaaaatgtcttcattaaagttaaggataaaaaaaataaatattttaaaaatatagaaaaagatattttggaacttcatatagctcacaatgagggaaattatttttgtagtgatgcagaatacaaatctatggaagacaatagccaaatagcggtcacttattgtgatagtaaaggaatagaaaatgacgaaaataatccaaacggtgcattaaaaaatattgcaggaatatttaacaagaataaaaatgttctgggaatgatgcctcatcctgaaagaatgattgataaatatctttcaggagaagatggttcactattctttgaaaatcttttaagaaatttaaaataat

SEQ ID NO: 318384 - DNA, 862 bp, Unknown
  Bacterial polypeptide expressing nucleotide sequence isolated from the Sargasso Sea
tgctggtcaaacgtgttttgacgagtcttataatggaaatattttagttaatgctatgacattgggtttagttaataaaaataaaatattttattcaaaagctgctggaattaacaaaccagtaatttatgttggttcaaaaacaggaagagatggaatacatggtgcaagtatggcatcagctatttttgatgacaaaatagaagaaaaaaaacccactgttcaagttggtgatccatttacagaaaaacttttacttgaagcttgtcttgaacttatggctggtaaatcaattatatcaattcaggatatgggtgctgcgggtttaacatcctctagcattgaaatggcatctaaaggtgatttaggtattgaaattgatttaacaaaagttccttgtagggaagaaaatatgacaccttatgagataatgctctcagaaagccaagagagaatgcttattgttttagaggaaggaaaagaaaatgaggcaaaaaaaatatttgataagtggaacttagattttgcagtaattggaaaaacaacaaatagtaaaaatattgaattgtttttcaaaaatgaaaaagttgctgaaattccaattgattttttagcggagaatgctcctatgtatgatcgaaaatggataaaagctaaacttccaaaagaaaataatttttcaaaagaacaatttaagtctttaaaacttggtcattgtttaaaaaaaattttaattgatccaaacattgcagataaaggatggatctgggaccagtatgatcatacagttatgggagacactatacaaaaacctggagggaatgctggtgttgttagagttcatggcacaaataaagctgtg

SEQ ID NO: 318385 - DNA, 870 bp, Unknown
  Bacterial polypeptide expressing nucleotide sequence isolated from the Sargasso Sea
agaagatgacgcaattgtatttaaaatagaaagtcataaccacccttcttttattgagccatatcaaggtgcagccactggtgttggtggtatattgcgagatgtatttacaatgggtgctagaccaattgctctaatgaattcaattcactttggatcacctaaaaataataaaactagaaacttattaaatggagtagtttcgggaattggtggttatggtaattccgttggaataccaactgttgggggggaaacgaaattcaatgatacatataatgaaaatattttggttaatgcgatggcgataggtttagcagataaaaataaaattttttactcaaaagcaaagggtttaaataaagcagtagtatacgttggttcaaaaacaggaagagacggtattcatggagctacaatggcttcagcagaatttgatgaaaactcagaagaaaaaaaaccaaccgttcaagttggtgatccattcactgaaaaattgcttttagaggcttgtttagaattaatgaaagataactctattatatctattcaggacatgggtgctgcaggtcttacctcctccagtatagaaatggcttcaaaaggaaaacttgggatcgaattggatttaaataaagtaccgtgtcgtgaaaataatatgacgccctatgaaatgatgttgtcagaaagtcaagaaagaatgcttttaatattaaatgataataaagaagaagaagcaaaaaaaatattcgataaatgggatttagattttgttgttattgggaaaactacagacagtaatagattaattttaaattttaataacaaaaaagttgcagatatacctatacctgcccttgctgataaagc

SEQ ID NO: 318386 - DNA, 835 bp, Unknown
  Bacterial polypeptide expressing nucleotide sequence isolated from the Sargasso Sea
tataaaaaaataaaagaacttttaggtagagattcaaatttactagaattaggaattttttctgcaatgtggaatgaacattgttcttataagtcttcaaaaattcatttaaaaaaattgccgacaaaaaataatattgtaattcaaggtccgggtgaaaatgcaggtgttatcgatataggagacgatgatgcaatagtttttaaaatagagagccataaccatccatcttttatagagccttatcaaggtgcggccactggggttggaggaatattaagagatgtttttactatgggcgcaagacctattgctttgatgaattcaattcattttggttctcctgaaaacaaaaaaactcaaaatttattaagtggtgttgtatctggaattggtggttatggaaattcagtaggaatacctactgttggtggcgaaaccaaatttaatagtacatacaacgaaaatattttggtaaacgcaatggcaattggtcacgcaaacaaaaataaaatattttattcaaaagcaaaaggtatcaataaacctgtagtttatgttggttcaaaaactggaagggatggtattcacggagctactatggcgtcagcagaatttgacgaaaactctgaagaaaaaaaaccaacagttcaggtaggagatccttttacagaaaaattgcttttagaagcttgcttagaattaatgaaagacaattctattatatctatacaggatatgggtgcagccggattaacgtcatccagtgtagaaatggcctcaaaaggaaaactcggaattgaattaaacttaaacaaaataccttgccggaaaa

SEQ ID NO: 318387 - DNA, 886 bp, Unknown
  Bacterial polypeptide expressing nucleotide sequence isolated from the Sargasso Sea
ctaagtctgggtctgagcgattcggaataccaacttgtttgtgaattgctgggccggaaaccgaatcttaccgaaaccgggatctacggggtaatgtggtctgaacactgcagttacaaaacctccaagatgcaactctcccgtttccctaccgagggaccgaatgtacttcaaggtcctggtgaaggtgctggagtcgtggatttgggagatggctgggccgtggttttcaaagtcgaaagtcacaatcatccctcggcaatcgaaccctatcagggtgcggctacgggagttggtggaatcctgagagacatttattccatgggagcaaggccggttgcttttctcaattcattgcgttttggacccttgtccgacaaaaaggattcaggctctccgaacagcaaacgcaaccaatacctttttggtggagtggtggcaggaatcgcgggatacggtaactgtatcggagttccaactgttgcgggagaggtcggcttcgatacatgttactccggaaatcccctggtgaacgcaatgtgtgtgggagtgatccggcatgaggacttgcagcatgggcgagccgagggcatcggcaatcctgtcatttacgtgggtgctgctactggaagagatggaatccatggcgctaccttcgcgtccgaagaattgaatgaaaaatccgaagcaaaacgcccctcagttcaggttggagatccttttatggggaaattggtgctcgaagcctgcctcgaacttttccagtctggagcagtgatcagcgtccaggatatgggagcagcaggactcacctgttcaagtacggagatggcggaaaagggtggcaacggaatggaactcgatctggaccttgtacctcaaagag

SEQ ID NO: 318388 - DNA, 811 bp, Unknown
  Bacterial polypeptide expressing nucleotide sequence isolated from the Sargasso Sea
agaaaacacttaaaaaaaatgcacaccaaaggaaaacaggtcattcaaggacctggagaaaatgcgggtgtcattgatattggagatgacgatgcaattgtatttaaaattgaaagccataatcacccttcgtttattgaaccttatcaaggagcagcgactggtgttggtggaattatgagggatgtatttacaatgggagcaagaccaatagcaaatctaaattcaattcattttggttcaccacaacataaaaaaacaagaaatttattaagaggagttgttaagggtataggtggatatggtaattgtattggagttccaacaattgctggccaaactacttttgatgagtcttacaatggtaatatattagtaaatgccatgacccttggtttagtaaataaaaataaaattttttactcaaaagcagctggattagataaaccagtaatatacgtaggttcaaaaactggaagagatggaattcatggtgccagtatggcttccgcaactttcgatgataaaattgaagaaaaaaaaccaacagttcaagttggagacccatttactgaaaaattattacttgaagcgtgcctagaattaatggctgataattcaattattgcaattcaagatatgggtgcagcaggattaacatcctcaagtgtggaaatggcatcaaaaggaaatcttggtattgaattaaatcttagcgaggttccttgtagggaagaaaaaatgtctccatacgaaataatgttgtctgaaagtcaagagagaatgcttatagttctgaaaaaggaaaaga

SEQ ID NO: 318389 - DNA, 559 bp, Unknown
  Bacterial polypeptide expressing nucleotide sequence isolated from the Sargasso Sea
aatgataaatcaagaaaataatgatctgtatgatcttaatgaagcactaaaagttgaaaatttaacactaaaagattacgaagaaatttgcaaaagattaaagagaaatcctaatagaacggaattaggcatgtttggcgttatgtggtctgaacattgttgttatagaaattcaaaaactttactatctaagtttcccactaaaggtaaaaatgttttagttggacctggagaaaatgctggcgttattgatgttggaaataatcaaaaacttgtttttaaaatagaaagtcataatcatccttctgctattgaaccttttcaaggcgcagcaacaggtgtaggaggaatcttaagagatatatttacaatgggagctaggccaatcgcagtcttgaattcattgagattcggcaaccttgataaatcatcaaatgttgatttactacgaggagttgtatccggtatttcacattatgggaattgtgtaggtgtgccgactgttggaggtgaaattgacttcgatgatagttactctgggaatcctcttgtgaatgtt

SEQ ID NO: 318390 - DNA, 611 bp, Unknown
  Bacterial polypeptide expressing nucleotide sequence isolated from the Sargasso Sea
aatgaaatcatcagtcataacctttcctggttcaaattgcgatagagacatggatgttgcgttaaataaatttggatttaaaaataaaatggtttggcataatgataatgaactacctaaaagtgatttagttgttttgcctgggggtttttcttatggtgattatctccgttgcggaagtatggcttcaaaatctaaaataatgcagtcagttataaattttgcaaaatctggtggattagttatgggaatctgtaatggatttcaaatattagttgaaactggattggtccctggagttttgttgagaaataaatatttagaatttatttgtaaaaatgtttttgttaaaattaataatagagaaaacccctattttaagaatcttgataaagatatatttgaatttcatatagcccataatgaaggaaactatttttgcaccaaagatcaaattaaagaaattgaagataataaccaagtagcaatttattattgtgataacaatggagaaattgatgaacacattaacccaaatggttctaaaaataatattgctggaatatttaataaagaaaaaaatgttcttggaatgatgcctcaccctgaaa

SEQ ID NO: 318391 - DNA, 814 bp, Unknown
  Bacterial polypeptide expressing nucleotide sequence isolated from the Sargasso Sea
gatgacaaaatagaggaaaaaaaaccaacggttcaagttggagatccttttactgaaaaactattattagaagcttgcttagagttaatggaaggaaaatcaattatatctattcaagatatgggtgcagcaggattaacttcttcaagtattgaaatggcatcaaaaggtaatttgggtattgaattaaatttaaataaagttccatgtcgtgaagaaaaaatgacaccgtatgaaattatgctgtcagaaagtcaagaaagaatgttaattattctagagaatggtaaagaagcagaagcaaaaaagatttttgataaatggaatttagattttgctgtaataggaaaaactactgactcaaaaaaaattgaattgttttttgataacaataaagtagcagaattacctataaatatattggcagaaaatgcaccagtttataatagaaaatggaaaaaaacaaaacttccacaaaaaataaaatttaataaagatgattataaaaaattaaaaattactgaagttcttaaaaaaatattaggcttaccaaatatctcaagtaaagaatggatctggcaacaatatgaccatactgtcatgggagataccatacaaaaacctggatcagattcaggtgtagtaagggtgcatggtacaaataaagctgtcgctacatcagtagactcttctgctgtatattgttacgcacatcctctaactggtggaaaacaagttgtttgtgaaagttggagaaatttaatttcatgtggatctaagccaattgctattacaaattgtttaaactttggta

SEQ ID NO: 318392 - DNA, 466 bp, Unknown
  Bacterial polypeptide expressing nucleotide sequence isolated from the Sargasso Sea
atggacgaaccaggcataaccaaagaaattgtcgaattgcatggtttaaattcagatgaatacaatttaattttatccattattaaaagaactcctacattcacggagttaggtattttttcagcaatgtggaatgaacattgttcttacaagtcttcaaaaaaatggcttcgaactctacctactgaaggtcctcaagttatttgtggtccgggagaaaatgcaggaattgttgatattggtgatgatcaagctttggtttttaaaatggagagccacaatcatccaagttatatcgagccataccaaggagcggcaacgggcgtcggaggaattctacgagatgttttcacgatgggcgctcggccaattgcagtaatgaattctttgagcttcggtaatatagatcattgtaaaacaattcaacttgtcaacggtgtagtatcaggcataggcggatacggta

SEQ ID NO: 318393 - DNA, 824 bp, Unknown
  Bacterial polypeptide expressing nucleotide sequence isolated from the Sargasso Sea
tcatgctaataaaaataaaatattttactctaaagctaaaggtgtcggtaaacctgtggtttatgtctgctcaaagaccggaagagacggcatccatggagcaacaatggcttctgctgaatttgatgaaaattctgaggaaaaaaaaccaacagttcaagtaggagacccttttacggaaaaattacttttagaagcatgtttggaattaatgaaagacaattctattatatcaatacaagatatgggcgccgcaggtctaacttcatctagtgtagagatggcttcgaagggcaaactaggaattgaattgaatctaaacaaagtgccttgcagggaagacaacatgaaaccttatgaaatgatgttgtctgaaagccaagaaagaatgctaattatacttgatgaaaataaagaagttcaagccaaaaaaatttttgataaatgggatttagattttgttgtgataggcaaaacaactaattctaatagattaatattaaattttaatgatgaaaaagtagcagacattcctattagtgcactggctgataaagcgcctttgtatgacaggaaatgggctgagtcaaaagtatcaaaagataaaattaaaataaaagatttaaagaaaataaaaattgaagatgctcttattaaaatattatcttcgcctaatcattcaaataaaaattggattactgatcaatatgatcaggtcgtaatgtgtgatactattcaaaaatctggtggtgactctgctgtaatcaggattcataacaaaaataaagccatagctatttctgtggactcctctgctaattatt

SEQ ID NO: 318394 - DNA, 595 bp, Unknown
  Bacterial polypeptide expressing nucleotide sequence isolated from the Sargasso Sea
ggtctggcatgatgacgatgaattgcctaaaagtgatttaatagttttaccaggtggattttcttatggagattatcttagatgtggaagtattgcaggaaagtctaaaattattcaatcagtaatcgattttgcaaactctgggggtttagttttaggaatttgcaacggatttcaaatcttaacagaaaccggtctattaaaaggcgttcttcaacaaaataagaatattgaatttatttgtaaaaatatatttgtcaaagttaacaatagtgaaaacaaattttttgaaaatatagataaagatgtcttagagcttcatatagcgcataatgagggtaattatttttgcactgaagatgaattaaagtcgttagaagataataatcaaattgcagcttactactgtagctctgatggaaaagtagatgataagtcaaatccaaacggtgcaattaaaaatattgcaggaatattcaatgaaaagaaaaatattttaggaatgatgcctcatccagaaagaatgatagatcaaagtttatctggggaagatggctcaatattttttgaaaatttattaaagaatttgaaataa

SEQ ID NO: 318395 - DNA, 294 bp, Unknown
  Bacterial polypeptide expressing nucleotide sequence isolated from the Sargasso Sea
aatggaagtaaatgaaaaaattgcagttgatcatggtttaaagcctgatgaatataaaaagatttgtgatttgttaaagcgtgtaccaaatttaacagaacttggaattttttcagcaatgtggaatgaacattgttcttataaatcttcaagattacatttaaaaaaattaaatactaagggtaaaaaggtaattcagggaccaggtgaaaatgctggtgtcattgatattggagatgatgatgcaatagtttttaaaattgaaagtcataaccatccctcatttatagaacc

SEQ ID NO: 318396 - DNA, 562 bp, Unknown
  Bacterial polypeptide expressing nucleotide sequence isolated from the Sargasso Sea
atggaagtcacagaagcagttgcgatagaccacggattaaaaaaagaagagttttctaaaatatgtgaacttcttaagagaacacctaatttaacggagcttgcaatattttctgcaatgtggaacgaacattgctcttataagtcttctagaaaacacttaaaaaaaatgcacaccaaaggaaaacaggtcattcaaggacctggagaaaacgcaggtgtcgttgatattggagatgatgatgcaattgtatttaaaattgaaagccacaatcacccttcatttattgaaccttatcaaggtgcagcaactggagttggtggtatcatgagggatgtatttacaatgggagcaagaccaatagcaaatcttaattcaattcactttggttcaccacaacataaaaaaacaagaaacctattaagaggagttgttaaagggataggtggatatggaaattgtattggagttccaacaattgctggtcaaacaactttcgatgagtattacaatggaaatatattagtaaatgccatgacccttggtttagtaaataaaaata

SEQ ID NO: 318397 - DNA, 637 bp, Unknown
  Bacterial polypeptide expressing nucleotide sequence isolated from the Sargasso Sea
catggatgttgcactcaagaaatttggttttaccaacaagatggtttggcatgatgatagtgaactccctaaaagtgatttagttgtgcttcctggtggcttctcgtatggggattacttgcgatgtggaagtatggcatcaaagtctaggattatgcaatcagtaataaattttgcaaaatctggaggattagtcatgggtatatgtaatggatttcaaatattggttgaaactggtttagtgccaggggttttattgaggaataaatatttagaattcatatgtaaaaatgtcttcgtgaaattgaacaacaaagaaaatgcatattttaaaaatcttaataaagatgttttagaatttcatattgctcataatgaaggaaattatttttgtaccaaagatcaattaaaagaaattaaggataataatcaaatagcaatttattattgtaatagtgagggtaagatagaagatcaatataacccaaatggttcaatcaagaatattgcgggcatttttaataaagaaaaaaatgttttagggatgatgcctcatcctgaaagaatgatagatcaaagtttatctggggaagatggttcaatttttttcaaaaaccttattgataatattaaataa

SEQ ID NO: 318398 - DNA, 750 bp, Unknown
  Bacterial polypeptide expressing nucleotide sequence isolated from the Sargasso Sea
gacctgttccggaggacggcctctggctctgacgaatggtttgaattttggaaatccagaaaaatctgaaatcttttggcaacttcgggaagcggtgacaggaatttgtgaagcatgccaaagcctcgaattgcctgtaaccggagggaatgtcagcctctacaacgaaaccgaaggtgaagcagtctacccgactcctctgatcggggtcgtcgggctggtggaacacccagagcatgaaacaacccaacactggaaacaggctggagatgtgatattgcttttgggtgaaactgaagaagaacttggagcttcagccctgcagcaatttatgacaggaagcatcttcgggatgcctccagccctcgatctggaaaaggaaaaaaatctccaggaggtagttcttgaagcaatccgccaaaacttgattgcctcggctcatgacctttcccagggtgggcttgccctggccttgttaacaagttgcaaaggagagcttggggttcatgtcgactgggagtcaggaatccgggacgatcttgcccttttcagcgaaagccagtcccggatattactttcaacagttcctcaaaatcttttgatgctggaaaaactgatgcaaagcaggaatatcccgtacgagcgtattggagtggtcatgcctgggcgttttgatttcgcccttaacggaaaattgctgatacaggaagaacttcctgagttgcagcaactttgggaaaaggcactgga

SEQ ID NO: 318399 - DNA, 685 bp, Unknown
  Bacterial polypeptide expressing nucleotide sequence isolated from the Sargasso Sea
aatgaattcatcggtcattatatttcctggatctaattgtgatagggatatggatgttgcattaaaaaaatttggttttaaaaataaaatggtatggcataatgatgatgaattgcctaatagtgacttaattgttttgccaggtggattttcttatggagattatcttagatgtggaagtattgcaggaaagtctaaaattattcaatcagtaatcgattttgcaaactctggggggttagttttaggaatttgcaatggatttcaaatcttaacagaaactggtctattaaaaggcgttcttcaacaaaataagaatattgaatttatttgtaaaaatatatttgtcaaagttaacaatagtgaaaacaaattttttgaaaatatagataaagatgtcttagagcttcatatagcacataatgaaggtaactatttttgtactgaagatgaactgaaatctttagaagataataatcaaattgcagtttactattgtggctctgatggaaaagtagatgataagtcaaatccaaacggtgcaataaaaaatattgctggaatattcaatgaaaaaaaaaatattttaggaatgatgccccacccagagcgaatgatagatcaaagtttatctggtgaagatgggtcaatattttttgaaaatttattaaagaatttgaaataa

SEQ ID NO: 318400 - DNA, 955 bp, Unknown
  Bacterial polypeptide expressing nucleotide sequence isolated from the Sargasso Sea
gggtgtgttaaaagggaatggaggttatggaaactgtattggagtcccaactatagctggtcaaacttgctttgatcaatcttataatgaaaatattttagtaaatgcaatgactttaggtttggtaaataaaaataaaattttttactcaaaagctgcaggattaaataaaccagttatttatgttggatcgaaaacaggtagagatggtattcatggagcaagtatggcgtcagcaatattcgacgataaaattgaagaaaaaaaacccactgttcaagttggagatccttttactgaaaaacttcttttagaagcttgcttagagttaatgtctgacaaatccattattgctattcaagatatgggtgctgcaggtttaacttcctcaagtattgaaatggcatcaaaaggaaatttaggaattgaattacatttagataaagtaccgtgcagagaagaaaagatgacaccttatgaaattatgttgtctgaaagccaagaaagaatgttgatagttttagaaaatggaaaggaagatagtgccaaaaaaatatttgataaatggaacctagattttgcagtaataggaaaaacaactaattccaaaaatattgagctttattttgaaaaagaaaaagtagcaaatgtaccaattaaatttctggcaaatgaagctccaatgtatgatagaccttggaaaaaaaccaaacttcctcaaaagattaaattttcaaatagtgaattaaaaaaattaaagtttaatgatgtaattaaaaaaatgatttctcatccaaatatttgttctaagcaatggatatgggaacaatatgatcatactgttatgggagatacaattcaaaaacctggtggtgatgcaggagttgttagagtgcacggcacaaataaagcagttgcttcttcggtcgattcatctgcttcctactgttatgca

SEQ ID NO: 318401 - DNA, 882 bp, Unknown
  Bacterial polypeptide expressing nucleotide sequence isolated from the Sargasso Sea
tatgggtgctgctggtttaacctcctcaagcgttgaaatggcttctaaaggttcgttaggaatcgaattagagcttgataaagttccatgtagagaggaaaacatgacaccttacgagatgatgttatcagaaagccaagaaagaatgttaatcatattagaggatggcaaagagggtcacgctagaaagatatttaataaatgggatttagattttgtaataattggaaaaacaactgatacaaataaattaactttaaaattcaaaaacaaaattgagggagaaattcctttagaggctttagcatcaaaagcaccaatttataataggaagtggtcaaaaaaaaagttgtccaaaaaaaaattaaatttaaaaaaattaaagaaaattaaaattgaggaatcattaattaaaatactttcttctccaaatcactctaataaaagttggattactcaccaatatgatcaaatggtgatgtgtgatactgctcaaaaatcagggtctgatgctgctattattagaatacataataaaaataaagctattgctttatctgttgattcatcggcaaattattgtaagtcacatccaattactggaggcaaacaaatcgtttgtgaaaactggagaaatttaatttctgttggttcaagacctttagctattacaaattgcttaaattttggaaatccagaaaatgaggagatcatgggggaatttgctgagtgtttagagggtattaaagaagcttgcgagtttttaaaatttcccgtggtttcgggtaatgtgtctttttataatggaacaaataaaaaaaatatttatcccactccagtgattggaggcgttgggttaattcataatctcaataaaccgtt

SEQ ID NO: 318402 - DNA, 778 bp, Unknown
  Bacterial polypeptide expressing nucleotide sequence isolated from the Sargasso Sea
agaagaatatcaaagtattcagaaactactgaaaagaaatccaaatttattagaacttggtattttttctgctatgtggaacgagcactgttcttataagtcttcaagattacatctaaaaaaattacctacgaaaggaaaacacgttttacaaggtccaggcgaaaacgccggagttatagacataggtgatgacgatgcgatcgttttcaaaatcgaaagtcataatcacccatcttatattgaaccttaccaaggtgcagcgacaggagttggaggaatattaagagatgtttttacaatgggcgcaagaccaatagcattattaaattcaatacatttcggttcacctactcattcaaaaactaaaagtttattaaacggtgttgtttctgggataggaggttacggaaactgcataggtgtccctactgttgctggtgaaaccaaatttaacgacacatataatgaaaatattttagttaatgcgatggcagtaggtcacgctaataaagaaagaatattttactcaaaagcaaaaggtttaggtaaatcagttgtatatgttggctcaaaaaccggtagagatggaatacatggagcatcaatggcctcagctgaattcgatgaaaattctgaagaaaaaaaacctacagtgcaggtaggtgatccatttactgagaaattactattagaggcttgtttagaattgatgaaagatgattcaataattgcaattcaagacatgggagccgccggtctaacttcatctagtgtt

SEQ ID NO: 318403 - DNA, 667 bp, Unknown
  Bacterial polypeptide expressing nucleotide sequence isolated from the Sargasso Sea
atggatattttcactgtaggagttgttgtcttccctggttctaattgtgatcgtgatgtttcatgggcattggaaggttgtttagacatcagaacaaaatacttgtggcatgagtcttcagatttaagtgatatagacgcaatagttttacccggaggatttagctatggtgattatttaagatgcggagcaattgcgagattctctccattaataaatgccttggatgattttgttaaaagcgggaaaagagttttaggaatttgtaatgggtttcaaattttgacagaatcaggatttttgcctggtgctcttgttgcaaataaaaatctcaattttatctgtgatgacgttgaactggacatcgtttcttcaaaaggaggttggtttaataatgtagatgaaaaacaaacaattaaattgccaatagctcatggggaaggaagatatcattgtgattctgatactttaaagaaacttgtagataatgaattgatcgctttgagatataaaaataatcccaatggatcctcattcgatatcgcaggcataactaatgagaagggaaatgttctaggtttaatgcctcatccagagcgagcatgcgacgagacaattggtgggactgatggtctctttacattaaaatcattaatattgagataaa

SEQ ID NO: 318404 - DNA, 841 bp, Unknown
  Bacterial polypeptide expressing nucleotide sequence isolated from the Sargasso Sea
tatgtggaatgaacattgttcttacaaatcttcacgaaaacatttaaaaaaacttcacactaaaggaaagcaagtaattcaaggtccgggtgaaaacgctggggttatagatatagacgataatgatgcaattgtttttaaaatcgaaagccacaatcacccttcttttatagaaccatatcaaggagcggcgacaggtgtaggtggaattatgagagatgtttttacaatgggtgcaagaccaattgcaaatctaaattctattcattttggctcaccacaacataaaaaaacaaaaaatttattaaggggagtcgttaaaggtattggaggatatggtaattgtataggagtgccaactatagctggccaaacctcgtttgatgaatcctataatggtaatattttagtgaacgcaatgaccttgggcctagttgacaaaaaaaaaattttttactcaaaagctgcaggattagataaacctgtaatttatgttggctctaaaactggtagagatggaattcatggagcaagtatggcttcggcaactttcgacgacaaaattgaggaaaaaaaaccaacagtacaagttggggatccgtttacagaaaagctattattagaagcttgtctagaattaatggcagacaattcaattattgcaattcaggatatgggtgctgccgggttaacatcatcaagcgttgagatggcatctaaaggaagtttaggtattgaattagacttaagtaaagttccttgtagagaagaaaaaatgactccatacgaaattatgctttctgaaagtcaagaaaggatgttaattgttttagaaagtgga

SEQ ID NO: 318405 - DNA, 528 bp, Unknown
  Bacterial polypeptide expressing nucleotide sequence isolated from the Sargasso Sea
aatgaatataaccgcaaaaattattgaaaatcacggactaaaaaaagaagaatacgagaatattaaaaagttattgaaaagaagccctaatttacttgagcttggtattttctcagctatgtggaatgaacattgctcttacaaatcttccagaattcatttaaaaaatttacccactaaaggaaaacatgttatccaaggtcctggagaaaatgcaggagttgtagatattggagataacgatgcaatagtatttaaaattgaaagtcacaaccacccttcttatattgaaccttatcaaggtgctgctactggcgtgggtggaattcttcgtgatgtctttactatgggcgcaagaccgatagctttattgaattcaattcattttggatctccttcacatcccaaaactaaaagtttattaaatggtgtggtttcaggcataggtggatacgggaattgtattggaatacctactgtagcaggggaaacaaaatttaatgagacatataatgaaaatattttagt

SEQ ID NO: 318406 - DNA, 614 bp, Unknown
  Bacterial polypeptide expressing nucleotide sequence isolated from the Sargasso Sea
aatgagaaatcaagataataatgatctatatgatctcaatgaggtacttaaatttgaaaatttaacaattaacgattacgaagaaatttgcaatagattaaagagaaaaccaaataggactgaattaggaatgtttggtgttatgtggtctgaacattgttgttatagaaattcaaaacctcttctatctaagtttcccaccaaaggaaaaaatgttctagttggtcctggagaaaatgctggagttattgatgttggaaataatcaaaaacttgtttttaaaatagaaagtcataatcatccctctgcaattgaaccttttcagggagcggcaacaggggtaggaggaatattaagagatatttttacaatgggagcaagaccaatagcagtattgaattcattgagattcggaaatattgataaaccatcaaatgtcgatttgcttagaggagttatatcaggtatcgcacattatggaaattgtgtaggtgtgcctactgttggtggtgaaatttacttcgatgatagttattcaggcaatcctcttgtcaatgttatgtctttaggacttttagagactaatgaaatcgtttgttctggagctaaaaatg

SEQ ID NO: 318407 - DNA, 645 bp, Unknown
  Bacterial polypeptide expressing nucleotide sequence isolated from the Sargasso Sea
tatgaaaaacactagatttggaatagtagtctttcctggcacatggagtgacaaagattgttatcatgcagtcactgatatactaggtaatgaatctgtttatatttggcacaaagaaacaagtctgaaagatatagattgtttgatcctgccaggtggattttcatacggagattatttgagacctggggcaatagcaagattttctcctattatgaaagaaataatcaaattttctaatagtgggaaacctgtcattggtatatgcaacggttttcaaattttgtgcgaagctaatctattacctggaatattattgccaaacaacgttatggaattccgatgcaaaagtacccatttaacggttcaaaacaataaatcaactttcacgaacgaatgtggaaataatcaagtattaaatattccaatatctcatggagaaggtaactactttgctgataaaaacacagttgaagaattagaaaatactgacagaattctatttagatactcatctgaaaatggagaaatttctaacaaatacaatcccaatggttctgtaaacaatattgcaggtattataaataaaaataaaaatgtattaggaatgatgcctcacccagagagaagttgcgaacctatact

SEQ ID NO: 318408 - DNA, 833 bp, Unknown
  Bacterial polypeptide expressing nucleotide sequence isolated from the Sargasso Sea
tttgggtttagttaaaaaagataaaattttttactcaaaagcagctggtttaaataaaccagtaatttatgtaggttcaaaaacaggtcgggatggaattcatggtgctagtatggcatcagcgagttttgatgaaaaaattgaggagaaaaaaccaactgttcaagttggagatccttttacagaaaaattacttcttgaagcttgtttagaattaatggcaggagactctattatagctatccaggatatgggtgctgcaggattaacctcgtctagtattgaaatggcttcaaaaggaaatcttggaattgaaattgatctgaacaaagttccttgtagagaatcaaaaatgacaccttacgagataatgctatctgaaagccaagaaagaatgttgattattttagaaaatggaaaagaagaaaaagctaaaaaaatatttgataaatggaacttagattttgctgtaattggcaaaactacaaaatcaaaaaaaattgagctttattttaacaacgaaaaagtaacagatattcctgttaatacattagttgagaactctcctatgtatgaccgcaaatggaaaaaagctaaaattccaaaaaaaaataaaattaaaaaagaagatcttaaaaacttaaaaataattgacgttttaaagaaaattttatcaaatccaaatgtatgtagtaaagaatggatctggcaacaatatgatcatacagtcatgggtgatactatccaaaaaccaggaggagactccggagtggtgagagttcatggaacaaataaggcagtagcagcttcggtagattcgtctgctgtttatt

SEQ ID NO: 318409 - DNA, 820 bp, Unknown
  Bacterial polypeptide expressing nucleotide sequence isolated from the Sargasso Sea
taagagaactccaaatattacagaattaggtgttttttcggcaatgcggaatgagcactgttcatataaatcatctagaagacatcttaaaaaattacatacaaaaggtgatcgagttatccaaggtccaggagaaaatgctggtgtcgttgatattgatgatgatgatgcaattgtatttaaaatagaaagtcataaccatccttcttttattgaaccatatcaaggagcggcaacaggtgtaggtggaattatgagagatgtatttactatgggtgcaagacctattgctaacttaaattctattcattttggttctccaaatcatgaaaaaacgaggaatcttttaagaggagttgtaaaaggtattggcggatatggaaattgtattggtgttcctacgattgctggccaaacttgctttgaccagtcttataatggaaatattttagtaaatgcaatgacattaggtttagttaacaaaaataaaatattttattcgaaagctgcgggaattaataaaccagtaatttatgttggctcaaaaacaggaagagatggaatacatggtgcaagcatggcatcagctatttttgacgataaaatagaggaaaaaaaacctactgttcaagttggtgatccattcacggaaaagctacttcttgaggcttgtcttgagcttatggctggaaaatcaataatatcaattcaggatatgggtgcagcaggtttaacatcttccagcattgaaatggcatccaaaggcaacttaggcattgaaatagatttaacaaaagtcccgtgtagagaagaaatatga

SEQ ID NO: 318410 - DNA, 679 bp, Unknown
  Bacterial polypeptide expressing nucleotide sequence isolated from the Sargasso Sea
atgaaatcatccgtcatagtttttccaggatcaaattgcgacagagatattgctgtagctttagaaaaactacaatttaaaaattcaatggtttggcataaagaaactgaactgccaaaatcagatttaattgtggttcccggtggcttttcatatggagattatcttagatctggcgcaatagcagcgaagtccaacatactatcggaagtaataaacgctggaaaaaaaggtgctttaattttgggaatttgtaatggattccaaattctaattgaatgtggattgctccagggtgctttattaagaaattctggacttaaatttatttcaaaagatatttttgtaaaagttcaatcaaataagaataaattctttaaaaaatacaaggctggtgaaacattaaaattaaacattgcacacaatgagggaaattatttcactgataaaaaacatctgaaagaattagaggataatgatctaataccacttaaatattgtgatgaaaaaggcaatatagatttcatatcgaatccaaatggttcgataaataatattgctggtatttttaataaaaataaaaatattttagggatgatgccgcatcctgaaagaatggctgacaaagttttatctggtgaagatggattgggtttattcttaagtttaatgaattaat

SEQ ID NO: 318411 - DNA, 871 bp, Unknown
  Bacterial polypeptide expressing nucleotide sequence isolated from the Sargasso Sea
gtatttactatgggggctagaccaattgctctcttgaattcaatccattttggatcaattgattatccaaaaactaaaagtttattaaatggcgttgtctcaggaataggcggttacggaaattgtattggtattccaactgttgcaggtgaaacaaagtttaatggaacatataacgagaatatattagttaatgctatggcagtcggccatgtaaaaaaaaataaaattttttattcaaaagctaaaggacttaataaatcggttgtatatgtaggatcaaaaacaggtcgcgatgggatacacggggcatctatggcatctgctgaatttgatgaaaactctgaagaaaaaaaaccaacagtacaggtaggagatccgttcacagaaaagttgcttttagaggcttgtctagaattaatgaaagacgactctattatagcgatccaagatatgggcgcagctggtttaacctcatcaagtgtagaaatggcgtctaaaggatcactaggtatagaattggaactaagtaaagttccttgcagagaagaaaatatgactccttatgaaatgatgctttcagagagccaagagagaatgttaattgtattggaggacggtaaagaacatcatgctcaaaaaatttttgaaaagtgggacttagattttgttataattggtaaaacgaataatacaaaaaatttaaccttgaaatttaaaaatgagatcgtaggggaaatacctattgaagtattagcaagtaaagctccaatgtatgatagaaaatgggttaaaaaaaaattaaaccacaaaaaaatagacattaaaaaacttaaaaagatagaactcgaggaagccttaattaaaattt

SEQ ID NO: 318412 - DNA, 694 bp, Unknown
  Bacterial polypeptide expressing nucleotide sequence isolated from the Sargasso Sea
tatggaaattgtatttggagttccaacaattgctggtcaaacgacatttgatgagtcttacaatggcaatatattagtaaatgccatgacacttggtttagtaaataaaaataagattttttactcgaaagcagcaggattagataaaccagtcatatacgtaggttcaaaaactggaagagatggaattcatggcgccagtatggcttcagcaactttcgatgacaaaattgaagaaaaaaaaccaacagttcaagttggagacccatttactgaaaaattattacttgaagcgtgcctagaattaatggctgataattcaattattgcaattcaagatatgggtgcagcaggattaacatcttcaagtgtggaaatggcatcaaaaggaaatcttggaattgaattaaatttaaacgaagttccttgtagggaggaaaaaatgactccatacgaaataatgttatctgaaagtcaagagagaatgcttatagttcttgaaaaaggaaaagaagaacacgcaaagaaaatattcgataaatggaacttagattttgcagttataggtaaaacaactaattcaaaaaaaatagaattaacatttgataataaaaaagttgctgaaataccaattgatcttcttgctgaaaatgctccaatttatgatcgtccttggaaaaaaactaaattacct

SEQ ID NO: 318413 - DNA, 562 bp, Unknown
  Bacterial polypeptide expressing nucleotide sequence isolated from the Sargasso Sea
cccttctgatttaattgttgtacctggaggattttcttatggagattatttaagatctggtgcaatagctggaaaatctttgattattaacgaagtaattaaagcagcaaaccaaggtcgtttaatcttaggtatctgcaatggttttcagattttaactgaaactggtttactagaaggtgttttattaagaaataagaatttaaagtttattaacaatgatgttaatattaaagtactaaataacaacactaaattttctaataaatataaaaaaaatcaaattttaaaaataaatattgctcataatgagggtaattactttactaatgcaaaacatttaaatgtattaaatgaagaaaatttaatagcttttaaatattgtaatgaaaatggagaaactaacgaaagttctaatccaaatggatccttagaaaatattgctggtatttataattcaaagaaaaatattttgggtatgatgcctcatcccgaaagaatgattgacaatctcatatctaacacagatggggaaaacttattttcaagtttgcttaattaa

SEQ ID NO: 318414 - DNA, 910 bp, Unknown
  Bacterial polypeptide expressing nucleotide sequence isolated from the Sargasso Sea
tgaggaaaaaaaaccaactgttcaagttggagatccatttactgaaaaacttttacttgaagcttgtttagagttaatggcaggagactcgattatagctattcaagatatgggtgcagcaggtcttacttcttcaagtattgaaatggcttcaaaaggaaatcttggaattgaaattaatttaaacaaagtaccatgcagagaatctaagatgacaccttatgaaattatgctctctgagagccaagaaagaatgttgatagttttggaaaatggtaaagaagaacaagcgaaaaaaatatttgataaatggaacttagattttgcagtaattggcaagactactaaatcaaaaaaaatagaactttattttgatgaagaaaaagttgcagatattccagtaaataccttagtagaaaactcacctatgtatgatcggaaatggaaaaaaaccaaacttcctaaaaaaaataagattaaaaaagaagatataaaacatttaaaaattattgatgctttaaaaaaaattttagcaaacccaaatgtatgtagtaaagaatggatttggcaacaatatgatcataccgtaatgggagatactattcagaaaccaggtggagatgcaggtgttgtaagagttcatggaacagataaagcagtagctgcatctgtagattcttctgctgtttattgttgggcacaccctttaactggtggaaaacaagtagtttgtgaaagtttcagaaatcttatatctgttggtgctaaaccaattgctatcaccaattgtttaaattttggtagtcctgaaaatgaggaaaatatgggtgagttttgtgaatgtgttcaaggtattggtgaagcaagtgaatatttaaagttcccagtggtttctggaaatgtatctttt

SEQ ID NO: 318415 - DNA, 610 bp, Unknown
  Bacterial polypeptide expressing nucleotide sequence isolated from the Sargasso Sea
gatgtgcagtgggcgacagaaggatgcctcggcatgcccacccggcggatctggcatgaggaaacggatctgagcggccttgatgccgttgtgctgccagggggcttcagctacggcgattacctccgctgtggtgcgattgcccgcttcgccccagcactccaggcgctgctcgacttcgcggctcaaggggggcgcgtgctggggatctgcaacggatttcaggtgctgaccgaactgggactcctgcccggagtcctgacccgcaaccgagaccttcacttcatctgtgaggacgcaccgctacaggtggccagctcccgcacaccatggctagagcactacggaacagacaggacgctcaccctgcccatcgcccatggggaaggccgctatcaatgctccgacgacaccctgaagcaactgcaggatgccgatgccattgccctgcgctaccaagccaatccaaatggctcggtgggggacattgctggcatcaccaacgactccggaaacgtgctgggactgatgccccatccggagcgtgcctgcgaccctgccaccggtgggaccgacggtcgcgtcctgctgcagggcctactgagctgag

SEQ ID NO: 318416 - DNA, 843 bp, Unknown
  Bacterial polypeptide expressing nucleotide sequence isolated from the Sargasso Sea
ttagttagaggtgttgttcgcggtataggaggttatggcaattgtattgttgttcctacaattgcagggcaaacatgttttgatgaatcttacaatggaaacatattggttaatgcaatgactttaggtttggttaaaaaaaataaaattttttattcaaaagcaacaggtatcgataaaccagttatttatgttggatcaaaaacaggaagagacggtatacatggcgctagtatggcatctgcagttttcgatgatcaaattgaagaaaaaaaaccaactgtacaagtcggtgacccctttactgaaaaacttttattagaagcttgtttagaattaatgtctgataactcaattatttctattcaagatatgggtgctgctggacttacttcgtctagtatagaaatggcatctaagggtaatcttggaatagaattaaatttaaataaagttccatgcagagaatctaatatgaatccatatgagattatgctttcagaaagccaagaaagaatgcttatagttttagaaaatggaaaagaaggcaaagctaaaaaaatatttgacaaatggaatttagattttgctataattggaaaaacaacaagttccaaaaaaatagaaatttattttgatggaaataaagttgtcgatgttccaatagaatttttatctgacaaagcccctgagtatgatagaaaatggaaaaaaacaaaacttccaataaaaaataagtataacaaagatatttataaaaatttgaaaattcttaatgttcttaaaaaaattttatctaatcccaatgtttgtagcaaggaatggatatggagacaatacgat

SEQ ID NO: 318417 - DNA, 651 bp, Unknown
  Bacterial polypeptide expressing nucleotide sequence isolated from the Sargasso Sea
cttggtctccctttctgattcccctggatacaatcacctggcagctctcaggcaggaaggtctgaagccacgggattgggacgagatctgtcgacgattgggacgtgcgccgaatcgggtcgagctcggcatgttcggcgtgatgtggtcggagcattgctgttatcgcaactccagacctctgctcaggggctttcccactgagggaccccgcattttggttggacctggggaaaacgccggtgtggtggatcttggtgacggtcaccgtctggcgttcaagattgaaagtcacaatcatccgtctgctgtggagccgtttcagggcgctgccacaggcgttggaggaatccttcgggacatcttcaccatgggcgcaaggccgattgcgttgctcaacgccctgcggttcgggccgcttgaggattccgtcaatgtgggtttgatggagggggtggttgccggtatcgcccattacggcaattgcgtcggggtgccaacggtcggcggcgaggtggtttttgacccgtcgtattccggcaatccattggtcaatgccatggctcttggcctgatggagaccgaggagatcgtttgctctggtgcggcgggtctggccaatcccgtcgtatacgtcggcagcaccaccgg

SEQ ID NO: 318418 - DNA, 397 bp, Unknown
  Bacterial polypeptide expressing nucleotide sequence isolated from the Sargasso Sea
tataaaacttcaaaaaaatggcttaagaaactccctacagataatgaaattgtaattcagggaccaggagaaaacgctggtgtaattgatttgcaagataacgatggtattgcgtttaaaatagaaagccacaatcatccaagctacatagaaccttttaacggttcagcaactggtgttggaggtatacttcgtgatatatttacaatgggagcaagaccaattgctactcttgactcaattagatttggtttaatagaaactgaaaagacaaaatacttgttaaatggtgtggttcatggaattggacaatatggtaactgtattggaattcctaatattggtggagagtgtgagtttgagtcaacatatgattttaataatttggttaatgcta

SEQ ID NO: 318419 - DNA, 775 bp, Unknown
  Bacterial polypeptide expressing nucleotide sequence isolated from the Sargasso Sea
atgataaattttttcgataaagataaatatgatgttaatgaatcacttaaagttgaaaacttaactagtaatgattatgaagagatatgtaagagattaggaaggaaacctaatagaacggaattgggaatgtttggagtaatgtggtctgaacattgttgttatagaaattcaaaaccgttattagctaattttcctattactggaaaaaatgtattggtcggccctggagaaaatgcaggtgttattgatgttggcaacaatcagaaacttgtctttaaaatagaaagtcataatcatccttcggccattgaaccctttcaaggagctgcgacaggagttggtgggatattgagagatatttttactatgggtgcgagacctatcgcagtcttaaattctttaaggttcggtaatcttgataaatcatctaatatctctttacttcgtggagtagttgctgggatttctcactacggtaattgtgtaggagttcctacagtgggaggagaaatagattttgatgatagttattcaggaaatcctttagttaatgttatggctttaggtttattagaaactgatgaaattgtttgctcaggagcaaaggaagttggttctcctgttttatatgtaggtaataccacaggtaaggatggtgtaggaggtgctagttttgctagttctgaattaactactaactctttagataatagacccgcagtacaagttggtgatccatttattgaaaaaagtcttattgaagcatgtttgg

SEQ ID NO: 318420 - DNA, 913 bp, Unknown
  Bacterial polypeptide expressing nucleotide sequence isolated from the Sargasso Sea
tacggaaattgcgtcggcgttccaacagttggcggtgaatgcgaatttcattcttcctatgacggaaacatcttagtcaatgcaatgaccgtcggtctggtagacactgataaaattttttattctactgcttcaggtgtgggtaactccgtggtttatgtggggtccaaaactggacgggatggtatccacggcgcaacaatggcttctagcgagtttaacgaagattctgaagaaaaaaggccaactgttcaagtcggtgatccctttactgaaaaacttcttatcgaggcctgcctggaactaatgtcaactgacgcaatcgtttccattcaggatatgggtgccgcaggtcttacatcttcttctgtagaaatgtcctctaaaggtgcggtgggaatagaactgaatctagatcaaattcccgtgagagaaactggaatgaccccatacgaaataatgctatctgagagtcaggaacgtatgctcatggttttaaatcctggggcagaagaacgcgccaaaaagatttttgacaaatgggaactcgatttcgctattattggtcaagttatagaggaacaacgattagttctcagagataatggccacatagttgcggatatacctgtcccccctctagtttctgaggcgccggaatatgatcgtccctgctcgtcacctcctcgcccaatgccttttccggaaaatcttccagatcttgagacccctatcaatgatgcattgttaacccttcttggatcgccaaacctctgttcaaaacgctggatatgggaacaatacgatcacatggtcatggcagacacagtccagaggcccggcggcgatgcggcagtagttcgaattcacggcagtaacaaggcggttgcgatgacttctgattgtacaccta

SEQ ID NO: 318421 - DNA, 565 bp, Unknown
  Bacterial polypeptide expressing nucleotide sequence isolated from the Sargasso Sea
atggatgattttactgtaggagttgttgtcttccctggttctaattgtgatcgtgatgtttcatgggcattggaaggttgtttagatataagaacaaaatacttgtggcatgagtcttcggatttaagtgatgtagatgcaatagttttacctggaggatttagctatggtgattatttaagatgcggagcaattgcgagattctctccattaataaatgccttggatgagtttgttaaaagcggcaaaagagttttaggaatttgtaatgggtttcaaattttgacagaatcaggatttttgcctggtgctcttgttgcaaataaaaatcttaattttatatgtgatgacgttgaactggatatcgtctcttcaaaaggaggttggtttaataatggagatgaaaaacaaactattaagttgccaatagcccatggagaaggaagatatcattgtgattctgatactttaaaaaaacttgtagataatgaattaatcgctttgagatataaaaataatcccaatggatcctcatttgatatcgcaggcataactaagaaaaggg

SEQ ID NO: 318422 - DNA, 481 bp, Unknown
  Bacterial polypeptide expressing nucleotide sequence isolated from the Sargasso Sea
tatgaaagttacagagtcagttgcaatagatcatggattaaaaaaagaagaattcaaaaaaatttgtgaattattaaacagagttcccaatataactgaattagcaatattttcagcaatgtggaatgaacattgttcttacaaatcatcgagaatacatcttaaaaaacttcacacttctggaaagcaagtaatacaaggtccaggtgaaaatgctggtattgttgatattggtgataatgaagcaattgtttttaaaattgaaagtcataatcatccatcttttatagaaccttaccaaggagcggctacaggggttgggggaattatgagagatgtatttactatgggtgctagaccaatagctaatttaaattcaatacattttggttcacctcaacacaaaaaaactaaaaatttattacgtggagcagtcaaaggtattggtggatatggtaattgtatcggagttccaaccata

SEQ ID NO: 318423 - DNA, 881 bp, Unknown
  Bacterial polypeptide expressing nucleotide sequence isolated from the Sargasso Sea
tgttgtttcaggtataggcggatatggaaattgtattggtataccaactgttgcaggagaaacaaaatttaatagcacttacaacgaaaacatattggtaaatgctatggccgtaggtttggctaataaaaaaaaaattttttattcaaaggctaaaggtctcaataaagctgttgtatacgttggatctaagactggtagagatggaattcacggagcatctatggcctctgcagagtttgatgaaaattctgaggataaaaaacctaccgtgcaagttggggatccttttactgaaaagcttttaatggaagcttgtttggagttaatgcaaaaagagtcaattatttctatacaagatatgggcgcagccggtttaacttcatcaagtgttgaaatggcccataaaggaaatttaggaattgaattaaatttggataaaattccatgtagagaggaaaatatgagtccatatgagatgatgttgtcagaaagtcaagaaagaatgctaattattttagaagatggaaaagaagatgaggcaagagcaatttttaaaaaatgggatctcgactttgttatcataggaaaaactactgaaaccaaaaatttatcattaagatttaaaacaaaaattgtagctacaattccaattgatgctttgtcctctaaagcgccattatatgatagaaaatggtcgaaaaagaatttaagtaaaaagaaaacaaatataaaagatcttaaaaaaattaactttgacgaagctttttttaaaattttatcttcccctaatcattcaaataaaagatgggtaacagaacaatacgatcagatggtcatgggtgatactatagaacgatctggtgcaaatgctgctatta

SEQ ID NO: 318424 - DNA, 892 bp, Unknown
  Bacterial polypeptide expressing nucleotide sequence isolated from the Sargasso Sea
aatagcacatataatgaaaatattttggttaatgctatggcagttgggcatgccaaaaaaaataaaattttttattctaaagctaaaggtctaaataaatcggttgtatatgttgggtctaaaactggtagagatggtatacatggagcatctatggcttctgcagaatttgatgaaaattctgaggaaaaaaaacctaccgttcaagttggcgatccctttacagagaaattattaatggaagcttgtttagagttaatgaaagataattcaattatttcaattcaagatatgggggctgccggacttacttcttctagtgttgagatggcttcaaaaggtgaattaggaatcgaactttacttggataaagtgccttgcagagaagaaaatatgactccttatgaaatgatgttatctgagagccaagaaagaatgttaattattcttgaagatggaaaagaaaagcatgctgaagaaatatttaaaaaatgggatcttgattttgtaattattggaaaaactacaaatacaaacaaattaactcttaaatataaaaataaagttgaaggcgaaatccctttagacgctttgtcctcaaaagcacccatgtacgatagaaaatggattaaaaaaaaactaactaaaagtaaaatagatactaaaaaattaaaaaatattaaaattgaagatgccttaattaaaatattgtcctcagcaaatcactcaaataaaagttggattacaaatcagtatgatcagatggtaatgtgtgatactgcacaaagatctggctctgatgctgcgattataagaattcataataaagaaaaggcaattgctgtttctgttgattcatcttctaattattgtaaagcccaccctttaactg

SEQ ID NO: 318425 - DNA, 469 bp, Unknown
  Bacterial polypeptide expressing nucleotide sequence isolated from the Sargasso Sea
aatggaagtcactgaagcagttgcaatagaccacggattaaaaaaagaagagttttctaaaatatgtgaacttcttaagagaatacctaatttaactgagctagcaatattttctgcaatgtggaacgaacattgctcttataagtcttctagaaaacacttaaaaaaaatgcatacaaaaggaaaacaggtcatacaaggaccaggagaaaatgctggtgttattgatattggagatgatgatgcaattgtatttaaaattgaaagccacaatcacccttcgtttatcgagccttatcaaggtgcagcaaccggagttggtgggatcatgcgagatgtatttacaatgggagcaagaccaatagcgaatttaaattcaattcattttggttcccctcaacataaaaaaacaagaaacttattaagaggagttgttaaaggcataggtggatacggaaattgtattgga

SEQ ID NO: 318426 - DNA, 856 bp, Unknown
  Bacterial polypeptide expressing nucleotide sequence isolated from the Sargasso Sea
ggaaaaaaagtaattcaaggtccaggtgaaaatgccggtgtcattgatataggtgatgacgatgcaatagtttttaaaattgaaagtcataaccatccctcatttatagagccatatcaaggtgctgcaacaggtgttggtggaataatgagagatgtttttacaatgggtgcaagacctattgcaaacctaaattcaattcattttggatcaacacaacataaaaaaactaaaaatttgttgagaggtgttgttaagggaattggaggatatggaaattgtattggagtaccaactatagctggccaaacttgttttgatcaatcttataatggaaatattttagtaaacgcaatgacattaggtttggtaaataaaaataaaattttctactcaaaagctgcagggataaataaaccagtcatttatgttgggtcaaaaactggaagagatggtattcatggagcaagtatggcgtcagcaatattcgatgacaaaatagaggaaaaaaaaccaaccgttcaagtcggagatccttttactgaaaaacttcttttagaagcttgtttagagctaatgtctgataaatcgattattgcaattcaagacatgggtgctgcaggcttaacatcctcaagtatagaaatggcatcaaaaggaaacttaggaattgaattatatttagataaagttccttgcagagaggataaaatgacaccatatgaaattatgttatctgaaagccaagaaagaatgttgatagttttagaaaatggaaaggaagatagcgcaaaaaaaatatttgataaatggaatttagactttgccataataggaaaaacaaccaactccaaaa

SEQ ID NO: 318427 - DNA, 904 bp, Unknown
  Bacterial polypeptide expressing nucleotide sequence isolated from the Sargasso Sea
aacaggccgtgacggtatccatggggcaagtatggcctcagcaatttttgatgacaaaattgaagaaaaaaaaccaactgttcaagttggagatccatttacagaaaaattattgttagaagcatgtttggaattgatggcagggaaatcgattatatcaatccaagatatgggcgcagctggattaacatcttcgagtattgaaatggcatctaaaggtaatttaggtattgaattaaatctaaataaagtcccatgccgggaggaaaaaatgtcaccatatgaaattatgctttctgaaagtcaagagagaatgttaattgtattagaaagtggaaaagaagcagaggcaaaaaaaatttttgataaatggaatttagattttgcagtaataggaaaaactaccgactcaaaaaaaattgagttattttttgataataaaaaagttgctgaagttccaataaacatattagcagaaaatgcacctatatatgatcgaaagtggaaaaaaacaaaacttccacaaaaaattaaatttaataaagatgattttaaaaaattaaacattactgaagttcttaagaaaattttaagtttaccaaatatttcaagtaaagaatggatatgggagcagtacgatcatacagttatgggagacactattcaaaaacctggttctgattcgggagtaataagagtacacggtacaaataaagcagttgcaacttcagtagactcctctgctatctattgttacgcacaccctcttactggcggtaaacaagttgtatgtgaaagttggagaaatttaatttcatgcggggctattccaattgcaattaccaactgtttaaactttggtaatcctgagaaagagaaaaatatgggtgaatttgtcgaatgt

SEQ ID NO: 318428 - DNA, 589 bp, Unknown
  Bacterial polypeptide expressing nucleotide sequence isolated from the Sargasso Sea
ttggcacaacgattctgaaattcctaaaagtgatttaattgtactgcctggaggtttctcttatggtgattaccttaggtgtgggagcattgctggtaaatcaagaataataaaatctgtaattgattttgcaaattctggaggattagtgcttggtatctgtaatggttttcaaatactgactgaaacaggcctacttcctggaatacttcaacaaaataaatacctaaattttatttgtaaaaatgtttttgtgaaaattaaaaataaggaaaataaatattttaaaaacattaaaaaagaagttttagaacttcatattgcacataacgagggaaattacttttgttcaaatgatgaattaaaatcaatagaggataatggacaaatagcggttacctattgtgacgataaaggaaatgataacgaacataataatccaaatggggctattaaaaatatagctgggatatttaataaagataaaaatattttgggaatgatgcctcatccagaaagaatgattgatccttttctttcgggtgaagatgggtcacttttttttgaaaatttaatgggcagcatttaa

SEQ ID NO: 318429 - DNA, 733 bp, Unknown
  Bacterial polypeptide expressing nucleotide sequence isolated from the Sargasso Sea
atgctagttgacgagaaaattgcaattgaacatggtttaaaatcagatgagtataaaaaaatttgtaaattattgaagagagtacctaatattactgaattgggtatattttctgcaatgtggaatgaacattgctcctataaatcttctcgaattcatttaaaaaaattgcatactaaaggaaaaaaagtaattcaaggaccaggggaaaatgctggggttattgatattgaagatggagatgcaatagtttttaaaatagaaagtcataatcatccatcatttattgaaccgtatcaaggagctgcaacaggtgttggaggaattatgagagatgtttttactatgggagcaagacctatagctaatttaaattctatccattttggttcttctcaaaataaaaaaacaaaaaatctattaagaggagttgttcatggtattgggggttatggtaattgtatgggtgttccaactattgctggacaaacatcatttgatagctcttacaacggtaatatcctggttaacgcaatgaccttaggattagtcaaaaaaaacaaaatattttattcaaaagcagcaggattaaataaaccagtaatatacgttggctcaaaaactggaagagatggaattcatggtgctagtatggcctcagcaagttttgatgataaaattgaggaaaaaaaacccacagttcaagttggagatccttttactgaaaaacttt

SEQ ID NO: 318430 - DNA, 392 bp, Unknown
  Bacterial polypeptide expressing nucleotide sequence isolated from the Sargasso Sea
aatgcaggtaaatgaaaaagtagctattgaacacggtcttaaagctgaagaatataaaaaaatttgtgatttattaaaaagaaatcccaacatcactgaactaggtatattttcagcaatgtggaatgaacattgttcttataaatcatctagactccatttaaaaaagttacctactaaaggaaaaaaagttatccagggtccaggtgaaaatgctggtgtaatagatattgaagatggtgatgctatagtatttaaaatagaaagtcataatcatccatcatttatagaaccttatcagggagcagcgactggagttggtggaattatgagagatgtttttacaatgggagcaagacctatagctaatttaaattcaattcattttggct

SEQ ID NO: 318431 - DNA, 889 bp, Unknown
  Bacterial polypeptide expressing nucleotide sequence isolated from the Sargasso Sea
gatgcaattgtatttaaaatagaaagtcataaccatccctcatttattgagccctatcaaggagcagctacgggtgttggtgggatcatgagagatgtgttcacaatgggtgccagaccaattgctaatttaaactctattcattttggctcaccagaccatgaaaaaacaagaaatctattaagaggagttgttaaaggtattggtgggtatggtaactgtattggtgttccaacaattgctggtcaaacttgctttgatgagtcttataatgggaatattttagtaaatgcaatgacattaggtttagttaataaaaataaaatattttattcaaaagctgcaggaattaacaaaccagtaatttatgttggctcaaaaacaggaagagatggaatacatggtgcgagtatggcatcagctatttttgacgacaaaatagaggaaaaaaaacctacggttcaagttggtgatccgtttacagaaaaactacttcttgaggcttgtcttgagcttatggctggtaaatcaataatatcaattcaagatatgggtgccgcaggtttaacttcatctagcattgaaatggcatctaaaggtgatttaggtattgaaatagatttaacaaaagttccttgtagagaaaaaaatatgacaccttatgagataatgctctcagaaagccaagaaagaatgcttatagttttggaggaaggaaaagaaaatgaagcaaaaaaaatatttgataaatggaacttagactttgcgataattggaaagacaacaaatagtaaaaatattgaattgtttttcaagaatgaaaaagttgctgaaattccgattgattttttagcggagaatgctcctatgtacgatagaaaatggataa

SEQ ID NO: 318432 - DNA, 513 bp, Unknown
  Bacterial polypeptide expressing nucleotide sequence isolated from the Sargasso Sea
aatggttaaagttaatgaaaaaatagcaattgagcatggattaaaaaaagatgaatataagaaaatctgtgatcttttaaagagaataccaaatattactgaattaggtattttttcggcaatgtggaatgagcactgctcttacaaatcatccagaagacacttaaaaaaattacacactaaaggcgaccaggttattcagggtccaggagaaaatgccggagttgttgatattgaggatgatgatgcaattgtatttaaaattgaaagccataaccatccttcatttattgagccctatcaaggagcagcaacaggtgttggtgggattatgagagatgtatttacaatgggcgcgagacctattgctaatttaaactctattcattttggctcgccagaccatgaaaaaacaagaaatctgttaagaggagttgttaaaggtattggtggatatggtaactgcatttggtgtccgactatagctggtcaaacttgctttgatgaatcttt

SEQ ID NO: 318433 - DNA, 667 bp, Unknown
  Bacterial polypeptide expressing nucleotide sequence isolated from the Sargasso Sea
gatggataattttactgtaggagttgttgtcttccctggttctaattgtgatcgtgatgtttcatgggcattggaaggttgtttagacataagaacaaaatacttgtggcatgagtcttcagatttaagtgatgtagatgcaatagttttacccggaggatttagctatggtgattatttaagatgcggagcaattgcgagattctctccattaataaatgccttggatgagtttgttaaaagcgggaaaagagttttaggaatttgtaatgggtttcaaattttgacagaatcagggtttttgcctggtgcccttactgcaaataaaaatcttaatttcatctgtgatgatgttgaacttgatatagtttcttcaaaaggaggttggttcaataatgtagatgaaaaacaaacaattaagttgccaatagcgcatggggaaggaagatatcattgtgattctgatactttaaagaaacttgtagataaagagttgatcgctttaagatataaaaataatcccaatggatcctcattcgatatcgcaggcataactaatgagaagggaaatgttctaggtttaatgcctcatccagagcgagcatgcgacgagacaattggtgggactgatggtctctttacattaaaatcattaatattgaaataa

SEQ ID NO: 318434 - DNA, 589 bp, Unknown
  Bacterial polypeptide expressing nucleotide sequence isolated from the Sargasso Sea
gcataatgataatgaattaccaaaaagtgatttagttgttctacctggtgggttttcttatggtgattatcttcgttgtggcagcatggctgctaaatcaaaaataatgcaatcagtcatcaattttgcaaaatctggtggtttggtcatgggtatttgtaatggatttcaaatattagttgaaactgggttagtgcctggtgtgctacttagaaataaatatctagagtttatctgtaaaaacgtttttgtaaaattagataacaaagaaaatacttattttaaaaatcttgataaaaaagttttagaatttcatattgcccataacgaaggaaactacttttgtacaaaagatcaattaaaagaaattgaagataataatcaaatagcaatttattattgcaataatgagggtaaagttgaggatcaatttaacccaaatggatctttaaaaaatattgcaggaatttttaataaagaaaaaaatgtattaggaatgatgccacacccagaaagaatgattgatcaaagtttatctggtgaagatggctcaattttctttaaaaatctaattaataatatcaaataa

SEQ ID NO: 318435 - DNA, 904 bp, Unknown
  Bacterial polypeptide expressing nucleotide sequence isolated from the Sargasso Sea
ctcttctagtgttgaaatggcttcaaaaggaaatcttggaattgaattaaatctaagcgaggttccttgtagggaagaaaaaatgactccatacgaaataatgctgtctgaaagtcaagagagaatgcttatagttcttgaaaaaggaaaagaagaacatgcaaagaaaatatttgataaatggaacctagattttgcagttataggtaaaacaactaattcaaaaaaaatacaattaatatttgataataaaaaagttgctgaaataccaattgatcttcttgctgaaaatgctccaatttatgatcgtccttggaaaaaaactaaattacctcaaaaattaaaatttgataaagatgaatttaaatctctaaaactaccagattgtctaaagaagattttaagtaattcaaatatttctgataaaaagtggatatgggatcaatatgatcatacggtaatgggagacacgattcaaaaacctgggggtgatgctggagttgttagagttcatgggacaaataaagcggtagcagcatcagtagattcatccgcattatattgtttctcgcatccattgactggaggaaaacaaatagtttgcgagagctatagaaatcttatttcggtaggagctaaacctattgctattacaaattgtttaaattttggaaatccagaaaaagaaaaaaatatgggtgaatttgtagaatgtgttgagggaattacagaagcaagtaagtatctagattttccagtcgtgtccggaaatgtttcgttttataacgaaacaaaagataaaggtatcaagcctacaccaacaattggaggtgtagggctaatctctgactatcaacaaatgcttactatggattttaaaactgaaggaaacttagtttatgta

SEQ ID NO: 318436 - DNA, 576 bp, Unknown
  Bacterial polypeptide expressing nucleotide sequence isolated from the Sargasso Sea
acatggattaaaaaaagatgaatttgtaaaaatttttgaattactaaaaagagttccaaatataactgaattaggaatattctctgcaatgtggaatgaacactgttcctacaaatcatcaagaaagcatttaaaaaaactacatacttcaggaaatcaagtcatccaaggacctggtgaaaatgctggtgttgtaaatattggagatgatgatgctttagtttttaaaattgaaagtcataatcacccatcttttattgagccctatcaaggagcagccactggagtgggtggtattatgagagatgtatttaccatgggagctagaccaatagccaatctaaattcaatacattttggttcacctcaacacaaaaaaactaaaaatttattgcgtggagttgtcaaaggcattggaggttatggtaattgcataggagtaccaaccatagcaggacaaacttcttttgatgattcatacaatggaaatattttagtaaatgcaatgacgcttggtctagtaaataaaaaaaaaatattttattcaaaagctgcaggaataggaaaaccagttat

SEQ ID NO: 318437 - DNA, 337 bp, Unknown
  Bacterial polypeptide expressing nucleotide sequence isolated from the Sargasso Sea
atgaaagttacagaggctgttgcaatagaacatggtttaaagaaggatgaatttgcaaaaatttgtgaattattaaaaagagtaccaaatataaatgagctagcaatattttctgcaatgtggaatgaacattgttcctacaaatcatcaaggaaacacctaaaaaaactcaacacttcaggaaaacaagtaatacaaggtccaggtgaaaatgcaggtgtcatagatattggtgatgatgatgctattgtttttaaaattgaaagtcataatcatccatcttttatagaaccttatcaaggtgcagctactggtgttggaggtataatgagagacg

SEQ ID NO: 318438 - DNA, 940 bp, Unknown
  Bacterial polypeptide expressing nucleotide sequence isolated from the Sargasso Sea
aatgaacaaatagctatcgatcatggactgaagaaagatgaatataaaaaaatttgcgatctattaaagagaactccaaatattacagaattaggtattttttcagcaatgtggaatgaacactgttcttataaatcatctagaagacatcttaaaaaattacatactaaaggtgatcaagttattcaaggtccaggagaaaatgctggtgttgtcgacattgaagatgatgatgcaattgtatttaagatagaaagtcataaccatccttcatttattgagccctatcaaggtgcagcaacaggtgttggtggaattatgcgagatgtatttactatgggagcaagacctattgctaatttaaactcaattcactttggctcaattgatcacgaaaaaactagaaatttattaagaggggttgttaaaggtattggtggatatggtaattgtattggtgttccaactatcgctggtcaaacttgctttgacgaatcttataatggaaacattctggtcaatgcaatgacattaggtttggtaaataaaaataaaatattttactctaaagctgctggagttgataagcctgttatatatgtagggtcaaaaacaggtagagacggaattcatggtgcaagtatggcatcagctattttcgatgataagatagaggaaaagaaaccaacagttcaggttggtgatccatttactgaaaaactacttttagaggcttgcttagaattaatggcaggtaaatcaataatatcaattcaggatatgggagctgctggactaacttcatcaagtattgaaatggcatcaaaaggtgatttaggtattgaaatagatttaacaaaagtaccttgtagagaagaaaatatgacaccttatgaaatcatgctttcagaaagccaagagcgtatgttgattgtattag

SEQ ID NO: 318439 - DNA, 361 bp, Unknown
  Bacterial polypeptide expressing nucleotide sequence isolated from the Sargasso Sea
aatgacagtaaacgaacaagtagctatagatcatggtcttaaaaaagatgaatatgctaaaatttgtgagttactgaaacgaactccaaatattacagagcttggtattttctccgctatgtggaatgaacattgctcctataaatcatcaagacttcacttaaaaaaacttcctactaagggcaaacaagtaattcaaggaccaggagaaaatgctggagtaattgatattggtgacgatgatgcaatagtttttaaaattgaaagccataaccacccttccttcatagaaccttatcaaggagctgcaaccggtgttggtggaataatgagagatgtatttacaatgggagctagacct

SEQ ID NO: 318440 - DNA, 484 bp, Unknown
  Bacterial polypeptide expressing nucleotide sequence isolated from the Sargasso Sea
tgcggagcaattgcgagattctctccattaataaatgccttggatgagtttgttaaaagcgggaaaagagttttaggaatttgtaatgggtttcaaattttgacagaatcaggttttttgcctggtgctcttgttgcaaataaaaatcttaattttatctgtgatgacgttgaactggaaatcgtttcttcaaaaggaggttggtttaataatgtagatgaaaaacaaacaattaagttgccaatagcgcatggggaaggaagatatcactgtgattctgatactttaaagaaacttgtagataatgaattgatcgctttgagatataaaaataatcccaatggatcctccttcgatatcgcaggtataactaatgagaagggaaatgttctaggtttaatgcctcatccagagcgagcatgcgacgagataattggtgggactgatggtctctttacattaaaatcattaatattgaaataaa

SEQ ID NO: 318441 - DNA, 790 bp, Unknown
  Bacterial polypeptide expressing nucleotide sequence isolated from the Sargasso Sea
tgcgatagtttttaaaatagaaagtcataatcacccttcatttattgaaccatatcaaggagcagcaactggtgttggtggtataatgagagatgtttttacaatgggcgcaagacctattgcaaatttaaattctattcattttggttctccgcaacatcctaaaacaaaaaatttattaagaggagttgttaaaggtattggtggttatggaaattgcatgggtataccaactgttggtggtcaaactagctttgacgattcttataacggaaatattttagttaatgcaatgactttaggattagtaaataagaataaaattttttattcaaaagcagctggagtgaataaaccagtaatatatgtgggttcaaaaactggtcgagatggaattcatggtgcaagcatggcttcagcaatttttgatgataaaatagaagaaaaaaaaccaacagttcaagttggagatccttttacagaaaaactattattagaagcttgcttagaattaatgtcaggaaaatcaattatatctattcaagatatgggggctgctggattaacatcttctagtattgaaatggcatcaaaaggaaatttgggcatagagttaaatctaaataaagttccatgtcgagaagaaaaaatgacaccttatgagattatgctgtctgaaagccaagaaagaatgctaattgtcttagagagcggaaaagaagacgaagcaaaaaaaaattttgataaatggaatttagattttgctgtaataggaaagactactgactca

SEQ ID NO: 318442 - DNA, 649 bp, Unknown
  Bacterial polypeptide expressing nucleotide sequence isolated from the Sargasso Sea
aatgataaatcaagaaaataatgatctatatgatcttaatgaagcactacaagttgaaaatttaacacttaaagattacgaagaaatttgcaaaagactaaagagaaaacctaacagaacggaattaggcatgtttggtgttatgtggtccgaacattgttgttatagaaattcaaaacctttactatctaagtttcccactaaaggtaaaaatgttttagttggacctggagaaaatgctggcgttattgatgttggaaacaatcaaaaacttgtttttaaaatagaaagtcataatcatccttctgctattgaaccttttcaaggcgcagcaacaggtgtaggaggaattttaagagatatattcacaatgggtgctaggccaatcgcagtcttgaattcattgagattcggtaatcttgataaatcatcaaatgttgatttactacgaggagttgtatccggtatttcacattatgggaattgcgtaggtgtgccgactgttggaggtgaaattgacttcgatgatagttactctggaaatcctcttgttaatgttatggctttaggacttttagagactgaggaaatcgtttgttctggagctaaaaatgtaggatcaccagtgttatatgttggtaatacaact

SEQ ID NO: 318443 - DNA, 715 bp, Unknown
  Bacterial polypeptide expressing nucleotide sequence isolated from the Sargasso Sea
ttctggagctaaaaatgtaggatcaccagtgttatatgttggtaatacaactggcagagatggtgttggtggtgctagttttgctagttcagaattaactacaacttcattggatgatagacctgctgttcaggtaggggatccatttgttgagaaaagtcttattgaagcttgcttggatgctttcaagacaggggatgtaattgcagctcaagatatgggtgctgcaggtttaacatgtagtagcgcagaaatggctgcaaatggaaatttagggatatctattgatttagatttggtcccttctagagaagatgatatgtcttcataccaatatttattatctgaatcgcaagaaagaatgttgtttgtcgttaaagaagaaaaaattaatgatcttattgaaaaatttaataaatggggattatatgccagtgttattggcgaagtgataagaactaatgaggtaattatttctcataaaggtaaaattgtggcccaaatacctacttctgccttatctgatgatactccagtaaattttcacaatgtgattaataacccacccgatgatcttttaaataaatgggaatggaaagaaaatgatttaccagaaattcatgagcaaaaaatattttcattgaaagaaaataagaatttttctttttcagaaatcattttaaaactactatctaatccatcaatagcttctaaa

SEQ ID NO: 318444 - DNA, 371 bp, Unknown
  Bacterial polypeptide expressing nucleotide sequence isolated from the Sargasso Sea
aatgattgtaaacgaacaagtagcagttgatcacggtttaaagaaagatgaatacgcaaaaatttgtgaactattaaggagaactcccaatattacagaactaggtattttttccgcaatgtggaatgaacattgttcttataaatcatcaagattacacctaaaaaaactgcctactaaaggaaagaaagttattcaaggtcctggagaaaacgctggtgttatcgatattgaggatgatgatgcgatagtttttaaaatagaaagtcacaatcacccctcatttattgaaccatatcaaggtgctgctaccggtgttggaggaataatgagagatgtatttacaatgggtgcaagaccaatagctaact

SEQ ID NO: 318445 - DNA, 430 bp, Unknown
  Bacterial polypeptide expressing nucleotide sequence isolated from the Sargasso Sea
aatgcttgttaacgaaaaaattgcaattgaacatggtttaaaatcggatgagtacaaaaaaatttgtaaattattgaagcgaacacctaatattactgagttgggtatattttctgcaatgtggaatgaacattgctcctataaatcttcacgaattcatttaaaaaaattacatactaaaggaaaaaaagtaattcaaggacccggagagaatgctggcgttattgatattgaggatggagatgcaattgtttttaaaatcgaaagtcataatcatccgtcatttattgaaccttatcaaggagcagcaacaggtgttgggggaattatgagagatgtttttactatgggagcaagaccaatagctaatttgaattctatccattttggttcttctcaaaataaaaaaacaaaaaatctattaagagga

SEQ ID NO: 318446 - DNA, 715 bp, Unknown
  Bacterial polypeptide expressing nucleotide sequence isolated from the Sargasso Sea
actaaagacgagtatctctctattgtaaaaaaactaaatagagaacctaatactaatgaaataggagtaatagctgctatgtggtcagagcattgctcatataaaagttcaaagttttatctaaagaaactcccaacaaagggtaaacatgttatccaagggcctggcgaaaatgctgggatcatagatattggcgataatcaatgcgcagttttcaaaatagaaagtcataatcatccatcttttattgagccatatcagggtgctgcaactggggttggcggtattcttagagatgtttttacaatgggtgcaaggcctattgcattaatgaattctctaagatttggaaatcctaagcttaaaattacaaaaaaacttattaatggagtcgtttcaggaattgctggatatggtaattgtatgggaattccaacagttggaggagagatttattttgacaaatcttataatggcaatccactagttaatgcttttgctctaggcataacgacaaaagataaaattttcttaggcagagctgatggcccaggaaatcctgtttattatcttggagccaaaactggtaaggatggtgtgaagggtgccattatggcctcagatgtatttgaaaatgaagaagagcttgataggccaacagtacaaattggtgacccttttaaagaaaaacttctactcgaagcatgtctagagt

SEQ ID NO: 318447 - DNA, 853 bp, Unknown
  Bacterial polypeptide expressing nucleotide sequence isolated from the Sargasso Sea
tatgcgagctctgaatatgacagcttatgaattaatgctttccgaaagccaagaacgaatgttgatggtaattgatccctcaaaagagaagatggcacgtgagatttttaaaaaatgggatcttgaatttgaagtaattggtgaagttacagatactaaaaaacttgtattacatatgaacgggaatgaagaagcaagtatcccaattaatatcttagttgaggatgcaccagaatatcaaagggaatatattgttagcaaaccatcaccaccagtaatttttaatcccaatgaattcgatgataaaaaaatattagatgaattagttttgatggttagtcatccaaatttatgtagtcgcaagtggatatgggaacagtatgatcacatggtaatggctgatacagtagtaagacctggatcagatgcggcagtagtaagagttcatgggaccaataaaggaattgctataagtactgattgctctccaacatactgtaagcataattcatttgagggtggaaaacatgcagtagtcgaaacatggagaaaccttatatcttcaggagctataccaattgctattactgactgtatgaattttggtaatcccgaaaagccagaaataatgggtcagtttgttgaatgtattcgaggcatgggagaagcatgttctaaactgaaatacccagttatttctggaaatgtatctttatacaatgaaacaaatggagtgggtatttatccaactcctgcgattggcggagttggactaattagagatttatctaagactatgactatcgattttaaatctgaaggtaatattgtatttgtaatcggtgaaagtcat

SEQ ID NO: 318448 - DNA, 856 bp, Unknown
  Bacterial polypeptide expressing nucleotide sequence isolated from the Sargasso Sea
ttacttgaacttggaattttttcagcaatggtggaatgaacattgttcatataaatcatccaaaatacatttaaaaaaattacctactaaaggaaatcatgtaattcagggtcctggtgaaaatgctggagtgattgatataggtgataacgatgcaattatttttaaaattgaaagtcataaccacccatcttacattgaaccataccaaggtgctgctactggtgttggaggcattcttagagacgtttttactatgggtgcacgaccgatcgctcttttaaattccattcattttggttctccgtcacatccaaaaactaaaagtttattaaacggtgtagtatccggtataagtggatatggaaattgtattgggattccaacagtagcgggtgaaacaaaatttaatgaaacctacaacgaaaatatcttagtaaatgcaatggcggttggccatgcaaaaaaagataaaattttttactccaaagcaaaaggattaaataaatctgttgtgtatgtcggttcaaaaaccggacgagacggaattcacggcgcatctatggcctctgctgaatttgatgaaaaatctgaggaaaaaaaacctactgttcaagttggtgatcctttcacagaaaaattgttattagaagcttgtttagagttaatgaaagatgactcaataattgctattcaagatatgggtgctgcaggactaacgtcctctagcgtggaaatggcctctaaaggatctttaggtattcaactagaattagataaagttccatgcagggaaaataatatgactccttatgaaatgatgttatctgagagccaagaaagaatgctaataatt

SEQ ID NO: 318449 - DNA, 688 bp, Unknown
  Bacterial polypeptide expressing nucleotide sequence isolated from the Sargasso Sea
tacggtaattgcatttggagtacctactgttggaggagaggttaatttccatccatcttataatgggaatattttagtaaatgcaatgaccgtaggaattgcaaaaaaagataagatattttactccgctgcggcaggaattggaaatccagttgtgtatgtaggatcaaaaactggacgtgatggtattcacggagcaacaatggcatctgctgagtttgatgaagattctgaagaaaaaaaaccaactgttcaagttggtgacccatttactgaaaagttattacttgaggcatgtcttgaattaatgaaagaagaggcaattattgcaattcaagacatgggtgcagctggactaacatcctcttcaattgaaatggcatctaaaggtgatgtgggtttggaaattgatctttcaaaagtacctatgcgcgcgcaaaatatgtcagcttatgagctaatgttatcagaaagtcaggaacgcatgctcatggttcttgatccttcaaaagaagacatggctcgagatatttttaaaaagtgggatctggaatttgaggtaatcggcaaggtaaccgataccaaaagacttattcttatgatgaacggaaaagaagaggccagtattccgattaacattttagttgaagatgctcctgaagtatcaaagagaatatattgtcagtga

SEQ ID NO: 318450 - DNA, 635 bp, Unknown
  Bacterial polypeptide expressing nucleotide sequence isolated from the Sargasso Sea
tttggaatttttccagaaaaaaattggtgtggaattagcaaagagtcatggactgaccagtaaagaatacaaaactatattggaattgatagaacgagaacccacaatcactgagttaggagtgttctccgcaatgtggaacgagcattgttcttacaagtcgaccaagaaatggctacgtacactaccaacaactggtccaaaggtaatctgtggtccaggtgaaaatgcggggataatagacatagacgacggtgatgcactggtctttaagatagagagccataatcatccctcgtatattgacccatttcaaggtgctgcaaccggagtgggaggaattttaagggatatatttacaatgggagcacgaccaattgtaactatgaatgcacttagttttggatgtaaagacagaaaaaaagtgaatcatctcctatctgaagtagtaaatgggattggaagttatgggaatagctttggggttcccaatttaggcggagagctccgtttcgacgaatcctatgaaggtaactgcctagtaaacgtctttgctgctggagttgttaaatcagacaaaatcttctattccagcgcaactcaaagtaatctaccagttgtttatttgggagcaa

SEQ ID NO: 318451 - DNA, 897 bp, Unknown
  Bacterial polypeptide expressing nucleotide sequence isolated from the Sargasso Sea
cttcttttagaagcttgcttagagttaatgtctgacaaatctattattgctattcaagatatgggtgctgcaggtttaacgtcttccagcattgaaatggcatcaaaaggaaatttaggaattgaattacatttagataaagtaccatgcagagaagaaaaaatgacaccatacgaaattatgttgtctgagagccaggaaagaatgttgatagttttagaaagcgggaaggaagatagtgcaaaaaaaatatttgataaatggaatttagattttgcagtaataggtaaaacaactaattccaaaaatattgaactttattttgaaaaagaaaaagtagcaaatgtaccaattaaatttttagcaaatgaagctcctatgtatgatagaccttggaaaaaaaccaagcttcctcaaaagattaaattttcaaataatgattttaaaaaattaaagtttaatgatgtcattaaaaaaatgatttctcatccaaatatttgttctaagcaatggatatgggaacaatatgatcatactgtaatgggtgatacaattcaaaaacctggtggtgatgcaggtgttgtaagagtacacggtaccaaaaaagctgtagcttcatcagttgactcgtccgcatcttattgtcatgcgcatccattcaccggaggaaaacaagttgtttgtgaagcttggagaaatctagtttcagttggtgcagaacccatagcaataacgaattgtttaaattttggaaacccagaaaaaaaagaaaatatgggtgagtttgttgaatgcattgatggaattaatgaagctagcaaatatttaaatttccctgtcgtttcgggaaatgtatcgttttacaatgagacaaaagataaaggaataaaaccctac

SEQ ID NO: 318452 - DNA, 535 bp, Unknown
  Bacterial polypeptide expressing nucleotide sequence isolated from the Sargasso Sea
cgttatagatattggtgatgatgatgctatagtttttaaaatagaaagtcacaaccatccttctttcatagaaccctaccaaggagctgctacgggagtgggtggaatattgagagatgtttttactatgggtgctcgacctattgcaactcttaattctattcattttggtagccacgaaaatgcaaaaacaaaaaatctactgagcggtgtagtttctggtatcggtggctatgggaactgcatgggtattcctaatgttggcggcgaagtgaaatttgattcaacatataatgataatattttagttaatgcaatggctgtagggttagttaaaaaaaataaaattttttactcaaaagcaaaagggattaaccaatcagttatttatgttggatctaaaacgggaagagacggaatacatggagcaagtatggcctcagcaaaatttgataaaaatactgaagaaaaaaaacctactgtacaagttggagatccttttactgaaaaattacttttagaagcttgtctagaa

SEQ ID NO: 318453 - DNA, 997 bp, Unknown
  Bacterial polypeptide expressing nucleotide sequence isolated from the Sargasso Sea
aggattccgaccattggtggagaaactaattttgataaatgctataatgaaaatattttggttaatgcaatggctgttggtttagcaaagacgaataaaattttttattccaaagcaaaaggtatgaatatgcccgttatttatgttggttcaaaaacaggaagagatggaatacatggagctagcatggcgtctgcggaatttgacagtacttctgaagaaaaaaaacccactgttcaagtgggagatccttttaaagaaaaactactgcttgaggcctgtcttgaattgatgaaagaaaattcaattatatctatacaagacatgggagctgctggactaacatcctcaagtatagaaatggcatccaaaggaaatttgggaattcaattaaacttggacaaagttccctgtagagaatatggaatgactccatatgaaattatgctttctgaaagtcaagaaagaatgcttataattttaaaaaaaggaaaagaggaatcggcaaaaaaaatatttgataaatggaatttagatttttcaattattggaaaaacaaatgatagcaaaaatttattaataatggaaaaagggaaaatcgtttgcgacttacctctcaagtctctctcttcaatggctcctgtatatgatcgtaaatggacaaaacaccctcttccaaaatcaaataaacctatagatcaatataaaaataaaattgatgaatctttaattaaactcgttcaaacaacaaggttgtcaaataagtcttgggtttgggaacagtacgaccagacagttatgggtgatacaattcaaaagcctggaggtaattctggtgtaataagaatacatgaaactaataaagccatatcagtttctgtagattcctcagcaaattattgcaaagctcatcctttaaccggaggaaaacaagttgtttgtgaaaatttggagaaatttgattgctgtaggctcaaaaccaattgcgataactaat

SEQ ID NO: 318454 - DNA, 838 bp, Unknown
  Bacterial polypeptide expressing nucleotide sequence isolated from the Sargasso Sea
gggtatggtaattgtattggcattccaactgtagcaggagaaacaaaatttaatgatacttacaacgaaaatattttagtaaatgcaatggcagttggacacgcaaaaaaaaataaaatcttttactccaaagcaaaaggaattggtaaatcagttgtgtatgttggttcaaaaacaggaagagatggcattcatggagcatcaatggcatctgctgagtttgatgagaattcagaagaaaaaaaacctacagtgcaggtaggtgatccttttactgaaaaattactattagaggcatgtttagaattgatgaaagatgactcaattattgcgattcaagacatgggtgctgctggtttgacatcttcaagtgtagaaatggcttcaaaaggttctttaggaattgagttagatttagagaaagttccttgtagagaggagaatatgacaccatatgaaatgatgttatctgaaagtcaagaaagaatgctgataattttagaagaaggaaaagaggagtctgcaaggaaaatttttaaaaagtgggatcttgacttcgttgtaataggaaaaactactcaaacaaaaaatttgaccttaaaatttaacaaaaaaattaaaggagaaattccaatagaatttttagctaacaaagcacctatgtacgataggaaatggaagaagaagaatatcaaaaaaaataaaattgaagttaaaaaacttaaaaaagttaaaattgaagatgctttaacaaaaatattatctagcccaaatcattcaaataaaagctggataacagagcaatttgatcaaatggtaatgtgcgataccttgcaaa

SEQ ID NO: 318455 - DNA, 775 bp, Unknown
  Bacterial polypeptide expressing nucleotide sequence isolated from the Sargasso Sea
atggaagtaacagaggctctagcaatagatcacggattaaaaaaggaagaatattctaaaatatgtgaattattaaaaagagttccaaacataactgaattaggaatattttctgcaatgtggaatgaacattgttcttataaatcatcaaaaaaacacttaaaaaatcttcatacaattggaaagcaagtcatacagggtccaggtgaaaatgcaggcgttatcgatattggagataatgacgcaatagtttttaagattgaaagtcacaatcacccttcttttatagagccttatcaaggtgcggccactggtgttggtggaataatgagagatgtttttactatgggcgcgagaccaatagcaaatttaaattctatacattttggatctcctcaaaacaaaatgacaagaaatttattaagaggagttgttaagggtataggaggatatggcaattgtattggtgtacctactattgccggacaaacatctttcgatgaatcttataatggaaatattttagttaatgcaatgacattaggtttggtgaataaaaataaaattttttattctaaaccaacaggtataaataaacctgtgatctatgttggttcaaaaacaggacgagatgggattcatggtgcaagtatggcttccactatttttgatgaaaaaattgaagaaaaaaaaccgacagtccaggttggtgatcgatttacagaaaaattattattagaagcttggtttagaattaatgacactgataattcaa

SEQ ID NO: 318456 - DNA, 631 bp, Unknown
  Bacterial polypeptide expressing nucleotide sequence isolated from the Sargasso Sea
ggttctaattgtgatcgagatgtttcatgggcattggaaggttgtttagacataagaacaaaatacttgtggcatgagtcttcagatttaagtgatgtagatgcaatagttttacccggaggatttagctatggtgattatttaagatgcggagcaattgcgagattctctccattaataaatgccttggatgagtttgttaaaagcgggaaaagagttttaggaatttgtaatgggtttcaaattttgacagaatcaggatttttgcctggtgctcttgttgcaaataaaaatcttaattttatctgtgatgacgttgaactggacatcgtttcttcaaaaggagggtggtttaataatgtagatgaaaaacaaacaattaaattgccaatagcgcatggggaaggaagatatcattgtgattctgatactttaaagaaacttgtagataatgaattgatcgctttgagatataaaaataatccaaatggatcttcattcgatatcgcaggcataactaatgagaagggaaatgttctaggtttaatgcctcatccagagcgagcatgcgacgagacaattggtaggactgatggtctctttacattaaaatcattaatattgaaataaa

SEQ ID NO: 318457 - DNA, 388 bp, Unknown
  Bacterial polypeptide expressing nucleotide sequence isolated from the Sargasso Sea
aatggaagtaaatgaacagattgcggtagatcacggtttaaagactgatgaatacaaaaaaatttgtgatttgttaaagcgtgttccaaatttaacggaacttggaattttttcagcaatgtggaatgaacactgttcctataaatcttcaaggttacatttaaaaaaattaaacactaaaggaaaaaaagtaattcaaggtccaggtgaaaatgctggtgtaattgatattggtgatgacgatgcaatagtttttaagattgaaagtcataatcacccctcatttatagaaccatatcaaggtgccgcaacgggtgttggggggataatgagagatgtttttacaatgggtgcaagaccaattgccaacttgaattcaattcatttt

SEQ ID NO: 318458 - DNA, 518 bp, Unknown
  Bacterial polypeptide expressing nucleotide sequence isolated from the Sargasso Sea
gatgaaaataaccaacaaaattattgaaaaacacggtcttaagtttgaagagtttgagagtattaaaaaactaatgaaaagagatcctaatttactagagcttggaattttttcagctatgtggaacgaacactgttcttataaatcatcaagaatacatttaaaaaaattaccaactaaaggaaaacaagttattcaaggtcctggtgaaaatgctggtgtagttgatattggtgataatgatgcaatagtatttaaaattgaaagtcataaccatccctcatacattgagccttatcaaggggcggctacaggagttggaggtattcttagagatgtattcacaatgggtgctagaccaattgctttattgaattccattcactttggttctccatctcatcctaaaacaaagagtttattaaatggtgtagtttctgggatcggtggatatggaaattgcattggaataccaactgttgctggtgaaactaaatttaacgaaacctacaatgaaa

SEQ ID NO: 318459 - DNA, 667 bp, Unknown
  Bacterial polypeptide expressing nucleotide sequence isolated from the Sargasso Sea
atggattattttactgtaggaattgttgtcttccctggttctaattgtgatcgtgatgtttcatgggcattggaaggttgtttagatataagaacaaaatacttgtggcatgagtcttcagatttaagtgatgtagatgcaatagttatacctggaggatttagctatggtgattatttaagatgcggagcaattgcgagattctctccattaataaatgccttggatgagtttgttaaaagcgggaaaagagttttaggaatttgtaatgggtttcaaattttgacagaatcaggatttttgcctggtgctcttgttgcaaataaaaatcttaattttatctgtgatgacgttgaactggatatcgtttcttcaaaaggaggttggtttaataatggagaagaaaaacaaactattaagttgccaatagcgcatggggaaggaagatatcattgtgattctgatactttaaaaaaacttgtagataatgaattgatagctttgagatataaaaataatccaaatggatcctcattcgatatcgcaggcataactaatgaaaagggaaatgttctaggtttaatgcctcatccagagcgagcatgtgacgagacaattggtgggactgatggtctctttacattaaaatcattaatattgaaataaa

SEQ ID NO: 318460 - DNA, 685 bp, Unknown
  Bacterial polypeptide expressing nucleotide sequence isolated from the Sargasso Sea
aatgaaatcatctgtaattgtttttccaggttcaaattgtgatagagatgtagctgttgctcttgaaaaatttcagattaaaaaccaaatggtttggcataacgaatcaaatttaccaaaatcagatttgattgttttgcctggtggtttttcttatggtgattatttaagaactggttgtatagccagtaaatcaagaattattaacgatgtgttaaaacatgcaaatagaggtggtttagtactaggaatttgtaatggttttcaaatattaattgaaactggtttattaccaggtgttttattgagaaacaaaaaacttagatttatatcaaaaaatgtctttttaagagtaatgaatgtgaatagcagattttgcttaaattataataaaaaaaatataattaaattaccaattgcacataatgagggaaattattttgctaacgacgaacttttaaaaaaacttgaagatgaaaatttaatagcatttaagtattgtagtaaaaaaggtgatataagcgaaaactttaatcctaacggatcttctaaaaatattgcagggatactaaataaagaaaaaaatattctgggcatgatgcctcatccggaaaggttaattgatcctcttttgtcgggtgaggatggttcaataatgtttgaaagcttagttaaatcgcattaa

SEQ ID NO: 318461 - DNA, 522 bp, Unknown
  Bacterial polypeptide expressing nucleotide sequence isolated from the Sargasso Sea
gatgccgcctgaaccgactccggaagaaatttcaacacagcaaagttacctaagtctgggtctgagcgattcggagtaccaacttgtttgtaaattgctgggccgaaaaccgaatctcaccgaaaccgggatctacggggtaatgtggtcggaacactgcagttacaaaacctcaaagatgcaactctcccgtttccccaccgagggaccgaatgtacttcaaggtcctggtgaaggtgccggagtcgtggatttgggagatggctgggccgtggttttcaaagtcgaaagtcataatcatccctcggcaatcgaaccctatcagggtgccgctacgggagttggtggaatcctgagggacatttattccatgggagcaagaccggtcgcttttctcaattcactgcgtttcggacccttatccgacaaaaaggatccaggctctccgaccagtaaacgcaaccaatacctttttggtggagtggtggcaggaatcgctggatacggcaactgtatcggagt

SEQ ID NO: 318462 - DNA, 316 bp, Unknown
  Bacterial polypeptide expressing nucleotide sequence isolated from the Sargasso Sea
ttcttttacttcgcgttaccaacagggggaattgattcgtctcccgatagcccatggcgagggaaattacatttgtgatgaactcagcttaagacatctccagtcggaaaaccgtatcgttttccgttatgcatcaggcagcaatcctaatggttccattgataacatcgcgggtatcctcaaccccaaaggcaatgtgctggggatgatgcctcatcctgagcgggccatggcggattggatgggtagcagtgacggccgtcgtctttttgagtcagcccttaacctgtttccggaaacagccgatgccgcctga

SEQ ID NO: 318463 - DNA, 853 bp, Unknown
  Bacterial polypeptide expressing nucleotide sequence isolated from the Sargasso Sea
atgcttaagcgagagccaaatctattagaattaggtattttttcagcaatgtggaatgaacattgctcttataaatcttcaaaaattcatcttaaaaaattgcctactaacggcaaacatgtgattcagggtccaggtgaaaacgcaggtgtaattgatattggcgataatgatgcaataatttttaaaatagaaagccataatcatccttcttatattgagccttatcaaggagcagcgacaggtgttggtggaattttaagagatgtttttacaatgggggcaagacccattgctttattaaattcaattcattttggatctccagatcactcaaaaactaaaagtttacttaacggtgttgtatctggaattggtggatatggaaattgtattggtataccaaccgtagctggtgaaacaaagtttaataaaacttacaatgaaaatattttagttaatgcaatggcagttggtcatgctcaaaaagataaaattttttattcaaaagcaaagggtataaataaatctgttgtttacgtaggatctaaaactggtcgagatgggatacacggtgcctctatggcatcagctgaatttgatgaaaattctgaagataaaaaaccaactgttcaagtaggagacccatttacagaaaagcttttaatggaagcctgtctagaattgatgaaatataattcaattatttctattcaagatatgggcgctgcaggtttaacatcttcaagtgttgaaatggcctctaagggaaatctaggtatagagctcaatttagataaagttccaagcagagaagaaaacatgactccttatgaaatgatgttatctgaaa

SEQ ID NO: 318464 - DNA, 682 bp, Unknown
  Bacterial polypeptide expressing nucleotide sequence isolated from the Sargasso Sea
atgacgcccaaagatcattctccaataatcataagagctcatggtcttacgacggaagagtataatcaaattaaaaaaatattggatcgaaccccaaacattacagaattaggaattttttctgcaatgtggaacgagcattgttcgtataagtcatctagaaaatggcttaaagaacttccaacggaaggtaatcaagtcatttgtggtcctggtgaaaattctggaatagttgctattgatgagaaacttgcattggcatttaaaatggaaagccataatcaccccagctatattgagcctttcaacggggcagcaactggagtgggaggaatattgagagatgtatttacgatgggagcaagacctattgctgttatgaactcattatcgatgggatcatctgacaaaattgaaactaaagaaattcttcgaggagttgttaaaggcataagccactatggaaattcttttggagtacctaatgtaggtggcgaaattagatttcatgcttcatataatggtaactgtctggttaatgcctttgctgccggcattgttaatagaaaagagatcttttattcaaaagcgacaggcattggttctccgatagtttatatgggtgcaaaaacaggaaaggatggtgttggaggggctagtatggcgtccggaaagctttgac

SEQ ID NO: 318465 - DNA, 589 bp, Unknown
  Bacterial polypeptide expressing nucleotide sequence isolated from the Sargasso Sea
atgataaatcaagaaaataatgttctttatgatcttaatgaagcactacaagttgaaaatttaacagttaatgattacgaagaaatttgcaaaagattaaagagaaaacctaacagaacggaattaggcatgtttggcgttatgtggtcagaacattgttgttatagaaattcaaaacctttactatctaagtttcccactaaaggtaaaaatgttttagttggacctggagaaaatgctggcgttattgatgttggaaataatcaaaaacttgtttttaaaatagaaagtcataatcatccttctgctattgaaccttttcaaggcgcagcaacaggagtaggaggaattttaagagatatatttacaatgggtgcaaggccaatcgcagtcttgaattcattgagattcggcaaccttgataaatcatcaaatattgatttgctaagaggagttgtatccggtattgcacattatggaaattgcgtaggtgtgccgactgttggaggtgagattgaattcgatgatagttattccggaaatccattagtgaatgttatggctttaggacttttagagacggaacaaa

SEQ ID NO: 318466 - DNA, 785 bp, Unknown
  Bacterial polypeptide expressing nucleotide sequence isolated from the Sargasso Sea
aatgggagctagaccgattgctttaatgaattccattcactttggttctcctgaaaataaaaaaacacaaaatttattaaatggtgttgtttctggtattggtggttatggaaactctgttggtgttccaacagttggtggtgagactaaattcaatagcacttataatgaaaatattttagtaaacgcgatggcaattggacatgcaaaaaaaaataaaattttttattcaaaggcaaaaggaattaacaaaccagtagtatacgttggttcaaaaactggcaaggatggaatacacggtgcaactatggcctctgcggagttcgatgaaaactcagaagaaaaaaaaccaacagtccaggtgggggatccttttacagaaaaattattgttggaaggatgtttggaattgatgaaaaaaaattcaattatttcaattcaagatatgggagcagctggattaacatcctctagtatagaaatggcttcaaaaggtaaacttggtattgaattagatttagataaggttccatgtagagaaagaaatatgtccccttacgaaatgatgttgtcagaaagtcaggaaagaatgcttattatacttgatgataaaaaggaagatgaagcaaagaaaatatttgataaatgggatcttgatttcgtggttattggaaaaactacagatacaaatagattagttttaaattttaattctaaaaaggtagcggacataccaattcctgcattagcagatgaagcaccgaaatatgatagaaagtggaata

SEQ ID NO: 318467 - DNA, 580 bp, Unknown
  Bacterial polypeptide expressing nucleotide sequence isolated from the Sargasso Sea
gctgaattaccaaaaagtgatttagttgtactgccaggtggattttcatatggtgactacttgagatgtggaagtatggcatcaaaatcaaaaataatgcagtccgtaattaattttgcaaattcaggtggtatggttatgggtatctgtaatggatttcaaatattagtagaaactggattagttccaggtgttttgcttagaaacaaatatttagaatttatttgtaaaaatgtttttgtaaaaattaaagataaaaaaaataaatattttaagaatattaataatgaagttttagaatttcatatagctcataatgaaggaaattatttttgtactaatgatcaattaaaagaaattgaagataataatcaaatagctataaactattgtgatgaaaacggaaaaatagaagatcgatttaatcctaatggatccataaaaaatattgctggtatatttaataaagaaaaaaatattttaggaatgatgccacaccctgaaagaatgattgatacatctctatctggtgaggatggatctttattttttaaaaatttaattaacaacttaaaatgat

SEQ ID NO: 318468 - DNA, 333 bp, Unknown
  Bacterial polypeptide expressing nucleotide sequence isolated from the Sargasso Sea
aatgattgtaaacgaacaagtagcaattgatcatggtttaaagaaagatgagtatgctaaaatttgtaagttgttaaaaagaaccccaaatataacagagcttggaattttttctgcaatgtggaatgaacattgttcttataaatcgtcaagattgcatttaaagaaactccctaccaaaggaaaaaaagtaattcaaggtccaggcgaaaatgctggagttattgatattgaagataacgatgcaatagtttttaaaatagaaagtcataatcacccttcgtttattgagccttatcaaggtgctgcaactggtgttgggggaataatgag

SEQ ID NO: 318469 - DNA, 418 bp, Unknown
  Bacterial polypeptide expressing nucleotide sequence isolated from the Sargasso Sea
atgattgtaaacgaaaaaatagctatcgatcatggattgaaaaaagaagaatatcaaaaaatctgtgaacttttaaaaagaactcccaatatcactgagcttggaattttttcagcaatgtggaatgaacattgttcctacaaatcttcaagacttcatttaaaaaaattaccaaccaaaggtaaacaagtaattcaagggccaggagaaaatgctggagtagtagatattggggataacgatgcaatagtctttaaaattgaaagtcataaccatccctctttcattgaaccctatcaaggtgctgctaccggtgttggtggaataatgcgagatgtgtttacaatgggtgcaagaccaatagctaatttaaattcaatacactttggttcaacgcaacataaaaaaacaaaaaatc

SEQ ID NO: 318470 - DNA, 578 bp, Unknown
  Bacterial polypeptide expressing nucleotide sequence isolated from the Sargasso Sea
aatgaaaattactgaaaatataattacaaaacatgggctgactttatcagagttcaagcagattgtatcgttgctatcaagagatccaaatttattagaattaggaattttttcagcaatgtggaatgagcattgctcctacaaatcttcaaaaattcatttaaaaaaacttcctacaaaaaataagaatgtcatacagggaccaggtgaaaatgcaggtgttatagatattgaaggtgacgacgctataatatttaaaattgaaagtcataaccacccttcatttattgaaccttatcaaggagccgcaacaggtgtaggaggtattttaagagatgtttttacaatgggagctagaccgatagcattattaaattcaatacattttggttcaccaaaaaacaataaaacgaaaggtttgtttaacggtgtggtttctgggatagcgggttatggaaattgtgttggtataccaactgttgcgggtgaaactaaatttaatgattgttataataacaacaatttggttaatgcaatggcggtaggtcatgcgaaaaaagataaaattttttactcta

SEQ ID NO: 318471 - DNA, 769 bp, Unknown
  Bacterial polypeptide expressing nucleotide sequence isolated from the Sargasso Sea
cccgcaacataaaaaaacaaaaaatcttttaagaggcgttgtgcatggtattgggggttatggaaactgtatgggtgtaccaaccatcgcgggtcaaacatcatttgatagttcatataatggaaatattttggttaacgctatgaccttaggtttagttaaaaaaaataagatattttattctaaagctgcaggtttgaataaaccagtaatatatgttggatctaaaaccggaagagatggaattcatggagcaagcatggcatcagccagttttgacgaaaaaattgaagaaaaaaaacctactgttcaagtgggtgatccttttacagaaaaacttttactagaggcttgtttggagctgatggcaggtgattctattattgcaattcaagacatgggtgctgcagggctcacatcatctagtatagaaatggcatctaaaggaaatctaggaatagaaataaatcttaataaagtcccatgtagagaaacaaaaatgacaccttatgaaattatgctatcggagagtcaagaaagaatgctgatagttttagaaaatggaaaagaagagcatgctaaaaaaatatttgataaatggaatttagattttgctgtgattggaaaaacaaataactcaaaaaatattgaattattttttgataatgaaaaagttgcaaatatacctgtaaatacattggttgaaaattctccaatgtacgatcgaaaatggaaaaaatctaaactcccaaaaaaaaataaaaattaa

SEQ ID NO: 318472 - DNA, 685 bp, Unknown
  Bacterial polypeptide expressing nucleotide sequence isolated from the Sargasso Sea
aaaaccgacggtgcaagtaggtgatccatttactgaaaaacttctaatggaagcttgtttagaattaatgaaaaaggattctataatctctattcaagacatgggtgcagcaggtttgacatcatcaagtgttgagatggcttacaaaggaggtttaggaatagaattagatttggacaaaattccttgtagagaagaaaatatgagtccctatgaaatgatgttatctgaaagtcaagaaagaatgttaattatattagaagacggtaaagaaaatgaggcaagacaaatatttaaaaaatgggatttagactttgtcgtaattggtaaaacaaccgatactaaaaatttatctttaaaatttaagaatgaggtcgtagcatcaattcctataggggcattgtcttcaaaagcgcctttatatgacagaaaatgggtcaaaaaaaaattagataaaaaaaaaattaatattaaagaacataaaaaaattaaatttgacaaagctttttttgaacttatatcttcgcctaatcattcaagcaaaaaatgggtaaccgagcagtatgatcaaatggttatgggtgataccatagaacgttctggaggggacgctgctattgtaaaaattcatcaaaaagataaagcaatcgccatgacagtagactcttcggctaactatttgtaa

SEQ ID NO: 318473 - DNA, 850 bp, Unknown
  Bacterial polypeptide expressing nucleotide sequence isolated from the Sargasso Sea
aatgacaaaagtaaatgagaaaattgcaatagatcacggtcttaaagctgatgagtataaaaaaatttgtgaacttcttaatcgcattccaaatattactgagcttgctatattttcagcaatgtggaatgagcattgctcctataaatcatcaaggaaacatttgaaaagtttacacacgactggtgagaaagtaattcaaggacctggtgaaaatgctggggtaattgatatcggagatgaagacgcaatagtatttaaaattgaaagtcacaatcacccatcctttattgaaccttatcaaggagctgctacaggtgtaggaggtataatgagagatgtattcacaatgggtgcaagaccaattgcaaatttaaattctatacattttggatctcctcagcataagaaaactaaaaatcttttaagaggtgtagttaaggggattggtggttatggtaactgtattggtgttcctacaataggtggtcaaacatcttttgacgagtcatataatggaaacatcttggtaaatgcaatgacattaggtttagtgaataaaaacaaaattttttactcaaaggctgcgggtatcaataagcctgtaatatatgttggttctaaaactggaagagacggaatacacggtgcaagtatggcatcagcagtttttgatgatcaaatagaagaaaaaaaacctacagttcaggttggagatcctttcacagaaaaacttcttttggaggcatgtctagaattaatggctgaagattcaattatagctattcaagatatgggagcagctggcttaacatcctccagtgttgagatggcttctaagggaaattag

SEQ ID NO: 318474 - DNA, 790 bp, Unknown
  Bacterial polypeptide expressing nucleotide sequence isolated from the Sargasso Sea
cacaaaaaaactaaaaatttattaagaggagtcgttaaaggaattggtggttatggaaattgcattggagttccaacaataggaggtcaaacatgttttgacgagtcttataatggaaatattttagtaaatgcaatgacacttggtttagttaataagaaaaaaattttttactcaaaagcagctggtattggtaaacctgtaatttatgttggatcaaaaactggaagagatggaatacacggtgctagcatggcgtcagcagtatttgatgataaaattgaagaaaaaaaaccaacagttcaagttggagatccgtttacagaaaaacttttactagaggcatgtttagaattaatggctgatgattctattatatcaattcaagatatgggtgcagctggattaacatcgtcaagcattgaaatggcttcaaaaggtaaactgggaatagaactagatttaagcaaagttccatgcagagaagaaaaaatgacaccttatgaaattatgctatctgagagtcaagaaagaatgcttattgtgcttgagaatggaaaagaggaaaatgcgaaaaaaatatttgataaatgggatttagattttgctgtaattggaaaaacaacaacttcaaaaaaaattgaactttatttcgatagtaaaaaagtagcagatattccaattgattttttagctgaagatgcgccagagtatgatcgtaaatggaaaaaaacaaaactacctcaaaaaataaaatttaaaaaagagaattttaaatctcttaagatta

SEQ ID NO: 318475 - DNA, 685 bp, Unknown
  Bacterial polypeptide expressing nucleotide sequence isolated from the Sargasso Sea
atgaaatcatcagttattacatttcctggttctaattgtgatcgtgatatggatgtagctttaaaaaaatttggttttaaaaataaaatgatttggcatgatgatctcgagattcctaaaagtgacctggttgtgcttcctggtggattttcttatggagattatcttagatgtggaagtatggcttcgaaatcaaagataatgaattcagtgattaattttgcaaaatctggtggtttaataataggcatttgcaatggttttcaaattttagttgagtcaggtttggttcctggagtcttgttaagaaataaatatctagaatttatctgtaaaaatgtatttgtaaaaattaacaataaacagaatgcttattttaaaaatatcaataacaatgttttagaatttcatattgctcataatgaaggaaattatttttgtactgatgatcaattaaaagaaattgaagacaacgaccaagtggcaattaattattgtgataaagaaggtaaaattgaagatcaatttaatcctaacggatcaattaaaaatattgctggaatattcaataaagaaaaaaatattttaggaatgatgcctcatccagaaagaatgattgacccttctctatcaggtgaggatggttccatattttttaaaaacctaattaataatcttaaataat

SEQ ID NO: 318476 - DNA, 871 bp, Unknown
  Bacterial polypeptide expressing nucleotide sequence isolated from the Sargasso Sea
aaacatcactgaattaggtattttttcagcaatgtggaatgagcattgttcgtataagtcatcaagaaaatggcttaaggaccttccctcaattggagatcaagttatttgtggtcccggcgaaaatgccggggttgtggctattgatagcaaccttgcgttggcattcaaaatggaaagtcataatcaccctagttatattgaacctttcaatggagcagccactggggttggaggcatcttaagagacgttttcacaatgggtgcaagaccaatcgccgttatgaactccctttcaatgggctcggttgacaatatcaagactaaggaacttcttcgtggggttgttaagggaataagccactatggaaactctttcggagtgccaaatgttggtggagagcttagatttcatgctagatataatggtaactgcctagtgaacgcttttgctgcgggcatagtaaataaggatgagattttttattcaaaagcgagtgggataggttctccaatagtgtatatgggtgcaaaaacaggtagagatggtgttggaggcgctagcatggcatccgaaagctttgaatctgacgaagaacaaaataaagctaagcgacccacagttcaaattggagacccatttttagaaaagaagcttatggaagcttgttttgaacttatgaggagtgggtgcgtaattgcgatacaagatatgggggccgctggactaacgtgttcttcaattgaaatgggagataaaggaaatcttggcatttttttaaatttagacaaagtccccactcgtgaagataagatgactgcttacgaaataatgttgtccgaaagccaagagagatgcttgcagttataa

SEQ ID NO: 318477 - DNA, 844 bp, Unknown
  Bacterial polypeptide expressing nucleotide sequence isolated from the Sargasso Sea
tcaaatcggaaaggtaataagcaagaaaagatttttcatcaaaagtcagaaaaaaattgtggttgatttacctgtagacctattaacagatgactgcccaatgtataagagagaaataaaaaagccaaaaaaaatggctgggatagataaactaactgatgctaacattagaagaatacagtttaatccactagttttactcaaaaaacttctgtcaaatgagaacatatgctctcgtgaatggatatataaccaatttgattatatggtaggaacgaatactttggtaagacctggttctgattcagcaattataagaattaaaggaaccaaaaaagccattgctatgtcaacaaattgtaattcaaactattgccaactagatccttatactggtgctgctatagctgtagcagaatcaactagaaatataatagctagtgggggtaaacctttagccttaactaattgtttaaattttggcaaccctgaaaaacctgaaattatgtggcaattcgctaaatccattgatggcctttcgaaagcttcaaagactttcaatgtcccagtcgttagcggaaatgtaagtctatacaatgagacatttaatgaacctataaagccaacacccactataagcatggttggtatagttgaagacaaaaaatttctaaagacacaatggttcaaaaatgaaggagatcaaataatattaataggaaatattaagaatgattttgggggctcgcaagcattaaaatatatcaatactaaaaagaaccttaggaagccaccagagattaactttagcaatcacttaaaaattaataatttttgtttataa

SEQ ID NO: 318478 - DNA, 685 bp, Unknown
  Bacterial polypeptide expressing nucleotide sequence isolated from the Sargasso Sea
aatgaagtcatctgtaataacttttcctggttcaaattgtgatagagatatggatgttgcactcaagaaatttggttttaataacaagatggtttggcatgatgacaatgaactccctaaaagtgatttagttgtacttccgggcggtttttcttacggagattacttacgatgtggaagtatggcttcaaaatctaagataatgcaatcagttataaattttgcaaaatctgggggattggtcatgggaatttgtaatggatttcaaatactggttgaaacaggtttagtgccaggagttttgctaagaaataaatatttggagtttatatgtaaaaatgtcttcgtgaaattagacaacaaagaaaattcatattttaaaaatcttaataaagatattttagaatttcatattgctcataatgaaggaaattatttttgtactaaagatcaattgaaagaaattgaggataataatcaaatagcaatttattattgtaataaagaaggcaagatagaagaccaatataatccaaatggttcaattaaaaatattgcaggcatttttaataaagaaaaaaatgtattaggaatgatgccccatcctgagagaatgatagaccaaagtttatctggggaagatggctcaatttttttcaaaaaccttattaataatatcaaataa

SEQ ID NO: 318479 - DNA, 637 bp, Unknown
  Bacterial polypeptide expressing nucleotide sequence isolated from the Sargasso Sea
tatggatgttgctttaaaaaaatttggttttaaaaataaaatggtatggcacaatgataaaaatataccatcaagtgatttgatagtattgccaggtggtttctcttatggtgattatttaagatgtggaagcatagcttcaaagtctaaaataattaaatctgttattgattttgctaattctggtggattagttttgggcatatgtaatgggttccaaattttaacagaaactggccttcttcctggaattcttcaacaaaataaatatcttaattttatttgcaaaaatgtgtttgtaaagattaaggacaccaaaaacaaatattttaaaaatattaaaaaagaaattcttgaattgcatattgctcacaatgaaggaaattatttttgcactaaagaagaattaaaaaatttaaaagataatagccaaatagctgttacttactgtgaccaaagtggtatggaaaatgaggaaaataatcctaacggtgctcttaataatattgcaggaatatttaataaaaataaaaatgttttagggatgatgcctcatcctgaaagaatgatagacagttatctgtctggagaagatggttctttattctttgagaatcttctaggtaatttaaaataa

SEQ ID NO: 318480 - DNA, 508 bp, Unknown
  Bacterial polypeptide expressing nucleotide sequence isolated from the Sargasso Sea
aatggaagtttcagagtctgttgctttagatcatggtttaaaaaaagaagaatacaaaaaaatttgtgaattattaaaaagagttcctaatataacagaattagcaatattttctgcaatgtggaatgagcattgttcatataaatcatcaagaaaacacttaaaaaaacttcatacttctggaaaacaagttattcaaggaccaggtgaaaatgcaggtgttatagatattggtgatgatgatgcaatagtatttaagatagaaagtcataaccatccttcttttattgaaccctatcaaggagcggctactggtgttggtggtattatgagagatgtatttacaatgggtgctagaccaatagctaatttaaattcaatacattttggttcaccacaacacaaaaaaactaaaaatttattacgtggtgtggtgaaaggtataggtggatatggtaattgtataggagtaccaacaatagcgggtcaaacttcatttgatgattct

SEQ ID NO: 318481 - DNA, 685 bp, Unknown
  Bacterial polypeptide expressing nucleotide sequence isolated from the Sargasso Sea
atgaaatcatcagttattacttttcctggctcaaattgcgatagagacatggatgtcgctttgaagaagtttggatttaaaaacaaaatggtttggcatgctaatactgaattaccaaaaagtgatttggttgtattgccaggtggtttttcatatggcgactacttaagatgtggaagtatggcatctaaatcaaaaataatgcagtctgtaattaattttgcaaattcaggaggtatggttatgggtatctgtaatggatttcaaatattagttgaaactggtttggtgcctggtgttttgcttagaaataaatatttagaatttatatgtaaaaatgtttttgtaaaaattaacgacaaacaaaataaatattttaaaaatgttaataacgaggttttagaattacatatagctcataatgagggaaattatttttgtactaatgatcaattaaaagagattgaagataataatcaaatagctatcaaatattgtgatcaaaatggaaaaatagaagaccaattcaatcctaatggatccataaaaaatattgctggtatatttaataaagaaaaaaatgttctaggaatgatgccccaccctgaaagaatgattgatacatctttatctggtgaggatggatcattattttttaaaaacttaataaacaacttaaaatgat

SEQ ID NO: 318482 - DNA, 376 bp, Unknown
  Bacterial polypeptide expressing nucleotide sequence isolated from the Sargasso Sea
catgagcatcggcgtccttgtctttcccggctccaactgcgaccgcgatgtgcagtgggcgacagaaggatgcctgggcatgcccacccggcggatctggcatgaggagacggatctgagcggcctcgatgccgtggtgctgccagggggcttcagctacggcgattacctccgctgtggtgcaattgcccgcttcgccccagcactccaggcgctcctggacttcgcggctcaagggggacgcgtcctggggatctgcaacggatttcaggtgctgaccgagctgggactcctgcccggagccctgacccgcaaccgagaccttcacttcatctgtgaggacgcaccgctgcaggtggccagctcccgcacacca

SEQ ID NO: 318483 - DNA, 970 bp, Unknown
  Bacterial polypeptide expressing nucleotide sequence isolated from the Sargasso Sea
caaggtgctgccacaggagttggtggaataatgagagatgtgtttacaatgggtgcaagaccaatagctaatttaaattcaatacactttggttctacacaacataaaaaaactaaaaacctccttagaggtgttgtcaatggaattggtggttatgggaactgcatgggagttccaaccattgcaggtcaaacaagttttgatagttcttataatggaaatatcttggttaacgcaatgacgttaggattagtgaagaaagataagattttttactcaaaagcagccggtttaaataaacctgtaatatatgtcggatctaaaacgggtcgtgatggtattcacggagctagtatggcctctgctagttttgatgaaaaaattgaggaaaaaaaaccaactgtacaagtcggtgatccctttacagaaaaacttttacttgaagcatgtttagaattaatggcaggtgactctatcattgcaattcaggatatgggggcagcaggtttaacttcttcaagtattgaaatggcttcaaagggaaatcttggaatagagattaatttaaataaagtgccctgtagggaaacaaaaatgactccttatgaaattatgctgtctgaaagtcaggaaagaatgttgattgttttagaaaatggaaaagaagagcatgctaaaacaatatttgataagtggaatttagattttgctgtaattggaaaaacaaccaaatcgaagaaaattgaactttattttgatagtgaaaaagttgctgatataccagttaatactcttgttgaaaattcaccaatgtatgatcgtaaatggaaaaaatcaaaacttccaaagaaaaataaaattaataaagatgatataaataatttaaagataattgaagttcttaaaaaaattttagcaaatccaaatatctgtagtaaagaatggattggcaacagtagaccatacagtg

SEQ ID NO: 318484 - DNA, 628 bp, Unknown
  Bacterial polypeptide expressing nucleotide sequence isolated from the Sargasso Sea
atggtagtaaatgaaaaaattgctatagagcacggattaaaaaaagaagaatttgaaaaaatatgtaatcttttaaagagaaatcctaatattactgaacttgctattttttcagctatgtggaatgaacattgctcatataaatcttcaaaagttcatttgaaaacacttaattctaaaagtaaaaaagttattcaagggcctggggaaaacgccggtgttgttgatataggagatgatgatgctatcgtatttaaaatagaaagtcataatcatccatctttcattgaaccttatcagggagcggctacaggtgtaggtggaattatgagagatatatttacaatgggagctagacctattgcaaacttaaattcattacattttggatctccccagcataaaaaaactaaaaatttattaagaggtgttgttcaaggaattggtggttatagtaattgtattggtgtaccgactattgccggtcaaacatgttttgatgaaagctacaatggaaacatactagttaatgctatgactatcggtttggtaaataaaaataaaatattttattcaaaagctgtaggaataaataaaccagtaatttatgttgggtctaaaacaggaa

SEQ ID NO: 318485 - DNA, 586 bp, Unknown
  Bacterial polypeptide expressing nucleotide sequence isolated from the Sargasso Sea
atgaagattactaataaagttgtagcaaaacatggtttaaaaccagaagagtattctagtattaaaaaacttttaaaaagagagccaaatttattggagttaggaattttttctgctatgtggaatgagcactgttcctataaatcctctagaaaacatcttaaaaatttacctacaaaaggaaaacaagttattcaaggacctggtgaaaatgcaggagtgattgatattggagacgacgatgcaattatttttaaaatagaaagtcataatcatccttcttatattgagccatatcaaggtgctgctacaggtgttggaggaatactgagagatgtgtttactatgggtgctaggccaatagcgcttcttaattcaatacattttggatcacctgatcattttaaaacaaaaagtctgttgaatggtgtcgtctcaggaattggaggatatggaaattgtattgggataccaactgtggcaggagaaactaaatttaacagcacatataatgaaaatattttagtcaatgccatggctgttggtcatgcaaaaaaagataaaattttttattcaaaagctaaag

SEQ ID NO: 318486 - DNA, 636 bp, Unknown
  Bacterial polypeptide expressing nucleotide sequence isolated from the Sargasso Sea
gatgccgcctgaaccgaccccggaagaaatttcaacacagcaacgttatctgagtctggggctgagcgattcggaataccaacttgtctgtgaattgttgggccgaaaaccgaatcttaccgaaaccggcatctacggggtaatgtggtcggaacactgcagttacaaaacctcaaagatgcaactctcccgtttccctaccgagggaccgaatgtacttcaaggtcctggtgaaggtgccggagtcgtggatttgggagatggctgggccgtggttttcaaagtcgaaagtcataatcatccctcggcaatcgaaccctatcagggtgcagctacgggagtcggtggaatcctgagggacatttattccatgggagcaaggccggttgcttttcttaattcattgcgtttcggacccttgtccgacaaaaaggatccgggctctccgaccagcaaacgcaaccaatacctttttggtggagtggtggcaggaatcgcgggatacggcaactgtattggtgttccaactgttgcgggagaagtcggcttcgatgcatgctactccgggaatcccctggtgaatgcaatgtgtgtgggagtgatccggcatgaggacttgcagcatggccgagccga

SEQ ID NO: 318487 - DNA, 292 bp, Unknown
  Bacterial polypeptide expressing nucleotide sequence isolated from the Sargasso Sea
ggggaattgattcgtctcccgatagctcatggggagggaaattacatttgtgatgaactcaccttaagacatctcaaggcggaaaaccggatcgttttccgttatgcatcaggcagcaatccaaatggttccattgataacatcgcaggcatcctcaatcccaaaggcaatgtgctggggatgatgcctcatcctgagcgggccatggcgcactggatgggcagcagtgatggtcgtcgtctttttgagtcagcccttaacctgtttccggaaacagccgatgccgcctgaa

SEQ ID NO: 318488 - DNA, 520 bp, Unknown
  Bacterial polypeptide expressing nucleotide sequence isolated from the Sargasso Sea
atgctcgagcctgcaatcacatcggaacttatagaaagtcatggccttaactctagcgaatacgaccttctgctggaaattatcggtcgaaatccaacatttacagaactggggatattttctgcgatgtggaatgaacattgttcttataaatcatctaagaaatggctacgattacttccaacgaagggtgaaaatgtaatctgcgggcctggtgaaaatgctggaatagtagacattggggacaatcaagctgttgtttttaagatggaaagccataaccacccaagttacattgagccacatcaaggcgctgcaactggcgttggaggaatactcagagacgtatttacaatgggcgcacgtcccatagcagctatgaatgccttatcatttggggaaataaaccatccaagaacgaaagaactagtgcacggtgtcgtagaaggcatcggtagttatggaaactcgtttggagttcctactgttgggggagaaatccgatttaataaatcatata

SEQ ID NO: 318489 - DNA, 945 bp, Unknown
  Bacterial polypeptide expressing nucleotide sequence isolated from the Sargasso Sea
gccttatcaaggagcagcaaccggagttggtggaattcttagagatgtattcactatgggagcaagaccaattgctttattgaactcaatacattttggctcgccctcacatcctaaaacaagaagtttattaaatggtgtagtttcaggtataggtggttatggaaattgtattggtatcccaacagtagctggtgaaacaaaatttaacgaaacttataatgaaaatattttagtaaatgctatggcagtaggacatgcaaataaaaataagatattttactcaaaagcaaaaggtataaataaagcagtagtttacgttggttcaaaaactggtcgagatggtattcatggcgcatcaatggcttctgcagaatttaacgaaaattctgatgaaaaaaaaccaactgttcaagtaggagatcctttcacagaaaaattattattagaagcttgccttgagttaatgaaagatgactcaattattgccatacaagacatgggagctgcaggactaacatcatcaagtgttgagatggcttcgaaaggctctcttggcatagagctagatttagaaaaagttccttgtagagaagaaaatatgagtccttatgaaatgatgttatcggagagtcaagagaggatgttaattattttagaagatgggaaagaagaccatgcaaaaaaaattttcaaaaaatgggaccttgattttgtagtgattggtaaaactactaaaaataagaatttaacacttaaatacaacggagttattgagggagagttgcccattgaagctttatcctcgaaagctccagtctacgatagaaaatgggtaaaaaaaaatctttcaaaaaaaaagtttgaaataaaaaaattaaaaaagattaaattagaggatgctttgattaaagttttatcttcaccaaatcactcaaataaaag

SEQ ID NO: 318490 - DNA, 931 bp, Unknown
  Bacterial polypeptide expressing nucleotide sequence isolated from the Sargasso Sea
ttctgctttgtctgatgatactcctgttaattttcacaatgtgattaataatccacccgatgatcttttaaaaaaatgggaatggaaagaaaatgatttaccagaaatttgtgagcaaaaaatattttcattgaaggaaaataagattttttctttcaatgaaatcattttaaaactactctctaatccatcaatagcttctaaacgatggatttataatcaatatgactctcaagttcaggcaaatacagtttttaaacctggaaaatcagatgcagccgtagtaagactaagggaacaaaataaaaaaaataaaagcaaagtattttctgcggttgctgcttcagttgattgcaatagtagatgggttgcgcttgatccttttagaggatctatcgctgccgttgcagagtccgctagaaatgttagttgtgttggtgctgaaccagtagcaattacaaataatttaaatttttcctctcctgagaatgaaataggatattggcaactctcatcttcatgtaatggaattgctgaagcctgtaaggctttagaaactcctgttacaggaggtaatgtttctttatataatgaatctaaaaataaagataatctaattactcctatcaatcctactcctgttattggaatggttggaaagatagataatgtcgaaaaagctgtaagtagtgaatggaaaaatattgaagatcaaatttggttaattggttcttccaaatcagaaataaaaattgcagctagctcttatctggaatattttcatggaaaaattacaggtcggcctccaaaaatagatttgttggatgagaagttttgccagagttttttaaggaatgcgattttaaacagtcttgtagtttcttctcacgatataagcgacggaggtttagctatagctttagcagagtct

SEQ ID NO: 318491 - DNA, 610 bp, Unknown
  Bacterial polypeptide expressing nucleotide sequence isolated from the Sargasso Sea
ttttaaaaataaaatggtttggcacaatgataacgaaatgcctaaaagtgatttaattgttctacctggtggtttttcgtatggagattatttaagatgtggaagtatcgctgcaaagtcaaagattatagagccagttattaattttgcaaaaaaagggggtttagtattgggtatatgtaatggttttcaaatattatccgaaacagagttacttcctggtattcttcaacaaaataagtatttaaattttatatgtaaaaatgtttttgttaaaattaaaaataaagacaatatatattttaacaagatcaaaaaagatattttagaactgcatattgcacataatgaagggaattatttttgcagtcaggatcaattgaaatctctaaaatacaataatcaaattgctgtcacttattgcaatgaagaaggaatagaaaaagaggaaaataatcctaatggtgctttagaaaatattgctgggatatttaacaaaagcaaaaatattcttgggatgatgcctcatcctgaaagaatgattgataaatatttatcaagtgatgatggtagttatttttttaaaaatattttagaaagttttaaatga

SEQ ID NO: 318492 - DNA, 383 bp, Unknown
  Bacterial polypeptide expressing nucleotide sequence isolated from the Sargasso Sea
aatgattgaagtaaatgaaaaaatagcaacagaacatggtctcactaaagaagaatttattaaaatttgtgatcttttaaaaagaaatccaaatttgactgaacttggaattttttctgcaatgtggaatgaacattgctcatataaatcctctagatttcatttaaaaaaattaaatacgaagggaaaaaaagtaattcaaggtccaggtgaaaatgctggtgttgtcgatataaatgacaacgatgcaatagtttttaaaattgaaagtcataatcacccatcttttatagagccttaccaaggtgctgccacaggtgtaggtggaatatgcgagatgttttactatgggcgcaagaccgatttgcaatttaaaactcatt

SEQ ID NO: 318493 - DNA, 805 bp, Unknown
  Bacterial polypeptide expressing nucleotide sequence isolated from the Sargasso Sea
gatggaaagccataaccacccttcatttattgacccttatcaaggtgccgcaactggcgtaggtggaataatgagagatattttcactatgggcgcaagacccatcgcaaacatgaattgcttacattttggtgagcctgaaaattttaaaactaagtatttggtaagcggtgtcgtttcaggtattggtggatatggtaattgtgttggcgtacctacaattggaggtcaaactatctttaacaaaagttataatggcaacaatattgtaaatgcaatgacattaggaattgcaccttcaaataagattttttattctaccgccgcaggtgtaggtaatccactaatatatgttgggtcaaaaacaggtaaagacggcattcatggcgctacaatggcttctgctagctttgaagaaacaactgaaaataaaagaccaacagtccaagtaggtgacccatttacagaaaaactacttctagaagcatgtctagagcttatggaaaaagatgtaatcatttctattcaagacatgggggcagcaggcctaacatcttcagcttttgaaatggcatctaaaggtggagtaggaattgagttgcaactagaaaaagttcctcaaagagaaaaaaacatgcaaccttttgaattaatgttatcagaaagtcaggagagaatgcttttagtcattaaagcaggaaaagagattgaagcaaggcaagtttttactaaatgggacttacctttttcaattattggcaatttaactgatactggaaggatggtattaaaatataacaatatt

SEQ ID NO: 318494 - DNA, 723 bp, Unknown
  Bacterial polypeptide expressing nucleotide sequence isolated from the Sargasso Sea
ggtttagcaaataaaaacaaaattttctattcaaaagcaaaaggggttaataaaccagttgtttatgttggttcaaaaaccggacgagacggaattcatggagcttcgatggcttcagcagaatttgatgagaattcagatgaaaaaaaacctacagttcaagttggagatccttttacagaaaaattattaatggaagcatgcctagaattaatgaaagaagagtcaataatttcaatacaagatatgggagcagctggtttaacttcttcaagtgtagaaatggcacataagggtggattgggtattgagcttaatttagatgaaattccatgtagagaagaaaatatgagcccatatgaaatgatgctttcagaaagtcaagagagaatgctgataattttagaagatggcaaagaagaaagtgcaaaaaaaatttttaaaaaatgggatcttgattttgttgtgataggccgaactacagagacaaaaaatctctcattaaaatttaaaaaagaagtcgttgctaccatcccaatagatgcgttgtcttcaaaagctcctgtgtatgatagaaaatgtaaaaaaaagaaactttcaaaaaaaaatattaatttaaaagatcttaagaaaattaaatttgatgatgcttttttcaaaataattacctctccaaaccaatcaaacaaaaaatgggttacagaccaatacgatcaaatggta

SEQ ID NO: 318495 - DNA, 682 bp, Unknown
  Bacterial polypeptide expressing nucleotide sequence isolated from the Sargasso Sea
aatgaaatcatctgtaattatattccctggctcaaattgtgatagagatatggatgtggctctaaagaaatttggttttgaaaatcaaatggtttggcatgatgatactgaaattccaaagagtgatttaattgttttaccaggggggttctcatatggtgattaccttagatgtgggagtattgccggaaaatcaagaataataaaatctgtaatcgaatttgcaaattcaggaggattagttcttggaatttgtaatggttttcaaatactaactgaaacaggtctgttacctggaatacttcaacaaaataaatacttaaactttatttgcaaaaatgtttttgtaaaaattaaaaataaagaaaataaatatttcaaaaaaattaaaaaagaagttttagaacttcacattgctcacaatgaaggaaattatttttgctcaaatgatgaattaaaatcaattgaagataacggtcaaattgctgttacttattgcgaccataaaggaaatgatgatgaaaaaaataacccaaatggtgccttaaaaaatatagcaggtatatttaacaaagataaaaatattttgggtatgatgcctcatccagagagaatgattgatccatttctttcaggtgaagatggatcactattttttaaaaatttaattgaaagtttataa

SEQ ID NO: 318496 - DNA, 610 bp, Unknown
  Bacterial polypeptide expressing nucleotide sequence isolated from the Sargasso Sea
aatgaaaattactcctgaaatagttgataaacatggtatcaaacctgaggaatataaaaaaatagttagcttaattaaaaaagaacctaacctattagaacttggaattttttctgcaatgtggaatgaacattgttcttacaaatcttccaaaaaatacctaaaagccctaccaacaaaaaataaaaaagtcattcaaggtcctggcgaaaatgctggggtcatagatattgaagataatgatgcaattgtatttaagatcgaaagtcataaccacccttcttttatagaaccttaccaaggtgctgcaactggggtcggaggaatcttacgagatatatttacaatgggcgcaagacccatagccacacttaattcaattcattttggtagcgaaaatcatccaaaaactaaaaatttgttaaatggcgtagttgcaggaattggtggttacggcaattgcatgggtattccaactgttggtggggaagttaaatttgactcatcctataatgaaaatattttagttaatgcaatggctgttgggttggttaaaaaaaataaaatattttattctaaggcaaaaggctttgatcgaccggtaatctac

SEQ ID NO: 318497 - DNA, 685 bp, Unknown
  Bacterial polypeptide expressing nucleotide sequence isolated from the Sargasso Sea
gatgaagtcagctgtaatagtatttccaggatcaaactgtgatagagatatggatgtggctttaaaaaaatttggctttaaaaaccaaatggtttggcacaatgatcacgaaattcctaaaagtgatttaattgtattaccaggtggtttttcctatggagattatttaagatgtggaagtatagcgggaaagtcaaaaataattaaatcggttgttgaatttgcaaattcgggaggcttagtattgggaatatgtaatggatttcaaattctaacagaaacaggtttactaccaggagttcttctacaaaataaatatcaaaaatttgtatgtaaaaatattcatgtaagaataaatgataaagaaaataagtattttaaaaatattagaaaagaaatcctagaactacatatagctcataatgaaggaaattatttttgctcagaggatgagttaaaatctataattaataataatcaaatcgctgttacatattgtaacgaaaaaggtaaattatctgatgagtttaatccaaatggagcattaagtaatatagctggaatatttagcaaaaataaaaatatattaggaatgatgcctcatcctgaaagaatgatagataaatatctttcaagtaatgacggtagtattttctttgaaaacctaatcgagaatttaaaatga

SEQ ID NO: 318498 - DNA, 908 bp, Unknown
  Bacterial polypeptide expressing nucleotide sequence isolated from the Sargasso Sea
gatcgcaccgcttgttgatgaagctcccgaatatgatcggccacatattaagtcccctgtccgtccgacccttgcaagcaccaagattaacgcgacaacttctatcactcaaacgttaaaatcaatgcttgggcatgttgatctagcaagtcgtcgctggatttatgaacaatatgatagtcaggtcatggccgacacgatatttggaccaggcggtgatgccgcactgataagattacacgggagcaaacgcggtctcgccataagtacggattgcacgccccgatatgttcaagcagacccaaaaaatggcggcgcacaagcagttgcggaggcctatcgtaacctttctgctattggtgcaaagccacttgcgataacaaataatctgaattttgggaatcctcaaaaacctgaaataatgacccagcttgtagagtctgtgactggtatgggagaagctgcgctcgcccttgatacaccggtggtatcaggaaatgtatctctttataatgaaactgatggagaagccattcaaccctgcccagttgttggtatggttggaattatagaaaacattgaaaaagctgttaataatcaatttactgaagccggtcatgaagtttttgtcatcggccaagactgtaccgtgaacgatggctggctgggagcatcaatttaccaacagcattttggcaaacagagaatatatgcaccaccaccaataaatctcgcggctgaactcaagcattctagctttgtccgtcaacaaattcttgatagtaatataaatgcggctcatgatgtcagcgatggtggactagtcgtggccattgcggaaatggccgtcagagctgggcttggcgctgaaatcatcactcccgcatcaggccagattcatggctggg

SEQ ID NO: 318499 - DNA, 771 bp, Unknown
  Bacterial polypeptide expressing nucleotide sequence isolated from the Sargasso Sea
gcagaattcaatgaagatgcagaagaaaaacgccctactgttcaagttggcgaccccttcacggaaaaacttctcctagaggcttgcctcgaactgatggaaagtgacgctatcatagctattcaagatatgggagcagctggtttgacatcgtcatcggttgaaatggctggtaaaggtggactggggatgaagctgaacctagagcatgttcctgttagagaagagggcatgagtgcctatgaaataatgctttccgagagtcaggaacgaatgttgatgatactggatccaaatacagaagaccttgctagagaaatcttcaaaaaatggggactagatttcgctattataggaacccttaatgatacaggacatcttgaagtggttaaaaatggcatttcagaagctaatataccaattgatccaatggttgatcagtcacctgaatatgatagaccttggtctgaaactccgaaacaagaacaaataagatcatcggactatccgccaaaaagttcgctacaggatgtatttgaagttctaatcgggtgtcccgacttatcgagccgacgttggatttgggaacaatatgaccatatggttatgaataacacaatagcaaggccgggaggcgacgctgccgtcgttcgtgtgaatgatactaataaagcgataacaatgtctgtcgattgtacaccgcgttattgtttagcagacccaaaagttgggggggcacaagcagtagcagaagcatggcgaaatataacg

SEQ ID NO: 318500 - DNA, 862 bp, Unknown
  Bacterial polypeptide expressing nucleotide sequence isolated from the Sargasso Sea
catccaattttatgtagtcgcaaatggatatgggaacagtatgatcacatggtaatggctgacacagtcgtaaggcctggatcagatgcggcagtagttagagttcatgggaccaataaaggaatagctataagtactgattgctctccaacatactgtaagcataattcatttgagggaggaaaacatgcagtagtcgaaacatggagaaatcttatagcttcaggagctatgccaattgctattaccgactgtatgaattttggtaatcccgaaaagccagaaataatgggtcagtttgttgaatgtattcgaggcatgggagaagcatgctctaaactaaaatacccagttatttctggaaatgtatctttatacaatgaaacaaatggagtgggcatttatccaactcctgtgattggcggtgttggactaattagggatttatctaagactatgactattgatttcaaatctgaaggtaatattgtatttgtaatcggggaaagtcgtaaccatttagggaacagtcaatatctatcgattgttaaaaatagagaagatggaggacctcccactataaacctcgaagaagaattaaaaaatggagaatttgttctgaattgtattaatcagaatacttttcaatctgttcatgatctaggagaaggcggattacttattgcaatagcggaaatgtgcttagcaggcaataaaggcatttatatcgatatcaaaaaagaatttttacatggttatttttttggtgaagaccaagcgagatatctagttgaggtttcaaaagataaattaaataatttcgaaaaccaggcaagagatcataatgtacagatagaaaaag

SEQ ID NO: 318501 - DNA, 846 bp, Unknown
  Bacterial polypeptide expressing nucleotide sequence isolated from the Sargasso Sea
tcaaaacgatggatttataaacaatatgattctcaagttcaggcaaatacagtttttaaacctggaaattcagatgcagccgtagtaagactaagagaacaaaataaaaaaaataaaagtaaagtattttctggtgtcgctgcttcagttgattgtaatagtagatgggttgcgcttgatccttttagaggatctattgctgccgtagcagagtccgctagaaatgttagttgtgttggtgctgaaccagtagcaattacaaataatttaaatttttcttcccctgagaatgaaataggatattggcaactttcatcttcatgtaatggaattgctgaagcctgtaaagctttagaaactcctgtaacaggaggtaatgtatctttatataatgaatcaaaaaataaagataatctaattactcctatcaaccctactcctgttattggaatggtgggaaagatagataatgtcgaaaaagctataagtagtgaatggaaaaatattgaagatcaaatctggttaattggttcttccaaatcagaaataaaaattgcggctagttcttatctggaatattttcatggagaaattacaggtcggcctccaaaaatagatttgttggatgaaaagttttgccagagttttttaagaaatgcgattttaaatagtcttgtagtttcttcgcatgatatcagcgacggaggtttagctatagctttagcagagtcttgcattttgtccgcaaggggtgcaactatagaattagagaaaaatctaaatagagttgataatttattgtttgccgaaggtgggtcaagaattattttttcaattagtaaaatg

SEQ ID NO: 318502 - DNA, 630 bp, Unknown
  Bacterial polypeptide expressing nucleotide sequence isolated from the Sargasso Sea
aatgacaacagtaaacgaacaagtagctatagatcatggattaaaaaaagatgagtttaaaaagatttgtgatcttatgaaaagaacgccaaatctaactgaactcggaattttttcagctatgtggaatgaacactgttcatataaatcttcgaggaagcacttaaaaaatcttcacacgcaaggtaaaagagtgatacagggaccaggtgaaaatgctggtgttatcgatgttgatgatgaagatgctattgtttttaaaattgaaagtcataatcacccctcatttatagaaccatatcaaggtgctgcaactggtgtaggtggtatcatgagagatgtttttacaatgggtgcaagacctattgctaatttaaattcaattcattttggatcaactcaacacaaaaaaactaaaaatttactaagaggagtcgttaaaggaattggtggttatggaaattgtattggagtaccaacaattggaggtcaaacatgttttgacgagtcttataatggaaatattttagtgaatgcaatgacacttggtttagttaataagaaaaaaattttttactcaaaagcagctggtataggtaaacctgtaatttatgttggatcaaaaactgg

SEQ ID NO: 318503 - DNA, 929 bp, Unknown
  Bacterial polypeptide expressing nucleotide sequence isolated from the Sargasso Sea
ttttattctaaggcaaaaggtttaaataaatctgtagtttatgttggttcaaagacaggcagagatggtattcatggtgcttcaatggcctctgcagagtttgatgaaaattcagatgataaaaaacctacagtgcaggttggagatccatttacggagaagttgctattagaagcatgtctcgagttaatgcaagacgactctataatagcaatacaagacatgggtgctgcaggcttaacatcttctagtgttgaaatggcttcgaagggatctttgggaatagaacttaatttagaaaaagttccttgcagagaagaaaatatgacaccttatgaaatgatgttgtcagaaagtcaggaacgaatgttgataattttagaggataataaagaggaacatgcaaaaaaaatatttgaaaaatgggatttagattttgttataataggaaaaacaactaattccaaaaatcttactttaaagtataataacaaagttgagggtgaaattcctttagaagccttggctgctaaagcaccagtatataacagaaaatgggttaagaaaaaaattttaaaaagtaaattaaacttaaaaaaactaaaaaagtttaaaattgaagaaagtttaattaaaattttatcctccccaaatcattcaaataaaagctggattacaaatcaatttgatcaaatggtaatgtgcgatactgcacaaagatcaggttcagatgcagcaattataagaatacataataaagataaagcgattgcagtctcagttgattcatctgcaaattattgtaaatcccatccagaattaggcggaaagcaaatagtttgcgagaattggagaaatttaattgcaactggagcaaaacctttagctatcacaaattgtttaaactttggaaatcctgagaattcaga

SEQ ID NO: 318504 - DNA, 667 bp, Unknown
  Bacterial polypeptide expressing nucleotide sequence isolated from the Sargasso Sea
gatggataattttactgtaggagttgttgtcttccctggttctaattgtgatcgtgatgtttcatgggcattggaaggttgtttagacataagaacaaaatacttgtggcatgagtcttcagatttaagtgatgtagatgcaatagttttacccggaggatttagctatggtgattatttaagatgcggagcaattgcgagattctctccattaataaatgccttggatgagtttgttaaaagcgggaaaagagttttaggaatttgtaatgggtttcaaattttgacagaatcaggatttttgcctggtgctcttgttgcaaataaaaatcttaattttatctgtgatgacgttgaactggacatcgtttcttcaaaaggaggttggtttaataatgtagatgaaaaacaaacaattaaattgccaatagcgcatggggaaggaagatatcattgtgattctgatactttaaagaaacttgtagataatgaattgatcgctttgagatataaaaataatccaaatggatcttcattcgatatcgcaggcataactaatgagaagggaaatgttctaggtttaatgcctcatccagagcgagcatgcgacgagacaattggtaggactgatggtctctttacattaaaatcattaatattgaaataa

SEQ ID NO: 318505 - DNA, 670 bp, Unknown
  Bacterial polypeptide expressing nucleotide sequence isolated from the Sargasso Sea
ataacagaattagggatattttctgctatgtggagcgaacattgttcttataaatcatctagaaaatggcttaaaactcttcctacagaagcaccatgggttatccaaggtccgggtgaaaacgcaggaataattgatattggtaataatttagctgctgtttttaaaatggagagccataatcatccatcatttattgagccttatcaaggagcagctactggcgtaggtggtatcatgagagacgtattcactatgggtgcaagaccggtagcaaatcttaattgtttaaggtttggaaaccctctacatgctaaaaccaaacatttattatctggagtagtatctggtataggtggatatgggaattgtatgggagttcctactataggtggagagtgcacatttgatgaaggttataacggaaatattttagtaaacgctatgacagtaggcatagtaaaaaaagataaaatattttatgcaaaagcaggatcaccaggaagtccagtagtatatgtaggagctaaaacaggtagagacggaatacatggggcatctatggcttcagcttcatttgatgcagattcagaaagtaagagacctactgttcaagttggtgacccattcacagaaaaattattactagaggcatgtttagaattaatgg

SEQ ID NO: 318506 - DNA, 922 bp, Unknown
  Bacterial polypeptide expressing nucleotide sequence isolated from the Sargasso Sea
cgaatcgaaagccacaaccatctttcagcaattgagccatatcagggagccgctacaggagttgggggcattctgagagatatttttacgatgggcgctcgtccgatagccgttatggatcctcttcggttcgggcccattgacgaccctcgcagccggtggatagcagaaggggtcattagtggtgtctctggttatggaaacagtgttggcgtgcccacagtcggtggtgagatcgtctttgacgaaacctataaaggtaatccgctagtcaatgtcctagccatgggggtactacccacagagcgcttagttctaggacaagctagcggtgttggtaatcttgccgttcttctcggtgcctccacgggaagagatgggataggcggcgtcagtgttctcgcctccgcaggcttcgacgaaagttctgaagacattgataagcggccaagtgtgcaggtcggtgatccttttgaagagaaacggctcttggaggcgtgtctcgaattattggatcaaggtctcgtatcaggaatccaagatcttggaggagccggaatcacctgcgctacgagtgaaacagcgtcacgcggaggcgcgggtatggatgtggatgtaacggctattcacgctcgcgaaaacaacatggaaccctttgagttaatgacctcagaatcacaagaacgcatgcttgcgattattaagccagaggatcttgctcatgtagaagaaatttctgcccgatgggaaatacaggcaagtgtcattggtcgagttacaggcaccggacaactgagaattcttgatggatttgatggggacgtattagcgagccttcccgcttcgacactgcacgatgacgcgccggaatacaagcgaccgattgcaccgcctgctgacctggagagcgccgggcccaaga

SEQ ID NO: 318507 - DNA, 358 bp, Unknown
  Bacterial polypeptide expressing nucleotide sequence isolated from the Sargasso Sea
tatgaaaataacaaatgaacaaatagaaaaccacggtttaaaacttgaagaatataaaaaaattaaagaacttttaggaagagaggcaaattttttagaattaggaattttttctgctatgtggaatgaacattgttcatataaatcttcaaaaattcatctaaaaaaattaccaacaaaaaataatattgttatacagggaccgggagaaaacgcgggtgttattgatataggagatgatgatgcaattatttttaaaatagaaagtcacaatcacccgtcatttatagaaccctatcaaggtgctgctactggggttggtggtatattaagagatgtgtttacaatgggagctaga

SEQ ID NO: 318508 - DNA, 880 bp, Unknown
  Bacterial polypeptide expressing nucleotide sequence isolated from the Sargasso Sea
catgggagtaccaactattgcaggccaaacatcttttgatagctcatataatggaaatattttagttaatgctatgactttaggattagttaaaaaaaataagatattctattctaaggctgcaggattaaacaaaccagttatttatgttggatctaaaactggtagagacggtatacatggtgcgagcatggcatcagccagctttgatgaaaaaattgaagaaaaaaaacctacagttcaagttggtgacccttttacagaaaaacttctcctagaagcatgtttagagctaatgtcgggagactctattatttcaattcaagatatgggagcagcaggacttacttcatctagtatagaaatggcatctaaaggaaatttgggaatcgaaattaatttaaacaaagtcccatgcagagaaacaaaaatgacaccttatgaaattatgctatctgaaagtcaagaaagaatgctgattattttagaaaatggcaaggaggagttggcaaaaaaaatatttgataaatggaatttagattttgcaataattggtaaaacgacaaattcaaaaaatattgaattattttttaataatgaacaggtagcaaatatacctataaatacattagtagaaaattctcctatgtatgatcggaaatggaaaaaatcaaaattaccaaaaaaaaataaagttgaaaaaaaaactttaaataaattaaaaataaaagatattttaaaaaaaattttatctagtccaaatatttgtaataaagattggatttggcatcaatttgatcacaccgttatgggagatactattcaaaaacctggtggagattctggtgttgtaagagttcatggaactaataaagctatt

SEQ ID NO: 318509 - DNA, 685 bp, Unknown
  Bacterial polypeptide expressing nucleotide sequence isolated from the Sargasso Sea
aatgagatcatcagtcattatttttccaggatcaaattgtgatagagacatggatgtggctctgaaaaaatttggttttaaaaatcaaatggtttggcacaatgatcaatctattccaaagtcagatttaatagtattgccaggtggcttttcttacggtgactacttaagatgtggaagcattgcttctaaatcaaaaattataaaatcagtgattgattttgcgaattctggaggtttggtattaggtatttgtaatggatttcaaatcttaactgaaactggcctactaaatggaattttacaacaaaataagtttctaaattttatatgcagcaatgtttttgtaaaagttaaagataaagaaaataaatttttcaaaaatttaaaaaaaaatcttttagaacttcatattgcccacaatgaaggaaattacttttgtagtgatgatgaattaaaatcattagaggataatagtcaaatagctgtaacatattgtggagcagatggcacagaaaatgaaacaactaatcctaatggagcgataaaaaatatagctggaatatttaataaaaataaaaatgtattgggaatgatgcctcatcctgaaagaatgatagacaaatatttatcaggtgaagatggttcattatttttcaaaaatattttagataattttaaataa

SEQ ID NO: 318510 - DNA, 679 bp, Unknown
  Bacterial polypeptide expressing nucleotide sequence isolated from the Sargasso Sea
atgaaatcatcggtaattgtttttcctggttcaaattgtgacagagatattgctgttgctttagagaaaatgcaattcaaaaataaaatggtttggcataaagaaacatctttgcctaactctgatttaatagttatcccaggtggtttttcatacggcgactacttacgatcaggtgcgatagcagggaaatctttaataataaatgaagtgattaaggctgctaattctggttgtctaattttaggtatttgtaatggctttcaaattttaactgagacagggcttctaaaaggaactttattaagaaataaaaacttaaaatttattaacaatgatgtctacattaaagtgataaataataaaactagattttcaattaaatataaacaaaatcaggttttaaaaataaatatagcacacaacgaaggtaattattttacagatgacaatcacctcaatcaactaaataaagaaaatttaattgcatttaaatattgcaataaaaaaggaattgcaaatgaggattctaaccctaatggagcaataaataacattgctggtatatttaatgccaaaaaaaatattttaggaatgatgcctcatccagagcgaatggttgatgatattatttccaatactgacggcatgaatttgttttcaagtttaataaattaag

SEQ ID NO: 318511 - DNA, 685 bp, Unknown
  Bacterial polypeptide expressing nucleotide sequence isolated from the Sargasso Sea
aatgaaatcatctgtaataacctttcctggttcaaattgtgatagagacatggatgttgctttaaaaaaatttggatttaataataaaatggtttggcatgatgataatgaattaccaaaaagcgacttagttgttttacctggaggtttttcttacggtgattatttacgttgtggaagtatggcttcaaaatctaaaattatgcaatctgtaataaactttgcaaaatctggtggcttggtaatgggtatttgtaatggttttcaaatattagttgaaacaggtttagttcctggagttttgttaagaaataaatatttagaatttatttgtaagaatgtttttgtcaaattagataataaagaaaacccttattttaaaaacatagataaagacgtctttgaactacatatagctcataatgaaggtaattatttttgtacagatgatcagctaaaagaaattaaagataataaccaagttgcaatttattatagtaacaacaaaggtcaaatagatgaaaattcaaacccaaatgggtcaattaaaaatattgcaggtatttttaataaagagaaaaatgtccttggtatgatgccccaccctgaaagaatgatagatcaatccttatcaggtgaagatggatctatattctttaaaaatctaattaataatattaaataa

SEQ ID NO: 318512 - DNA, 823 bp, Unknown
  Bacterial polypeptide expressing nucleotide sequence isolated from the Sargasso Sea
atttgcaaaagattaaagagaaaaccaaataggactgaactaggaatgtttggtgttatgtggtctgaacattgttgttatagaaattcaaaacctttactatctaagtttcctactaaaggagctaatgttttggttggtcctggagaaaatgctggagttattgatgttggaaataaccaaaaacttgtttttaaaatagaaagtcataatcatccttctgcaattgaaccttttcaaggagcggcaacaggtgtaggaggaatattaagagatatttttacaatgggagctaggccaatcgcagtattgaattcattgagattcggaaatcttgataaactatcaaatgtcgatttgcttcgaggagttgtatccggtattgcacattatggaaattgtgtaggtgtgcctactgttggaggtgaaattaatttcgatgatagttattctggaaatcctctagtaaatgttatggctttgggacttttagagactaatgaaattgtttgttctggagctaaaaatgtaggatcaccagtactatatgtaggcaatactactggcagagatggtgttggtggtgcaagtttcgcaagttcagaattaacgactacttcattagataacagaccggcagtccaagtaggtgatccatttattgagaaaagtcttatagaagcttgtttagatgcttttaagacaggagatgtgatttcagctcaagatatgggtgctgcaggtttaacttgtagtagtgcagaaatggctgctaatggaaatttaggcatatctattgatttagatttagtccttctagaga

SEQ ID NO: 318513 - DNA, 952 bp, Unknown
  Bacterial polypeptide expressing nucleotide sequence isolated from the Sargasso Sea
aatgagcactggctcttacaagtcatccagaagacatttaaaaaaattacacaccaaaggtgaccaagtaattcagggtccaggagaaaatgctggagttgtagatattgaagacgatgatgcaattgtatttaaaatagaaagtcataaccatccttcatttattgagccctatcaaggagcagctacgggtgttggtgggattatgagagatgtatttacaatgggcgctagacctattgcaaacttaaactctattcattttggctcaaccaaccatgaaaaaacaagaaatctattaagaggagttgttaaaggtattggtggatatggtaactgtattggtgttccaacaatagctggtcaaacttgctttgatgaatcttataatggaaatattttagtaaacgcaatgacattaggtttagttaataaaaataaaatattttattcaaaagctgcggggattaacaaaccagttatttatgttggttcaaaaacaggtagagatggaattcatggtgcgagtatggcatccgctatttttgacgacaaaatagaagaaaaaaaacctactgttcaagttggtgatccattcacagaaaaacttctacttgaagcttgtcttgagcttatggctggtaaatcaataatatcaattcaagatatgggggctgcaggtttaacatcttctagcattgaaatggcatctaaaggagatttaggcattgaaatagatttaacaaaagttccttgtagagaggaaaatatgacaccttatgaaataatgctttcagaaagccaagagagaatgttgattgtgttagaagcaggaaaagaagaagaagcaaaaaaaatatttgataagtggaacttagattttgctgttattggaaagacaaccaatagtaaaaatatagaattgttttttaaaaataaaaaaagttgctga

SEQ ID NO: 318514 - DNA, 477 bp, Unknown
  Bacterial polypeptide expressing nucleotide sequence isolated from the Sargasso Sea
aatgaaaattactaatcaaattgtagaaaagcacggattaaaactagaagaatattctgttattaaaaaactattaaaaagagaaccaaatttgttagaacttggaatattttctgcaatgtggaatgaacattgctcctataaatcttcaagaaaacatcttaaaaatttacacacaactggaaaacaagttattcaagggcctggagaaaatgcgggtgttattgatattggtgatgatgacgcaattatttttaaaatagaaagccataatcatccttcttacatagaaccttaccaaggtgccgctactggcgtaggcggaatattaagagatgtatttactatgggagcaagaccaatagctcttcttaattcaatacattttggttctcctagtcactttaaaacaaaaactctattgaatggagtagtctcaggaattggaggatatggaaactgtattggtataccaac

SEQ ID NO: 318515 - DNA, 905 bp, Unknown
  Bacterial polypeptide expressing nucleotide sequence isolated from the Sargasso Sea
gcttcgcttcggtgccgcggatcatgagaaaacccgtcatcttctgtcaggcgtggtctcgggcattggcggatatggcaactgtatcggcattccgaccatcggcggtgaggtcaatttcgatccgtcctacaatggcaatattctcgtgaacgcgatggcggtcgggctggcaaacagcgaccgcatcttccggtctgccgccaccggccccggcaatccggtgatctatgtcggtgcgaagaccggccgtgacggcatccatggtgccaccatggcgtctgccgaattctcggacgaaaccgaatccaaacgccccactgtgcaggttggcgaccctttcaccggcaagcttctgatggaggcatgccttgaactgatggcctctgactcggtgctgtctattcaggatatgggggctgccggcctcacctcttcctcggtcgagatggcgtcgaagggcgggcttggcatggagatggatcttgatctggtgccagcacgcgaagaggcgatgagcgcctatgagctgatgctctcggaaagccaggaacggatgctgatggtgctgaaacctgacgccaccgaaattgcgcggcagatttttgacaagtgggacctcgatttcatgccgatcggcaaggtcaccgagactggcaggcttgtgctcctcaaggatggtgaagtggcctgtgacatcccgctggcaccgcttgtcgatgacgcgccggaatatgaccgaccacaggccgaggttgcgccgcgcccggtcctggccagcagcgagatcgccggtcaggctccggttgtcgatgttctgaaggatcttcttggcagcgtcgatctggcaagccgccgctggatctatgagcagtatgacagccaggtgatggcggacaccattg

SEQ ID NO: 318516 - DNA, 577 bp, Unknown
  Bacterial polypeptide expressing nucleotide sequence isolated from the Sargasso Sea
gatgcacgccgccgtcatcgtctttcccggctccaactgcgatcgtgacatggccgtcgcgcttgagcgggcaggggccaaggtttccatggtctggcacaaggatacggccctgcccgaaggcattgacctgatcggcgtgccgggcggattctccttcggcgattacctgcgctgcggcgcgattgccgccaattcgccgatctgccgctcggtcgtggcccatgccgaaaagggcggttacgtgcttggcatctgcaacggctttcaggtgctgaccgaaaccggccttctgccgggtgtcctgctgcgcaacgcaggcctgaaatacatctgcaagccggtcgacctgacggtgcaaaccgccgacagcgcctacacctgcgggtatgaggctgggcaaaccgtgacctttccgattgcccaccacgacggcaactatttcgccgatgccgaaacgctcaagcgcctgcacggcgaggcacgggtggccttcacctataacgacaatcccaacggctcggtcgatgacatcgccgggggtcctgtcgggaaaaccgtcgcgtgctcggcatga

SEQ ID NO: 318517 - DNA, 685 bp, Unknown
  Bacterial polypeptide expressing nucleotide sequence isolated from the Sargasso Sea
atgaaatcttctgtaatcattttcccaggatctaattgtgatagagatatggatgtggcattaaaaaagtttggttttaaaaatcaaatggtttggcacaacgatcaatcaataccaaaaagtgatttaattgtattacctggtggtttttcttatggagactatttgagatgtggaagcattgcttcaaaatcaagaataataaaatcagtaatagaatttgctaacaaaggaggattagtacttggaatttgtaacggatttcaaattttaaccgaaacaggtctacttactggaatactacaacaaaacaaatatttaaattttatatgcaaaaatgtatttgtaaaaataaaagataaaaaaaataaatactttaaaaatataaaaaaagaaattttagaacttcatattgctcataatgaaggaaattatttttgcacggatgatgaattaaaaattctaaaaaataacaatcaaatagcagtcacatactgcaatgaattaggcttagagaatactgaaaataacccaaatggtgctataaataatatagcaggaatatttaacaaaaataaaaatgtattaggtatgatgcctcatcctgaaagaatgattgatagttatctttcaggagaagacggatctttgttttttaataatcttttaaataattttggataat

SEQ ID NO: 318518 - DNA, 889 bp, Unknown
  Bacterial polypeptide expressing nucleotide sequence isolated from the Sargasso Sea
caaaggtattaacaaaccagttgtttatgttggttcaaaaactggaagagatggtattcatggtgctaccatggcatctgcagaatttgatgaaaattctgaggaaaagaaaccgacagttcaggtaggagacccttttacagaaaaactattattagaggcttgcttagaattaatgaaaaaaaattctataatatcaattcaagacatgggtgcagcaggattgacatcatcaagtattgaaatggcttcaaaaggtaacgtaggtattgaattaaatctaaataaagttccatgtagagaaaataatatgacaccttatgaaatgatgctgtcagaaagtcaggaaagaatgttgattattcttgatgacaaaaaagaaaatgaagcaaaaaaaatatttgataagtgggatcttgactttgtagtaattggtaaaactaccgacagcaaacgtttaatattaaattttgatgataaaaaagttgcagatattccaattactgcattggcagatgaagctcctcaatataatagaaagtggacaatatctcaaaataaaaaaaaagaattaaagctaaaaaatctgaaaaagattaaaattgaagaggctcttcaaaagatattgtcttcgccagatcattcaaataaaagttggattacaaaccaatttgatcaagctgtaatgtgtgacacaatacaaaagtctggtggggatgctgctgtgataagaattcataaaaaagagaaagcaatatcaatttctgtcgattcttctgcgaattattgtaatgcagatgctaagattggaggaaaacaaattatttgtgaaaactggagaaaaatgatttctgttggatcaaaacctctcgcaataacgaattgtctt

SEQ ID NO: 318519 - DNA, 819 bp, Unknown
  Bacterial polypeptide expressing nucleotide sequence isolated from the Sargasso Sea
catgcgggatgtatttacaatgggagcaagaccaatagcaaatctaaattcaattcattttggttcaccacaacataaaaaaacaagaaacttattaaggggagttgttaaaggaataggtggatatggaaattgtattggagttccaacaattgctggtcaaacaacttttgatgaatcttacaacggaaatattttagtaaatgccatgacacttggtttagtaaataaaaataagattttttactcaaaagcagctggattagataaaccagtaatatacgtaggttcaaaaactggaagagatggaattcatggtgccagtatggcttcagcaactttcgatgacaaaattgaagaaaaaaaaccaacagttcaagttggagacccatttactgaaaaattattacttgaagcgtgcctagaattaatggctgataattcaatcattgcaattcaagatatgggtgcagcaggattaacatcttcaagtgttgaaatggcatcaaaaggaagccttggaattgaattaaatcttagtgaggttccttgtagggaagaaaaaatgacaccatatgaaataatgctgtctgaaagtcaagagagaatgcttatagttcttgaaaaaggtaaagaagaacatgcaaaaaaaatatttgataaatggaacttagattttgcagttataggtaaaacaacagacacaaaaaaaatagaattaatatttgataataaaaaagttgctgaaataccaatagatcttcttgcagaaaatgctccaatatatgatcgtccttggaaaaaactaaattacctcaa

SEQ ID NO: 318520 - DNA, 472 bp, Unknown
  Bacterial polypeptide expressing nucleotide sequence isolated from the Sargasso Sea
aatgactgtaaatgaaaaaatagcaattgagcatggacttaaggcagatgagtataaaaaaatttgtgatcttttaaaaaggactcctaacatcactgaactaggaatattttctgcaatgtggaatgagcattgttcttacaaatcatctcgacttcatttaaaaaaattacctacaacaggaaaaaaagttattcaaggtccaggtgaaaatgctggtgtaatagatattgaagatggtgatgctatagtttttaaaatagaaagtcataaccatccatcatttatagaaccttatcaaggggcagcaacaggtgttggaggaattatgagagatgtttttacaatgggtgcaagacctattgcaaatttaaattcaattcattttggctcaccccaacataaaaaaacaaaaaatttacttagaggtgttgttcacggtataggtggatatggaaattgtatgggtatt

SEQ ID NO: 318521 - DNA, 867 bp, Unknown
  Bacterial polypeptide expressing nucleotide sequence isolated from the Sargasso Sea
cttgtttcatcattttccgactgaaggtgaaacgatattgacaaaaacaggtgaagagaatgctggtgctattgatcttggagatggatggtgtgcagtgttcaaaatggagtcgcataatcatccatcagccattgaaccataccagggtgccgctaccggtgtaggtgggatattgcgcgatatatttgcgatggggatgaggcctatagcgttgttggattcattacgctttggcccccttgatgatcgcaataataaatacttatttaatggtgtggtttctggcattggtgggtatggaaattgtattggagtcccaactgttggtggtgaagtgcaatttgataaaagttattcaggtaatccattagttaatgcaatgtgtgtgggtataggtcgagtagaaaatttactttctgcaagtgcttctggcccagggaatccattgctgttagttggagcagacacgggtcgtgatggaatccatggagcaacatttgcatctgttgagttggatgaaaatgctgaagagatgcgtcctgcagttcaggtagggaatccatttttagaaaaactcttacttgaagcttgtgttgaattagccgaagaacataatgattggatagttggattgcaagatttaggtgcagctggacttacgtcaagtgcaatcgaggctgcttctcgtgctggtactggaattgatattgatgtcacattagttccgcgaagagaagaaaagatgacagcatatgaagtaatgctttctgaatctcaagaacgtatgttagtaattcctaaaaaagaacacttggatgatgttattcatttgtttcgtcgatgggaaattcgtgccgatgtaat

SEQ ID NO: 318522 - DNA, 817 bp, Unknown
  Bacterial polypeptide expressing nucleotide sequence isolated from the Sargasso Sea
aatctggataaatcatctaatatttctttacttcgaggagtagttgcggggatatctcattacggtaattgtgttggggttcctactgtcggtggagaaatagattttgatgacagttattccggcaatcctcttgttaatgtcatggctttaggtttattagaaactgatgaaattgtttgttcaggagcaaaagaagtaggttctcctgttttatatgtaggaaatacgacaggaaaggatggagtaggaggtgctagttttgctagttcagaattaaccactaattcattggataatagaccggcagtacaagtaggtgatccatttattgaaaaaagtcttattgaagcttgtttagatgcttttaaaacgggcgatgtacttgctgctcaagatatgggagctgcgggattaacatgtagtagtgctgaaatggctgcaaatgggagtctaggtatttcaattaacctagatttagttcctgcaagagagaatgatatgtctgcttaccaatatttactctctgaatcacaagagagaatgttgatggttgttaaagaagaaaagttaaatactcttattaatcaatttaaaaagtggggactttttgcaaatgttattggtgaagtcatatctaaaagagaggttattatctctcaaaaaaatcaaatagttgcacaaattcctacttctgctttatctgatgaaactccaattaatattcataatattattaaggagcctcctattcatttattagagaaatggaaatggacagaagaggaattgccagctatcagcgaaaataaaattt

SEQ ID NO: 318523 - DNA, 721 bp, Unknown
  Bacterial polypeptide expressing nucleotide sequence isolated from the Sargasso Sea
ctgcatctaactatttcagagcatggtgaaatgaattctaccattgttatatttcctggaaccaaccgcgaacacgatatggtgatggccgtgcagcaagcaagtggtaaaaaaccgaactttgtttggtacaatgatacaagttttccaaaaacggacttaataatagtgccaggcggtttttcttacggcgattatcttcgctccggtgcaatggcagcaagatcccctgcaatgaattcggttttagagtatgcatctaaaggggttccgatactcggcgtatgtaacggatttcaaatcctaacggaagttggtctattgccgggtgcattaatccgaaacaagaacctgaaatttatatgcagaaatgttagtataaaagttgaagttgatgactcgatctttacatcgcgatattcaaaaggtcagattttatctataccagtagcgcacaatgatggaaactattttgctagcgaaggtcttttacaggaattacatgacaagagtcagatcgccttcaagtatactgatcaatcaggcagagtagatgcgtcaacaaatccaaatggatcctgtgaaaatattgcagggatattgaatgcgcaaaagaatgtactgggattaatgccccatccagaaaatgctactgaccgtaatcttggaggtatagacggcagaccacttttccaaagtttagtggatgcgatcacatgac

SEQ ID NO: 318524 - DNA, 763 bp, Unknown
  Bacterial polypeptide expressing nucleotide sequence isolated from the Sargasso Sea
ctgccaataactggagcacaggttatacaaggtccaggtgagaatgccggggttgtagatatcggagataatcaagcaattgtttttaaaattgaatctcataatcatccatcatttatcgaaccgtttcaaggtgccgctacaggggttggtggtattttaagagatatttttaccatgggagcacgaccaattgcattaatgaacgttttaagatttggggagagaaaaaattcccttacaaagcatttagtaaatggagttgtaaaaggtattggtggttatggaaactgcatagggatacctactattggtggcgaaacttactttcataaatcatacaatgaaaacattttagtcaacgcaatggccattggattggcagacaaaaacaaaatattttattctgcagcaactggagttggaaacccagttatttatgtaggtgcaaaaacaggtagggatggaattcatggggcaactatgtcttccgcagaattttcagatgataccgaaaacaaaaaaccgacagttcaagtgggtgatccattcacaggaaagttattgctagaagcttgtttagaattaatggaatcagattccatcttatcaattcaagacatgggagctgcaggactcacaagttcgagtgtggagatggcatcaaaaggaaatttaggaattaaaattaatctaaataagataccacttagagaaaaaaatatgtctagttatgaaataatgctttctgaaagtcaggaaa

SEQ ID NO: 318525 - DNA, 587 bp, Unknown
  Bacterial polypeptide expressing nucleotide sequence isolated from the Sargasso Sea
catgaacgaaccggaaatgacctttgagaatgcggcgtcaatggggttgtcagaggacgaatggaggctgatcctgaaacggctcgcacggacaccaaacctctgtgaactagggattttctcggcaatgtggtcagaacattgctcgtataaatcatcaaaaaaatggctgaaaactcttcccgttgatggctcgcaggtgatcgaggggccaggcgagaatgctggcgttgttgatatcggcgacggtcttgctgccatcttcaagatcgagagccataatcatccctcctatattgaaccctatcagggtgcggcgaccggtgttggagggattttgcgtgacgtgttcactatgggcgcacgaccagtggccttattgaacgccctccgctttggcgctgctgaccacgagaaaacgcggcatttgcttggcggtgtcgtctcgggaatcggtggatatggcaattgcattggcattccaaccgttggcggcgaggtcaatttcgacgcctcctacaatggcaatattctggtcaatgcgatggctgtcggcttggccaacagcaaccgcattttccggtccg

SEQ ID NO: 318526 - DNA, 793 bp, Unknown
  Bacterial polypeptide expressing nucleotide sequence isolated from the Sargasso Sea
aatgaaaaaaaataaagatagcaaaaacgagttaagtttaaaaacggtgtttgctcacggtttatctttaaacgaatatgagaagatcaaatgtctaataggtcgggctccaaatattacagaacttggcattttttctgctatgtggaacgagcactgctcttataaatcgtcaaaaaagtggctgaaaaatctttatagtaaaggagatgccgtaatctgtgggcccggtgaaaatgctggaataattgccatagacgaaaaaatcgcgcttgcctttaaaatggagagtcacaatcacccaagttacatcgagccatttaatggggcagcaacaggagttggaggtatcctaagagatgtctttactatgggagctagaccgatagcagtaatgaactctctttcaatgggatctataaattattcctctacaaagcatattctaaaaggtgttgtaaagggtattagtcattacggaaattcttttggagtccctaatattggaggtgaattgaggttccacagaagctacaattctaactgtctagtaaatgcttttgcggcaggtttggttgagaggcacaaaatattttactctaaagcttctggtgttaatgctcctattatttatatgggagctaagacaggaaaagacggagttggtggtgccactatggcttcagaaagcttctctgaaaaccttgaagacaaaaataaaaaacgacctaatgtaccaataggtgacccgtttctagaaaagaagcttatggaggcatgcttagaattatga

SEQ ID NO: 318527 - DNA, 607 bp, Unknown
  Bacterial polypeptide expressing nucleotide sequence isolated from the Sargasso Sea
atgaaagttacagaaactgttgctattgaacatggattaaaaaaagaagaatttaaaaaaatttgtgaattattaaaaagaatacctaatattactgaattgggaattttctcagcaatgtggaatgagcactgctcatataaatcatctagaaaacatctcaaaaaactacataccaaaggaaaacacgttattcagggcccaggggaaaatgcaggtgtaatagatattggcgatgatgatgcaattgtgtttaaaattgaaagtcataatcatccttcttttattgagccttatcaaggagcagctacaggcgttggaggaataatgagggatgtatttacaatgggcgctagacctatagcaaatctaaactctattcacttcggatcgcctcagcataaaaaaactaaaaatttgttaagaggggtagttaaaggaataggaggatacggaaattgtattggggtgccaacaattgcaggtcaaacaattttcgatgagtcttacaatggcaacattctagtaaatgcaatgacactaggattagtaaataaaaataaaatattttattcaaaagcagcaggtataaataaaccagtaattt

SEQ ID NO: 318528 - DNA, 889 bp, Unknown
  Bacterial polypeptide expressing nucleotide sequence isolated from the Sargasso Sea
attttactcaaaagcagcaggattaaataaaccagtaatttatgtaggatctaaaacaggtagagatggtattcacggtgcaagtatggcctctgccagctttgatgaaaaaattgaggaaaaaaaaccaactgtacaagttggagatccattcactgaaaaacttttactggaggcctgtttagaattgatggcgggagattctataattgcaattcaagatatgggagcagctggcttaacttcctcaagtattgagatggcatcaaaaggaaatttggggattgaaattaatttaaacaaagtcccatgcagagaaacaaaaatgacaccttatgaaataatgctttcagaaagtcaagaaagaatgttgatagttttagaaagtggaaaagaagaaatggcaaaaaaaatatttgataaatggaacctagattttgctataattggcaaaacaacaaattcaaaaaatattgaattattttttgataatgaacaagtcgcgaatatacctgtaaatacacttgttgaaaactctcctatgtataacagaaaatggaaaaaagctaagttacctaaaaaaaataaaattaaaaaagaaacttacagtaagttaaaaattaaagatgttctaaaaaaaattttatctaatccaaatgtttgtaataaagaatggatttggcaacaatatgatcatactgttatgggtgatacaattcaaaaacctgggggtgattcaggtgtagttagagtgcatggaactgataaagctgttgctgcttcagttgactcttcggctgtttattgttgggcacatccattaactggtggaaaacaagttgtagctgaaagctggagaaatttaatttcagttggagcaacaccaata

SEQ ID NO: 318529 - DNA, 677 bp, Unknown
  Bacterial polypeptide expressing nucleotide sequence isolated from the Sargasso Sea
aatggaagtttcagagtctgttgctttagatcatggtttaaaaaacgaagaatacaaaaaaatttgtgaattattaaagagagttcccaatataacagaattagcaatattttctgcgatgtggaatgaacattgttcatataaatcatcaagaaaacacttaaaaaaacttcatacttctggaaaacaagttattcaaggaccaggtgaaaatgcaggtgttataaatattggtgatgatgatgcaattgtatttaagatagaaagtcataaccatccttcttttattgaaccctatcaaggagcagctactggtgttggtggtattatgagagatgtatttacaatgggtgctagaccaatagctaatttaaattcaatacattttggtttaccacaacataaaaaaactaaaaatttactgcgcggagttgttaaaggtataggtggatatggtaattgtataggggtaccaacaatagcaggtcaaacttcatttgacgattcttataatggaaatattttagtaaatgcaatgacaattggtttagtcaataaaaataaaatattttattctaaagctgcaggaataggtaaaccagttatttacgttgggatcaaaacaggtagagatggaattcatggagccagtatggcttctgctacatttgatgatg

SEQ ID NO: 318530 - DNA, 871 bp, Unknown
  Bacterial polypeptide expressing nucleotide sequence isolated from the Sargasso Sea
ggggatcctttcactgaaaaattactattagaagcctgcttagaattaatgtcagataaatcaattattgcaattcaagatatgggagcggcaggactaacatcttcgagtgttgagatggcctctaaaggaaatttaggtattgagttagacttaagcaaggttccttgcagagaagagaatatgactccttatgaaataatgctatctgaaagtcaggaaagaatgttgatagttttagaaaatgggaaagaagattatgctaaaaaaatatttgaaaaatggaatttagattttgctataattggtaaaacaacaaattctaaacaaattgagattaaatttaataatgaaaaggttgctgaaattccaatcaatttattggcagaaaatgcacctgtttatgacaggaaatggaaaaaaactaaaattccacaaaaattaaaattaaataaagatgagtttaaatcattaaatttatcagattgtctaaaaaaaattttagctaatccaaatatatcagaaaagaaatggatatgggatcaattcgatcatactgttatgggagatacaattcaaaaacctggtggcgacgctggggtagtaagagtacatggaacaaaaaaagctattgctgcatcagtagactcatccgcatcttattgttattcacatccattgacaggaggaaagcaaattgtttgtgaaagttggagaaatttaatttctgttggcgctaaaccaattgctattaccaactgtctaaactttggaaatcctgaaaaagaaaaaaatatgggtgaatttgttgaatgtgttgaaggaattactgagtcaagtaaatatttaaatttccccagtagtttctggt

SEQ ID NO: 318531 - DNA, 581 bp, Unknown
  Bacterial polypeptide expressing nucleotide sequence isolated from the Sargasso Sea
aatggaagtaaatgaaaaaattgcaatagatcacggtttaaaacctgatgaatacaaaaaaatttgtgatttgttaaagcgcgttccaaatttaacagaacttggaattttttcagcaatgtggaatgagcattgttcctacaaatcttcaagattacatttaaaaaaattaaacactaaggggaaaaaagtaattcaaggtccaggtgaaaatgctggggtaattgatattggagatgacgacgcaatagtttttaaaattgaaagtcataatcatccctcatttatagaaccttatcaaggtgcagcaacaggagttggtggaataatgagagatgtttttacaatgggtgcaagaccaattgcaaacttaaattcaattcattttggttcaacacaacacaaaaaaactaaaaatctattaagaggtgttgttaagggaattgggggatatggaaattgtattggagttccaactatagctggccaaacttgttttgatcaatcttataatggaaatattttagtaaacgcaatgacactaggtttggtaaataaaaataaaattttttactcaaaag

SEQ ID NO: 318532 - DNA, 898 bp, Unknown
  Bacterial polypeptide expressing nucleotide sequence isolated from the Sargasso Sea
ggattatcagaacaagattatatggattgtaaaagcttgcttaaaagagtcccccttagaacagagctagcattattctcggctatgtggagtgagcattgttcttacaaatcttctaaatattggcttaagaaacttcctcataaggccgagtatgtgattcaaggaccaggtgaaaatgctggcgtcatagatataggctatgataatgcattgatttttaaaattgaaagtcataatcatccatcttttattgagccataccaaggagctgccacaggggttggaggtataatgagagacatctttaccatgggtgcaaggccgatagctaatttaaattgcttaagatttggtaacctgcataacagaagaacaaaatatttatttaatggagtagtagaaggtattggtgactatggtaattgcactggtattcctactgtcgcaggagaatgcagttttgatagtagatacaatcagaatattttagttaatgctatgaccataggtattactaaaaaaaataaagttttctatgcaaaagcaggaaaaattggtaataaagtggtttatttgggctctaaaaccggtagagatggaattcatggtgcaagtatgtcatcagaatccttttctaaagactctaaaagtttaaaacctactgtacaagtgggagatcctttctcagaaaaattattaatggaggcctgcttagaattaatgcggaaacaattggttataggcttacaagacatgggggcagcaggattaacctcatctgccgttgaaatagcagcatcttccaatgtagggataagactaaatttagataaggttcctcttcgagacggtgagatgaatgctgatgaaattatgttatcagaaagtcaagaga

SEQ ID NO: 318533 - DNA, 703 bp, Unknown
  Bacterial polypeptide expressing nucleotide sequence isolated from the Sargasso Sea
atgttagtaaacgaaaaagtagctatagagcacggtcttaagtcagacgaatataaaaaaatttgtgaattattaaaaagaactcctaatatcactgaacttggaatattttcagcaatgtggaatgaacactgttcttataaatcatcaagactgcatttaaaaaaattaccaactacaggaaaaaatgttattcaagggcctggcgaaaatgcaggaataattgacattgaagatggggatgcaatagtttttaaaattgagagtcacaatcatccctcttttattgaaccctaccaaggcgcagcgactggtgtagggggaattatgagagatgtgtttaccatgggtgcacgcccaattgctaatctaaattcaattcatttcggatcttctcaaaataaaaaaactaaaaatttattaaggggagtagtgcatggaataggtggttatggcaattgtatgggtgttccaacaattgctggacagacaagttttgacagttcttataatggaaatattttggtaaatgcaatgactctaggtctagttaaaaaagacaaaattttttattctaaagcagcaggtttaaataaacctgttatctatgttggctctaaaacaggaagagatggaattcatggggcaagtatggcttctgcgagttttgatgataaaattgaagaaaagaaacctacagttc

SEQ ID NO: 318534 - DNA, 721 bp, Unknown
  Bacterial polypeptide expressing nucleotide sequence isolated from the Sargasso Sea
catgagcaatttgcgcgaaggtctttcaacttttgaaatcgcagaagacctaggccttaaaaaggacgagtacgagcaaatttgctcactcatgggtagaattcctaacattcaggaaatctcaatattttctgcaatgtggtctgagcattgttcttacaaatcatcaaggaaatggttgaagactttaccaactaaaggtgaagttgtgatccatggcccaggtgaaaatgcaggcgcaatagacattggcgatggcaaggttgctatatttaaaattgaatctcacaatcacccatcatttatagagccctatcaaggagcagctactggtgttggtggaatactcagagacgtttttacaatgggtgcaagacctgtagcacttctaaatgctttaagatttggatctattgaaaataataaaacaaagtatttactagagggggttgtttcaggcatcggaggatacggtaattgtattggcataccaacaatcggtggagaaactaattttgataaaagttatgacggcaacatccttgtaaatgcaatggctataggaattactgaaaaagataaaatatttttatcagctgctaggggagtaggatatccattaatttatgtgggagcaaaaacgggaagagacggaattcacggtgcgtctatgtcatcaacagaatttgacgataaaactgaagaaaaaagaccaacagtt

SEQ ID NO: 318535 - DNA, 736 bp, Unknown
  Bacterial polypeptide expressing nucleotide sequence isolated from the Sargasso Sea
ttgaattatcttggaagagatccgagtcacactgaaattggtatattttcagtaatgtggtcagaacattgttcatataaatcttctcgacattggcttaaaaaattacatacagaaggaatacaggttatacaaggtcctggtgagaatgctggtgtagttgatattggtgacaaccaggcgataattttcaagatggaaagtcataatcatccgtcttttatcgaaccgtaccagggtgcagcaacaggagttgggggaattatgcgtgatgtgtttacaatgggcgcccgtcctattgcacttgtaaattcgatcagatttggtgaattaacgcatccaaaaacaaagtttttactttctggcgtcgtcgctggcattggagggtatggaaactgtgttgggataccaacaattgcaggtgaaacaggctttgatagctcatataatggaaataaccttgtaaatgccatgtgtgttggattaaccacgaaagataaaatattttattcaaaagcctccggtatcggaaacccagttgtgtatgtcggcgcaaaaacgggccgtgatggtattcacggtgcaacgatggcttcgggggagtttgatgacgagtcggaaaaaaacaggccgacagttcaagttggtgatccgtatgctgaaaagcttctgcttgaggcgtgcctagagcttatgcaaaaagacgcgatcatatcaatacaggacatgggcgcag

SEQ ID NO: 318536 - DNA, 630 bp, Unknown
  Bacterial polypeptide expressing nucleotide sequence isolated from the Sargasso Sea
ttaggagatgatgatgcagttgtctttaaaatagaaagtcttaatcatccttcttttattgaaccatatcagggtgcagctacaggtgtcggtggtatattgcgcgatgtatttacaatgggtgctagaccaattgctttgatgaattctatacactttggatcacctaaaaatcataaaaccaaaaacttattaagtggcgttgtttctggaattggtggttacggaaattctgttggaataccaactgtaggaggagaaactaaatttaatgatacatataatgaaaatattttagtcaatgctatggcagttggtttggcaaataaaaataaaattttctattcaaaagcaaaaggtttaaataaggctgtagtatatgtgggttcaaaaactggacgggatggtatccacggagctacgatggcgtctgcagaattcgatgataactcagaagaaaaaaaacctactgttcaagtcggagatccttttacagaaaaattacttttggaagcatgtttagagttaatgaaagacaactctattatatcaatacaggatatgggagcagcaggtcttacttcatcaagtatagaaatggcttcaaaaggaaaacttggtatcgaatta

SEQ ID NO: 318537 - DNA, 894 bp, Unknown
  Bacterial polypeptide expressing nucleotide sequence isolated from the Sargasso Sea
agaaatctattacatggagttgtttctggaataggtggttacggaaattgtatcggcataccaactgtcgccggagaaacaaaatttaatcaaacatataatgaaaatatattagtaaacgcaatggcggttggtcttgtgaaaaaaaataaaattttttattcaaaggcaaaaggaataggtaaatctgtagtctacgttggttctaaaactggtcgagatggtattcatggagcatctatggcatcagcagaattcgacgacgactctgaggaaaaaaagcctacagtgcaagtaggagatccctttactgaaaaattacttatggaagcttgtctagaattgatgaaagataaatcaataatatcaattcaagatatgggtgcagctggactaacctcctcaagtgtagaaatggcatttaaaggagatttaggaatggagattaatttagataaagtgccttgtagggaagaaaagatgactccatatgaaatgatgctatcagaaagtcaagaaagaatgttgattattttagaggatggaaaagaaaatgaagctaaaaagatatttgataaatgggacttagattttgtagttataggaaaaacaatagaaacaaaaaaacttaagctgtattataaaaatgatattgtagcagacatacctatagaagctttatcatctagcgctccccagtatgaaagaaaatggactaaaacagaactgcctaaaaaagaaacaaactttaaaaatttaaaaaaaataaattttaaagaaagttttttaaagattatctcttcatcaaatcactctaacaaaaactggataactgaacagtacgatcagatggtgatgtgtgatacaattcaaaaatctggaagcgatgctgct

SEQ ID NO: 318538 - DNA, 775 bp, Unknown
  Bacterial polypeptide expressing nucleotide sequence isolated from the Sargasso Sea
atgttagtaaacgaaaagattgcaatagatcatggtctgaaagcagatgagtataaaaaaatatgtgatctgctgaaaagaacacctaacttaactgaacttggaattttttctgctatgtggaatgagcactgctcttataaatcctcgaggcttcatctaaaaaaattaccaactgaaggaaaaaaagttatccagggacctggagagaatgcaggagtaattgatattgaggatggtgatgcaatagtctttaaaattgaaagtcacaaccacccttcatttattgagccttaccaaggtgctgcaacaggagttggtggcattatgagagatgtttttacgatgggcgctagaccaatcgctaacttaaactctatacattttggatctccacaacataaaaaaacaaaaaatcttttaagaggtgttgtccatggtattgggggttatggaaactgtatgggtgtgccaacaattgctggacaaacatcatttgatagctcttacaatggaaatattttggttaacgctatgaccttaggtttggtcaagaaaaataaaatattttattcaaaagccgctggtataaataagccagttatttatgtaggttccaaaactggtagagacggcattcatggagcaagtatggcatcagctagttttgatgaaaagattgaagaaaaaaaacctaccgtccaagtaggtgatccattcacagaaaaacttttattagaggcatgcctagaactaatggcaggtgactctatta

SEQ ID NO: 318539 - DNA, 625 bp, Unknown
  Bacterial polypeptide expressing nucleotide sequence isolated from the Sargasso Sea
atgagcatcggcgtccttgtctttcccggctccaactgcgaccgcgatgtgcagtgggcgacagaaggatgcctcggcatgcccacccggcggatctggcacgaggaaacggatctgagcggcctcgatgtcgtggtgctgccagggggcttcagctacggcgattacctccgctgtggtgcaattgcccgcttcgccccagcactccaagcgctgctcggcttcgcggctcaaggggggcgcgtcctggggatctgcaacggatttcaggtgctgaccgaactgggactcctgccgggagccctgacccgcaaccgggaccttcacttcatctgtgaggacgcaccactgcaggtggtcagctcccgcacaccatggctggagaactacggaaaagacacggcgctgaccctgcccatcgcccatggggaaggccgctatcaatgctccgacgacaccctgaagcatctgcaggatgccgatgccatcgccctgcgctaccaagccaatccaaatggctcggtgggggacattgccggcatcactaacgactccggaaacgtgctggggttgatgccccatccggagcgggcctgcgaccctgccaccggtgggaccgacggtc

SEQ ID NO: 318540 - DNA, 585 bp, Unknown
  Bacterial polypeptide expressing nucleotide sequence isolated from the Sargasso Sea
atgatcaggaaattcctaaaagtgatttaattgtattgcctggaggtttttcctatggagattatttaagatgtggaagtattgctggaaaatcaaaaataattaaatcagttgtagaatttgcaaactcaggaggcttggtattaggaatatgcaatggatttcaaatattaacggagactggtttgttgccaggtgttcttttacaaaataaatatcaaaaatttatatgtaaaaatgttcatgttaaaataaatgataaagaaaataagtattttaaaaatatcaaaaaggaaattttagaattacatattgctcataatgaaggaaattatttttgttctgaggacgaaattaaatctttaaatgataataatcaaattgcagttacttattgtaacgaaaaaggcaaggaagatgagcgatacaaccccaatggtgcattaagaaatattgctggaatttttagtaaaaataaaaatatcttaggaatgatgccacatcctgaaagagtaatagacaaatacctctcaagtaatgatggaaattttttctttgaaaatttatttgaaaatttaaaataat

SEQ ID NO: 318541 - DNA, 867 bp, Unknown
  Bacterial polypeptide expressing nucleotide sequence isolated from the Sargasso Sea
ttattctcaagctaaagggatagatcaacccgtaatttatgtaggatcaaagactggcagagatggaattcatggagcaagcatggcttcagctgaatttgacgaagatactgaaaataaaaaacctaccgttcaagtaggcgatccctttactgaaaaacttcttttagaggcttgtttagaattaatgaaagaagacgctattatttcaatacaagatatgggagcggcaggtttaacatcatcaagtgttgaaatggcctcaaaaggtaatctgggaatagaaataaacttaaacaaaattccatgtagagaagataaaatgtctccctatgaaatgatgctttcagaaagtcaggaaagaatgcttttaattttaaagtctgaaaaaataaatattgcagaaaatatttttattaagtggggtttagatttttctgtaattggaaaaacatcaaatacaaataagcttgttcttaaatttaacaacaaagaagtggccaatttaccacttagttctctatcaacagatgttccggtatatgacagaaagtggaaaaaaacaaaaattaaaaaaaaattgaattcagatactaatttcaaatccataaaaattttagattccttaaaaaaaatattaacaagcccaaataattctgaaaaaaattgggtatgggaacaatatgataatactgttatgggtgatacaattcaaaaacccggtggggactctgctgtaataagaattcatggaaagaataaagcaatagcaataactgtagactcatcagctcactattgtttagctaatccaataactggagctaaacaagtggtttcagaggcatggcgaaacttaatttctgt

SEQ ID NO: 318542 - DNA, 922 bp, Unknown
  Bacterial polypeptide expressing nucleotide sequence isolated from the Sargasso Sea
gtacacacaatcacaactaaatgaaattgcattaagctctgaagaatatgaacttatagtagagaaattaggccgagatcctaattatcttgaactaggtttatttggtgctctatggagtgagcattgtggatataaacattctaaaaatctaattaaaactctacctaattctagtactgcactcttagcaaagccaggagaagaaaatgctggagtcattgatattggaaataatttagcaatagtatttaaaattgagtcccacaatcatccatccgcagttgaaccatatcaaggtgctgcaaccggagtaggtggaattatcagggatatactagctatgggggcaagaccaattgctattttaaactctcttagattcggccatgtaaataataaccgcaatgaatatctttttgaaggtatagtttcaggaatatctggttatggaaattgtataggcattccaaatattgggggtgaaactaaattttctgattcttattctgggaaccctttagtaaatgccttttgcctaggaattactaataaaaacaatttaatgagtgcagcatcttacactcctggcaatattataatggtaattgggtcaccaactggacgtgatggaattcatggcgcttctggtttagcttcacggaatttaaataaaaatgaatcagaacaagataagcggccaacggttcaaataggtaatccttttatggaaaaagttttaattgaatcatgcttagaaattgtatcaaagaaccttatagagtccctacaagatctgggagcagcgggacttacgagtgcaattgtagaaacggttgataaaggtaaaactgggtttaatatagacttggccaaggttcatcaaagagaaaataatatgaccccgtatgaaatcatgtta

SEQ ID NO: 318543 - DNA, 499 bp, Unknown
  Bacterial polypeptide expressing nucleotide sequence isolated from the Sargasso Sea
aatggaagttacagaagcagttgcaatagaccacggattaaaaaaagaagagttttctaaaatatgtaaacttcttaagagaatacctaatttaactgagcttgcaatattttctgcaatgtggaacgaacattgctcctataagtcttctagaaaacatttaaaaaaaatgcatacaaaaggaaaacaggttattcaaggacctggagaaaatgctggtatcattgatattggagatgacgatgcaattgtatttaaaattgaaagtcacaatcacccttcgtttattgagccttatcagggtgcagcaactggagttggtggaattatgagggatgtatttacaatgggagcaagaccaatagcaaatttaaattcaattcattttggttcaccccaaaataaaaaaacaagaaatttattaagaggagttgttaaaggaataggtggatatggaaattgtattggtgttccaaccattgctggccaaactactttt

SEQ ID NO: 318544 - DNA, 894 bp, Unknown
  Bacterial polypeptide expressing nucleotide sequence isolated from the Sargasso Sea
tgttggttcaaaaactggtagggatggaatccatggggcaagcatggcatcagccatatttgatgatcaaattgaagaaaaaaaacctacagttcaagttggagatccatttactgaaaaacttttactagaagcttgtttagagctaatgaccgacgattctattatctctatacaggatatgggtgctgctggactaacctcttccagtgtagagatggcatctaagggcaaactaggtatagaactagatttgaacaaagttccttgtagagaacccaatatgacaccttatgaaattatgttatctgaaagtcaagaaagaatgctcattgttttagaaaatggaaaagaagataaggcaaaaaaaatttttgacaaatggaacctagattttgcaattattggtaaaactaccaattcaaagaaaattgaaatttattttgatggaaaaaaaaatgcagacattcctatagaatttttgtcagacaaggctcctgaatacaatagaaaatggaaaaaaacaaaacttccagtaaaaaacaaaattaataaagatttatataaaaatttaaaaattgcagatgttttaaaaaaaattttatcaaatcctaatgtatgtaataaaaaatggatttgggaacaatacgatcatacagttatgggtgatactattcaaaaaccaggagggaatgcgggcgtcgttagagtgcacggatctaataaagctatagcggcctcagtagactcttcagcaaattattgttttgcacatccaataacaggtggaaaacaaattgtgtgcgaaagttggagaaatattatttctgttggagcttctcctatagctattacaaattgtttaaattttggaaacccggaaaaagacgaaaa

SEQ ID NO: 318545 - DNA, 663 bp, Unknown
  Bacterial polypeptide expressing nucleotide sequence isolated from the Sargasso Sea
aatgaaggcatcgataattgtctttcctggatcaaattgcgatagagatattgctgtatctattaaaaaacttacagatctaaaaccaataatggtctggcataaagaaacctccatacctgattcagatttaatagtcattccaggcggatttacatttggagattatttaagatgtggctctatcgcagcaaatagcccaattatgaatgatgtcattaaaaaagcaacagacggattacccactttaggaatatgtaatggttttcaaattcttacggaatcaggattgctacctggaacactcattaaaaatgattgtctttcctttttatgtaagactgtttcaataagagttgagaataatgaaacaaatttttctaaaaaatataaacaaaatgaagtgatcaatatacctattgctcacaatgaaggcaatttctttgctaatgaagatacattgaaaaaaattaaagactctaatcaaataatttttaaatattgcaatcaaaatggagaggtaaataatgaagcagatccgaatggttcaatcgaaaatattgctggtataacaaatgagcaaggtaatgttttgggtatgatgcctcatcctgaaagagcaacatgtgaaattacaaaactttcagatggagaaaacccttt

SEQ ID NO: 318546 - DNA, 595 bp, Unknown
  Bacterial polypeptide expressing nucleotide sequence isolated from the Sargasso Sea
ttggcacaattggattctgaattaccaaaaagtgatttattagttttaccaggtgggttctcatatggtgattatttgagatgtggaagcatggcttctaaatccaaaatcattcaatctgtaattaaatttgcaaaatctggaggtttgttaatgggaatatgtaatggttttcaaattttgactgaaacagagctgctccctggtgctttattaagaaataaatactctgaatttatatgtaaaaacgtttttgttaaaataaatgatactaaaaataattattttaaaaatattaataaaaatattttagaattgcacattgcgcacaatgaaggcaattttttttgctcttcagatcaaatgaaaagtttaaatgacaacaatcaagtcgcagtaatctattgtgatgaaagcggcgaagtaaatgacagctctaatccaaatggagctattaataatattgcgggaatatttaataaacaaaaaaatattcttggaatgatgccacatcccgagcgaatgattgatagttatttatcaggtaatgatggttctatttttttccaaaatttaataactaatttaaaataat

SEQ ID NO: 318547 - DNA, 343 bp, Unknown
  Bacterial polypeptide expressing nucleotide sequence isolated from the Sargasso Sea
aatggaagttaacgagtctttagctttagaacacggattaaataaagatgagtacaaaaaaatctgtgatttattaaatagaataccaaatatcactgaacttggaattttttctgctatgtggaatgagcactgctcttacaaatcatcaagattgcacttaaaaaatttaccaactaaaggtaaaaaagttattcaaggacctggtgaaaatgcaggtgttgttgatataggagatgacgacgctattgtttttaaaatagaaagtcataaccatccttcatttatagaaccttatcaaggagcggcgacgggagttggtggtatcatgagagatgttttt

SEQ ID NO: 318548 - DNA, 649 bp, Unknown
  Bacterial polypeptide expressing nucleotide sequence isolated from the Sargasso Sea
atgactgcagaatcaaataaaatgacttttgagaatgctaccacaatgggtttgtcccgcgatgaatgggatttgattaatcagcgccttggccgtgttcccaatctgtgtgagcttggcatattttccgccatgtggtctgagcattgctcgtataaatcatcaaaaaaatggctaaaaaccttgcctgttgatggctcacaagtgattgaagggccaggcgagaatgcaggagctgttgatattggtgacggactagctgcaatctttaaaatcgaaagtcataatcatccctcatatatcgagccttatcagggggcggcaacaggtgttggcggaatcttgcgcgatgtgttcaccatgggtgcgcgccctatcgctttaatgaacgcactgcgatttggcgaggcagatcatgaaaaaacccgtcatcttgttagtggcgtcgtggcaggcattggtggttatggaaattgtattggcattcccacggttgggggggaggtcaatttccacaaatcttataatggcaatatacttgtaaatgccatggctgttggtttggcaaatagtgaccgcattttccgatcagccgctactggtccaggcaatccagttatttatgtcggggcaaaaaccgggcgcgatg

SEQ ID NO: 318549 - DNA, 823 bp, Unknown
  Bacterial polypeptide expressing nucleotide sequence isolated from the Sargasso Sea
attttagtcaatgcaatgacattaggattggtaaataaaaataaaatattttattctaaagctaccggaataaataaaccagttatatatgtcggttctaaaactggaagagatggtattcatggagcaagtatggcatcagcagtttttgatgataagattgaagaaaaaaaaccaactgtacaagttggcgatccttttactgaaaaattattacttgaagcttgtttagaattaatggctgataattctataattgcaatccaagatatgggagctgcaggactgacttcatctagcattgaaatggcttcaaaaggaaaattgggtatagagctggatttaaataaagttccctgtagagaaaaaaatatgtcgccgtatgagataatgttgtcagaaagtcaagaaagaatgttaattattttagaaaatggaaaagaaattaatgcaaaaaaaatatttgataaatggaatttagatttcgcaattataggaaaaacaacagatagtaaaaaaattgagatttattttgataaaaaaaaagttgctgatgtaccaatagatttattttcggaaaatgctcccgtatatgacagaaaatggaaaaaaagtaagcttcctcaaaaaattaaatttaaaaaagaaaattttaaatctttaaaattaaatgattctttaaaaaaaattttatcaagtccaaatatctgtgacaaacagtggatttgggatcaatatgaccagactgtaatgggtgatacaattcaaaaacctggtggtgacgcaggagttgttagagttcacggaacaaaaaaagctatcg

SEQ ID NO: 318550 - DNA, 788 bp, Unknown
  Bacterial polypeptide expressing nucleotide sequence isolated from the Sargasso Sea
tgttggtggtgctagttttgctagttcagaattaactataacttcattggatgatagacctgctgttcaggtaggtgatccatttgttgagaaaagtcttattgaagcttgtttggatgcttttaagacaggggacgtaattgcagctcaagatatgggtgctgcaggtttaacatgcagtagcgcagaaatggccgcaaatggaaatttagggatatctatcgatttagatttggtcccttctagagaagatgatatgtcttcataccagtatttattatctgaatcgcaagaaagaatgttatttgtcgttaaagaagaaaaaattaatcatcttattgaaaaatttaataaatggggattatatgccagtgttattggtgaagtgataggaactaatgaagtaattatttctcataaaggtaaaattgtggcccaaatacctacttctgccttatctgatgatactcctgttaattttcacaatgtaattaataacccaccagatgatcttttaaataaatggaaatggaaagaaaatgatttaccagaaattcatgagcaaaaaatattttcattgaaggaaaataagaatttttcttttgcagaaatcattttaaaactactctctaatccatcaatagcttctaaacgatggatttatgaacaatatgattctcaagtacagacaaatacagtttttaaacctggaaaatcagatgcagccgtagtaagactaagagaacaaaataaaaaaaataaaagtaaagtattttctggtgttgctg

SEQ ID NO: 318551 - DNA, 662 bp, Unknown
  Bacterial polypeptide expressing nucleotide sequence isolated from the Sargasso Sea
aatgaagtcatctgtaataatctttccaggttccaattgtgatagagatatggatgtagcactaaaaaaatttggttttaaaaatcaaatggtttggcacaacgatcctaaaatcccaaaaagtgatttaattgttcttcctggaggtttttcctatggagattatttaagatgtggaagtattgctgctaagtcaaaaataatcaaatctgtcattgagtttgcaaattcaggaggtttagtattaggtatatgtaatggatttcaaatactaacagaaactggtttattaccaggaattcttcaacaaaataaatatcaaaaatttatatgtaaaaatgtctatgtgaaaataaatgataaagaaaataaatactttaaaaatattaaaaaagaaatcttggaattgcatatagctcataatgaaggaaattatttttgttcagaagatgagttaaaatctttgaatgataataatcaaattgcagttacttactgtagcgaaaatggtaatgatgctgatgaatttaacccaaacggtgcattaaaaaatattgctggaatatttagtaaaaataaaaacatcttaggaatgatgccccacccagaaagaatgatagataaatgtctttcaagcaatgatggtaattttttttttgaaa

SEQ ID NO: 318552 - DNA, 862 bp, Unknown
  Bacterial polypeptide expressing nucleotide sequence isolated from the Sargasso Sea
tgtattggtgttccacatagctggtcaacctgctttgacgagtcttataatggaaatattttagttaatgcaatgacgttgggtttagttaataaaaataaaatattttattcaaaagctgcggggattaacaaaccagtgatttatgttggctcaaagacaggaagagatggaatacatggtgcgagtatggcatcagctatttttgacgacaaaatagaggaaaagaaacctacggttcaagttggtgatccgttcacagaaaagttacttcttgaagcttgtcttgaacttatggcaggtaaatcaattatatcaattcaggatatgggtgctgcaggactaacttcttctagcattgaaatggcatctaaaggcgatttaggtattgaaatagatttaacaaaagttccctgtagagaagaaaacatgacaccttatgagataatgctctcagaaagccaagagagaatgcttattgttttagaggaaggaaaagaaaatgaagcaaaaaaaatatttgataagtggaacttagactttgcggtaattggaaagacgacaaatagtaaaaatattgaattgtttttcaaaaatgaaaaagttgctgaaattccaattgattttttagcagataatgcacctatgtatgatcgtaaatggataaaagcaaaacttccaaaagaaaataatttttcaaaagataaatttaaatctttaaaactgagtgattgtttaaaaaaagttttaattgatccaaatattgcagataaagaatggatctgggaccagtatgatcatacagttatgggcgatactatacaaaaacctggtggaaatgctggtgttgttagagttcatg

SEQ ID NO: 318553 - DNA, 655 bp, Unknown
  Bacterial polypeptide expressing nucleotide sequence isolated from the Sargasso Sea
cctgggttctaattgtgatagagatcttaaggttgccattgaaaaatgtcttaatactaaaattgaacttgtttggcatcaaacatcacaaattaaaaaaactaatatgatttttattcctggaggattctcctatggagattatctcagagctggaatacttgctacaaaatcgcccgctattaaagaagttatcagatggtcaaaaaaagaaataccaatcataggtatttgtaatggatttcaaattctaacagagtgcaagttattgcctggtgcattaattaaaaatatagatcctaaatttttatgtaaaaatataaatttaaagatttcaacaaagaatagttttacatctaattataaaaaaaaagtattgaaattacctattgctcattcacaaggtaattattttttaaaaaaaaatgaaattaaagttttgcaagataacgaacaaattgtttttcagtactctgactttaatggattagtgaactcatctaataatccgaacggttcaatagataacattgcaggtattacaaataaaaaaaaaaatatacttggcatgatgccacatccggaaagagcaataggaaataataatttaaaagatggtttaaatttttttgaaagtttagggaaatatctatga

SEQ ID NO: 318554 - DNA, 811 bp, Unknown
  Bacterial polypeptide expressing nucleotide sequence isolated from the Sargasso Sea
ggatatggaaattgtatgggaataccaactgttggaggtgaagtaaaatttaattcttcctacaatgaaaatattttagttaatgctatggcagttggcttagttaaaaaaaataaaattttttattctaaagcaaaaggaattaatcaacctgtaatttatgttggatctaaaaccggtagagatggaatacacggtgcaagtatgtcttctgctgaatttgatgaaagcactgaagaaaaaaaacctacagttcaagttggagatccttttacagaaaaattacttttagaagcctgtttagaacttatgagagatgattctataatatctatacaagacatgggagctgcaggacttacatcttctagtattgaaatggcatctaaaggtgatttaggtattgaaataaatcttaataaaataccttgtagagaaaaaaatatgaatccatatgaaatcatgctttcagaaagtcaggagagaatgctcttaatactaaatgataaaaaagtagagcaagcaaaaaaaatttttaataagtggaacttagattttgctgtaattggaaaaacaactaatacaaaaaatttagttttaaattttaataataaagaagttgctaatttaccaataagctctttatcatctgatgctcctatatacgacagaaaatggaagaaaaattcaatttctaaaaaaagcgatgtcagaaagggctttgataaatttaaaattgaagatgttttaaaaaaaattttaaccagcccaaataactctgaaaaaagactgggtatgggaacaatacgat

SEQ ID NO: 318555 - DNA, 763 bp, Unknown
  Bacterial polypeptide expressing nucleotide sequence isolated from the Sargasso Sea
atgcaattgttttttaaaatagaaagtcataaccatccatcgtttatcgaaccatatcaaggtgctgcaacaggtgtaggtgggataatgagagatgtctttacgatgggagcaagaccaattgctaatttaaattcaatccattttggatctccacaacataaaaaaactaaaaacttattaagaggagtagttaaaggaattggtggatacggaaattgcattggtgttccaaccgttgctggacaaacatcttttgatgagagttataatggaaatattttagtaaatgcaatgactttaggattggtaaataaaaacaaaattttttattcaaaagctgctggagtagataaacctgtaatttatgtaggatcaaaaacaggtagagatggaatacacggagccagtatggcttcagctatatttgatgataaaatagaagaaaaaaaaccaactgttcaagttggtgatccgtttactgaaaaactattattggaagcttgccttgaactaatggagggtaactccataatagcaatccaagatatgggtgctgcaggtttgacttcatcaagtgttgaaatggcatcaaaaggtaaattaggaattgaacttaatcttaacaaagttccctgcagagaggaaaagatgacaccatatgaaattatgctttcagaaagtcaggagagaatgttaatcgttttagaaaatggcaaagaggatcatgcgaaaaaaatttttgataaatggaatttagatt

SEQ ID NO: 318556 - DNA, 675 bp, Unknown
  Bacterial polypeptide expressing nucleotide sequence isolated from the Sargasso Sea
ttccaggtacatggagtgaatcagacacattttatgccactaaagatatcttaggtattaatacagaatatatttggcataaagatcagaaattaaataatactgatctaattatcttaccgggaggattttcctatggagattatttaagaacaggtgcaattgcaagtttttcaccaatagttaataaagtaaaagaatttgcaaattcaggtggccctgtaataggtatatgtaatggatttcaaattttatgtgaaacacaacttttacctggaatactcctaagaaacaaagacttatcattcgtatgtgaatggtcaaacttaaaagtaaacaataattctatattcacaaataaatttaaaaatgatgaaataattaagattcctatttcacatggagaaggtaattttcaagcagatgaaagaactataaaggagcttgaggaagaaaatagagttatatttagatattgctctgatgaaggtgaaacaaacttaatttcaaaccccaatggttcaattaacaacatagctggaataattaacaagcaaggcaatgttttagggatgatgccacatcctgaaaaagcttgtgaaaaattaataggtggaattgacggattaggaatttttgaatcagtaataaaaagagtaactaatggtaactgaa

SEQ ID NO: 318557 - DNA, 670 bp, Unknown
  Bacterial polypeptide expressing nucleotide sequence isolated from the Sargasso Sea
atggaagttacagaagcaattgctatagaccacgggttaaaaaaagaagagttttctaaaatatgcgaacttcttaagagaacaccgaatttaactgagcttgcgatattttctgcaatgtggaacgaacattgctcttataaatcatctagaaaacatttaaaaaaaatgcacaccaaaggaaaacaggtcattcaaggacctggagaaaatgcgggtgttattgatattggagatgacgatgcaattgtatttaaaattgaaagccacaatcacccttcgtttattgaaccttatcaaggtgcggcaactggagttggtgggatcatgcgggatgtatttacaatgggagcaagaccaatagcaaatctaaattcaattcattttggttcaccacaacataaaaaaacaagaaatttattaagaggagtagtcaagggtataggcggatatgggaattgtattggagtgccaacaattgctggccaaactacttttgatgagtcttacaacggtaatatattagtaaatgccatgacccttggtttagtaaataaaaataaaattttttactcaaaagcaactggtttagataaacctgtaatatatgtaggttcgaaaactggaagagacggaattcacggagcaagtatggcctcagcaactatcg

SEQ ID NO: 318558 - DNA, 1005 bp, Unknown
  Bacterial polypeptide expressing nucleotide sequence isolated from the Sargasso Sea
tttattgaaccttatcaaggagcagccactggtgttggtggaattatgagagatgtatttactatgggtgctagaccaatagctaatttaaattcaatacattttggttcacctgagcataaaaaaacaagaaatttattacgtggtgtagttaaggggattggaggatacggcaattgtattggggtaccaactatagcaggtcaaactacctttgatgaatcttacaatggaaatattttagtaaacgcaatgactttaggtttagtaaataaaaataaaatattttattcaaaagccgcaggtattggtaaaccagttatatatgtgggatcaaaaactggtagagatggaattcatggtgcaagtatggcctcagcaacgttcgatgataagattgaagaaaaaaaacctactgtacaagtaggagatccttttacagaaaaattattattagaagcttgtttggaattgatggctgataaatcgattatagcgatacaagacatgggcgccgcaggattaacttcatcaagtgttgaaatggcttcaaaaggaaagttaggtatagaacttgaccttagcaaagtaccatgtcgcgaaaccagcatgacaccttacgaaataatgttatccgaaagtcaagaaagaatgttaattgttttagaaaaaggaaaagaaaatcatgcaaaaaaaatatttgataaatggaatctagatttttctgtaattggaaaaacaactaatacaaaaaaaattgaattaatttttgataataaaaaagttgcagaaatacccattgaacttcttgcagaaaatgctcctatttatgacagaaaatggaaaaaaactaaattacctcaaaaaattaaatttaataaaaataaatttaagtctttaaaattatcagattgtttaaaaaaattattaagtaactcgaatatttgtgaccagcagtggatttgggatcaatatgatcatactgtaatgggcgacactatacaa

SEQ ID NO: 318559 - DNA, 944 bp, Unknown
  Bacterial polypeptide expressing nucleotide sequence isolated from the Sargasso Sea
cttcggcgtgcccaccgtgggcggcgaagtgcgctttgatccggcttataacggcaactgccttgtgaacgcattcgccgccggtctggccgatgccgacaagattttctactccgccgcctcgggcgtcggcatgcccgtggtctacctcggggccaagacgggccgcgacggcgtcggcggggccaccatggccagtgccgaattcgatgaaaccatcgaggaaaagcgccccaccgttcaggtcggcgaccccttcaccgaaaagcgcctgatggaggccacgctggaactgatggccaccggcgcggtgatctcgatccaggacatgggcgcggcgggcctgacctgttccgccgtcgaaatgggcgacaagggcggcctaggcgtcaagctgcaactcgaccgggtgccgcagcgcgaagagaacatgaccgcctatgaaatgatgctctcggaatcccaggaacgcatgctcatggtcctgcgcccggaaaaagaagccgaggcgcgcgccgttttcgaaaaatgggatctcgattttgccatcgtcggcgaaaccatcgccgaagaccgcttccttatcatgcacggcaacgacgtgaaagccgacctgccgctggccaccctctcgggcagcgccccggaatacgaccgcccctggaacgaaccgcaacccgccgagccgctggaggccgacagcgtgccgggcgtcgatcccatcgacgggctgaaagccctcgtcgcctcgcccaactactgctcgcggcaatgggtgtacgaacaatacgacaccatggtcatggccgacaccgcgcgcggcccgggccttggcgcaggcctcatccgcgtgcatgacaccgacaaattgctggccttcacctccgatgtgaccccccgctacgtcaagggcgaaccccgtcgaaggcggcaagcaagccgtc

SEQ ID NO: 318560 - DNA, 869 bp, Unknown
  Bacterial polypeptide expressing nucleotide sequence isolated from the Sargasso Sea
gatgaaaaaatttgaggaaaaaaaacctactgttcaagtaggagacccttttacagagaaacttttattggaagcatgtttagaattaatggcaggagactctattatagcaattcaagatatgggggctgctggtttaacatcatccagtatagaaatggcatctaaaggaaatttagggatcgaaatcaatcttaataaagttccttgtagagaaacaaaaatgactccttatgaaataatgctttcagagagtcaggaaagaatgttgattgttttagaaaatggaaaagaagaacaagctaaaaagatatttgataaatggaatttagattttgctgtaattggaaagactactgactcaaaaaatattgaattattttttgatagtgaaaaagttgcaagtatacctgtacatacattagttgaaaattcaccaatgtacgaccgtaaatggaaaaaatctaaattacctaaaaaaaataaaattaagaaagaaacttttagtaaactgaagatcaaagatgttttaaaaaaaattttatcaaatcaaaatatttgtagtaaagaatggatttggcaacagtacgatcatacagtaatgggtgatactattcaaaaacctggaggagatgccggtgtagtgcgagttcacggaacaaacaaagcaatagctgcatctgtagactcatcagctgtatattgttgggctcatccattaacaggaggaaagcaagttgtggctgaaagttggagaaatttaatttctgttggtgcaactccgatagctataactaattgtctaaattttggaagtccagaaaatgaagacaacatgggagaatttgttgaatgcgttcagggtattg

SEQ ID NO: 318561 - DNA, 696 bp, Unknown
  Bacterial polypeptide expressing nucleotide sequence isolated from the Sargasso Sea
aatggaagttaacgaacaaattgcaatagatcacggtttaaaaaaggaagagtttaataaaatttgtgatctattaaaaagagtgcccaacataactgaacttgggattttttctgctatgtggaatgagcattgttcatacaaatcgtcaagatttcatttaaaaaaacttaatactaaaggaaaaaaagtaattcaaggcccaggtgaaaatgctggagttattgatatagaagatgatgatgcaatagtttttaaaattgaaagtcataatcacccttcatttatagaaccttaccaaggtgcagcgacaggtgtaggtggtataatgagagatgttttcacaatgggcgcaagacctattgcaaatttaaattctatacattttgggtcaccccaacatcctaaaacaaaaaatttattaagaggcgtggttaaaggtattggcggttatggtaattgtatgggaattccaactattggtggtcaaacatcttttgatgagtcttataatggaaacattttagttaatgctatgacattaggtttagttaataaaaacaaaattttctattcaaaagctgcaggcataaataaaccagttatatatgttgggtcaaaaactggtcgagatggcattcatggtgcaagtatggcttctgcaatttttgatgaaaaaatagaagaaaaaaaacc

SEQ ID NO: 318562 - DNA, 668 bp, Unknown
  Bacterial polypeptide expressing nucleotide sequence isolated from the Sargasso Sea
tatatttccaggatctaattgtgatagagatatggatgtagctctaaaaaaatttggatttaaaaataaaatggtatggcacaatgataatgtaataccaaaatcagatttagttgttttaccaggcggtttttcgtatggagattatttgcgatgtggaagtattgctgcaaagtcaaacataataaattcagttatagaattcgctaataaaggtggtctggttattggtatatgtaatggtttccaaattttaatagaaactggtcttgttactggtgctttattaagaaataaatatttaaaatttatttgcaaaaatatttttgtaaaagcaaataaaacacataataaatattttaataaaattaaaaaagatattctcgaactacatatagctcataatgatggtaattatttctgttcacaagatgatttaaaatcaatacaagataatgatcaaattgcagtcagatattgtgatagtaatggagaaatatcagaaaattctaatccgaatggatcaattcaaaatatagctggtgtctttaatgaaaagaaaaatattttgggtatgatgcctcatccagagcgtgttattgatagttgtttatcaagtaatgatggatcttatttttttgaaaatcttttgagtaatatgaaatgat

SEQ ID NO: 318563 - DNA, 883 bp, Unknown
  Bacterial polypeptide expressing nucleotide sequence isolated from the Sargasso Sea
tactgaacttggtatcttttcggcaatgtggaatgagcattgttcttataaatcctcaagacttcatttaaaaaaacttcctacaaaaggaaaaaaagtcattcaagggccaggagaaaatgctggggtaattgatattgaagataatgatgcaattgtatttaaaattgaaagccataaccatccatcattcattgagccctatcaaggtgcagccactggtgttggtggtattatgagagatgtattcacaatgggcgcaagacctattgcaaacttaaactcaattcatttcggctcacctcaacacaaaaagacaaaaaatctattaagaggtgtggttcatggaattggaggatatggaaattgtatgggcgtcccaacagttgcagggcaaacaagttttgatagttcatataacggaaatatcttagttaatgcaatgactcttggcttggttaaaaaagataagattttttactcaaaagcagctggtttaaataagcctgttatttacgttgggtcaaaaacaggtagagatggaatccatggggctagtatggcttcagcaagttttgatgataaaatagaagaaaaaaaacctactgttcaagttggtgatccatttactgaaaaacttttacttgaagcttgtttagaattaatggctggtgactcaattattgcaatacaagatatgggtgcagccggcttaacctcatcaagtattgaaatggcctcaaaagggaatcttggaattgaaatgaatctaaataaagttccttgtagagaagctaagatgacaccctatgaaattatgctctcagaaagccaagaaagaatgttgattgttctagaaaacggaaaagaaaaacaagcaaaa

SEQ ID NO: 318564 - DNA, 975 bp, Unknown
  Bacterial polypeptide expressing nucleotide sequence isolated from the Sargasso Sea
cttgtgaacggtgtagtatccggcattggtggatacggaaactgttttggtgtccctacagttggaggtgaaacaagattggactcatcttataatggaaattgtttagtcaatgcatttgcagcaggtttggttgataaagataaaatattctactcagcagcttctgggatcggtatgccagttgtatacctcggagcaaaaactggacgcgacggagtgggtggcgcaaccatggcgagtgctgaattcgatgatacaattgaggaaaagcgacccacagttcaagtaggtgacccttttaccgaaaaacgtttgatggaagcctgcctagaacttatggcgacaggtgcggttatttcaattcaagatatgggagctgcaggtctcacttgttcagctgtagaaatgggggacaagggtaatttagggataagcttggacctagaaaaagttccaactcgagaacctaatatgagcgcctatgaaatgatgctgtctgaaagccaagaaagaatgctgatggttttggaccctgaaaaagaaaacatagccaaaacaatttttgacaaatgggatttagattttgctgttgttggtgaaactatctcagaggacagatttcttataaaattaaacggtgttgtgaaagctgatcttcctttaaaggcactggcgggtaatgcgcctgaatacgacagaccatggattgaagcccaaccaaatagcgagttaaaagacgttgtagaggtgaacgcaattgatggtttaaaagctttaatttcgtccgcgaattactgttcaaaaagttggatttacgaacaatatgacagtcaggtaatggccgatactattgagcgaccaggttttggcgcgggcatcgttagggttcatggaacaaaaaaatcaatcgcatttacgagtgaagtaactccgagatatgttcgggccaatccattgaaggagaaagcaggc

SEQ ID NO: 318565 - DNA, 782 bp, Unknown
  Bacterial polypeptide expressing nucleotide sequence isolated from the Sargasso Sea
aatgttagtaaacgaaaaagttgcaatagaacatggtcttaaaactgacgaatataaaaaaatttgtaaattattaagaagaactcctaacattacagaactgggaattttttcagcgatgtggaacgaacattgttcatataaatcctcaagactacatttaaaaaagttacctacaaagggaaaaaaagtaattcaaggacctggtgaaaatgctggtgtagtagatattgaggacggtgatgcaatagtttttaagatcgaaagtcacaaccatccatcatttattgaaccctatcaaggtgccgctactggtgttggtggtataatgagagatgtttttacgatgggtgcaagaccaatagccaatttaaactctattcactttggatctccgcaacataaaaaaacaaaaaatctgttaagaggtgttgtgcacggaatcggaggttatggaaactgtatgggagtacctaccattgctgggcaaacttcatttgatagttcatacaacggaaatatattagtaaatgcaatgactttaggtttggtcaagaaaaataaaatattttactcaaaagcagcaggtttaaataagcctgttatttatgttggttcgaaaaccggaagagatggtatccatggagcaagtatggcctctgcaagttttgacgaaaaaattgaagaaaaaaaaccaacagtacaagttggagatccatttacagaaaagcttttattagaagcatgcttggaattgatggcaggtgactcaattattgcaa

SEQ ID NO: 318566 - DNA, 505 bp, Unknown
  Bacterial polypeptide expressing nucleotide sequence isolated from the Sargasso Sea
tttggcggctagaactcctgttcttaaggctttgatccgggctgcggagaggggggtccgggtgatcggaatttgcaatggttttcaggttcttaccgagtgcgggcttctgcccggtgcgcttcagcgtaattccggactccatttcatctgtgatactcctctcatcgaggtgattcaggaccgatcttgttttacttcgcgttaccaaaagggggaattgattcgtctcccgatagctcatggggagggaaatttcatttgtgatgaactcaccttaagacatctccaggtggaaaaccggatcgttttccgttatgtatcaggcagcaatcccaacggttccgttgataacatcgcaggcatcctcaactcaaaaggcaatgtgctggggatgatgcctcatcctgagcgggccatggcggactggatgggcagcagtgacggccgtcgtctttttgagtcagccctaaacctgtttccggaaacagccgatgccgcgtga

SEQ ID NO: 318567 - DNA, 437 bp, Unknown
  Bacterial polypeptide expressing nucleotide sequence isolated from the Sargasso Sea
catgaacgacgctgattatccaaaacctgcgatcaccccagaaattatcgccgagcacggcctgtcggcatccgaatacgataaagttttggagatcatggggcgagagcccaacatcacggaactgggtattttctctgtcatgtggtcggaacattgctcctacaagtcttccaagcactggctgaaattacttccgacggaggcaccgtgggtgatttgcggccccggcgagaacgctggcatcatcgacattggagatggccaggccgctgtgtttaaaatggaaagccacaatcacccctcctacattgagccatatcaaggcgccgcgaccggtgtagggggcatccttcgcgatgttttcaccatgggcgcgcgtcccgtggccaatatgaatgcactgcgctttggacagccgacgcacccaaagacca

SEQ ID NO: 318568 - DNA, 703 bp, Unknown
  Bacterial polypeptide expressing nucleotide sequence isolated from the Sargasso Sea
agagatatttttgcaatgggggcttatccaatcgctttattgaattcactgagatttggccctcaagatgtaccaagaaacagataccttctaaacggagttgtggaaggaatatcaacttatggaaactgcttaggaatccctgatgtaggaggagagatagaatttgaagaatgtttcacaactaatcctttagtgaacgcaatgtgtgttggaatcatagacagcaattctccagtactaaatgctaaagctgacaaagaaggtgaccttgcaatattagtaggggcagatacaggaagagatggtattcatggagcatctgggttagcctctcagtctttagaagaagggttagactctcgatctgcagttcaagtaggaaatccttttttggaaaaagttctattagaatcttgtctcatatcagcaaaaatggaaggtataattggaatgcaagaccttggagcagcgggcctaactagctcagtaatagaagttgctgaaaaaagtaatcttggaattgaattaaatctagatagagttcataccaaagaagaaggcatgaccccttatgaaataatgctctctgaatcacaagaaaggatgctggttatagtagatccaaaaagtgaagatgcttttttaaaattttttcaagatagagaccttaaagcaaatactattggaacatttaataaaa

SEQ ID NO: 318569 - DNA, 810 bp, Unknown
  Bacterial polypeptide expressing nucleotide sequence isolated from the Sargasso Sea
gtggttatggaattgcatcggggtaccaactataggtggtcaaactttatttgatgaatcttataatggaaacattttggttaacgcaatgactttgggattagtaaataaaaaaaaaattttttactctaaggcagcaggactaaacaaacctgttatatatgttgggtcaaaaactggtagagatggaattcatggagctagtatggcatcaactatatttgatgaaaaaatagaggaaaaaaaaccaacagtccaggtaggtgatccatttactgaaaaattattacttgaagcttgtttggaattaatggcagataactctattattgcaattcaagatatgggtgctgctgggctaacttcttcgagcgttgaaatggcatcgaaaggtaaattaggaatagaattaaatcttaataaagttccatgtagagaggaaaatatgactccttatgaaattatgttatcagagagtcaggaaagaatgttgatagttttagaaaatggaaaagaaaaaaaagcaaaaaaaatatttgataaatggaatttagatttttctgttattggaaaaacaacgaatactaaaaatatagaaatttattttgataaaaaagtggtcgctaacgttccaattgactatttatctgaaaatgcacccttgtatgaaagaaagtggaaaaaaacaaaacttccacaaaaattaaagtttaaaaaagaaaaatttaaatcattaaaaattttagattgtttaaagaaagttttatcaaacccgaacgtttgtgacaaagaatgggtttgggaacaata

SEQ ID NO: 318570 - DNA, 772 bp, Unknown
  Bacterial polypeptide expressing nucleotide sequence isolated from the Sargasso Sea
tattcatttcggatcacctgaccacccaaaaacaaaaaatttattaagaggcgttgttaaaggtataggaggatatggtaactgtatggggataccgacaattggaggtcaaacatcattcgatgagtcttacaatggaaatatacttgttaacgctatgactttaggattggtaaataaaaataaaattttttattcaaaagcagctggagttaataaaccagttatttatgttggttctaaaactggcagagatggtattcatggagctagtatggcttctgcaatatttgatgacaaaatcgaagaaaaaaaaccaacagttcaagttggggacccttttactgaaaaattattattagaagcttgtttggagttaatgtcaggcaaatcaattatatcaattcaagatatgggagctgctggactaacatcttcaagtattgaaatggcatcaaaaggtaatttaggtattgaattatatttagataaagtcccgtgtagagaggaaggtatgacaccttatgaaattatgctttctgaaagtcaggagagaatgttgattgttttagaaaaaggtaaagaggcagaagcaaaaaaaatatttgataaatggaatcttgattttgcaataataggaaagactacaaattctaaaaaaatagaactattttttgataagaaaaatgtaggaacgatacctattgatattttagcagaaaatgcacctctgtatgacagaaaatggaaaaaaactaaacttccaaataaa

SEQ ID NO: 318571 - DNA, 948 bp, Unknown
  Bacterial polypeptide expressing nucleotide sequence isolated from the Sargasso Sea
gcaacaagttttgatagctcctataacggtaatattctagttaatgcaatgacattaggtttagtcaaaaaaaataagattttttactcaaaagcagctggtttaaataaacctgtaatttatgtcgggtcaaaaacaggtcgtgatggtattcatggtgcgagtatggcttctgctagttttgatgataaaattgaagaaaaaaaaccaactgtacaagtgggagatccatttacagaaaaacttttacttgaagcttgtctggaattaatggctggagattcaattattgctattcaagatatgggagcagcgggtcttacttcctctagtattgaaatggcttcaaaaggaaatcttggaatagagataaatttaaacaaagtcccatgtagagagtctaaaatgactccatacgagatcatgctctcagaaagtcaagagagaatgttaattgttttagaaaatggaaaagaagaacaggcaaaaaagatatttgataaatggaatttagattttgctgtgattggaaagactactaaatccaaaaaaattcaactttattttgataatgaattagttgctaacataccagtaaatactcttgttgaaaattcaccaatgtacgaccgtaaatggaaaaaagcaaagcttcccaagaaaattaaaattaaaaaagaagatataaataatctaaaaataattgaggttctaaaaaaaattttagctaacccaaatatttgtagtaaagaatggatttggcagcaatacgatcatactgtaatgggagacactattcaaaaaccagggggtgactctggtgtggttagagttcatggtaccaacaaagcggtcgccgcatcggtagactcatcagcagtttattgttgggctcatcctcttacgggtggaaagcaaatagtgtgtgaaagttttaggaatttaatt

SEQ ID NO: 318572 - DNA, 945 bp, Unknown
  Bacterial polypeptide expressing nucleotide sequence isolated from the Sargasso Sea
gagtgggtggtattatgagagatgtttttacaatgggtgcaagaccaattgctaacttaaactctattcattttggatctccacaaaataaaagaacaaaaaatcttttaagaggtgttgtgcatggtattgggggttacggaaattgcatgggtgttccaacaattgcagggcaaacttcgtttgatagctcttacaatggaaatattttggttaatgctatgaccattggtttagttaaaaaaaataaaatattttactcaaaagctgctggattaaataagccagttatttatgtaggttctaaaactggtagagacggtattcatggtgcaagtatggcgtcagctagttttgatgaaaagattgaagaaaagaaacctactgtacaagtgggtgatccatttacagaaaaacttttattagaagcgtgtttagagcttatggcaggagactcaattatagcaatccaagatatgggagctgcgggtttaacatcatccagtattgaaatggcatctaagggaaatttaggaattgaaattaatcttaataaggtcccttgcagagaaacaaaaatgacaccttatgaaattatgctttcagaaagtcaagagagaatgttgatagttttagaaaatggaaaagaagagcaagctaaaaagatatttgataaatggaatttagattttgcagttataggaaaaacaactaatacaaaaaatattgaattattttttgataataaaagagttgcaaatatacctgtaaattcattggttgaaaattctccaatgtatgaccgtaaatggaaaaggtccaaactgccaaaaaaaaatataatcaaaaaggatgctttaaaaaaattaaaaataaaagatgtattaaaaaagattttatcaaatcaaaatgttgtagcaaagagtggattggcaacaatatgat

SEQ ID NO: 318573 - DNA, 504 bp, Unknown
  Bacterial polypeptide expressing nucleotide sequence isolated from the Sargasso Sea
tatgaaagttacaaaagaacaaattgagtcacacggtttaaaattcgaagaatatgaaaaaatcaaagaacttttgggaagagaagcgaatttattagaattaggaattttttccgccatgtggaatgaacattgctcctataaatcatctaaaatacatcttaaaaaattacctacaaaaaacaaaattgtaatacagggtcctggagaaaatgctggtgttattgatatcggggatgacgatgcaattgtttttaaaatagaaagtcataaccatccatcattcattgaaccttatcaaggtgcagctactggggttgggggaatattaagagacgtttttacaatgggagctagaccaattgctttaatgaattcaattcactttggttctcctgaaaataaaaaaacgcaaaatttattaagtggcgttgtttctggaattggtggttacggtaactctgttggtgttccaactgttgggggtgaaaccaaattcaatag

SEQ ID NO: 318574 - DNA, 822 bp, Unknown
  Bacterial polypeptide expressing nucleotide sequence isolated from the Sargasso Sea
actgaagagaactccaaatattactgaactcggaattttttcagctatgtggaatgaacattgttcttataaatcttcaagaaaacatttaaaaaatctacacacacaaggcaaaagagtaattcagggaccaggtgaaaatgctggtgttatcgacgttgatgatgaagatgctatcgtttttaaaattgaaagtcacaatcacccttcatttatagaaccgtaccaaggtgctgcgactggtgtaggcggtatcatgagagatgtttttacaatgggtgcaagacctattgctaatttaaattcaattcattttggatcaactcaacacaaaaaaactaaaaatttattaagaggtgttgtcaaaggaattggtggttatggaaattgcattggtgttccaacaattggaggtcaaacatgttttgacgagtcttacaatggaaatattttagtaaatgcaatgacacttggattagtaaataaaaaaaagatattttactcaaaggcagctggtattggtaaacctgtaatttatgtgggatccaaaactggaagagatggaatacacggtgcgagcatggcgtcagcagtatttgatgataaaattgaagaaaaaaaaccaacagttcaagtcggtgatcctttcacagaaaaacttttactagaagcatgtttggaattaatggctgatgattctattatatcaattcaagatatgggtgcagcaggattaacatcttcaagtgtcgagatggcatcaaaaggaaaattgggaatagaattagatttaagtaaagtgccttgtagagaagataaaat

SEQ ID NO: 318575 - DNA, 394 bp, Unknown
  Bacterial polypeptide expressing nucleotide sequence isolated from the Sargasso Sea
aatgcaaaccggcgtcataacttttccaggttcaaattgcgatagagacatgtttgatgctctttcaaaggtaagtagcaaatgccacaaaatatggcatggtgacactgagctaccaagcaatcttgattttatagcaatacccggcggattctcatatggagattatttaagatgcggctccattgcagctaattctgccattatgtcggaagttaaaaaatttgcagctaaaggtggctacatacttggagtttgcaatggcttccagattcttactgaggctggtttattgccaggcactttattacgcaataaaaatcttaaattcatttgtgatcaagtagaattagagatcatcaataaaaacacaaaattcacaaaatcatttaaa

SEQ ID NO: 318576 - DNA, 589 bp, Unknown
  Bacterial polypeptide expressing nucleotide sequence isolated from the Sargasso Sea
catgaaaattacagatagtttagttgaaaaacacggtattaaaaaagaggaatacaaaaaaatacttactctaataggaagagagcccaacttattagaattgggtatattttcagctatgtggaatgaacattgttcatacaaatcttcaaaaaaaattttaaaaagactacctacaaaaaataaaaaagtgatacagggacctggagaaaatgctggcatagttgatattggcgataatgatgcaatagtatttaaaattgagagtcataatcacccctcctacattgaaccgtatcaaggtgctgctactggtgttggtggaatcttgagggatgtttttacaatgggagcaagaccaattgcgatattaaattcacttcattttggtagtcctacacattttaaaacaaaaaatcttttaagtggtgttgtttctggaataggtggttatggaaattgtattggtatacctacagttggtggtgaagtaaaatttgattcttcttataatgaaaatattcttgtcaatgcaatggctgtgggtctcgttaaaaaagataaaattttttattctaaagcgcaggga

SEQ ID NO: 318577 - DNA, 892 bp, Unknown
  Bacterial polypeptide expressing nucleotide sequence isolated from the Sargasso Sea
atacaaatcgtcaaaaaaatggctaaaaactttacctactaaaaatgaaagagttattcaagggccaggtgagaatgcaggtgtaattgatattgatgataatgatgtggcaattttcaaaatagaaagtcataatcatccgtcatttatagaaccatatcaaggtgcagctacaggggttggaggtatacttagagatatatttacaatgggtgcaagacccgtagctagtctaaattctttaagatttggatctgcagatcatccaaaaacaaaatatctattgaatggggtggtatcaggtattgcaggatatggaaattgcattggagttccaactgtgggcggagagatagagtttgatagctgctataatggaaatattttagtaaacgcaatgaatataggtattactaaaaaaaataaagttttttactcgattgctagtggtgttggaaatccagttatatatgtgggatcaaaaactggaagagatggtattcacggtgcatcaatggcttctcaagaatttgatgaaaatacagaagctaaaaagccgactgttcaggttggcgatccattttcagaaaaattattactggaagcatgtttagaattgatgaaaacaaatgctattgtttcaattcaagatatgggcgcagctggacttacctcttcatctgtagaaatggcatcaaagggtaaggttgggattgagattaatttagacaaagttccatgtagagaaaaaggtatgtcaccttacgaaataatgctgtcagaaagccaagaaagaatgttgattgttttgaaagaagggaaagagaaggattgtgaaaaaatatttaataaatgggggttggatttttctataattggaaaactgactaaa

SEQ ID NO: 318578 - DNA, 593 bp, Unknown
  Bacterial polypeptide expressing nucleotide sequence isolated from the Sargasso Sea
aatggttgaagttaatgaacaaatagcaatagatcatggattgaagaaagatgaatataaaaaaatctgtgatcttttaaaaagaactccaaatattacagagttaggagttttttcagcaatgtggaatgaacattgttcttataaatcatctagaagacatcttaaaaaattacatactaaaggtgatcaagttatccaaggcccaggagaaaatgctggtgttgttgacattgaagatgatgatgcaattgtatttaagatagaaagccataaccatccctcatttattgagccctatcaaggtgcagcaacgggtgttggtggaattatgagagatgtgtttactatgggtgcaagacctgttgctaatttaaactcaattcactttggttcaatcgatcatgaaaaaactagaaatttattaagaggggttgttaaaggtattggtggatatggtaattgtattggtgttcctactattgctgggcaaacttgttttgacgagtcttataatggaaacattctagtcaatgcaatgacattaggctttagtaataaaaataaatattttactctaaagctgctggagt

SEQ ID NO: 318579 - DNA, 856 bp, Unknown
  Bacterial polypeptide expressing nucleotide sequence isolated from the Sargasso Sea
aatgatagtaaacgaacaagtggctattaatcatggcttaaagaaagatgaatatgctaaaatttgtgaattattaaaaagaacaccaaatattactgaactaggaattttttctgcaatgtggaatgagcattgttcctataaatcttcaagacttcatttaaaaaaacttccaacaaaaggaaaaaaagttattcaaggtcctggagaaaatgctggtgtaattgatattgaagacaatgatgcaattgtttttaaaatagaaagtcataaccatccatcttttatcgagccatatcaaggagcagcaacaggggttgggggtattatgagagatgtatttacaatgggtgcaagacccattgcaaatttaaattcaattcattttggctctcctcaacataaaaagacaaaaaatcttttgaggggtgttgttaatggaatcggtggatatggaaattgtatgggtgttccaacagttgcagggcaaacaagttttgatagctcatataatggaaatatcttagttaacgctatgactcttggattggtgaaaaaagataaaatattttattctaaagcagcaggtttaaataagcctgttatttatgtcggatcaaaaacaggaagagatggaattcatggagctagtatggcttcagcaagttttgacgataaaatagaagaaaagaaacctactgttcaagttggagatccatttactgaaaaacttctactagaagcttgtttagaattaatggctggagactcaattattgcaatacaagatatgggtgcagctggattaacatcatcgagtattgaaatggcttcaaaaggaaatctttggaattga

SEQ ID NO: 318580 - DNA, 900 bp, Unknown
  Bacterial polypeptide expressing nucleotide sequence isolated from the Sargasso Sea
ggcggtgcaggttggtgacccttttaccgaaaaatgtttaatggaagcatgttttgagctgatgaacgctggggccgtaagatctatacaagatatgggtgctgccggtcttacatgctctgccgtggaaatgggagataaaggtgaccttggtattgaactatatttggaaagagtacccacccgcgaaaaatcgatgacagctttcgaaatgatgctttccgaaagtcaagaacgtatgctgtttgtattgagcccagataaagaaaaactagcagagaatattgccaaaaaatggaatttggaatttgccattgttgggaaaactataaagcaagacaggtttagagtttttttaaatggtgagattgaagccaatttaccactcaaagcactatcaaggtctgcgcctgagtatgacaggccctggacaaagcccccacagcataaaaattatgctcacaatgttgctaatttgaactctttggactgcttaaaaataataatctcatcgccaaactattgctcgagaaaaaaagtatggcaacaatacgatcatactattttatcaaacacgttaattggtcctggttcggacgcagcagtcattagaattgagaatacagaaaaagcccttgctttaacctgcgacgtaactccgagatactgcttagcaaatcctctagagggaggcaaacaagcagtagctgagtcatttagaaatatcattgcctctggtgcaacgcctatcgcaatcacagataatcttaattttgggaatcctgagaggccggagataatggggcaatttgtagactgtattaagggaattagtgaggcgtgtgtaaaactcaacatgcctgtagtttctgggaatgttagcttgtataatgaaactga

SEQ ID NO: 318581 - DNA, 775 bp, Unknown
  Bacterial polypeptide expressing nucleotide sequence isolated from the Sargasso Sea
atgattgaagttaatgaaaaaatagcaatcgaacatggattaaaaaaagaagagtataaaaaaatttgtgatctattaaaaagaactcctaatatcactgaattaggtattttttctgcaatgtggaatgaacattgttcatataagtcttcaagattgcatcttaaaaaattacatactaaaggtgagcaagtaattcagggacctggtgaaaatgctggcgtagtaaatattgatgataatgacgcgattgtatttaaaatagaaagccataaccacccttctttcattgaaccctatcaaggagcagctactggagttggtggtataatgagagatgtatttactatgggcgcaagaccaatcgcaaatttaaattctattcattttggctcgccagatcatgaaaaaacaagaaatttattaagaggtgtggttaaaggtattggtggatatggaaattgtattggtgttccaactattgcaggtcaaacatgttttgatgaatcttataacggaaatattttagttaacgcaatgacattgggtttggtaaacaaaaataaaatattttactcaaaagctgctggtataaataaaccagttatttatgttgggtcaaaaactggaagagatggaatacatggcgcgagtatggcttctgctatttttgatgataagattgaagaaaagaaaccgacagttcaagttggtgatccatttacaaaaaaattacttttagaagcttgtcttgaacttatggcagggaagtcaa

SEQ ID NO: 318582 - DNA, 865 bp, Unknown
  Bacterial polypeptide expressing nucleotide sequence isolated from the Sargasso Sea
tatggaaattgtattgggcgtacctacaattgcaggtcaaacaagttttgatagttcttacaatggtaatattcttgttaatgcaatgactttagggttggttaaaaaagataagattttctattcaaaagcagcaggattaaataagccagttatttatgttggatcaaaaactggtcgtgatggtattcatggagcaagcatggcctctgctagcttcgatgaaaaaattgaagaaaagaaaccaactgttcaagttggagatccttttacagaaaaattattacttgaagcgtgtttagaattaatggctggagactccataatatccattcaagatatgggcgctgctggactaacttcctcaagtatcgagatggcttctaaaggcaatttaggaattgaaattaatttaaataaagttccctgcagagaatcaaaaatgaccccttacgaaataatgctttcagagagtcaagaaagaatgttgattgttttagaaaacggaaaagaagaacaagcaaaaaaaatatttgataaatggaatttagattttgcagtaattggtaaaacaactaaatcaaaaaaaatagaactatattttgataatgaaaaagttgctaatattccagtaaatacattagttgaaaattcacctatgtatgaccgtaaatggaaaaaagctaaacttccaaaaaaaaataaaattaaaaaaaacgaattaaataatttaaaaatattaaatgttttaaaaaaaattttatcaaatccaaatgtatgcagcaaagaatggatctggcagcaatatgaccatactgttatgggtgatacaattcaaaagcccgggtggagattcttggtgtag

SEQ ID NO: 318583 - DNA, 685 bp, Unknown
  Bacterial polypeptide expressing nucleotide sequence isolated from the Sargasso Sea
atgaagtcatcagtaatagtttttccaggatcaaattgtgatagagatattgatgtagcactaaaaaaatttcaaatagacaacaaaatggtttggcatgatgaatctgtattaccaaaaactgatttagtagttttgccaggtggattttcttatggtgattatttaagatctggatgtattgcgagtaaatctaaaataataaatgaagtaattaaacatggaaaaagaggtggattaatcctaggtatttgcaatggttttcaaatattaattgagtcgggtttacttcctggtgttttattaagaaataaaaaacttagatttatatctaaagatgtttttttaaaagttacaaatgttaacaatcgattttgtctaaattataaaaaaaaaaatataattaaacttcctatagctcataatgaaggaaattattttgctaaaaaaaaattattaaatgaacttgaggataacaatttaattgcatttaaatatacaaataataaaggtgttattgacgaaaattccaatccgaatggttccttaaataatattgctggaattttaaattatgaaaggaatatactaggaatgatgcctcaccctgagagattgattgatcgtcatctatccggagtagatggttctataatgtttgaaagtttgcttaaatcaaattaaa

SEQ ID NO: 318584 - DNA, 844 bp, Unknown
  Bacterial polypeptide expressing nucleotide sequence isolated from the Sargasso Sea
aatacagtttttaaacctgggaaatcagatgcagccgtagtaagactaagggaacaaaataaaaaaaataaaagtaaagtattttctggtgtcgctgcttcagttgattgcaatagtagatgggttgcgcttgatccttttagaggatctattgctgccgttgctgagtccgctagaaatgttagttgtgttggtgctgaaccagtagcaattacaaataatttaaatttttcttcccctgagaatgatataggatattggcaactttcatcttcatgtaatggaattgctgaagcctgtaaagttttagaaactcctgttacaggaggtaatgtatctttatataatgaatcaaaaaataaagataatctaattactcctattaatccaacacctgttattggaatggtgggaaagatagataatgtcgaaaaagctataagtagtgaatggaaaaatattgaagatgaaatctggttaattggttcttccaaatcagaaataaaaattgcagctagttcttatctggaatattttcatggagaaattacaggtcggcctccaaaaatagatttgttggatgaaaagttttgccagagttttttaagaaatgcgattttaaatagtcttgtagtttcctcgcacgatatcagcgacggaggtttagctatagctttagcagagtcttgcattttgtcctcgaggggtgcaactatagaattagagagagatgtaaatagagttgataatttattgtttgccgaaggggggtcaagaattattttttcaattagtaaaatcaaacaaaatgaatggtttaattttttaaaacaaaatcaaataa

SEQ ID NO: 318585 - DNA, 685 bp, Unknown
  Bacterial polypeptide expressing nucleotide sequence isolated from the Sargasso Sea
atgaaatcatctgtaattatttttcccggttcaaattgcgatagagacatggatgttgctctaaaaaaatttggttttaaaaatcaaatgatttggcacaatgataaatctattccaaaaagtgatctgattgtacttccaggtggattttcatatggtgattatttaagatgtggaagtatcgcatctaaatctaatataattaaatcagttatagattttgctaattctgggggacttgttttaggtatatgtaacggttttcaaattttaacggaaactggtttgctgccaggaatattacaacaaaataaatatctaaatttcatatgtaaaaatgtttatgtaaaagttaaagataagaaaaacaaatattttaataatatcaaaaaggatattttagaacttcatatagctcataatgaaggaaattatttttgctcaaaagatgagttaaaatccttagaagacaacaagcaaattgctgttacttactgtgatgaaaaaggtattgaaaatgatcaagaaaatccgaatggtgcaataaaaaatatcgcaggtatttttaataaaaataaaaatgtattaggaatgatgcctcatcctgaaagaatgattgataaatatctttctggtgaagatggttctttattttttgaaaatcttttaggaaatttcaaataat

SEQ ID NO: 318586 - DNA, 364 bp, Unknown
  Bacterial polypeptide expressing nucleotide sequence isolated from the Sargasso Sea
atggaagtaaatgaaaaaattgcagtagatcacggtttaaaacctgatgaatacaaaaaaatttgtgatttgttaacgcgcgttccaaatttaacagaacttgggattttttcagcgatgtggaatgaacattgctcgtataaatcttcaagaatacatctaaaaaaattaaacactaagggaaaaaaagtaattcaaggtccgggtgaaaatgctggggtaattgatataggagatgacgatgcaatagtttttaaaattgaaagtcataatcatccctcatttatagaaccttatcaaggtgcagcaacaggagttggtggaataatgaaagatgtttttacaatgggtgcaagaccaattg

SEQ ID NO: 318587 - DNA, 737 bp, Unknown
  Bacterial polypeptide expressing nucleotide sequence isolated from the Sargasso Sea
aatgattgtaaacgaacaagtagcaattgatcacggtttaaagaaagatgaatattctaaaatttgtgaactattaaagagaactccaaatattacagaactaggaattttttctgcaatgtggaatgaacattgttcttataaatcatcaagactacatttaaaaaaactacctactaaaggaaagaaagttattcaaggtcctggagaaaatgctggtgttatcgatattgaggataatgatgcaatagttttcaaaatagaaagtcataatcacccttcatttattgaaccgtatcagggtgctgcaaccggtgttggaggaataatgcgtgatatatttacaatgggtgcaagaccaatagctaacttgaactccattcattttggatcgccacaacataaaaaaactaaaaatttgctgagaggtgtggttcatggcataggaggttatggaaactgtatgggtgtcccaacaattgctggtcaaacaagttttgatagctcttataacggcaatattttagtcaatgccatgactttgggattagttaaaaaagataaaatcttttactctaaagctgctggtttaaacaaacctgtaatctatgttggatcgaaaacaggaagagatggaattcatggggctagtatggcctcagctagttttgatgaaaaaattgaagaaaaaaaaccaacagttcaagtgggagacccatttactgaaaaacttttat

SEQ ID NO: 318588 - DNA, 673 bp, Unknown
  Bacterial polypeptide expressing nucleotide sequence isolated from the Sargasso Sea
gtaattacttttcctggctctaattgtgatagagacatgaatgttgcactcaagaaatttggttttactaataagatggtttggcatgatgataatgaactccctaaaagtgatttagttgtacttccaggtggtttttcctatggagattatttacgatgtggaagtatggcttcaaaatctaggataatgcaatcagttataaattttgcaaaatctggggggttggtcatgggaatttgtaatggatttcaaatactggttgaaacaggtttagtgccaggagttttgttgagaaataaatatttggagtttatatgtaaaaatgtcttcgtaaaattagacaacaaagaaaatgtttattttaaaaatcttaataaaaatgttttagaatttcatattgctcataatgaaggaaattatttttgtaccaaagatcaattgagagaaattaaggaaaataatcaaattgcaatttattattgtaataaagaaggtaaaatagaagatcaatacaatccaaatggctcaattaaaaatatcgcaggtatttttaataaagaaaaaaatgtcttaggtatgatgcctcatccagaaagaatgatagaccaaagtttatctggtgaagatggttcaatttttttcaaaaaccttcttaataatattaaataat

SEQ ID NO: 318589 - DNA, 760 bp, Unknown
  Bacterial polypeptide expressing nucleotide sequence isolated from the Sargasso Sea
gagctgatggatactaaatctattgttgcaattcaagatatgggcgccgcagggttaacatcttcatcatttgaaatggcggcaaaaggcggggttggtctggaaataaatatagacaaaatacccgcaagagagaaaaagatgacggcctatgaattccttctcagtgaaagccaggagagaatgcttatggttataaaacccgggtctgaaggagaagcaaaaaaagtttttgagaagtggggtcttgatttttcagtgattggtaacttggattcttcgggtcggatgaaaatcatggagaataagaagttaatagcggacctacctatagaacccctagttagcaaagcacccgaatatgataggccttgggaaaaaccgatacccggcagtatagtgaaagcggaagatataccagaacctgattcagtagtttcagttttgaaaactctactaggttcttcagacctttgttcaaaacgttggatatgggagcaatatgattatttggttatgggaaaaacaatccaagcccctggcggtgatgccgcggtcgttggccttgaaggtacaaaaaaagctgtagctatgaccactgactgcacacctagatattgcctcgctgatccattcgaaggcgccaaacaagcggttgtggaagcgtggagaaatttaatatctgtaggagcaaagccgctagcaattacagataatttaaactttggaaatccggagaagccagaaattatgggcgaaa

SEQ ID NO: 318590 - DNA, 679 bp, Unknown
  Bacterial polypeptide expressing nucleotide sequence isolated from the Sargasso Sea
aatgaattcatcagtaattgtttttcctggttctaattgtgacagagacatagcgaccgccctagaaaaaatgcaatttaaaaaccaaatggtttggcataaagaaacaaaactacctaaatctgatctaattgttgttcctggaggattctcttatggggattatttaagatcaggtgctattgcgggtaaatcattaataattaatgaagtaataaaagcagctaatgaaggttgtttaatactaggaatttgtaatggttttcaaatattaactgaaacaggattattaaagggagttcttttgagaaataaaaatttgaaatttattaacaaagacataaatattaaagtcattaataataatactaaattttcaaacaaatataaaaaaaatcaaattttaaaaataaatattgctcataatgaaggaaattattttacaaattctgaccatttaaatgaattaaaaaatgaaaatttaatagcatttaaatactgtgacaaagatggaaatgttaatgaaaagacaaatccgaatggttctttagaaaatattgccggaatatttaattcaaaaaaaaatattttaggtatgatgcctcaccctgaaagaatggttgataatttaatttcaaatactgatggggttaatttattttcaagtttacttaaataa

SEQ ID NO: 318591 - DNA, 823 bp, Unknown
  Bacterial polypeptide expressing nucleotide sequence isolated from the Sargasso Sea
tattttagtgaatgctatgacattgggtttggttgataaaaataaaatattttattcaaaagctgctggaataaataagcctgttatttatgttgggtctaaaactggaagggatggaatacatggtgcaagtatggcttcggctattttcgatgacaaaatagaggagaagaaaccaactgttcaagttggtgatccatttactgaaaaactgctcttagaggcttgtttagaattaatggctggaaaatcaataatttcaatccaagatatgggtgctgctggtttaacatcttctagtatcgaaatggcatcaaaaggtaatttaggtattgagatagatttaactaaagttccatgcagagaagaaaatatgtccccttatgaaattatgctatcagaaagtcaagaaagaatgctgatcgtattagaggaaggtaaagaaagtgaagctaaaaaaatatttgataagtggaatttagattttgcagtgataggaaaaactacaaataccaaaaatatagaattattttttaaaaaagaaaaagttgctaaaatcccaattgattttttggctgataatgctcccatatatgatcgaaaatgggttaaaacaaaactacccaaggaaaataaattttcaaaaaattattttaaatcattaaaactaaaaaattgtttgcaaaagattttaaccgatcctaatattgcagataaagaatggatttggaatcaatatgatcatacagtcatgggggatacaatacaaaaaccaggaggtgatgctggagttataagagttcatggtactaaaaaagctgta

SEQ ID NO: 318592 - DNA, 860 bp, Unknown
  Bacterial polypeptide expressing nucleotide sequence isolated from the Sargasso Sea
aattcactttggctcaattgatcatgaaaaaactagaaatctattaagaggggttgttaaaggtattggtggatatggtaattgtataggtgttccaactatcgctggccaaacttgctttgacgagtcttataatggaaacattctagtcaatgcgatgacattaggtttggtaaataagaataaaatattttactctaaagccgcaggcgttgataagcctgttatatatgtagggtcaaaaacaggaagagacggaattcatggtgcaagtatggcatcagctattttcgatgataaaatagaagaaaagaaaccaacagttcaagttggggatccatttacagaaaaactacttttagaggcttgtttggagttaatggcaggtaaatcaataatatcaattcaggacatgggtgcagctggactaacttcatcaagtattgaaatggcatcaaaaggtgatttgggtattgaaattgatttaacaaaagtaccttgcagagaagaaaatatgacaccttatgaaataatgctttcagaaagccaagaaagaatgttaattgtattagaggctggaaaagaagatgaagcaaaaaaaatatttgataagtggaacttagattttgcagttattggaaaaacaaccaatagtaaaaatatagaattattttttgaaaataacaaagttgctgaaattccgatagattttttagctgaaaatgctccaatgtacgatcgcaaatggataaaagctaaattacctaaagaaaacaatttttcaaaagatgattttaagtctttgaaattaagtgattgtttaaataaaatcttaactgaccccaaacattgcagataaa

SEQ ID NO: 318593 - DNA, 667 bp, Unknown
  Bacterial polypeptide expressing nucleotide sequence isolated from the Sargasso Sea
aatggatgattttactgtaggagttgttgtcttccctggttctaattgtgatcgtgatgtttcatgggcattagaaggttgtctagacataagaacaaaatatttgtggcatgagtcttcagatttaagtgatgtagatgcaatagttatacctggaggatttagctatggtgattatttgagatgcggagcaattgcgagattctctccattaataaatgccttggatgagtttgttaaaagcgggaaaagagttttaggaatttgtaatgggtttcaaattttgactgaatcagggtttttgcctggtgctcttgttgcaaataaaaatcttaattttatctgtgatgacgttgaactggatattgtttcttcaaaaggaggttggtttaataatggagatgaaaaacaaactattaagttgccaatagcgcacggggaaggaagatatcattgtgattctgatactttaaaaaaacttgtagataatgaattgattgctttgagatataaaaataatcctaatgggtcctcattcgatatcgcaggcataactaatgaaaagggaaatgttcttggtttaatgcctcatccagagagagcatgtgacgagacaattggtgggactgatggtctttttacattaaaatcattaatattgaaataa

SEQ ID NO: 318594 - DNA, 1201 bp, Unknown
  Bacterial polypeptide expressing nucleotide sequence isolated from the Sargasso Sea
atgactgttaacgaaaaagttgcaatcgatcacggattaaaaaaggatgaatacaaaaaaatttgtgatcttctcaaaagaacaccaaacataactgaattagcgatcttttcagcaatgtggaatgaacattgttcatacaaatcatcaagaaaacatcttaaaaacttacatacaaaaggaaaaaaagttattcaagggccaggtgaaaacgctggtgtaatagatattggagatgatgatgcaatagtatttaagatagaaagtcataatcatccatcatttattgaaccatatcaaggcgctgccacaggagttggtggtataatgagagacgtttttactatgggtgcaagacctatcgccaatctaaattcaatacattttggttcaccgcaacacaaaaaaacaaaaaatttattaagaggagttgtaaaagggattggtggttatggtaattgtataggagttccaactattgctggccaaacaagtttcgacgagtcatataatggaaatattttagtaaatgcaatgacccttggtcttgtaaataagaaaaaaattttttactcaaaagcagctggaattaataaaccagttatatatgttggatctaaaaccggtagagacggaatacatggcgctagtatggcgtcagcagtttttgatgacaaaattgaggaaaaaaaaccaacagtccaagttggagacccttttactgaaaaacttttattggaggcctgccttgaattgatgtctgacgactctataatttcaatccaagatatgggtgcagctggattaacatcttcaagcgtagaaatggcatcaaaaggaaagcttggtatagaattaaatctaaataaagttccttgtagagaagaaaaaatgaatccgtacgaaattatgttgtcagagagccaagaaagaatgcttatagttcttgaaaacggaaaagaggaaaaggccaaaaaaatttttgataaatgggatcttgattttgctataataggaaaaactacagactcaaaaaaaattgagttatattttgatgataaaaaagtttgtgacataccagtagactttttagctgagaatgcacctgtatatgatagaaagtggaaaaaaataaaacttccgcaaagtattaaatttaaaaagcaagagtttaaatctttaaagattgagaattgttgaa

SEQ ID NO: 318595 - DNA, 894 bp, Unknown
  Bacterial polypeptide expressing nucleotide sequence isolated from the Sargasso Sea
actgggaggaggtgctccgcgattcgtggtttcctcccctgcgtacgacatagctgcagccctgaagcaggaagggctcaagcccactgactgggatgagatctgtcggcgtctcggccgcgagccgaatcgagccgaactgggcatgttcggtgtgatgtggtccgaacactgctgttatcgcaattcccggcctttgctaagtggcttccccacggagggaccacgcatccttgtgggacccggcgaaaacgctggtgtggtggatctcggtgggggccatcggttggccttcaagatcgaaagccacaaccacccctccgccgtcgaaccctttcagggggcagctacaggtgtgggcggcatcctgcgtgacatcttcacgatgggggcccgtccgatcgcgctgctgaacgctctgcgcttcggccctcttgaggatcccgccaacgttggcctgatggaaggcgttgtggccggcattgcccattacggcaactgtgttggtgttccgacggtgggtggcgaggttgcttttgatccttcctattccggcaatccgctggtgaatgccatggcccttggcttgatggagaccgaggagatcgtcaaatccggtgcgatcggcgtcggcaatcctgtggtttacgtgggcagcaccaccggtcgggacggcatggggggagccagctttgccagtgctgagctcagtgcggattctttggacgatcgccccgccgttcaagtgggcgatccgtttctggagaaagggctgatcgaagcctgccttgaggccttcgccagtggtgatgtggtggccgctcaggacatgggcgctgctggtctcacctgcagctgttcggaaatggctgccaaagggggcctgggggtgga

SEQ ID NO: 318596 - DNA, 685 bp, Unknown
  Bacterial polypeptide expressing nucleotide sequence isolated from the Sargasso Sea
aatgaagtcggctgtaattatatttccaggttcaaactgtgatagagatatggatgttgccttaaaaaaatttggctttaaaaatgaaatggtttggcataatgagcaggagattcctaaaagtgatttaattgtattacctggaggtttttcctacggagactatttaagatgtggaagtatagctggaaaatcaaaaataattaaatcagttatagaatttgcaaattcaggaggattggtattgggaatatgtaatggatttcaaatattaacagaaactggcttgctacctggcgttcttttacaaaacaaatatcaaaaatttatatgtaaaaatgttcatgtgaaaataaacaataaagaaaataaatattttaaaaatatcaaaaaggaaattctacaactacatatagcgcacaatgagggtaactatttttgctcagaagatgagttaaaatctttaattaataataatcaagttgcagttacttattgtaatgaaaatggcaaggaagctgatgagtttaacccaaacggagcattaagtaatattgctggaatatttaataaaaataaaaatatattaggaatgatgcctcatccagaaagagttatagataaaagtctttcaagtgatgatggtaattatttctttgaaaatttaatcaagaatttaaaatga

SEQ ID NO: 318597 - DNA, 564 bp, Unknown
  Bacterial polypeptide expressing nucleotide sequence isolated from the Sargasso Sea
aatggaagtgactgaaaaattagcaattgatcatggtttaaagaaagaagaattttctaaaatctgtgaacttttaaaaagagtgccaaatataacggaacttgctattttttcagcgatgtggaatgaacattgttcttataaatcatctagaaaacatttaaaaaaacttcacactaaaggaaaacaagtaattcaaggaccaggagaaaatgctggcgtgattgatattggagatgatgatgcaattgtttttaaaattgaaagtcataatcatccttcatttatagaaccttatcaaggcgctgcaacaggtgttggaggaatcatgagagatgtttttacaatgggggctagacctattgcaaatcttaattcaattcactttggttcacctcatcacaaaaaaacaagaaatttattaagaggagttgttaaaggaattggaggatatagtaattgtataggtgttccaactattgcaggccaaacatcgtttgatgaatcttataatggaaatattttggtaaatgccatgactttaggtttggtaaataaaaataa

SEQ ID NO: 318598 - DNA, 1534 bp, Unknown
  Bacterial polypeptide expressing nucleotide sequence isolated from the Sargasso Sea
tgcatttttgacgataagatagaagaaaaaaagccaacagttcaggttggggatccttttacagaaaaattattattagaagcatgtttagaattaatggcaaaaaaatcaattatatctattcaagatatgggtgctgctggattaacatcttcaagcattgaaatggcatcaaaaggtaaccttggtattgagctaaatttaaataaagttccatgccgtgaggaaaaaatgacaccttatgaaatcatgctatctgaaagccaagaaagaatgttgatagttttagaaaatggtaaagaagatgaggcaaaaagaatttttgataaatggaatttagattttgcaattattggtaaaacaacagatacaagaaaaatagaactattttttgatagtaataaagttgcagaaattccaattaatatattagcagaaaatgcaccaatctatgaaagaaagtggaaaaaaacaaaacttccacaaaaaataaaatttaaaaaagatgattttaaaaaattaaaaattactgaagttcttaaaaaaattttaagtttaccaaatatttcaagcaaagaatggatttggcagcagtacgaccacactgtaatgggtgatactattcaaaaacctggttctgacgctggcgttgtaagagttcacggtactaacaaagctattgcaacctcagtagattcttctgccgtctattgttacgctcatcctcttacgggtggaaaacaggttgtttgtgaaagttggagaaatttaatttcatgtggggctacaccggtcgctattactaattgtttgaattttggtaaccctgaaaaagaaaaaaatatgggtgaatttgttgagtgcgttgaaggaattaatgaggcaagtaaatttttagattacccagtagtttcaggaaatgtttctttttataatgaaacaaaagataaaggaatcaagccaactccaactattggaggtgtaggattattaaaggattataaaaagatgataactatgaatctaaaaaaaaacgaaaatttaatattagttatcggtaaaactgaaggctacatagatcaaagtatttttgcgaggaatattttggatgaaaaaaagggcccgccgcctgaagttaatttatttaatgaaaaaaataatggtgagacaattttaagattaattaatgaagaattggtcgaatctgtacatgatgtgtcgttaggaggaattgttaccgcagtatcaaaaatggctataaaaggtaaaaagggttttaagcttagtaaactgaaagttttaattaacaaatttgattattattttggagaagaccaaggaagatatataattgaaattgatccaaaaaatctatcaaaagtgcaaaaaattttaaaagataattctgtacattgtgatgaaattggaattgtaaccgaaaatgaggtaataataaataatgagccaattctacatattgacgaattgattgaatctaataaaaattggttaatagattatatgaataaataat

SEQ ID NO: 318599 - DNA, 2320 bp, Unknown
  Bacterial polypeptide expressing nucleotide sequence isolated from the Sargasso Sea
tgcggctcaggtcaagcaggagggactgacccgtgaggattacgacgagatcgttcgtcggttgggccggcatccgaatcgtgccgagctcgggatgttcggtgtcatgtggtcagagcactgctgctaccgcaattcacggccgttgctcaagcagtttccgaccgagggcccgcgcatcctggtgggtcccggtgaaaacgccggggtcgttgatctcggtgaggggcatcgcctcgccttcaagatcgaaagccataaccacccctcagcggtggaaccatttcaaggggcagccactggtgtgggcggcatcttgcgggacatcttcaccatgggagcccgtcccctggccttgctgaatgccttgcgtttcggtcccctcgaggatcctcgcaacgctgggctgatggagggggtcgtcgccggcattgcccattacggcaactgcgtgggggttcccaccgtggccggtgaggtggcgtttgatccgagctacagcggcaaccccctggtcaatgccatggcgttggggttgatggagaccgaggagatcgtgcgttccggtgcttctggggtgggcaatcccgtcgtctacgtcggcagcaccactggccgcgatggcatggggggcgccagcttcgccagcgccgaactcagtgaggactcactggatgatcgtcctgcggttcaggtgggggacccattcctcgagaaggggctgattgaagcctgcctggaggcgttcaaaagtggtgatgtcgtcgcagcccaggacatgggtgccgccggcctcacctgcagctgtgccgagatggcggccaagggtgatgtcggtatcgagctggatttggatctggtgccagcccgcgagagcgggatgacggcttacgagtacctgctgtcggaatcccaagagcgcatgttgtttgtggtcgagcagggccgtgaacagcctctgatgcagcgcttccgccgctggggactgcaggctgctgtcgtcggtcgcgtcctggaagagcctgtggtgcgggtgttgcagcagggacaggtggccgctgaagtgccttcccgggccttggcggaagacacaccgatcaaccgccgggccctgctggagcagcctcctgagtcgattcagcagcactggcgttggagcgagcagacgctgcctgcgttacatgccgctgaggtgcctgaggtgctgctggcgctgttggatgaccccaccatcgccagcaaacgctgggtctggcgccagtacgaccatcaggtgcaggccaataccgtcgtcccgcctggtggcgctgatgcggcggtggtgcgtctgcgtccccaggagggagcccgagcgctgcaagccagcgagcgcggtgtggcatcgacggtggattgccccaaccgctgggtggcccttgatccagagcgcggcggcatggcggccgtggcagaggcggcgcggaacctcagttgtgtgggcgctgagcctgtagcggtcacggataatctcaatttcccctctccggagactccgacggggtattggcagctggcgatggcctgtcagggcttagcggagggttgccgcgcgctggccacaccggtcaccggtggcaatgtctcgctctacaacgaaacgcgtctgcccgatgggcaggttcagccgattcagcccacgcctgtggttggcatggtgggcctggtggagcggcttgagcgcctggtggggctggcgtggccccagcctgagcatgacgctgcggcccatcaggtgctgcttttgggtctgcctttggattgcagtgctgaggacgaccggcttggtttggcgggcagcagctacctgcaggtgcgccatggcttgtgcaccggccgcccaccgcgtccggatctggccctggagcgacaggtgcagggggcgctgcgggccgctatcactcaaggtctcgtaagtgctgcccatgatctctctgatggtggtctgctggtggcggcctcagagatggcgctggcggccggttgcggcgcccagctggagctgccgagctctgcgctgcgccttgagcgtttgttgtttgccgaaggcggtgctcggattctggtgagcgtcagcccggaccagcagcaagccctggagtccatgctcctggctcagggctgccccagccagtggttggggactgtgcagcaggatcctcagctggtggtgcgtcaggctggaagcacgctggtggacctgcccctgatcagcctgcacgatgctcacgatcaagggctgccgcggcgcctgcaacagcaagccctcgggcacaatggttaa

SEQ ID NO: 318600 - DNA, 823 bp, Unknown
  Bacterial polypeptide expressing nucleotide sequence isolated from the Sargasso Sea
atggttaatgaaaaaattgctatagatcatggtttaaaaaaagaagaatataaaaaaatttgtgatcttcttaaacgtacaccaaatattacagaactaggaatattttctgcaatgtggaacgagcactgttcttacaaatcatcaaaacttcacttaaaaaatttaccaacgaaaggaaaaaaagttattcaaggtccaggtgaaaatgctggcgtaatagatataggcgatgatgatgctattgtttttaaaatagaaagtcataaccatccatcatttattgaaccctaccaaggtgctgcaactggcgttggaggaatattgagggatgtttttacaatgggagcaagacctattgccaatcttaattcaattcattttggttctccccagcataaaaaaactaaaaatttattaagaggtgtggttcatggaattggtggttatggaaactgcatgggaattccaactatagcaggtcaaacaagtttcgatgaatcttataatggaaatattttagttaatgctatgacattaggtttagttaaaaaaaataaaattttttattcaaaagctgctgggttaaataaaccagtgatttatgttggttctaaaactggtagagatggaatacatggggcaagtatggcttcagctatttttgacgataaaatagatgaaaaaaaacctactgtccaagttggtgatccttttactgaaaaattactacttgaagcatgcttagagttaatggctggcgactctattattgcaattcaagatatgggagcagccggtctaacttcatcaagtatgaaaa

SEQ ID NO: 318601 - DNA, 529 bp, Unknown
  Bacterial polypeptide expressing nucleotide sequence isolated from the Sargasso Sea
atgttagtaaatgaaaaagtagctatcgaacacggtctaaaaactgatgaatataaaaaaatttgtgaattattaaagagaactccaaatataactgaacttggaatattttctgcaatgtggaatgaacattgctcatacaaatcatctagaattcatttaaaaaaattacccacttcggggaaaaaagttattcaaggacctggtgaaaatgctggagtcgttgatatagaggatggtgatgcactagtctttaaaattgaaagtcataatcacccctcttttattgaaccttatcaaggtgcagctactggtgttggtggaattatgagagatgtatttactatgggagcacgaccaatagctaacttaaattcaattcattttggatcaccacaacataaaaaaacaaaaaatcttttaagaggagttgttcatggcataggaggttatggtaactgcatgggagtacctacaattgcgggacaaacctcttttgatagttcatataatggaaaatatacttgtt

SEQ ID NO: 318602 - DNA, 685 bp, Unknown
  Bacterial polypeptide expressing nucleotide sequence isolated from the Sargasso Sea
atgaaatcatctgtcataacctttcctggttcaaattgtgatagagatatggatgtcgctcttaaaaaatttggatttaataacaaaatgatttggcataatgataatgagttacccaaaagcgatttggttgttttacctggtggcttttcttatggtgactatttacgttgcggcagtatggcttcaaaatctaagataatgcatcctgttataaattttgcaaaatcaggtggtctggtacttggaatttgtaatggctttcaaatattagttgaagcaggtttggttcctggagttttattaagaaataagtatctcgagtttgtctgcaaaaatgtttttataaaagtaaataacaaagaaaatactttttttaaaaatctagataaaaatatttgtgaatttcacatagctcacaatgaagggaattatttttgcacaaaagatcaacttaaagaaattgaagatcataaccaaattgcaatttattactgtaatgaaaaaggtcaaattgatgaaaagtttaatcctaatggatctataaaaaatattgcaggaatttttaataaagaaaaaaatgttttgggaatgatgccccatccagaaagaatgatagatgaaagtttatcaggagaagatggatcattattttttaaaaacttaatcaataatattagataat

SEQ ID NO: 318603 - DNA, 1345 bp, Unknown
  Bacterial polypeptide expressing nucleotide sequence isolated from the Sargasso Sea
atgaatgagcctgacgtaaccaaagaacttattgaagtacatggtttaaagtcagatgaatacgatttaattttatcaattatcaatagaaatcctacattcacggagttaggtattttttcagcaatgtggaatgaacattgttcttataaatcttcaaaaaaatggcttcgaactctacctacagaaggcccacaagttatttgtggacctggagagaacgcaggaattgttgatattggtgatgggcaggctttagtttttaaaatggagagccacaatcatccaagttacatagagccataccaaggagcggcaacgggcgtaggtggaattctacgcgatgttttcacgatgggtgctcggccaatcgcagtcatgaattctttgagctttggtgacgtaaatcattataaaacacgtcaacttgttaatggtgtagtatccggcataggaggatacggaaactgctttggtgttcctactgttggaggtgaaacgaggtttgactcttcttataatggaaattgtttggtcaatgcgtttgcagcaggtttggttgataaagataaaatattctactcagcagcttcggggatcggtatgccagttgtataccttggagcaaaaactggacgcgacggagtgggcggcgccacgatggcaagtgctgaattcgacgatacaattgaggaaaagcgacctacagttcaagtaggtgaccctttcaccgaaaaacgtttgatggaagcctgcctagaacttatggcgaccggtgcggttatttcaattcaagatatgggagctgctggtctaacttgttcagccatagaaatgggagacaaaggtaatttagggataaccttggacctagaaaaagttccaactcgagaacctaatatgagcgcctatgaaatgatgctgtctgaaagccaagaaagaatgcttatggttttaaaccctgaaaaggagaaaatagcaaaaacaatttttgacaaatgggatttagattttgctgttgttggtgaaactatctcggaggaccgatttcttataaaattagaaggtgttgtgaaggctgatcttcctttaaaggcactagcgggtaatgcgcctgaatacgacagaccatgggttgaagcgcaaccaaataacgagttaaaagacgttgtagaggtgaacgcaattgatggtttgaaagctttaatttcgtccgcgaattactgttcaaaaaattggatttacgagcaatatgacagtcaggtaatggccgatactattgaacggccaggttttggcgcgggcatcgttagggttcatggaacagaaaaatcaatcgcattac

SEQ ID NO: 318604 - DNA, 685 bp, Unknown
  Bacterial polypeptide expressing nucleotide sequence isolated from the Sargasso Sea
aatgaaatcatccgtaataacctttcctggttcaaattgtgatagagatatggatgttgctctaaataaatttggatttaaaaataaaatggtctggcatgatgataatgaattacctaagagtgatttggtagtattgccaggtggtttttcttatggcgattatcttagatgtggaagtatggcttcaaaatctaaaataatgcaatcagtaatcaattttgcaaaatcaggtggattagtaatgggaatttgtaatggttttcaaatattagtggaaacaggattggttccaggtgttttattaaggaataaatatttagaatttatctgcaaaaatgtttttgtaagattagataacaaagaaaatctctattttaaaaatcttgaaaaagatatttttgagtttcatatagctcataatgaaggaaattatttttgcactaaagatcaacttaaagaaattcaagataacaaccagatagctatctattattgcaataaaaatggtcaaactgaagaacaatataatcctaatggatcaataaagaatattgcaggtatatttaataaagaaaaaaatgttttagggatgatgcctcatcctgaaagaatgattgatcagagtttatcaggtgaagatggttctttgttttttaaaaacttaattaataatattaaataa

SEQ ID NO: 318605 - DNA, 895 bp, Unknown
  Bacterial polypeptide expressing nucleotide sequence isolated from the Sargasso Sea
actggcacttgaacatggtcttaggaatgatgagtataagaaaatttgtgatctattaaaaagaaccccaaatataactgaactaggaatattttcagcaatgtggaatgaacattgctcttataaatcttccagactccatttaaaaaaattacctactaaaggtacaaaagttattcaaggaccaggtgaaaatgctggagtaattgatattgaggatggagatgcaatagtttttaaaattgaaagtcataaccacccttcgtttattgagccttatcaaggagcagctacaggtgttggaggaattatgagagatgtttttacaatgggagcaagacctattgctaatttaaattcaatacattttgggtctccacaacataaaaaaacaaaaaatttattaagaggtgtagtgcatgggattggtggttatggaaattgtatgggcgtaccaactatcgctggccaaacatcttttgatagctcatataatggaaatattttagttaatgctatgactttgggattagttaaaaaaaataagatattctattctaaagctgctggattaaataaaccagttatttatgttggatctaaaacaggtagagatggtattcatggagcgagcatggcttcagctagttttgatgaaaaaattgaggaaaaaaaacctacagttcaagtaggtgacccttttacagaaaaacttcttcttgaagcatgtttagaattaatgtcaggagattctattattgcaatccaagatatgggagcagcaggtcttacttcatctagtatagaaatggcatctaaaggaaatttgggaataaaaatcaatttaaacaaagttccttgtagagaaactaaaatgactccatatgaaattatg

SEQ ID NO: 318606 - DNA, 451 bp, Unknown
  Bacterial polypeptide expressing nucleotide sequence isolated from the Sargasso Sea
aatgctttggatgactttgtgaaaagtggaagaagagttttaggaatttgtaatgggttccaaattttgacagaatcaggctttttgcctggtgcgcttacggcaaataaaaatcttaatttcatctgtgatgatgttgaacttgatattgtttcttcaaaaggaggttggtttaatgatggagttgaaaaacaaactattaagttacccatagcgcatggggaaggaagatatcattgtgattctaatactttaaaaaaacttgtagataatgaattgatcgctttgagatataaaaataatcctaatggatcctcattcgatatcgcaggcataactaatgaaaagggtaatgttctaggattaatgcctcatccagaacgcgcatgtgacgagacaattggtgggactgatggtctctttacattaaaatcattaatattgaaataaa

SEQ ID NO: 318607 - DNA, 1114 bp, Unknown
  Bacterial polypeptide expressing nucleotide sequence isolated from the Sargasso Sea
attcatggtgctagtatggcttctgcaagttttgatgaaaaaattgaagaaaaaaaacctacagttcaagtgggcgatccttttactgaaaaacttcttcttgaagcttgtttggaattaatggctggcgactcaattatcgcaatacaggatatgggagctgcaggtcttacatcttcaagcatagaaatggcctctaaaggaaatttaggagttgaaataaacttaaataatgtcccttgcagagaatcaaaaatgactccatatgaaattatgctatccgaaagccaggaaagaatgttgatagttttagaaaatggaaaagaagaattagctaagaaaatatttgataaatggaatttagattttgcagtcattggcaagactactaatacgaaaaatatagaattattttttgataatgaaaaagttgcaaatataccagtaaatatattggtagaaaattctccaatgtatgatcgaaaatggaaaaaatctaaattacctaaaaaaaataaaattaagaaagaaacttttaataaatttaaaattaaagatatcttagcaaaaattttggctagtcctaatgtttgtagtaaagaatggatttggcaacagtatgatcatactgttatgggtgacactattcaaaaacctggaggagactctggagttgtaagagtgcatggatctaacaaagcagttgctgcatcagtagactcgtctgcagtctactgttgggctcaccccctaacaggaggtaaacaaattgttgctgaaagttggagaaatttaatttctgttggagcaacaccgatagctataactaattgtctaaactttggaagtccagagaatgaagataatatgggtgaatttgtagaatgtgttcagggaattggagaagcaagtaaatatttagatttcccagtagtctctggaaacgtttctttttataatcaaacaaaagaagttggtatcaaaccaactccttcaataggtggggtaggtctaataaaaaattataaaaaaatggttacaatggattttaaagaagttggggatttagtattgataattggaaaaacagaaggtcatatagatcaaagtttat

SEQ ID NO: 318608 - DNA, 826 bp, Unknown
  Bacterial polypeptide expressing nucleotide sequence isolated from the Sargasso Sea
atggttgaagttaatgaaaaaatagcaatcgaacatgggttaaaaaaagaagagtataagaaaatttgtgatctattaaaaagaactcctaatatcactgaattaggtattttttctgcaatgtggaatgaacattgttcatataaatcttcaagattgcatcttaaaaaattacatactaaaggtgaacaagtaattcagggaccaggtgaaaatgctggtgtcgtagatattaatgacaatgacgcgattgtatttaaaatagaaagccataaccacccttctttcattgaaccatatcaaggagcagctactggagttggtggtataatgagagatgtatttactatgggcgcaagacctattgcaaatttaaattctatccattttggttcgccaaatcatgaaaaaacaagaaatttattaagaggagtggttaaaggtattggtggatatggaaattgcattggtgttccaactattgctggtcaaacctgttttgatgaatcttataacggaaatattttagttaacgcaatgacattgggtttggtcaacaaaaataaaatattttactcaaaggctgctggtataaataaaccagttatttatgttggatcaaaaactggaagagatggaatacatggcgcaagtatggcttctgctatttttgatgataagattgaagaaaagaaaccgacagttcaagttggtgatccatttacagaaaaattacttttagaagcttgtctcgaacttatggctggaaagtcaataattttcattcaagatatgggagcagctggtttaacatcttccagtatcg

SEQ ID NO: 318609 - DNA, 682 bp, Unknown
  Bacterial polypeptide expressing nucleotide sequence isolated from the Sargasso Sea
atgaaatcatctgtaattatatttcctggttcaaattgtgatagagatatggatgtagctctaaaaaaatttggttttaaaaatcaaatggtttggcacgatgatgctgaaattccaaaatgtgatttaattgttctgccgggtggtttttcttatggggattatcttaggtgtggaagtatagctggaaaatcaaaaattattaaatctgtcattgattttgctaattcaggtggattggtactgggaatttgtaatggctttcaaattctaacagagacaggattgttacctggtatacttcaacaaaataaatacttaaattttatttgtaagaacgtttttgtaaaaattaaaaataaagagaataaatatttcaagaatattaagaaagaagtcttagaacttcacattgcccataatgagggaaattatttttgcacaaaagatgaattaaaatctgttgaagataatggtcaaattgctgttacctattgtgatcacaatggtaatgataatgaagaaaacaacccaaatggtgcattaaaaaatattgcaggcatttttaataaagataaaaatattttaggaatgatgcctcatccagaaagaatgattgatccttttctatcaggtgaagatggatcattgttttttgaaaatttaattggaagtttataat

SEQ ID NO: 318610 - DNA, 679 bp, Unknown
  Bacterial polypeptide expressing nucleotide sequence isolated from the Sargasso Sea
aatgaaatcgtctgtaattgtttttcctggatcaaactgcgatagagatatcgctgttgctttggaaaaattacaatttaaaaacaaaatggtgtggcacaaagaaactagtctacctaagtctgatttaattgtaatacctggaggtttttcctatggtgactatttaagatcaggagctattgcaggaaagtccctaataatagatgaggtaataaaagctgcaaattctggttgcctaatcttaggaatttgtaacggatttcaaattttaactgaaactggattattaaaaggaacattattgagaaataaaaatttaagatttatcaatagagatgtaaatattaaagttataaataatcaaactaaattttcatctaaatatgagtctaaccaaattttaaaaattaatatcgcgcataatgaaggtaattattttaccaattcaaaacatctagatcagttaaaaaaagataatcttatagcttttaaatattgcgatgaaaatggaaatgtaaatgaaagttcaaaccctaacggcgcattagaaaatattgcaggtatatataatacgaaaaaaaatattttggggatgatgcctcatcctgaaagaatggtagacgacattatttctaacactgatggcactaatctattctcaggattgataaattaa

SEQ ID NO: 318611 - DNA, 448 bp, Unknown
  Bacterial polypeptide expressing nucleotide sequence isolated from the Sargasso Sea
tttggaggaatttaaaagtattcaaaaattattaaaaagagatcctaatttattagagttaggaattttttcagcaatgtggaatgagcactgttcgtacaaatcatcaagattacatttgaaaaaattaccaacaaaaggaaagcaagttattcaaggacccggtgaaaatgctggagtaatagatattggtgatgatgatgctattgtatttaaaattgaaagccataatcacccttcttacatagaaccttatcagggtgccgcaaccggtgttgggggtattttaagagatgtatttactatgggagctagacctatagctttattaaattcaattcactttggttcaccttctcaccctaaaacaaaaactttattgaatggagtagtttcaggaattggtggttatggaaattgtataggtatacctacagttgctggggaa

SEQ ID NO: 318612 - DNA, 496 bp, Unknown
  Bacterial polypeptide expressing nucleotide sequence isolated from the Sargasso Sea
gattatttaagatgcggagcaattgcgagattctctccattaataaatgccttggatgagtttgttaaaagcgggaaaagagttttaggaatttgtaatgggtttcaaattttgacagaatcaggatttttgcctggtgctcttgttgcaaataaaaatcttaattttatctgtgatgacgttgaactggatatcgtttcttcaaaaggaggttggtttaatgatgtaaatgaaaaacaaactattaagttgccaatagcgcatggggaaggaagatatcattgtgattctgatactttaaaaaaacttgtagataatgaattgatcgctttgagatataaaaataatcccaatggatcctcattcgatatcgcaggtataactaatgaaaaaggaaatgttctaggtttaatgcctcatccagagcgagcatgtgacgagatgattggtgggactgatggtctctttacattaaaatctttaataccgaaataaa

SEQ ID NO: 318613 - DNA, 803 bp, Unknown
  Bacterial polypeptide expressing nucleotide sequence isolated from the Sargasso Sea
aatggaagttaataaaaaaatcgcagtagagcacggtcttaaaacagaagaatacaaaaaaatttgtgaacttttaaaaaggattccaaatattactgaacttggtattttttctgctatgtggaatgagcactgttcttataaatcttcaagattacatcttaaaaaattacccactaagggaaaaaaagttattcaaggacctggtgaaaatgctggtgtgatagatattggcgacgatgatgcaattgtatttaaaattgaaagtcacaaccatccatcatttattgagccctaccaaggtgctgccactggggtaggaggaattatgagagatgttttcacaatgggtgcaagaccaattgcaaatttaaattctattcatttcggatcccctcaacacaaaaaaactaagaacttattaagaggtgttgtaaaagggattggaggttacggcaattgtattggtgttcctacaattggcggacagacgtatttcgacgagtcttacaatggaaatatactagttaatgcaatgactttaggtttagttaaaaaagataaaatattttattcaaaagcagctggattggacaagccagttatttatgtaggttcaaaaactggtagagacggaattcatggtgccagtatggcttcagcaatatttgatgacaaaattgaggaaaaaaaacctaccgttcaagttggtgatccgtttacagaaaaactgctattagaggcttgcttagaattaatggctggagactctataatttcaattcaagatatgggtgctgccg

SEQ ID NO: 318614 - DNA, 679 bp, Unknown
  Bacterial polypeptide expressing nucleotide sequence isolated from the Sargasso Sea
aatgaaatcttcagtaatagttttcccaggatctaattgtgatagagatatagctgttgctttagaaaaaatgcaatttaaaaattcaatggtttggcataaagaaactgctctgcctaaatcagatttaatcgtaatacctggcggcttttcgtatggagattacttaagatcaggtgctatagcggcaaagtccaatatacttacaggtgttattgaagcgggaaaaaaaggtacgctcattttaggaatatgtaatggttttcaaattcttattgagtgcggacttcttaagggtgctcttttgagaaattcaggattaaaatttatttcaaaaaatataagcgtaaaaattcaatcaaacaaaaataggttttttaataaatataaaaatggtgaagttttgagtttaaatattgctcataatgaaggaaattactttacaaataaaaaacatcttgccgaattagaggagaaagaattaattgcaattaaatattctgacgaaaatggaaagattgattttaaaaacaatccaaatggatcaataaataatattgctggtatttttaatgaaaataaaaatattttaggaatgatgccgcatccagaaagaatgactgataaagttttatcttcagaagatggattgggagtttttttaagtttagtaagttga

SEQ ID NO: 318615 - DNA, 682 bp, Unknown
  Bacterial polypeptide expressing nucleotide sequence isolated from the Sargasso Sea
atgaaatcatctgtaattatattccctggttcaaattgtgatagagacatggatgtggctcttaaaaaatttgggtttgaaaatcaaatggtttggcacagtgatacaaaaatacctaagagtgatttaattgtacttcctggaggtttttcttatggtgattacctaagatgtggaagtattgctggaaaatcaagaataattaaatctgtaattgattttgctaactcaggaggattagttcttggaatttgcaatggttttcagattttaacagagacaggtctacttcctggaatactccaacaaaataaatacttaaactttatttgtaaaaatgtttttgtaaaaattaaaaataaagaaaataaatattttaagaaaattaaaaaagatgttttagaacttcacattgctcacaatgaaggaaattatttttgttcaaacgatgaattaaaattaatcgaggataacggtcaaattgcagttacttattgtgatcataaaggaaatgatgatgaaaataataacccaaacggtgccttaaaaaatatagctggtatatttaataaagacaaaaatattttaggaatgatgcctcatccagaaagaatgattgacccgtttctatcaggtgaagatggatcattattttttaaaaatttaattgaaagcatgtaat

SEQ ID NO: 318616 - DNA, 1144 bp, Unknown
  Bacterial polypeptide expressing nucleotide sequence isolated from the Sargasso Sea
tgggccgtggttttcaaggtcgaaagtcataatcatccctcggcaatcgaaccctatcagggtgccgctacgggagttggtggaatcctgagggacatttattccatgggagcaaggccggtcgcttttctcaattcattgcgtttcggacccttgtccgacaaaaaggattcaggctctccgaccagcaaacgaaaccaatacctttttggtggagtggtggcaggaatcgctggatacggcaactgtatcggagttccaactgttgcgggagaagtcgccttcgatgcatgttactccgggaatcccctagtgaacgcaatgtgtgtgggagtgatccggcatgaggacttgcagcatggccgagccgagggcatcggcaatcctgtgatttacgtgggtgctgctactggaagagatggaatccatggcgctacgttcgcgtccgaagaattgaatgatgagtccgaagcaaaacgtccttcagttcaggttggggatccgtttatggggaaattggtgctcgaagcctgcctcgaacttttccagtctggagcagtgatcagcgtccaggatatgggagcagcaggactcacctgttcaagtacggagatggcggaaaagggtgggaacggaatggaactcgatctggaccttgtgcctcaaagagccctggagatgtctccttacgaaatcatgctttccgaatcccaggagaggatgctgttggttgccaaagcaggaagagaagaggaggtttttgaaatttgcagaaaatgggaagtcccagcatgcaccattgggagggtgatcccggaaacggtcttgcgtctcaaacacaggggggcattggcggccgaattgcctttggatcgactgctgggatcctgcccgctatatcagcgcgatgcggttccttctgaaaagcagctttcgaggcagaagaaaaatgaagtgacctgggatgttccagatgatattggagcactcttcaaagagatgatcgttcagcctgagttggcctcgaaacgctgggtttaccgacaatacgactcgatggtaaggacctgcacttccgtagggcccggatcggatgcagccgtgatccgaatcgaaggaacgaacaaagcactggcaatgagca

SEQ ID NO: 318617 - DNA, 976 bp, Unknown
  Bacterial polypeptide expressing nucleotide sequence isolated from the Sargasso Sea
atgaacgaaaatttaatacttcagcacggcttaactttagatgaattcaagatcatcaaggactatttaaatagagacttaactatggaagagttaggaattttttcagcaatgtggaatgaacactgttgttataagacatcaaaaaaatggttaaaaaaacttcctacagaaaatgaaatagttattcaggggccaggtgaaaatgctggaataattgacatacaagataatgacggaattgcttttaaaattgaaagtcataaccaccctagttacatcgaaccttttaatggatctgcaactggtgttggaggaatactaagagatatttttacgatgggggcgagaccaatagctactcttgactcaattagatttggtttgatagaaagtgaaaaaacaaaatatttattaaacggtgtggttcatggaattggccactacggcaactgtataggaattcctaatattggtggtgagtgcgagtttgagtcaacttatggttttaataatttggttaatgctatggctgtaggtcatgttcaaaaagataaaattttttactcaaagcctaagtctattgggggtttaattgtttatattggttctaagactggaaaagatggaattcatggcgccagtatggcttcagatgttttttcagaagacgacgaggatgataaaagaccttcggtacaagtcggtgatccttttatggagaaacttttaatggaaggttgtttagaattaatgtcattaggattgatagagtctatgcaagatatgggagctgcaggaattacctcctcaagcgtagaaatggcttcgaagggtaatgtgggtgtattaattaatcttgataaagtcccattgagacaaccattaagcgcatatgagatacttctatctgaaaagcaagaaagaatgctggcagtcatagatgaaaaaaataatcttaaggtgaaagaaattc

SEQ ID NO: 318618 - DNA, 682 bp, Unknown
  Bacterial polypeptide expressing nucleotide sequence isolated from the Sargasso Sea
atgagttttaagtctgctgtcattacatttccgggatctaattgtgatagagacgctttatgttacttacaagatttaacaaaaggtgttgtttataatatttggcatgaggaagcatctttgccacaagttgatttggtaattttacctggaggttttagttttggtgactatttaagatcgggtgccatggcatcaaagagtaaaataatcaacgatgttataaaacatgcaaatgatgatagatatttattaggtatttgtaacggctttcaaattttaactgaaattgggctccttgaaggagccttgatacaaaacaaaaaccttaaatttttgggcaaaaactgttttgttaaaaaaaaatttaaaaataatttcaattcatccattaaagaagatcaagtgcttcaaatccctgtggcccacaatgagggaaatttttattgtgataatgaaactttaaaatcacttaaaaataatgaacaaattgcatttgaatactgcaaaggtgaattttcaaatagtgaagaaaatattaatggttcaatagaagctattgcgggcatcacaaacaaaaagaaaaatattcttggtatgatgcctcaccctgaaagagcttattctgactttcatccttcacaagatggtaaactaatcatagagtcattgatatcatgaa

SEQ ID NO: 318619 - DNA, 2169 bp, Unknown
  Bacterial polypeptide expressing nucleotide sequence isolated from the Sargasso Sea
aatgcttgttaatgaaaaaatagcaattgaacatggtttaaagtcagatgagtttaagaaaatatgcaaattattaaagagaacgcctaacattactgaactgggaatattttcggcaatgtggaatgaacattgttcatataaatcctcaagaattcacttaaaaaaattgcccacaaaaggtaagaaagttattcaaggtcccggagaaaacgcaggtataattgatgttgatgatggagatgcgatagttttcaaaattgaaagtcacaatcatccttcattcattgaaccctatcaaggcgcagctactggtgttggtggtattatgagagatgtttttacaatgggtgccagaccaatagctaatttgaattccattcactttggttcaactcaacataaaaaaacaaaaaatttattaagaggtgttgttcatggaattggtggctatggaaactgtatgggcgtgcctacagtgggaggtcaaacatcatttgatcgctcttataatggtaatattttggttaatgccatgactttaggtctggttaaaaaaaataaaatattttattcaaaagcagcaggtttgaataaacctgttatttatgtcggatcaaaaacagggcgcgatggaatacatggtgccagtatggcttcagcgagttttgatgacaaaatagaggaaaaaaaacctacagttcaagttggagatccttttactgaaaagttgcttttagaggcctgtttagagctaatgtcaggagactcaataattgcaattcaagacatgggtgcagcaggtcttacatcctctagtatagaaatggcttccaaaggaaatttaggaatagaaattgatttgaataaagttccctgcagggaaacaaaaatgacaccgtatgaaattatgctatctgaaagtcaagagaggatgttgataattcttgaaaatggaaaagaggaattagcaaaaaaaatttttgataaatggaatctagattttgctgtaattggaaaaacaacaaatacaaaaaatattgaattattttttgatgagaaacaggtagctaaaattcctgtaaacactttggttgaaaattctccaatgtatgatcgaaaatggaaaaaatcaaaattaccaaaaaaaattaaacatgataagtcaaaaatcaaaaatcttaagatcaaagaaacattaactaaattattatcgacccctaatatttgtagtaaagaatggatttggcaacagtatgatcatacggtaatgggtgatacaatacaaaaaccagggggtgactcgggcgtagtcaaaattcatggaactgagaaagctgtggcagcaacagtagacagctctgcaacatattgttgggcacatccattaacaggtggtaagcaagtcgtatgtgaaacttggaggaatttaatttctgttggagctaaaccgattgctatcacaaattgtttaaattttggaagcccagaaaaagaggaaaatatgggagaatttgtagagtgtgtacaaggtattggtgaagcatgtaaatatttagagtatcctgtcgtttctgggaatgtatccttttacaatcaaacaaaagaaattggaataaaacctactcctacgataggaggtgttgggttaatcaaaaactataaaaagatggtaacaatgaattttaaggaaatcgggaatcaagttttagtaataggaaaaactgaaggccatatcgatcaaagtttatttgctagagtaatattaaatgagaaaaatggtcctccccctgaagtaaatttatttaacgaaaaaaacaatggtgaaacattattaaatcttatagagaaaaattatataaaaagtgcacatgatatttcattaggtggaattttaaccgcaattagcaaaatgtgtattaagggagataaaggtattgaattaaaggttcctaaatctttaattaatgagactgaatatttttttgctgaagatcaaggaagatatatcattgaagtaagttctaaagatttaaaagatgttacaaaaattctagataaaaattcagttcattatgatcaaattggtaaaattatagataaagaattaattattagtaaaaagacgaaagtatcaattgacgaattaaaatcttataatactaattg

SEQ ID NO: 318620 - DNA, 796 bp, Unknown
  Bacterial polypeptide expressing nucleotide sequence isolated from the Sargasso Sea
atgaaaataactgaagaaataattttatcacatggtttaaatattgatgaatattcaaaaattaaaaatttgttaaaaagagatccaaattatcttgaacttggaatattttctgcgatgtggaacgagcattgctcttataaatcatcaaaaattcatcttaaaaaattacctacaaaaaataaaaacgtcattcaagggccaggtgaaaatgcaggtgtgattgatattggtgatgaagatgcagtcgtgtttaaaattgaaagtcataatcatccgtctttcattgagccatatcaaggtgccgccacaggcgttggaggtattttaagagatgtttttacaatgggtgcaagaccaatagctcttttaaactcaatacactttggagaccctagaaatgaaaaaaccaaaaatcttttaaatggagttgtatcgggtataggaggatatggaaattgtataggaattccaactgttgcaggagaaacaaaatttaacaaaacatataatgaaaatattttagttaatgcaatggcagttggtttagctaataagaaaaaaattttttactctaaagcaaaagggataaataaatctgtggtttacgttggatcaaaaacaggtcgcgatggaattcatggagcatctatggcatctgccgaatttgatgaaaatacagaagaaaaaaaaccaacagttcaggttggtgatccatttacagaaaaacttttaatggaagcttgtttggagttaatgaaagatgattcaataatttcaattcaagatatggggg

SEQ ID NO: 318621 - DNA, 676 bp, Unknown
  Bacterial polypeptide expressing nucleotide sequence isolated from the Sargasso Sea
aatggaagttaacgaacaaattgcgatagatcacggattaaaaattgaagagtacaaaaaaataaaagaacttctaaaaaggaatcctaatttaacggagctagcgatattttcagctatgtggaacgaacactgctcttacaaatcgtctcgtaaacatttgaagaatttatttactaaaggagaaaaggttattcagggacctggagaaaatgctggagttatagatataggtgatgaagacgcaattgtatttaaaattgaaagtcataaccatccctcatttattgaaccatatcaaggtgccgcaactggtgtaggtggaataatgagagatgtatttactatgggagcaaggcctatagcaaatctaaactcaattcattttggatcaacacaacataaaaaaacaaaaaatttattaagaggtgttgtaaaaggaattggtggatatggtaattgtattggagttcctaccatagcaggacaaacaaattttgacgactcttataatggaaatattttggtaaacgcaatgacattaggtttagtcaacaaaaataaaattttttactcaaaagcggcaggtttaaataagcctgtaatatatgttggatcaaaaacagggcgtgatggaattcatggtgcaagcatggcatcagcaatattgagacaa

SEQ ID NO: 318622 - DNA, 719 bp, Unknown
  Bacterial polypeptide expressing nucleotide sequence isolated from the Sargasso Sea
aatgacctcatccaattggcagtttgatacagaaaaatcacttgtagaaagtcacggtcttaagcttgaagagtttgaaaaaattgttgagggccttgggcgtgaaccaaatcttactgaacttggaatatttagtgcaatgtggaatgaacattgctcctataaatcatctaaatattggctaaaaaaattaccgacctcaggggaacgagttatccaaggaccaggtgaaaacgcaggtgttattgatattgatgatggagatgttgctgttttcaaaatggaaagtcataatcatccttcatttctagagccttaccaaggtgctgcaactggtgtaggtggtattttaagagatgtttttactatgggtgcaagacctgtagcaaatatgaatgcacttcgatttggagatcccaatcatccaaaaacaaagcatttagtctcaggcgttgtcggtggtatcggaggttatggaaattgtattggaattccaactgttggaggtgaagtaaactttcatccatcctacaacggcaatatattggttaatgctatgacggttggcatcgcaaaaaaagataaaattttctattcagcggctgcaggaataggaaatccagtagtgtatgttggttcaaaaacaggtagagatggtattcatggtgcaactatggcatcagcagaatttgacgatgactctgaagaaaaaaaaccca

SEQ ID NO: 318623 - DNA, 871 bp, Unknown
  Bacterial polypeptide expressing nucleotide sequence isolated from the Sargasso Sea
atggaagtaaatgaaaaaattgcagtagatcacggtttaaagctcgatgaatacaagaaaatttgtgatttgttaaagcgtgttccaaatttaacagaacttggaattttttcagcaatgtggaatgaacattgctcgtataaatcttcaagattacatttaaaaaaattaaacactaagggtaaaaaagtaattcaaggtccaggtgaaaatgctggtgtaattgatataggggatgacgatgcaatagtttttaaaattgaaagtcataatcatccctcatttatagaaccttatcaaggtgcagcaacaggagttggtggaataatgagagacgtttttacaatgggtgcaagaccaattgcaaacttaaattcaattcattttggctcaacacaacacaaaaaaactaaaaatttattaagaggtgttgttaagggaattggaggatatggaaattctattggagttccaactatagctggccaaacttgcttcgatcaatcttataatggaaatatcttggtaaatgcaatgacattaggtttggtaaataaaaacaaaattttttattcaaaagccgcagggataaacaaaccggttatatatgttggatcaaaaactgggagagatggtattcacggggcaagtatggcctcagcaatatttgatgacaaaatagaggaaaaaaaaccaacagttcaagttggagatccttttaccgaaaaacttcttttagaggcttgcttagaattgatgtctgacaaatctatcattgcaattcaagatatgggtgctgcaggtttaacttcttcaagcattgaaatggcatcaaaaggaaacttaggaattgaattaagtttagataaag

SEQ ID NO: 318624 - DNA, 664 bp, Unknown
  Bacterial polypeptide expressing nucleotide sequence isolated from the Sargasso Sea
aatgactacttttactgttggcattgttgtttttccaggttctaattgtgaccgtgatgttgcatgggctttggaagcttgtttagaaattaaaacaaaattcttatggcatgaatcatctgatttaaacgatattgactccattgttttgccaggaggatttagttatggtgattatttaagatgtggagcaatagcaagattttccccattaataaatgctttacatgattttgtaaaaagcggtagacgagtattaggtatatgtaatgggtttcagattttgactgaatcaggttttcttcctggagctctcacagcaaataaaaatcttaattttatttgtgaagatgttgatttgaatgtgataacttcaaaaggaggttggtttcaaaagttagataaaaaacaaactataaaattaccaattgctcatggagaaggacgttatcattgcgatcaagatactctaaaaagacttattgataatgatttaattgcactgaaatacacaaataatccaaatggttcaacctctgatatagcaggaataactaatgagaaaggaaatgttttaggattaatgcctcatcctgaacgagcatgcgataaatctattggtggaattgatggtctttatactttgaagtcattaattacataa

SEQ ID NO: 318625 - DNA, 1501 bp, Unknown
  Bacterial polypeptide expressing nucleotide sequence isolated from the Sargasso Sea
atgactttccaagaacatgaaaacttacacattaaaaaaaatgttaaacgggaattaacttccactgaatctcaaattcttgcagctgaatggtccgaacattgttcctacaaatcttcaaaacaacatcttaagatgttgcctactaccggcccaaaagttattgtagaaaaaggatatgattctggtgtcttagatgttggtgatggctatgttgtaactgttcacattgaaagtcataaccatccttctgcagtagagccctttggtggtgctgcaactggcgttggtggcgtcattcgtgatattttatctgcaggtacaagacctattgccctctttgatggtttacgatttggaaatatagaaactgattcacatgctagatggttattcaaaaatgcggttgcaggaattgcagactatggaaattgtcttggtattccaactattggtggcgaagttgaatttgatgaatgttacaaaaattatgctttagtagatgttgctgcagttggttttggaaaaaaatcaaaattaattaaaaatcatgcaaacattgatgatttagttattctcataggtggttctactggacgtgatggtgtaggtggttcacaatttgcctctgatgcattagaaggcgaagaccgttctgcagtacaaatccctgatccatttattgaaaaattaatcattgaagcaattctggaatgtcgggatgaaaattgtattaatgcaatgaaagatttaggtggtggaggtttgtcatgtgcaatctctgaaacagctgaaagtttaggaataggaatcgagttagatgttcaaaatgtacatttacgtgagtctgatttggcacctgaagaaataatgatatctgaatctcaagaacgtatgttgatcatatctagtcctgataatctttcaaaaattcaaagtatatgtgagaaatttagaattcaatgttctgttattggcaaagtaaaagaagataaaatgatgcatgttaaaaatggaaatgaaactcttgcattactccctgctgactttgtcgcacgtggtcctctgatatctcgggaaaaaacaaaaccaaaatacctttcaaatttacctactgctcctgaatcccaaaacaatctgtctcttgcagacgtattattgaaattgctttcttctccaaatattgctagtaaacattgggtatatcgtcaatatgatcatgaagttggaattagaactgtgattaaacctggatttgatagctcagttttacgtttggataatggaaagtcattatctgtaaagattgatggaaatcccaagcattgttacctaaatcccagacaaggtgcaattggttgttttgaagaagcatgtagaaacgttgtttgtactggtgcaactccaattggaatggttgaccatttacaatttggaaatcctgaagaccctgaaatattttggacatttatggaatccattgaaggaataacagatattg

SEQ ID NO: 318626 - DNA, 1744 bp, Unknown
  Bacterial polypeptide expressing nucleotide sequence isolated from the Sargasso Sea
aagacccattgcgaatttaaattctattcattttggttcaccacaacatccaaaaacaaaaaatttattaagaggtgtggttaagggcataggtggttatggaaattgcatgggtattccgacaattggtggtcaaacaagctttgatgagtcttataatggaaatattttagttaatgcaatgactttaggcttagtgaataaaaataaaattttttattcaaaagctgcaggcatagacaaaccagtaatttatgtagggtcaaaaactggtcgtgatggaattcatggtgctagtatggcttcagcaatttttgatgaaaaaatagaagaaaaaaaaccaacagttcaagttggcgatccttttacggaaaaactattattagaggcatgtttagaattaatggcaggtaaatcaattatatctattcaagacatgggtgcagcaggattgacttcttctagtattgaaatggcatcaaaaggtaatttaggtattgaattaaacttgaataaagttccatgtcgagaagaaaaaatgacaccttatgaaattatgctctctgaaagccaagaaagaatgttgattgttctagagaaaggcaaagaagcggaagcaaaaaagatttttgataaatggaatttagattttgctataataggaaaaactactgactcaaagaaaatagaattgttttttgataataacaaagtagcagaaattcccatcaatatactggcagaaaatgctcctgtttatgatagaaaatggaaaaaaacaaaacttccacaaaaaataaaatttaataaagatgattttaaaaaattaaagattaccgaagttctaaaaaaaatcttagctttgccaaatatttcaagtaaagaatggatctgggagcagtatgatcatacagttatgggagatacaattcaaaagcctggctctgatgctggtgtagttagagttcatggtactaataaagcagtagcaacctcggtagattcttctgctatttattgttatgcgcaccctttaactggtggaaagcaagtagtttgtgaaagctggaggaatttaatttcatgtggatctaaaccaattgctattactaactgtttaaattttggtaatcctgagaaagaaaaaaatatgggtgaatttgttgaatgtgttgaaggtattaatgaagcaagcaaatttttagattatcctgtggtttcaggaaatgtttctttttataatgaaacaaaagataaaggaattaaacctactccggccattggtggtgttggtttaattaaagattacaaaaaaattgttacaatggacttgaaaagtaatgataatttaattctagttgttggcaaaactgaaggtcatatagatcaaagtatatttgctataaatattttaaatgaaaaaaaagggcctccaccagtagtcaatttatttaatgaaaaaaataatggtgaaactattttaaagttaatcaaagaaggtttgattagatctgctcacgatatatcattaggaggaattattactgcaatttctaaaatggcaatcaaaggtaaaaaaggctttaaacttaacaaacttaaggttttaatgaataaatttgattattattatggcgaagaccagggtagatatataattgaaattgacccccataatcttttaaaagtacaaaaaattttaaaggataactcggttcattatgatgaagttggaattgtaact

SEQ ID NO: 318627 - DNA, 1483 bp, Unknown
  Bacterial polypeptide expressing nucleotide sequence isolated from the Sargasso Sea
atgaatgaagttaacgaacaaattgcaattgatcatggtttaaaaaaagaagaatttagtaaaatctgtgatctattaaaaagaatgccaaaccttacggagcttggaattttttcagcgatgtggaatgaacattgttcatacaaatcatcaagacttcacttaaaaaaacttaacactaaaggtaaaaaagtaattcaaggaccaggagaaaacgcaggagtcatagacattgacgatgatgatgcaattgtttttaaaattgaaagtcataatcacccttcttttatagagccttatcaaggtgcagcgactggtgttggtggaataatgagagatgtttttacaatgggtgcaagacctatcgcaaatttaaattctattcattttggatcaccacaacatcccaaaacaaaaaatttattaagaggtgtggttaaaggtataggtggatatggaaactgcatgggtattccgactgtaggaggtcaaacaacttttgatgaatcgtataacggaaatattttggttaatgcaatgactttgggattggtaaataagaataaaattttttattcaaaagctacaggaattaataaaccagtaatatatgtagggtcaaaaacaggtcgcgatggaattcatggtgcaagtatggcttcagcaatttttgatgaaaaaattgaagaaaaaaaaccaactgtgcaagttggagatccttttacagaaaaattattattagaagcatgtttagaattaatgagcggaaaatcaattatatctattcaagatatgggtgcggctggtttaacatcctctagtattgaaatggcatcgaaaggtaatctaggcatagagttaaatttaaacaaagtaccatgtcgtgaagaaaaaatgacaccttatgaaattatgctctctgaaagtcaagaacgaatgttaattgttttagaaagtggaaaagaagaagaggcaaaaaagatttttgataaatggaatttagattttgcgataattggaaaaacaactgatacaaaaaaaattgaacttttttttgataatagcaaagtagcagaaattcctataaatattttagctgaaaatgcaccagtttatgatcgaaaatggaaaaaaacaaagctgccgcaaaaaataaaatttaacaaagatgattttaaaaaattaaaaattacagaggttcttaaaaaaatactagccctacctaatatttctagcaaagaatggatatggcaacagtatgatcatactgttatgggagatacaattctgaaaccaggttctgattctggagtagtgagagtccatggaaccaataaagctgtagcaacatctgtagattcttctgctgtttattgttacgcgcacccactcactgggggaaaacaaatagtctgtgaaagctggagaaatttaatctcatgtggatcaaaaccaattgctattactaattgtttaaactttg

SEQ ID NO: 318628 - DNA, 925 bp, Unknown
  Bacterial polypeptide expressing nucleotide sequence isolated from the Sargasso Sea
atgattgtaaacgaacaagtagcagttgatcacggtttaaagaaagatgaatatgctaaaatttgtgagctactcaaaagaactcctaatattacggaactagggattttttctgcaatgtggaatgaacattgttcttataaatcatcaagattacatttaaaaaaactacctactaaaggaaaaaaagttattcaaggtcctggagaaaatgctggtgttatcgatattgaagatgatgatgccatagtatttaaaatagaaagccacaatcacccatcatttattgaaccgtatcaaggcgctgctactggtgttggaggaataatgagagatgtttttacaatgggtgcaagaccaatagctaacttaaactcaatacattttggatcaccgcaacataaaaaaacaaaaaatttattaagaggtgttgtgcatggcataggtggttatgggaactgtatgggtgttcctacaattgctgggcaaacaagttttgatagctcctataatggaaatattttagttaatgcaatgacattgggcttagtcaaaaaggataagattttttactctaaagctgcaggcttaaataaaccagtaatttatgttgggtctaaaactggaagagatggaattcatggtgcaagtatggcttcagctagtttcgatgaaaaaattgaggaaaaaaagccaacagttcaagttggagacccatttactgaaaaacttttacttgaagcttgtttggagttaatggctggagattctattatagctatacaggacatgggtgctgccggattaacttcttcaagtattgaaatggcttcgaaaggaaaccttggaatagaaattaacttaaataaagtaccttgtagagaagccaaaatgaccccgtatgagataatgctctcagatagcc

SEQ ID NO: 318629 - DNA, 1148 bp, Unknown
  Bacterial polypeptide expressing nucleotide sequence isolated from the Sargasso Sea
tgccgaacatggcttatcgcaggctgagtacggcaaagtcctggagatcatggggcgcgagccgaacataacggaactcggtattttctccgtcatgtggtcggagcattgctcctataaatcgtccaagtactggctgaaaacgctgccgacagaggcgccgtgggtgatttgcggcccaggcgagaacgcgggtatcatagacatcggcgacggccaggccgttgtgtttaaaatggaaagccacaaccacccctcctacatcgagccctatcaaggcgcggcaacgggcgtggggggcatccttcgcgacgtcttcaccatgggcgcgcgtcccatagctaatatgaattccctgcgcttcggtcatcccgaccacccaaagaccaaacatctggtcgacggcgtcgtcgcgggcattggcggctatggaaactgtgtcggcgtccccaccgtcggcggcgaatgcaccttccatgccgcctacgatgggaacatccttgtcaatgccatgaccgtcggcgtcgcggacacagacaaaatcttctattccgccgccacgggcgcaggtaatccagtgatttatgtgggatccaagaccggacgcgacggcatccacggtgcaaccatggcgtcggccgaattcacagaggattccgaagagaagcgccccaccgtccaggtcggtgatccgttcacggagaagcttctgatcgaagcctgcctggaactcatgcaaacggactgcatcgtcggcatccaggacatgggcgcggcagggctgacctcgtcgagctttgagatggcgtcgagggggggcatgggggtctcgctcaacctcgacaacgtgccccagcgcgaagagaatatgacagcttacgaaatgatgctatcggaaagccaggagcgcatgctcatggtcctgaagcccggttcagaggatcaagcccgcgccatcttcgagaagtgggaacttgattttgctgtcatcggcaccctcacggacactggccgcatggtgcttatgcatcatggcgagaaggtcgctgacctgcccatcgacccgctggcgctggcgtcgcccgaatatgatgagaaagaccgcccctggataccgacaccaaagcctgccagcatcgatgccaaaa

SEQ ID NO: 318630 - DNA, 976 bp, Unknown
  Bacterial polypeptide expressing nucleotide sequence isolated from the Sargasso Sea
tttgtcagaagttgctagcaaattagggctaggattacttcccgatgaaatggaaaaagtaaaatcctattttgagagtgaaaaacgaaaaccaaccgatgttgaacttcaggcaatcgatcaggcatggtctgaacattgctgctataaatcttcaaaacctgttttagaagaaaccgtatttggtcttaaatcgagtaaaaaagtaattgcaagagaagatgcaggaataatggaatttgatgataagcactactatgcagttggattagaatcacacaatcacccgtctgcattggacccatatggcggttctgccaccggaatcggaggaattctaagagatgtagtatgtatgggggctcagccaatcgctctagttgatccattattttttggaaacttagatactccacgtgaagccttagccgaaggagtaaagcaccctagatatttgatggggggtgttgttgcaggaatacgagattatggaaatcgagtaggaattcctacagtagcaggacaagttgcttttcatccgaaatatactggaaatcctctcgtaaatgttggatgtgtgggtatagtcgaaaaagaattaatgattcatagtaaagctggtgacgtaggtgatatttacatattggctggaggtcgaactggcagagatggaattcacggtgtaaccttcgcttccagagatttagatgctggatctgatgatgatcttggagcagtacaattaggagatccgataaccaaagagcctctgatgcacctatgtttagaattgaatgaaatgggaatattaactggaatgaaagatttaggtggtggtggtttatcttgtgtggtaggtgaattagcactagatgggggatttggtgctagagtcgatttggaaaaagtgcatctaaaagttgaaaatatgcctccatgggaaatatgggtatctgaatctcaggaaagaatgatg

SEQ ID NO: 318631 - DNA, 850 bp, Unknown
  Bacterial polypeptide expressing nucleotide sequence isolated from the Sargasso Sea
aatgattgtaaacgaaaaagtagctgttgatcatggtttaaagaaagacgaatacgtcaaaatttgcaaactattaaaaagaactcctaatattacagaactaggaattttttctgcaatgtggaatgaacattgttcttataaatcatcaagattacacttaaagaagctgcctacaaaaggaaagaaagttattcaaggtcctggggaaaatgcaggtgttatagatattgaagataacgatgcaattgtttttaaaatagagagtcacaatcatccttctttcattgaaccatatcagggtgcagcaacaggagttggaggaataatgcgcgatgtatttacaatgggtgcaagaccaatagctaatttgaactcaatacattttggatcaccacaacataaaaaaactaaaaatttattaagaggtgttgttcatggcattgggggttatggaaattgtatgggcgttcctacaattgctggacaaacaagttttgatagttcgtataacggaaatattttggttaatgctatgactttagggttagtcaaaaaaaataaaattttctactctaaagcagcaggaataaacaaaccggttatttatgtgggatctaaaacaggaagagatggaattcatggagcaagtatggcctcagctagttttgatgaaaaaattgaagaaaaaaaaccaactgttcaagttggagatccatttactgaaaaactattacttgaagcttgtttggagttaatgggtggagactcaattatagctattcaagacatgggtgctgctggtctaacgtcctcaagtattgaaatggcatcaaaaggaaatcttgga

SEQ ID NO: 318632 - DNA, 685 bp, Unknown
  Bacterial polypeptide expressing nucleotide sequence isolated from the Sargasso Sea
aatgaattcatctgtaattatatttcctggatctaattgtgatagagatatggctgtagcattaaagaaattcggatttaaaaataaaatggtttggcatgatgatgttgaattaccaaaaagtgatttagttgttttgcctggtggtttctcttatggtgattaccttagatgcggtagcatggcttctaaatcaaaaataattcaatccataattagttattctaagtcaggtggtcttttaattggaatatgtaatggttttcaaatcttaacagaaacagaattattaccaggcgcattgttaagaaataaatactcagaatttatttgtaaaaatgtatttgtaaaaattaatagtgtagaaaataattatttcaaaaatttaaaaaaaaatactttaaaattacatattgcgcataatgaaggtaattatttttgttcaaatgaacaaattaatgaaatagaaaacaatgagcaaatagcattatcttattgtaatgaaaaaggtgaaatagatactaaatataatccaaatggatcaattaaaaacatagctggtttattaaacaaagaaaaaaatatattaggtatgatgccacatcctgaaagaatgatagattcttacctatctggtgaagatggttcaatattttttgaaaatttaattaataatttaaaataa

SEQ ID NO: 318633 - DNA, 1090 bp, Unknown
  Bacterial polypeptide expressing nucleotide sequence isolated from the Sargasso Sea
agaaatctattaagaggagtggttaaaggtattggtggatatggcaattgtataggagtaccaaccatagctggacaaacatcttttgatgaatcatataacgggaatattttagtcaatgcaatgactttaggtctggtaaataaaaataaaattttttattcaaaagctgcaggtattaataagcccgtcatatatgtaggttctaaaacaggaagagatggcatacatggagcaagcatggcatccgcgactttcgatgataaaattgaagaaaaaaaaccaacagtgcaagttggagatccatttaccgaaaaattattattagaagcttgtctagaattaatgtcagataaatcaattattgcaattcaagatatgggtgccgctggcttaacatcatctagcgttgaaatggcttcaaaaggaaatttaggaattgagctagatttaagtaaagttccctgtagagaagaaaaaatgacgccttacgaaataatgctttctgaaagtcaagaaagaatgttaatcgttttagaaaatgggaaagaagattatgcaaaaaaaatatttgaaaaatggaatttagattttgcaataattggaaaaacaacagattcaaaaaaaattgaaataaaatttaataatgagaaagttgctcaaattccaattaatttattagcagaaaatgcaccagtttatgatagaaaatggaaaaaaactaaacttcctcaaaaattaaaattaaataaagatgaatttaaatcaataaatttatcagattgtctaaaaaagattttagctaatccaaatatatctgaaaaaaaatggatatgggaccaatacgatcatactgttatgggagatacaattcaaaaacctggtggtgacgcaggcgttataagaattcatggaacaaaaaaagctatagcagcttcagtggattcatcagcgtcctattgttattcacatccattaactggtggaaaacaaattgtttgcgaaagttggagaaatttaatctctgtcggcgctaaaccaattgatataactaactgtcttaactttggtaatcctgaaaaagaaaaaa

SEQ ID NO: 318634 - DNA, 1690 bp, Unknown
  Bacterial polypeptide expressing nucleotide sequence isolated from the Sargasso Sea
tttggtagaaaatcatggtcttaaaattgatgaatttgagagaattgttgaaggtcttggaagagagcccaaccttactgaacttggaattttcagtgcaatgtggaatgagcattgctcatacaagtcttctaaattctggcttaaaaaattacctacatctggcgaacgtgtcgttcaaggacctggtgaaaatgcaggggtaattgatattgatgatggagatgtagcagtatttaaaatggaaagtcacaatcatccatcctttcttgaaccatatcaaggagcagctactggggttggaggaatacttagggatgttttcacaatgggtgctcgtccagtagccaatttaaatgcgttaagatttggagagccagagcatcctaaaacaaaacatttactatcaggtgttgtgagtggtattgggggatacggcaattgtattggcgtgccaaccgttggtggtgaggttaattttcatccctcatacaatggtaatattctagttaatgcaatgactgttgggatagcaaaaaaagataagatcttttattctgctgctgctggaataggaaatcctgtcgtttacgttggatctaaaactggtagggatggaatacatggcgcaacaatggcttcggctgaattcgatgaagactctgaagataagaagcctacagttcaagttggagatccttttacagaaaaacttttgcttgaagcttgtttagagttaatgaaagaggaagcaattattgctattcaagatatgggtgcagcaggcttaacttcatcatcaatagagatggcatctaaaggaaacgtaggaatagacattaatctatcaaaagttcctatgcgagctctgaatatgacagcttatgaactaatgctttccgaaagccaggagcgaatgttgatggttatagatccttcaaaagaaaaaatggcacgtgagatttttaaaaaatgggatcttgaatttgaggtaattggtgaagttacaaatactaaaaaccttgtattacatatgaatggaaatgaagaagcaagtatcccaattaatatcttagttgaggatgcaccagaatatcaaagggaatatatagttagcaaaccatcgccaccagtgatttttaatcccaatgaatttgatgataaaaaaatattagatgaattaattttgatggttagtcatccaaatttatgtagtcgcaaatggatatgggaacagtacgaccacatggtaatggctgacacagtcgtaaggcctggatcagatgcggcagtagttagagttcatgggaccaataaaggaattgctataagtactgattgctctccaacatactgtaagcataattcatttgagggaggaaaacatgcagtagtcgaaacatggagaaatcttatagcttcaggagctatgccaattgctattaccgactgtatgaattttggtaatcccgaaaagccagaaataatgggtcagtttgttgaatgtattcgaggcatgggagaagcatgctctaaactaaaatacccagttatttctggaaatgtatctttatacaatgaaacaaatggagtgggcatttatccaactcctgtgattggcggtgttggactaattagggatttatctaagactatgactattgatttcaaatctgaaggtaatattgta

SEQ ID NO: 318635 - DNA, 1300 bp, Unknown
  Bacterial polypeptide expressing nucleotide sequence isolated from the Sargasso Sea
gaatcacaagaaagaatgcttgtagtggtgcataaaggaaaagaagatgttgttaaaaaaatatttgataaatgggatttgcacgcagaagaaattggagtagttactgaggggggacgcgttaggtattttgaaaatggcgttatggtgtctgatcttccagcagaatcgcttgttcttggaggaggtgcgccccaatacgaaagggaatattcagaaccagcttattatgagcgatacaaatcttttgatataaaccatgtttcacaacctgcagatttaaaaaaaatagcctttgatttacttaaagaacctaatattgcttcaaaaaaatgggtttataatcaatacgattcaatggttggaacttgtaacatgacaaccaacagaccttctgatgcgggtattgctcttataaaaggatcgaataaagcgttatctatgagtgtggattgtaattcgagatacgttcatgctgacccagaaataggtacgatgattgctgtggctgaagcagcaagaaacattacttgttctggtggggaaccaagtgccgttacaaattgtcttaattttggaaacccatataatccagaatcctactggcaatttgttggtgcgataaaaggaatgtctgctgcatgtcttaaatttaatactccagtaaccggtggcaatgtttctttttacaaccaaaccgttattgataaaaaagaagaaccagtataccctactcctactattggtatgataggcatcttagaagacaagaacaaaatcatgacactagactttaaaacgaaaggggatttaatttttgtaattggaaattgcacaaatgacattgcctcttcggaatacctatcttcaatattaggaattaaagagtctcctgcgccatattttaacttggaagaagagtataacacccatcaaaccatcaaatatttaatttctaataactttattaatgctgctcatgatgtttcagatgggggattatttactaccttggtagaaatgtcttttccaagagaattaggctttgatattgaaaccgattctgaaattagagaagatgcatttttatttggagaaggtcaaggaagaattgtcgttactgttaatgaagacaccgaagaagaatttattgaatatttagcaaattcaaatcaaaaattcacgcttcttggccatgttaccaaaggaaaaatacaaattgatggacaacattacggcttcattaacgaagcaaaagatatatatgataatgccattcatcaaatgatagaaaactaaa

SEQ ID NO: 318636 - DNA, 1363 bp, Unknown
  Bacterial polypeptide expressing nucleotide sequence isolated from the Sargasso Sea
gcaagttttgcaagttcagaattaacttcctcttcattagatgatagaccagcagtgcaagttggtgatccatttattgaaaaaagtctgatagaagcttgtttagatgcttttaaaacaggagatgtaattgcagctcaagatatgggagcagcagggttaacatgtagtagtgcagaaatggctgctaatggaaatttaggaatatctattgatttagatttggtgccatctagagaggagaatatgtctgcgtaccattatttactatctgaatcgcaagagaggatgttatttgttgtgaaggaagaaaggcgtgaaaatctaatagaaaaatttaataaatggggattatttgcaaatgtaattggtgaagtaatagaggctaatgaggtaattatttctcataaaagcaaaattgttgctcaaattcctacttctgctttatctgatgatactcctgtaaattttcataatgagattaataatccacctgagaacttgctaaggaaatgggaatggacagaaaataatttaccagaaattaatgagcttaaaatattttcattgaaggaaaataagagtttttcttattcaaaaattattttaaaacttttgtctaatccttcaatagcttctaaaaggtggatttataaacaatatgattcccaagtccaagcaaatacagtctttaagcctggaaaatcagatgcggctgtaataagactaagagatcaaaatgaaaaaaacaaagataaagtgttttctggtgtagccgcttcggttgattgtaatagtaggtgggttgctctcgatccttatagaggatctatcgctgcagttgcagaatcttcaagaaatgttagttgtgttggggccgagccactagcaattacaaataatttaaatttttcttctcctaataatgacactggatattggcaactttcatcttcatgtaagggaatttccgaagcttgcaaagttttagaaacacctgttactggaggaaatgtttctttatacaatgaatcaataaatacagataataaaattactcctattaatcctactccagtcattgggatggttggaaaaatagataatgttgaacaagctattagtagtgaatggaaaaacattaatgatcaaatctggttgattggctcttctaaatcagaaataacaatttcagctagttcttatttagaatatttccatggtgaaattacaggtcggcctccaaaaatagatttgcttgatgaaaagtattgtcaaagttttttaagaaatgcgattttcaatagttttgtagtttcttctcacgatatcagtgatggtggtttagctatagcttttggct

SEQ ID NO: 318637 - DNA, 611 bp, Unknown
  Bacterial polypeptide expressing nucleotide sequence isolated from the Sargasso Sea
gggtttgaaatcaaatgggtttggcacaacggatgctgaaattcccaaaagtgatttaattgtacttcctggaggtttttcttatggtgattatctaagatgtgggagtatagctggtaaatcaagaataataaaatctgtaattgattttgcaaattctggaggattagtacttggtatctgtaatggttttcaaatactcactgagacaggtttattacctggaatacttcagcaaaataaatacttaaactttatttgcaaaaatgtttttgtcaaaattaaaaataaagaaaataaatattttaaaaaaattaaaaaagaagttttagaactgcatattgctcacaacgaaggaaattatttttgctcaaacgatgagttaaaatctatagaagataatggtcaaatagcggttacctattgtgatcataaaggaaatgaggatgaaatgaataatcctaatggagctttaaaaaatatagctggaatatttaataaagagaaaaatattttaggaatgatgcctcatccagaaagaatgattgatccttttctgtcaggtgaagatggatcactattttttgaaaatttaattgaaagcttataat

SEQ ID NO: 318638 - DNA, 1006 bp, Unknown
  Bacterial polypeptide expressing nucleotide sequence isolated from the Sargasso Sea
aatgaaagtaaataaagcagtggcattagatcatggcttaaatgaagaagaattttcaaaaatctgtgaattattaaaaagaacgcctaacataactgaattagcaattttttctgcaatgtggaatgaacattgctcttacaaatcatctagaaagcatttaaaaaaacttcacacaaaaggaaaacaggtaattcaaggtcctggtgaaaatgcaggaataattgacattggcgatgatgaagcaattgtttttaaaattgaaagtcataatcatccgtcttttatagagccttatcaaggtgctgcaactggggtaggtggaataatgagagatgtttttacaatgggtgcaagacctattgcaaatcttaattcaattcactttggatcgccacaacataaaaaaactagaaatttattaagaggagttgtcaagggaattgggggttatggaaattgtataggtgttccaacaattgcagggcaaacatcttttgatgaatcttacaatggaaatattttagtaaatgcaatgacattgggcttggttaataaaaacaaaatattttactcaaaagcggctggaataaataaaccagtaatctatgtaggttcaaaaacaggtagagatggaattcatggtgcaagcatggcttccgcaacatttgatgacaaagttgaagagaaaaaaccaactgtacaagtcggagatccatttacagaaaagctactattagaagcttgtttagaattaatggttgataaatcaataattgctattcaagatatgggtgctgctggattaacctcttcaagtattgaaatggcatcaaaagggaaactgggaatagaattagatttaaacaaagtgccatgcagagaagaaaaaatgtctccatacgaaattatgctttcggaaagtcaagaaagaatgttgattgtattagaaaaagggaaagaaaatcatgctaaaaaaatttttgataagtggaatttagatttg

SEQ ID NO: 318639 - DNA, 1222 bp, Unknown
  Bacterial polypeptide expressing nucleotide sequence isolated from the Sargasso Sea
ggatatggaaattgtattggtgtcccaaccatagcaggtcaaacttgttttgatgaatcttacaatggtaatattttggttaatgctatgacacttgggttggtaaaaaaaaataaaattttttattcaaaagcagctggtttgaataaacctgttatttatgttggttcaaaaacaggaagagatggtatccatggagctagtatggcctctgcaatttttgatgataaaattgaagagaagaagcccactgtgcaagtaggtgatccttttactgaaaaacttttactggaagcttgcttagagttaatggcaggagactctattatatctatacaggatatgggtgcagctggccttacatcttctagtatagaaatggcctcaaaaggtaaattaggtattgaactcaatttaaataaagttccatgtagagaaactaaaatgactccttatgagattatgttgtcagaaagtcaagaaaggatgctaatagtattagaaaatggaaaagagcaattagcgaaaaaaatttttgataaatggaatcttgattttgctgttattggcaaaacaacagattctaaaaaaattgaattatattttgataatgaaaaagttgccgatataccagttaatacattagtagaaaattctccaatgtacgatagaaagtggaaaaagagtaaacttccaaaaaaaactaaaatagaaaaagataaatttaaaaatttaaaaattactagcgtattaagtaaaattttatctaatccaaacatttgtaacaaaagttggatatggcaacaatatgatcatacggtaatgggtgataccatacaaaagcctggtggtgatgccggtgttgtaagaatccatggaacaaataaagctgttgcagcatcagtagactcttcagcagtatactgttgggctcacccattgactggtggcaaacaaatagtctgtgaaagctggagaaatttagtttcggtaggcgctaaaccaattgcaataacaaactgtttaaattttggaaatccagaaaaagatgaaaacatgggagaatttgtagagtgtgttcaaggcttaggtgaagcaagtcgatatcttgatttccctgtagtttctggaaatgtatcattttataacgaaactaaagataatggaataaaaccaacgccctcaattggaggagttggattaatcaaagactataaaaaaa

SEQ ID NO: 318640 - DNA, 685 bp, Unknown
  Bacterial polypeptide expressing nucleotide sequence isolated from the Sargasso Sea
atgaaatcatcagttattacttttcctggttcaaattgtgatagagacatggatgtcgctttgaagaagtttggatttaaaaataaaatggtttggcacgctgatgctgaattaccaaaaagtgatttggttgtattgccaggtggtttttcatatggggactacttaagatgtgggagtatggcatctaaatcaaaaataatgcagtcggtaattaattttgcaaattcaggaggtatggttatgggtatctgtaatggatttcaaatattggtagaaactggtttagttccaggtgttttgcttagaaacaaatatttagaatttatttgtaaaaacgtttttgtaaaaattaacgataaaaaaaataaatattttaaaaatgttgataacgaagttttagaatttcatatagctcataatgaaggaaattatttttgtaccaatgatcaattaaaagaaattgaagataataatcaaatagccattaattattgtgatgaaaatggtaaaatagaagatcaatttaatcctaatggatccataaaaaatattgctggtatatttaataaagaaaaaaatgttctagggatgatgccccaccctgaaagaatgattgatacatcattatctggtgaggatggatcattattttttaaaaatttaataaataacttaaaatgat

SEQ ID NO: 318641 - DNA, 457 bp, Unknown
  Bacterial polypeptide expressing nucleotide sequence isolated from the Sargasso Sea
aatgataaatcaagaaaataatgatctatacgatcttaatgaagcactacaagttgaaaatttaacactcaaagattacgaagaaatttgcgaaagattaaagagaaaacctaacagaacggagttaggcatgtttggcgttatgtggtctgaacattgttgttatagaaattcaaaacctttactatctaagtttcccactaaaggtaaaaatgttttagttggacccggagaaaatgctggcgttattgatgttggaaataatcaaaaacttgtttttaaaatagaaagtcataatcatccttctgctattgaaccttttcaaggcgcagcaacaggtgtaggaggaattttaagagatatattcacaatgggtgctaggccaatcgcagtcttgaattcattgagattcggcaaccttgataaatcatcaaatgttgatttactacgaggagtt

SEQ ID NO: 318642 - DNA, 667 bp, Unknown
  Bacterial polypeptide expressing nucleotide sequence isolated from the Sargasso Sea
aatgaagtcatctgtaataacttttcctggctcaaattgtgatagagatatggatgttgcactgaggaaatttgggtttaacaacaagatggtttggcatgatgataatgaactccctaaaagtgatttggtagtacttccaggtggtttttcctatggagattatttacgatgtggaagtatggcttcaaagtctaggataatgcaatcagttataaattttgcaaaatcagggggattagtcatgggaatttgtaatggatttcaaatactggttgaaacaggtttagtaccaggagttttgttaagaaataaatatttggagtttatatgtaaaaatgtcttcgtgaaattggacaataaagaaaatgcatattttaaaaatcttaataaagatattttagaatttcatattgctcataatgaaggaaattatttttgtaccaaagatcaattgaaagaaattaaggataataatcaaatagcaatttattattgtaataaagaaggcaagatagaagaccaatataatccaaatggttcagttaaaaatattgcaggtatttttaataaagaaaaaaatgtattaggaatgatgccccatcctgagagaatgatagaccaaagtctatctggggaagatggctcaatttttttcaaaaacctt

SEQ ID NO: 318643 - DNA, 1306 bp, Unknown
  Bacterial polypeptide expressing nucleotide sequence isolated from the Sargasso Sea
atggcgtcggccgaatttgatgaaaattcagaagaaaaaaaacctacagttcaagttggagatccttttacagaaaaattacttttagaggcttgcttagaattaatgagggataactcaattatatctatacaagatatgggagcagcaggtctaacatcttcaagtattgaaatggcctctaaaggtaagcttggaatagagttaaacttaaataaaattccatgccgtgaaaataatatgacaccttacgaaatgatgttgtctgagagtcaagagagaatgttaattatacttgacgatgaaaaagaggaagaagcaaaaaaaatatttgataaatgggacttagacttcgttgtaattggaaaaacaactgacactaaaagattaatattaaactttgatgataaaaaagttgctgatattcctattgaggcactggcagaaaaagctccgttgtatgaacgaaaatggacaaaatcaaaatcatcaaaaaataaagtaaaaataaaagatttaaaaaaaattaaaatcgaagatgctttagttaagatactttcttcgccaaatcattcaaataaaagctggattactgatcaatatgatcaagtagttatgtgtgatactgttcaaaaatctggtggggatgctgctgtagtaagaatccataacaaaaataaagctgtagcaatatcagtcgactcatctgcaaattattgtaacgtagatcctaaaacaggtggcaaacaaattgtttgtgaaaattggagaaatttaatatctgtaggagctaaaccgttagctataactaattgtttgaattttggaagtccagagaaaccaaaagttatgggagaatttgtaggatgtattgagggaatgaaagaggcttgcgaatatttaaattttccagttgtgtctggtaacgtctctttttacaacgaaacaaattctaaaagtatttttccaactcctgtaattgggggtatagggctaatagaaaatttaaataaaattataaatattaaaataaaaaaaactggtaatttagtcatggccataggaaaaacacttggccatattgatcaaagtgctttcttacaagaaaacttctccatagataatggtcccccaccagaaataaacttagttaatgaaaaaaataatggtttggctacattacgattgataaaagaaaatttggttatttcagcacacgatatctcttctggaggtatgcttgtttctttggcagaaatgtctatttcatcgggcttggggttaaaaatatttaaacccaaaaaaa

SEQ ID NO: 318644 - DNA, 1027 bp, Unknown
  Bacterial polypeptide expressing nucleotide sequence isolated from the Sargasso Sea
ttgtttggtatattaggacatataaatttttcgtcaaaacaatggatatatgaacaatttgatagttcagtaatgggagatactattcaaacaattgataatagtgatgcttcaatagtaaaagtacataattctcaaaaaaccaatcatcctggtaaggggatagcaatttccacagattgcacttctagatttgttttaaataatcctgaggtaggtggaatgcttgcggtcattgaagcagcaagaaatcttgcttgttcaggtgcaaaaccattagcagttaccaataatttaaattttggcaatcctgaaaaacctgaaataatgggacaaattgtagcatctatagagggtatcaaaaaaagctgtaattatttaaatacacctgtagtttctggtaacgtctcattatataatgagactaatggaaaaagcatccttcctacaccaatcattggaatgattggaattattgataatattgataatgtaattgaaaataatgcaaaagaaaaaaatactttgttgattataggtcaaaatgaaaaaaaagatgatggatggttaggatgcagcttatatcaagaaatttttcatgacaaaattgatggaaaagtcccagatgtaaatatcattaaagaaaaagaaataattgattttttacttgatctaaatctacagggattaatagaaggagcgcatgatatttctgatggtgggctccttccatgtatagttgaaatgctttttaaaaataatttaggaataaatataaatctgcctaaaattcttgaaaaacttaataatgaatatatttacaagttacatggatggtgtttcggagaggatcaaggcagaatagtaattgccactaataaacctcataaaatttttgagttaggtaaaaaaagaaaaatagatttattaaatctaggaaaaactaataaaagcggttttataaatttaggaaaatatgatagattttcaataaaagagtgttataatatatataataatgctttac

SEQ ID NO: 318645 - DNA, 2194 bp, Unknown
  Bacterial polypeptide expressing nucleotide sequence isolated from the Sargasso Sea
aatggaagttaatttacaaaatgcagttgaccatggtttaaacaaagatgagtttaataaaatttgtgatctattaaaaagaactccaaacttaactgagcttgggattttttcagcgatgtggaatgaacactgttcatataaatcatcaaagattcatctaaaaaaacttaatacaaaaggtaaaaaagtaattcaaggacccggtgaaaatgctggtataatcgatatagaagatgacgatgcaatagtttttaaaattgaaagtcataatcatccatcttttattgaaccttaccaaggagctgcaactggggttggtggtataatgagagatgtttttacgatgggagcaagaccaattgcaaatttgaattctattcactttggctctactcaaaatcctaaaacaaaaaatttattaaggggtgtagttaaaggtataggtggttatggtaactgtatgggaatacctacaattgctggacaaaccaattttgatgagtcttacgacggaaatatattagtaaatgcaatgaccttaggtttagttaataaaaataaaattttttactctaaagctgtaggggttaataaaccagtaatttatgttggatcaaaaacaggtcgagatggaattcatggagctagcatggcgtcagcaatttttgacgacaagatagaagaaaaaaaaccaacggtacaagttggtgacccatttacagaaaaattgttattagaagcatgtttagagttaatggcaggaaaatcaattatttcaattcaagatatgggtgctgctggccttacatcctcaagtatagaaatggcatctaaaggtaatttaggaattgagttaaatttaagcaaagtcccctgtcgtgaagaaaaaatgacaccttatgaaattatgctttcagagagtcaggaaagaatgttgataattttagaaaacggaaaagaagaagaggcaaaaaaaatatttgataaatggaatttagattttgcagttataggtaaaactactgacacaaaaaaaattgaaatattttttgataaaattagagttgcacaaataccaatcaatatattagcagaaaatgcacctatatatgatcgtaaattcaaaaaaacaaaacttcctcaaaagataaagtttaataaagatgatttaaaaaagtttaaacttacagatgttcttaaaaaaattttaagttcaccaaatatatctagtaaggaatgggtttgggaacaatacgatcagactgttatgggagatactgttgaaaaacctggatcggactctggaattgtaagaatacatggatctagtaaagctgttgcaacttctgtggattcgtcggctatatattgttatgcacatccacttacaggaggaaagcaagtcgtctgtgaaaattggagaaatttaatttcttgtggatcaaaaccaattgccattactaattgtttaaactttggtaacccagaaaaagagaaaaatatgggagaatttgttgagtgtgtagagggaataaatgaagctagtaaatttttagattaccctgtggtctcaggaaatgtatctttttacaatgaaacaaaagataaaggtattaaacccactcctactataggtggtgttggtttgattacggattacaaaaaaataatcactatggacttaaaaaatattaatgatcttattttagtagttggaaaaactgaaggtcacatagaacaaagtatatttgctagaaatattttaaatgaaaaaaaaggacctcctccagaaataaatctatttaacgaaaaaaataatggtgaaacaattttaaaattaattaatgaaaaattaattaaatcaactcatgatgtttcattaggtgggatcatcacggcagtttcaaaaatggcaataaaaggaaaaaaaggttttaaattaattaaacctaaagtattaactagtaaatttcattatttttttggagaagatcaaggaagatatataatcgaaattgaacctaataatcttccaaaagtacaaaaaattttaaaagaaaattcagttcattatgatgaaattggaattgtaacaaaaaatgaggtaattatagacaaagagccaattctacatattgacgatttaactaaatctaataaaacttggttaattgattatatgaataaataa

SEQ ID NO: 318646 - DNA, 1376 bp, Unknown
  Bacterial polypeptide expressing nucleotide sequence isolated from the Sargasso Sea
aatgattgtaaacgagcaggtcgctattgatcatggtttaaaaaaagatgaatacgctaaaatttgcgaattattaaaaagagtacctaacattactgaacttggtatattttctgcgatgtggaatgaacattgctcgtataaatcatcaaaacttcacttaaaaaaacttcctaccaaaggtaaaaaagttatccaaggaccaggagaaaatgctggagttattgatattgaagataatgatgctattgtttttaagatagaaagtcataaccacccttcttttattgagccctatcaaggagctgcaactggtgtgggtggaattatgagagatgtttttactatgggggcgaggccaatagcaaatttaaactctattcattttggctctcctcaacataaaaaaactaaaaatttattaagaggtgtggttcatggaattggaggttatggaaattgtatgggtgtcccaactattgcaggtcaaacaagttttgatagttcgtacaatggaaacatacttgtaaacgcaatgacattaggtttggtcaaaaaggataaaatcttttactctaaagctgcaggcttaaataaacccgttatatacgttggttcaaaaactggtagagacggaattcatggggcaagtatggcttcagcaagttttgacgacaaaatagaagaaaaaaaacctacagttcaagttggagatccttttacagagaaacttttgctcgaggcttgcttagaattaatggctggggactctattattgctatccaagatatgggtgctgctggattaacatcgtcaagtattgagatggcatcaaaaggaaaccttggaattgaaatcaatttaaacaaagtgccatgcagagaaactaaaatgacaccatatgaaataatgctttcagaaagccaagagagaatgcttatagttttagaaaacggtaaagaggaacaagctaaaaaaatatttgacaaatggaacttagattttgctgtcattggaaaaacaactaacactaaaaaaattcagctttattttgatgaagaaaaagtagcagacattccagtgaatacattagttgaaaattcgccaatgtatgatcgtaaatggaaaaaatctaaacttccaaaaaaaaataaaattaaaaaagaagatcttaaaaatttaaaaataattgatgtattaaaaaaagttttatcaaatccaaatatttgcagtaaagaatggatttggcaacaatatgatcatacagtaatgggtgatactattcaaaaacctggtggtgacgcgggtgttgtcagagttcatggaacaaaaaaagcagttgctacatctgtagactcctctgctgtttattgtt

SEQ ID NO: 318647 - DNA, 661 bp, Unknown
  Bacterial polypeptide expressing nucleotide sequence isolated from the Sargasso Sea
aatgaaatcatctgtaattatattccctggctcaaattgtgatagagatatggatgtggctctaaagaaatttggctttaaaaaccagatggtttggcataacgacgctgaaattccaaaaagtgatttaattgttttgccaggaggtttctcctatggtgattaccttcgatgtgggagcattgctggtaaatcaagaattattaaatctgtaattgattttgcaaattctggaggattggtacttggaatttgtaatggttttcaaatactaactgaaacaggtttattacctggaatacttcagcaaaataaatacttaaattttatttgtaaaaatgtttttgtgaaaattaaaaataaagaaaataaatattttaaaaatattaagaaagaagtattagaacttcatatagcccataacgaaggaaattacttttgctcaaatgatgaattgaaatcaatagaagataatagtcaaatagctgttacttattgtgatgataaaggaaatgatgacgaagataataatcctaatggggctattaaaaatatagcggggatattcaacaaaaataaaaatattttaggaatgatgcctcatccagaaagaatgattgatccttttctttcgggtgaagatgggtcactttttttgaaa

SEQ ID NO: 318648 - DNA, 1522 bp, Unknown
  Bacterial polypeptide expressing nucleotide sequence isolated from the Sargasso Sea
ttggttaacgaaaaaattgcaattgaacatggtttaaaatcagatgagtataaaaagatttgtaaattattaaaaagaacacctaatattactgagttaggtatattttctgcgatgtggaacgaacactgctcctataaatcttcaagaattcatttaaaaaaattacacactaaaggaaaaaaagtaattcaaggaccaggagaaaacgctggagttattgatattgaagatggagatgcattagtttttaaaatcgagagtcataatcacccttcatttattgaaccctatcaaggagcagcaacaggagttggtggaattatgcgagatgtttttaccatgggtgctagacctattgctaacttaaattcaatccattttggttcaactcaacacaaaaaaacaaaaaatttattaagaggtgttgttcatggaattggtggttatggaaactgtatgggagtacctactatagcaggacaaacatcttttgatagatcatacaatggaaatattttagtaaacgcgatgactttaggattagttaaaaaagataagatattttactccaaggcagctggcttaaataaaccagttatatatgttggatcaaaaaccggtagagatggaattcacggtgcaagtatggcctctgcaagttttgatgaaaagatagaagaaaaaaaaccaactgtgcaagttggagatccttttactgaaaagcttttattggaggcgtgcttagaattaatgtcaggagactcaattattgcaattcaagatatgggagctgcaggactaacctcttcaagtattgaaatggcatcaaaaggaaatttaggtatcgaaattaacttaaacaaagttccatgtagagaaaccaaaatgaccccttacgaaattatgttatcggaaagccaagaacgaatgcttatagttcttgagagtggcaaagaggaaatagccaaaaaaatatttgataaatggaatttagatttcgctgtaattggaaaaacgaccaacacaaagaatattgaattattttttgacaacaaacaagtggctaatattccagtaaatacattagttgaaaactcaccgatgtatgatcgaaaatggaaaaaatcaaaattaccaaaaaaaaataagataaataaaacaatatttaaaagtctaaaaatcaaagatacgttaaaaaaaatcttatccagccctaatgtttgtagcaaagaatggatttggcaacaatatgatcacaccgtaatgggtgatactatacaaaaacctggtggagactctggtgtggtaagagttcataaaacagataaagctatagctgctacagttgactcatctgcaacttattgttgggcacacccactcacagggggaaaacaagtcgtttgcgaaacttggagaaatttaatctcagtaggtgctaaacctatagcagctacgaattgtttaaattttggaagcccagagaaagaagaaatatgggtgagtttgttgaatgtgt

SEQ ID NO: 318649 - DNA, 685 bp, Unknown
  Bacterial polypeptide expressing nucleotide sequence isolated from the Sargasso Sea
atgaaatcgtctgtaattatttttccaggctctaactgtgatagagacatggatgtagcattaaaaaaatttggttttaaaaaccagatggtttggcataatgatgctaatataccaaaaagtgatttaatagtattgccaggtgggttttcatacggtgactatctgagatgcggaagcatagcagctaagtctaaaattataaaatctgtggttgattttgcaaattctgggggtttggtattaggcatttgcaatggttttcaaatattaattgagacaggattgcttcctggagctttattaacaaacaaatatttaaaatttatttgtaaaaatgtttttgtaaaattgaacgaagataaaagtaaatattttaataacattaaaaaaaatattttagagcttcatatagcacataatgatggtaattatttttgtacagatgatgagctaaagtctttagaggataataatcaaattgctgtcaaatattgcagtaaagatggagatgtttctgaaaattataatccaaatggatcaataaaaaatatagcaggaatatttaataaaaataaaaatattttaggaatgatgccccatccagaaagagttattgatcgaagtttatcaagcgaagatggaactttcttttttaaaaacttaattaaaaacttaaaataat

SEQ ID NO: 318650 - DNA, 1303 bp, Unknown
  Bacterial polypeptide expressing nucleotide sequence isolated from the Sargasso Sea
ggagcatctatggcatccgctgaattcgatgaaaactctgaagaaaagaaaccaacagttcaagttggagatccatttactgaaaagttgcttttagaggcgtgtttagagttaatgaaagatgactcaattatttcaattcaagacatgggtgcagctggattaacatcgtcaagtgttgaaatggcttcgaagggttcacttggaatagagcttgatcttgaaaaggtaccttgtagagaagaaaatatgacaccttatgaaatgatgttatcagaaagtcaagaaagaatgttaattattctagaagatggcaaagaggaaaatgcaaaaaaaattttcaaaaaatgggatcttgattttgttgttatcggtaaaactactaaatctaaaaatttaactttaaaatataaaaataagattgagggagaaatacctattgatgctttagctgctaatgctccgatttatgacagaaaatggtctaaaaaaaaaattgaaaaaaataaatttgattttaaaaaaataaaaaaaataaaaattgaagaagcattaattaaaattttatcctctcctaaccactctaacaaaagctggattactaatcagtatgatcaaatggtaatgtgtgatactgctcagcgctctggttcagatgcagctataataagaatacatgataagaataaagcaattgctgtatctgttgactcttcggcaaactattgcaagtcagatccagtaattggaggaaaacaaattgtttgtgaaaattggagaaacttaatatctgtaggagcaagacctttagccatcactaattgtctaaattttggtaatccagagaatcaacaaattatgggagaatttgctgaatgtgtggaaggaataaaagaggcttgtgaatttttaaattatccagtcgtatcaggtaacgtttctttttataatggaaccaacaaaaaaaacatatttccaacaccagtgataggaggagttgggttaatcaaaaaaatttttaaacctttaggtcataattttaaaatagataagagtttaatcatcttagtgggaaaaacatttggacatttagaacaaagttgttttttgaaagaaaattactcgattgttaatggaaggccgcctgaggtaaatcttgtaaatgaaaaaaacaatggtgaagctgttctaaaacttataaatgagaatctcatagactctgttcatgatatttctaatggtgggttaattacagcattgagtgaaatgtcgattaattcaaattttggcgcaaggattgaaa

SEQ ID NO: 318651 - DNA, 930 bp, Unknown
  Bacterial polypeptide expressing nucleotide sequence isolated from the Sargasso Sea
actgggaacagctgctggtcagtcccgcgtgtcctcccctgcctacgacgttaatgcggctctgaaacaggaaggtctgaaaccgtcggattggcaggagatctgtcggcggcttggacgggagcccaaccgtgccgagctgggaatgttcggggtgatgtggtcggaacactgctgctatcgcaactccaggccgctgttgcgggggtttccaacggaaggtcctcgaattttggtgggtcctggtgaaaattccggtgtggtcgacctgggggaaggccatcgcttggccttcaagattgaaagccacaaccacccctcggctgtggagcccttccaaggtgccgccaccggcgtcggcggcatcctgcgggacatcttcaccatgggagctcgcccgatcgcgttgctgaatgcattgcgtttcggccccctagaggaccccgtcaacgttgggctgatcgaaggcgttgtggccggcatcgcccattacggcaattgcgttggtgtgcccaccgttggtggtgaagtggctttcgatccctcctacggggggaatcctctggtgaacgccatggcgttgggtctgatggagaccgaagagatcgttaagtccggcgcccagggggtggggaatcctgtggtttacgtgggcagcaccaccggtcgggatggcatgggcggcgccagtttcgccagtgctgaactcagtgccgattctctggatgaccgccctgcggttcaggtgggcgatcccttcctggaaaaagggttgatcgaggcctgtctggaggcattttccagtggtgatgtggtggctgctcaggacatgggggctgccggactcacctgcagctgttcggaaatggcggccaaaggtggtctgggggttgagctcgacctcgatcgggttccggcccgcgaagaagg

SEQ ID NO: 318652 - DNA, 682 bp, Unknown
  Bacterial polypeptide expressing nucleotide sequence isolated from the Sargasso Sea
aatgaaatcatctgtaattatattccctggttcaaattgtgatagagacatggatgtggctttgaaaaaatttggttttgaaaatgaaatggtttggcataatgatgtggaaatacctaaaagtgatttaattgttcttccaggaggtttttcttacggagattaccttagatgtggaagtattgctggaaaatctaagattattaaatctgtaatcgattttgcaaattcagggggactagttcttggaatttgtaatggttttcagattttaacagagacgggtctacttcccggaatactccaacaaaataaatacttaaactttatttgcaaaaatgtttttgtaaaaattaaaaataaagaaaataaatattttaaaaaaattaaaaaagaagttttagaacttcacattgctcacaacgaaggaaattacttttgttcaaacgacgaattaaaatcaattgaagataatggtcaaattgcagttacatattgcgaccataagggaaatgaagatgaaaaaaacaaccctaatggtgccttaaataatattgctggaatttttaataaagataaaaatattttgggtatgatgccacatccagaaagaatgattgatccatttctttcaggtgaagatggatcattattttttaataatttaattgaaagcttataa

SEQ ID NO: 318653 - DNA, 1102 bp, Unknown
  Bacterial polypeptide expressing nucleotide sequence isolated from the Sargasso Sea
tttggatgatccaaccattgccagcaagcgatgggtctggcgtcagtacgaccaccaggtgcaggccaacaccgttctcaggcctggaggcgccgatgctgcggtgttgcgtttgcgctctcagcaggacaacgagccgcactcctccagtcagcggggtgtggcggccactgtggattgccccaaccgttgggtagctcttgatcccgagcgcggtgggatggcggctgtagcggaggctgcccgcaacctcagttgtgtgggtgctgaccccattgctgtgacagacaacctcaatttcccctcaccggaaacacccacggggtactggcagctggccatggcgtgccgcggcctctcggaagcctgccgggtgctgcagaccccggtcacaggaggcaatgtctccctctacaacgacacccgcctgcccgatggcagcatccagccgattcagcccacgcctgtggtgggcatggtcggtttggtggaaaacatccagaccttggtggggttggcctggccccaacccatcgcaggggatgcaggggatcacgtggtgctgttgggtttgccactgcagacgcctcaggatgatgagcgtctcggactggccggcagcagttttttgcaggtctgtcatggcctgtgcaccgggcggccaccgcggactgatctggatctagagcttcaggtgcagcaggttttgcgctccggtattcgtgcaggtcagatcaccgcggcccacgatgtttccgatggtggattgctggtgacaattgcagaaatggcgattgccgctggctgcggggctcagttgagtgtcccaagtgcgggacggttggaacggttgttgtttgccgaaggaggtgcccgtgttgttgtgagcgtcccggaggcgtcctggtcagcattgcaagctgcagcgcaggaagccggatgtccttcgcagtccttgggtcgtgtccaagccagcccccagctgcaggtgtccgttggagatcagcaggttcttgatgcctctgtggatgccttggctcaggcccatcaacaggggttgccgcggcggttagaacagccggccctcgggcacaatggttaa

SEQ ID NO: 318654 - DNA, 673 bp, Unknown
  Bacterial polypeptide expressing nucleotide sequence isolated from the Sargasso Sea
atgaagacacatgtaattgttttcccaggttcgaactgcgacagagatgtagctgttgcaattcaaaatattattggctcttcgcctgaaatggtttggcataaagactcgacaataaatcaatcagatttgattgttgttccaggtgggttttcttatggtgattatttacgatgtggcgcgatggcatcaacgtcgcctatcatgaaaagtgtgattgaaaatgcaaataaaggtgtgccagtaatgggaatttgtaatggatttcaaattctaattgaaagtggtcttcttcaaggtgcactaatgagaaatagtagtttaagttttatatgtcgcgacataataattaaaccaacaaatacgaaaaccatatttactaataaatccactatttcgaaaatgccaatagctcacaacgagggaaattattttgctaacagcaaccagataaaagaaatagaagataacgatcaaattgccttccaatactgtgacgaaaatggagatatcaatgcccattcaaatccaaatggatcaataaataatattgccggggtgttcaacaaaagcaaaaatgtactaggtatgatgccccaccccgaaagagcagctgaaagcattcatgggtgtgatgatggaagaaatatttttgaaagtcttctaagttaat

SEQ ID NO: 318655 - DNA, 682 bp, Unknown
  Bacterial polypeptide expressing nucleotide sequence isolated from the Sargasso Sea
gatgagttttaaatctgctgttattacatttcctggatctaattgtgacagagacgcattatgctacttaaaagatttaactaaaggtgaggttcataatatatggcatgaggagacatcattgccaaaagttgatttagtaattttacctgggggttttagctttggtgattatttaagatcaggagcaatggcatcaaaaagtaaaattattgatgaagttgtcaaacatgcaaatgataatagatatttattaggtatttgtaatggctttcaaattttaactgaaattggacttcttgaaggagcattaattcaaaataaaaaacttaaatttttaggaaaaaattgttttataaaaaaaaaatttaaaaataatttcaatttatcaatcaaagataatcaggttcttcaaatacctgtagctcataacgaaggaaatttctattgtgatactgaaactttgaatttattaaaaaataatgaacaaattgcttttgaatattgcaaaggtgaattctcaaatactgaagaaaatattaatggttcaatagaagctattgcaggtattacaaataaaaaaaagaatgttcttggaatgatgcctcatcccgagagagcatattctgattttcatcaatcacaagatggaagacttatcatagagtcgttaatttcatga

SEQ ID NO: 318656 - DNA, 1136 bp, Unknown
  Bacterial polypeptide expressing nucleotide sequence isolated from the Sargasso Sea
tcttcgagtgttgagatggcttttaaaggtgatttaggtttagagttaaatttagatcaagttccctgtagagaagaaaatatgacaccctacgagatgatgttatcagaaagtcaagaacggatgctaataatattagaagacgacaaagaggaaaaagcaaaagaaatttttaaaaagtgggatttagattttgtaattattggaaaaactactaatactaaaaaccttattttaaaatttcaggatcaagaagttgctaaaatacctataagcgctctttcctcaaatgctcctcaatatcaaagaaaattttttgaaaaaaaattaccgagtaaaaatataaagtttaaagattttaagaaaataaaacttgagaaagctttattgcaaattttatcttctccaaattattcaaataaaagttgggttactgaacaatttgatcaaatggtgatgtgtgatacagtaaaaaaatcaggatcagactcttctataatacgtattcatggaaaaaaaaaggcaatttctgttacagtagactcttcagctatctattgtaaatctcaccccttctcaggaggtaaacaaattgtctgcgaaaattggagaaacttaatttctgtaggctcaaaacctatagcaataacaaattgtttaaactttggaaatccggaagatcccaaaatcatgggggagttcgctgattgtgttaaaggtattaaatctgcatgcgaatttctggattatccagtggtctctggaaatgtttctttttataatggtacaaataaaaaaaatatttatccgacacctgtcatcggtggtgtaggattaataaatgaattaaataaacctattgaaaattttttcaaaaaggaaggcagtttaattatatcgataggtaaaaattttggtcatttaacccaaagtgcattatttttagaagtatttaattttaacgatgggcctccacctgaagtaaatcttctaaatgaaaaaaataatggggaaatcgttcttaagttgatacaaaataatatggttaattcagttcatgatatctcctctggtggtttgattattgctttggccgaaatgagtataaattcaaacttaggcttaaaaattaataa

SEQ ID NO: 318657 - DNA, 1617 bp, Unknown
  Bacterial polypeptide expressing nucleotide sequence isolated from the Sargasso Sea
tatgacagttaacaaagatcagatagaagctcacggtttaacacctgatgaatataaaaaaattaaagaatatttaggtagagactcaaatttattggaactaggaattttttcagcgatgtggaatgagcattgttcatataagtcatcaaaggtccatctcaaaaaacttccaacaaaaaataatattgtaatccaaggtccaggtgaaaatgctggtgttattgatattggggatgaagatgcgattgtctttaaaatagaaagtcataatcatccgtcttttattgagccatatcaaggtgcagctacaggtgttgggggtatattacgagatgtatttacaatgggtgccagaccaattgctttgatgaattcaatacactttggatcaccgaaaaatcataaaactaaaaacttattaagtggtgtagtttcgggtatcggtggctatggtaattccgttggaataccaactgtaggtggagagactaaatttaatgatacatataacgaaaatattttggtcaatgctatggctataggattagcaaataaaaataaaattttctattcaaaggcaaaaggtttaaataaagctgtggtatatgttggttcgaaaactggacgagacggaattcacggagcaacaatggcatcagcggaatttgacgaaaactcagaggaaaaaaaacctactgttcaggttggtgatcctttcactgaaaaattacttttagaagcttgtctagagttaatgaaagataattctattatatcaatacaagatatgggcgcagcaggtcttacttcatcaagcatagaaatggcttcaaaaggaaagctcggtatcgagttagacttaaataaagtgccatgtcgtgaaaataatatgacgccatatgaaatgatgttatcagagagccaagagaggatgcttttaatactggatgataataaagaggaagaagcaaaaaaaatatttgataaatgggatttagattttgtagttatcggtaagactacagacacaaatagattaattctaaattttaataccaaaaaagttgctgatatccctattccagctctagctgataaagctcctctatatgagagaaaatatattttaaaaaaatcaaaaaaagaaaaaatagatataaataattttaaaaagataaaaattgatgatgctctattaaaaattttatcttctccaaaccactctaataaaaattggattactgatcaatacgatcaatctgtaatgtgtgatactattcaaaaatcaggtggggactctgcggtagttagaattcacaataaaaataaagctattgcaatatcagtagattcatcagcttcatattgcaaagctaatccaaaaactggtggaaaacaaatagttgctgaaaattggagaaatttaatttcagtgggagcaaagccaatggcaataacaaattgcttaaactttggaagtccagaaaaacctgaggttatgggagaatttatagattgtataaacggtatcagagaggcttgcgaatttttgaattttccagttgtttcaggaaatgtctctttttataacgaaacaaaatcaaaaagtataga

SEQ ID NO: 318658 - DNA, 685 bp, Unknown
  Bacterial polypeptide expressing nucleotide sequence isolated from the Sargasso Sea
aatgaaatcatctgtaataatttttcctggttcaaattgtgatagagatatggatgttgctcttaaaaaatttggatttcaaaataaaatggtatggcataatgatcctgagcttcctaaaagtgatttaattgttttaccaggaggtttttcatatggagattacttaagatgtggaagtattgcaggtaaatcaaaaattattaattccgtaataaagttcgcaaaatctggaggtttagtattaggtatatgcaacggttttcaaattttgacggaaacaggacttttgccaggggttctccaacaaaataaatatctaagatttatttgtaaaaatgtatttattaaaattaataacaaagaaaacaagttttttaaaaatgttaaaaaagataccctagaactccatattgcacataacgaaggcagttacttttgttcaattgaagaaatgaaatctatcaaagataataatcaaattgctgttaaatattgtgatcataaaggtgatgtaagtgagaaaaataatccaaatggagccttagaaaatattgctggaatatttaataaagaaaaaaatattcttggaatgatgcctcatcctgaaagaatgattgataaatctttatctggtgaagatggttcaattttctttaaaaatcttttgcaaaatataaattaa

SEQ ID NO: 318659 - DNA, 679 bp, Unknown
  Bacterial polypeptide expressing nucleotide sequence isolated from the Sargasso Sea
aatgaattcatctgttatcgtatttcctggttctaactgcgatagagatattgctgtagcattagaaaaaatgcaatttaaaaacaaattagtttggcataaggatactaatttacccaagtcagatttaattgtaataccaggaggattttcttacggtgattatttgagatctggtgctatagcagctaagtcaaaaataattaatgaagttataaaagctgctaatgaaggttgtttagttttgggagtttgtaatggatttcaaattttaatagaaactggattgctaaaaggagctttgttaagaaataaaaatctaaaatttattaataaagatgtctctcttaaggttaatagcataaataacaaattttgtaagaaatataaactaggacaaataattaaacttaatatcgctcataatgagggaaattatttcacaaataaggatcatctaaaagaattagaagataataacttgattgcatttaaatactgtgatgagaaaggatttataaatcagaattcaaatccaaatggttccgttaataatattgcaggtatattaaacaaaaataaaaatattttaggtatgatgcctcatcctgaacgaatgattgaaaagtcagtatcaggagatgacggcatcagtcttttttctagtctattaaattaa

SEQ ID NO: 318660 - DNA, 282 bp, Unknown
  Bacterial polypeptide expressing nucleotide sequence isolated from the Sargasso Sea
aatgaatataactaaagaagttattcaaaaacatggtcttacaattgaggagttcgtaaaaattaaagatcttttgcaacgagaaccaaatattttagaacttggaattttttctgcaatgtggaatgagcattgctcttacaaatcttctaaaattcatttaaaaaagttaccaactaaaaataagaatgttattcagggtcctggggaaaatgctgggataatagatataggtgatggagatgcaatagtttttaagattgaaagtcataatcacccgtc

SEQ ID NO: 318661 - DNA, 595 bp, Unknown
  Bacterial polypeptide expressing nucleotide sequence isolated from the Sargasso Sea
atgacaattacaaaagatcaaatagaatcacatggtttgaaacttgatgaatataataaaatcaaaaaactgttaggtagagaggctaatctattagagcttggaattttttcagcaatgtggaatgaacattgctcttacaaatcatcaaagatacatcttaaaaaattacccacaaaaaataaagttgttatacaaggtcctggagaaaatgctggggttattgatattggagatgatgatgcaattgtttttaaaatagaaagtcataatcatccttcgtttattgagccttaccaaggggcagctacaggtgttgggggaatattgagggacgtgtttacaatgggcgcaagacccattgcactgatgaattcaattcactttggctctcctgataataaaaaaactcaaaatttattaagtggtgtcgtatctggtattggagggtatggtaattcagtgggtattcctacagtcggtggtgaaaccaaatttaatagtacttacaatgagaatattttagttaatgcaatggctgtaggtcatgcaaaaaagaatcgaatattttattcaaaggctaaagggattaata

SEQ ID NO: 318662 - DNA, 679 bp, Unknown
  Bacterial polypeptide expressing nucleotide sequence isolated from the Sargasso Sea
atgaaatcatctgtaatagtttttccgggttcaaattgtgatagagatattgcagtaacattagaaaaattacaatttaaaaactccatggtttggcataaagaaatgagtttgccaaaatctgatctaattgttgttccagggggcttctcatatggcgattatctaagatcaggcgcaatagctgctaaatcaaatatattaaatgaagttattaaagctgctaaagaaggctgtttaatccttggtatttgtaatgggttccaaatattgattgagtgtggacttctacaaggtgcgcttttaagaaattttggattaaaatttatttcaaagaatatttttgtaaaggttcattcgaataaaaataatttttttaataaatataaaaaaaatgaagtacttaaattgaatattgcacataatgaagggaacttttttactgataaaaaacatttaaaacaattagaggataatgatttaataccaataaaatattgtgatgagaaaggaaacataaacacagcatcaaatccaaatggttccttgaataatattgctggaatttttaacaaagacaaaaatatattaggcatgatgcctcatcctgaaaggatggcagataaaatttgttcagacgaggatggaataccactttttttaagtttgatgagctaat

SEQ ID NO: 318663 - DNA, 502 bp, Unknown
  Bacterial polypeptide expressing nucleotide sequence isolated from the Sargasso Sea
atggaagttaacgaacagattgcagtagaccatggtttgaaaaaagaggaatttaataaaatttgtggtttattaaaaagaaaaccaaacctaactgagcttgggattttttctgctatgtggaatgaacattgctcatacaaatcatcaagaattcatttaaaaaaactaaatacaaaagggaaaaaagttattcaaggtcctggtgagaatgctggtattattgatattgaggatgatgatgcaatagtttttaagattgaaagtcataaccacccttcatttatagaaccttatcaaggagcagctactggtgtcgggggtataatgagagatgtttttacaatgggtgcaagacccattgcaaatttaaattccatacattttggctcaccacaacatcctaaaacaaaaaacttattaagaggagttgtaaaaggtatagggggttatggaaattgtatgggcattccaactgtaggcggtcaaacaaattttgacg

SEQ ID NO: 318664 - DNA, 685 bp, Unknown
  Bacterial polypeptide expressing nucleotide sequence isolated from the Sargasso Sea
atgaagtcatctgtaataatttttcctggatccaattgtgatagggatatggatgtagcattaaaaaaatttggttttaaaaatcaaatggtttggcacaatgatctagaaattcctaaaagtgacttaattgttcttcctggtggtttttcatatggagattatttacgttgcggaagtattgccgctaagtcaaaaataattaaatcagttgttgagtttgcaaattcaggaggcttagtattgggtatatgtaacggatttcaaatattaacggagaccggcttgttgccaggtgttcttttacaaaataaatatcaaaaatttatatgcaaaaatgtttatgtgaaaataaatgataaggaaaacaagtattttaaaaatatcaaaaaggaaattctagaattacatattgctcataatgaaggtaattatttttgttcagatgaagaaattaagtccttaaatgataataatcaaattgcagtcacttattgtaacgaaaaaggaaatgaagataaacaatttaatccaaatggagcattaagaaacattgctggaatttttagtaaaaaaaaaaatatcttaggtatgatgccacatccagaaagaatgattgataaatatctttcaagtaacgatggaaattttttctttgaaagcttatttgaaaatttaaaataat

SEQ ID NO: 318665 - DNA, 1123 bp, Unknown
  Bacterial polypeptide expressing nucleotide sequence isolated from the Sargasso Sea
aaaagcagatatcactttagatattttagagaaaggtgcgccatcatataaacgaccttatgaaataaacatttttgataatgagtccatacaagaagataaatataaaaatgaaagccctatatcaattttaaaaaaaatgattgaatctccaaatttatgcagccgaaggtgggtgtgggaacaatatgatcatatggtaatgacagatactgttcttcttccaggtggtgactcagcaattattagagttcacggtactaataaaggcctatctgtaacatcagactcaactccacgatattgtgcatccgatccttttgaagggggtaagcaagcggtagctgaggcctggagaaacctgatttctgttggatcaactcctatcgccataactgattgtatgaattttggaaatcctgaaaagaaagaaatcatgggacaatttgcaggcgtaatcaaggggatgattgaagcatgtaataccttggattttcctgtagtttctggaaatgtatctctttacaacgaaacaaacggtaaagggattaatcctacacctgtaatcggtggtgtaggagtggtaaataatttagatattttctctgatcaaaattttaaaaggattaatgacttaatcttagtaattggtaaaactaatgggcacttaactcaatcgatatatgcaaatgagctgctaaattacaaaaaagggctaccaccaaaggttgatcttgaagaagaattaaaaaacggtttagcgctaaaggaattaattactaaaaggcttattgatacttcacatgatatttctgatggcggattattagttgcattaacagagatgagtatgaaaaataatattggttataaagtaaatatagcgaaagagaatcttaattcatatttgtttggcgaagatcaagcaagatatgctgtggctatagaaaaaagtaaaattgaagaagttagatcatttttaattgataaaaatattttctttgaagaaattggacaaacaaataaagataatattatctttaatgatgaaaaaattagtgttgctgaacttagggatttatatgaaaattggtttaataattacttatcggaagcatcataa

SEQ ID NO: 318666 - DNA, 802 bp, Unknown
  Bacterial polypeptide expressing nucleotide sequence isolated from the Sargasso Sea
atggataacctttcttttgctattgaaaatggacttacgaaagatgaatataagctaatactcaaaaaacttaaaagagagcccaataaaaatgaaattggtgtaatagccgcaatgtggtctgaacattgttcgtataaaagttcaaaattctatcttaaaaaattaccaacgaagggtaagtgtgtcatacaagggccaggggaaaatgccggagtaatagacataggagataatcaatgcttagtctttaaaattgaaagtcacaatcatccttcttttattgaaccttatcagggggcagcaacaggagttggcgggatactaagagatgtattcactatgggggcaaggccaatagcgttgatgaattctttgagatttggtaaccctaagaaaaaagacaccaaaagagtcgtaaatggagttgttagtggtattgcaggatacggaaactgtatggggataccaacaatcggcggggaagtttattttgatgactgttataatgggaatccactcgttaatgcttttgcgcttggtattgctaaaaaaaacaagatctttaagggactggcggatggtcctgggaatcctgttttttatttaggtgcaaaaacaggaaaagatggagttaaaggtgctattatggcatcagatatatttgaatcacaagaagaccttgacaggcccacagttcaaataggagacccatttaaggaaaaattactattagaggcatgtttagaaatgttcaaattaaaaggaatagtcgggattcaagatatgggggctgcaggtt

SEQ ID NO: 318667 - DNA, 625 bp, Unknown
  Bacterial polypeptide expressing nucleotide sequence isolated from the Sargasso Sea
aatgaaatcttcagtaattatttttccgggttcaaactgtgatagagacatggatgtagccctaaaaaaatatggctttaaaaatcaaatggtttggcatgacgataaaaatattcctaaaagtgatctaattgttttacctggaggtttttcttatggagactatctaagatgtggaagtattgctgcaaaatcaaaaataataagatctgtaattgaatttgcaaataaaggtggtcttgtcttaggaatttgtaatggctttcaaattttaactgaaactggtttgttgccaggaattcttcaacaaaataagtatctcaattttatatgtaaaaatgtttttgttaaaattaataataaagataataaatattttaaaaactctaaaaaaagtatcttagaacttcatatagctcataatgaaggaaattatttttgttccaatgatgaattaaaatccttaaaagataataatcaaattgcagttacttattgtgataaagacggtttagaaaatgaagagagcaatccaaatggtgcaatcaataatatagctggaatatttagtaaaaacaaaaatatattaggaatgatgcctcatcctgagagaatggtagatgaa

SEQ ID NO: 318668 - DNA, 1795 bp, Unknown
  Bacterial polypeptide expressing nucleotide sequence isolated from the Sargasso Sea
atgattgtaaacgaacaattagctatcgatcatggattgaaaaaagaagaatataaaaaaatctgtgaacttttaaaaagaacccctaacattacagaattaggaatattttctgcaatgtggaatgaacactgctcttataaatcttcaagattacatttaaaaaaattaccaaccaaaggtaaacaggttattcaaggacctggtgaaaatgctggggtagttgatattggagataatgatgcaattgtctttaaaattgaaagtcataaccacccttctttcattgaaccttaccaaggtgctgccacaggagttggtggaataatgagagatgtgtttacaatgggtgcaagaccaatagctaatttaaattcaatacactttggttctacacaacataaaaaaactaaaaacctccttagaggtgttgtccatggaattggtggttatggaaactgcatgggagttccaaccattgcaggtcaaacaagttttgacagttcttataatggaaatatcttggttaacgcaatgacgttaggattagtgaagaaagataagattttttactcaaaagcagccggtttaaataaacctgtaatatatgtcggatctaaaacgggtcgtgatggcattcacggagctagtatggcctctgctagttttgatgaaaaaattgaggaaaaaaaaccaactgtacaagtcggtgatccctttacagaaaaacttttacttgaagcatgtttagaattaatggcaggtgactctatcattgcaattcaggatatgggggcagcaggtttaacttcctcaagtattgaaatggcttcaaagggaaatcttggaatagagattaatttaaataaagtgccctgtagggaaacaaaaatgactccttatgaaattatgctgtctgaaagtcaggaaagaatgttgattgttttagaaaatggaaaagaagagcatgctaaaacaatatttgataagtggaatttagattttgctgtcattggaaaaacaaccaaatcgaagaaaattgaactttattttgatagtgaaaaagttgctgatataccagttaatactcttgttgaaaattcaccaatgtatgatcgtaaatggaaaaaagcaaaacttccaaagaaaaataaaattaataaagatgatataaataatttaaagataattgaagttcttaaaaaaattttagcaaatccaaatatctgtagtaaagaatggatttggcaacagtatgatcatacagtgatgggagacaccattcaaagacctggaggagattctggtgtggtgagagttcatggcactaataaagcagttgcagcatcagtagactcatcagcagtttattgttgggctcaccctcttacaggtggaaagcaagtggtatgtgaaagttttagaaatttgatatctgttggagcaaaaccaattgccattacaaattgtttaaattttggtagccctgaaaataaagagaacatgggtgagtttgttgaatgtgttcagggaattggagaggctagctcttatttaaaatttcctgtcgtgtctggaaatgtctctttctataatcaaacaaaggatcaagggatcaaacccaccccatctataggtggagttggacttataaaagattatacaaaaatgattactatggattttaaagaagtcgataatgttgtgttagttattggtaaaactgaaggtcatattgatcaaagtttatttgcaagagtcatattggatgaaaaaaatggacctccaccagaaa

SEQ ID NO: 318669 - DNA, 685 bp, Unknown
  Bacterial polypeptide expressing nucleotide sequence isolated from the Sargasso Sea
atgaaatcagcagtcattacatttccaggttctaattgtgatagagatatggatgttgctttaaaaaaatttggttttaaaaataaaatggtttggcatcaagatgttgagttaccaaaaagtgacttggtggtcttacctggtggtttttcttatggggattatcttagatgtggcagcatggcttctaaatctaagattatgcaatcagtaattaattttgcaaattctggtggaatggtgatgggtatttgcaatggtttccaaattttagttgaaacaggattggtccctggagttttattaagaaataaatatttagaatttatttgcaaaaacgtttttgtaaaaataaacaataaagacaatgcttatttcagaaaaattagtaaaaatgtattagaattacatatcgctcataacgaaggaaactacttttgtacaaatgatcaattaaaagaaattgaagacaatacccaagttgcgatcaattattgtgatcctgaaggtaaaattgaagaaccattcaatcccaatggatctattaaaaatattgctggaatttttaataaagaaaaaaatgttttaggaatgatgcctcatcctgaaaggatgattgatcattctctatcaggtgaagatggttctcatttttttaaaaacctaatcaataacttaaaatgat

SEQ ID NO: 318670 - DNA, 781 bp, Unknown
  Bacterial polypeptide expressing nucleotide sequence isolated from the Sargasso Sea
atgctttcccctcgcgctctcattcttcgtggaccgggtacgaattgtgaccaagaaaccgcttatgcctttgaacgtgccggtggtcatacgaaacgcatacacgttcaggcactcgctgaatccccttctcttctggatgattttcaaattttttgtatccccggtggcttttcatatggtgatgatattgccagcggacgaatattagcgattgaattgaccgaacgtctcggtgatacactccgtcgctttcatgagagaggtggactaattcttggaatttgcaatggattccaagtactcttgcaaacgggactgcttactcccgattctgcccctaacaaacaagtcgccacgcttgcacaaaatgcctccgagagattcattgattgctgggtacgattacaagccaccccagggaactgtgtctttcttcgtggactggaccactttgaattgcctgttgcccacgccgagggacgcttcaccactgctgacaaaacattcctccagcacctcgactcacgtggccaatttgtacttcactatgccgagagcagtgatgggcagcagaccaacccaaatggatccgagcaaaacgtagctggcatgtgtgatccaacaggccgaatcttcggcctcatgccacacccagaacgcttcattgacgcgacacagcaccctgcctgggtgggccgaatggaccctcatgctgatggtgctggcttaacatttttccgcaatgcactgcgtgtaataggaaaagatttaggttgac

SEQ ID NO: 318671 - DNA, 788 bp, Unknown
  Bacterial polypeptide expressing nucleotide sequence isolated from the Sargasso Sea
agattcatattcatccagaccgaaaattgcaattttaagagagcaaggcataaatgggcaaactgaaatggctgcagcatttcatcaagcttattttgatccctacgatgtacacatgtcagatttaattacgaaagagaaaaatttgaaagatttttcagggatagtttttccaggaggattttcctacggagatgtcctcggagcaggaaagggttgggcaaactcaattctatttaattcttttttatatgatgaattttctgaattcttttctgataaaaataagatagttttgggagtctgtaatggatgccaaatactatcaagtttaaaaaaaataattcctggatctgaaaactggccaaattttataaaaaattactctgatcaatttgaagcaagattaactcaagtaaatattcaaaaatcaccatctgttttttttgacggtatggctggctcaagactgattgtgcccgttgctcatggagaggggagagcacagtttgaatctaataaatcattcgataaattttctgaagagaaacttgcagttataaaatattgcgatgatgaaagtagtcctactcaaaattatccgcttaatccaaatggttcaaaggatgcaatagctggctgtacttcaaaagatggaaggatcactgcaatgatgcctcatcctgaaagagcatttcttaatagacagatctcttggacagatgctgaagatgaattcagtccttggaaaatgatttttttaaatgctagaaaggctattaattaac

SEQ ID NO: 318672 - DNA, 1145 bp, Unknown
  Bacterial polypeptide expressing nucleotide sequence isolated from the Sargasso Sea
gcaatttttgatgataaaatagaagaaaagaaaccaacagttcaagttggagacccttttacagaaaaactattattagaggcttgcttagagttgatgggaggaaaatcaattatatctattcaagatatgggcgctgctggattaacatcttctagtattgaaatggcatcaaaaggaaatttaggtattgaattaaatttaaataaagttccatgtcgtgaagaaaaaatgacaccttatgaaattatgctttctgaaagtcaagaaagaatgctaattgttttagaaaacggtaaagaagctgaggcaaaaaagatttttgataaatggaatttagattttgctgtaataggaaaaactactgactcaaaaaaaatcaaattgttttttgacaataacaaagtagcagaaatacctataaatatattagcagaaaatgcacctgtttatgatcgtaaatggaaaaaaacaaaacttccacaaaaaataaaacttaaaaaagatgattttaaaaaattaaaaattactgaagttttaaaaaaaatattagctttaccaaatatttcaagcaaggaatggatctggcaacagtacgatcatactgtaatgggtgatactattcaaaaacctggttctgactcaggcgtagttagaattcatggtaccaataaagctgttgcaacttcagtagattcttctgctgtctattgttatgcccatcctcttacaggtggaaaacaagtagtttgcgaaagttggagaaacttaatttcatgtggatctaaaccaattgctatcacaaattgtttaaattttggcaacccagaaaaagaaaaaaatatgggagagtttgttgaatgcgttgaaggaattaatgaagctagtaaatttttagattatcccgtggtttcgggtaatgtatctttttacaatgaaacgaaagataaagggattaaaccaaccccagcaattggaggtgtgggtttaatcaaagattataaaaaaatggtcactatgaatctaaaaaatagtgaaaatttaattttaacaattggaaaaactgaaggccatatagatcaaagcatatttgctagaaatattttaaatgaaaaaaaaggaccccctccagttgttaatttatt

SEQ ID NO: 318673 - DNA, 442 bp, Unknown
  Bacterial polypeptide expressing nucleotide sequence isolated from the Sargasso Sea
atgaacgaagttaacgaacaaattgcaatagaccatggtctaaaaaaggaagaattcagtaaaatctgtgatctattaaaaagaaccccaaacctaactgagcttgggattttttcagcaatgtggaatgagcattgttcatataagtcatcaaaactccatttaaaaaaacttaatacaaaaggaaaaaaagtaatccagggaccaggagaaaacgctggtgtaatagatattgaagataatgatgcgatagtttttaaaatagaaagtcataatcacccttcatttattgaaccatatcaaggagcagcaactggtgttggtggtataatgagggatgtttttacaatgggtgcaagacctattgcaaatttaaattctattcattttggttctccacaacatcctaaaacgaaaaatttattaagacggagttgttaaa

SEQ ID NO: 318674 - DNA, 685 bp, Unknown
  Bacterial polypeptide expressing nucleotide sequence isolated from the Sargasso Sea
atgaagtcagctgtaataatatttccaggatcaaactgtgatagagatatggatgttgccttaaaaaaatttggttttaaaaaccagatggtttggcacgatgatcaagaaattcctaaaagtgacctaattgtattacctggtggtttttcttatggagactatttaaggtgtggaagtatagctggaaagtcaaagataattaaatcagttgtagaatttgcaaattcaggaggtttggtattgggaatatgtaatggatttcaaatattaacagaaactggtttgttgccaggtgttcttcttcaaaacaaataccaaaaatttatatgtaaaaatgttcatgtgaaaataaatgataaagaaaataaatattttaaaaatattaaaaaagaagtcctagaactacatatagcgcacaatgaaggaaattatttttgctcagaagatgagttgaaatcattaattaataataatcaaatcgctgtaacttattgtaatgaaaatggaaaggaatctgatgaatttaatccgaatggagcattaagtaatattgctggaatatttaataaaaataaaaatatattaggaatgatgcctcatccagaaagagtgatagataaaagtctttcaagtgatgatggtaattttttctttgaaaatttagtagagaatttaaaatgaa

SEQ ID NO: 318675 - DNA, 1231 bp, Unknown
  Bacterial polypeptide expressing nucleotide sequence isolated from the Sargasso Sea
aaaagttattcagggtcctggagaaaatgctggtgttatcgatattgaggataatgatgcaatagtttttaaaatagaaagtcacaatcatccttcttttattgaaccttaccaaggtgcagcaacaggtgttggaggaattatgcgtgatgtatttacaatgggtgcaagaccaatagctaacttaaattcaattcattttggatctccacaacataaaaaaactaaaaatctattaagaggtgtagtccatggtataggtggatatggaaattgtatgggtgttccaacaatagctggccaaacaagttttgatagttcctacaatggaaatattctggttaatgctatgacattgggattggttaaaaaagataagattttctattcaaaagcagcaggattaaacaaaccagttatttatgttggatctaaaacaggaagagacggaatccatggagcaagtatggcttcagctagttttgacgaaaaaattgaggaaaaaaaaccaactgtccaagttggagatccatttaccgaaaagcttttactagaggcctgtttagagttaatggctggagattcaattatagccatccaagatatgggtgcagctggtctaacttcctcaagtattgaaatggcttcaaaaggaaatcttggaatagaaattaatttaaacaaagtaccgtgtagagaatctaagatgacaccttatgaaattatgctctcagagagtcaagaaagaatgttgattgttttagaaaacggtaaagaggaacaagcaaaaaaaatatttgataaatggaacttagattttgcagtaattggaaaaactactaagtcaaaaaaaatagaactttattttgatgaagaaaaagttgcagacattccagttaataccttggttgaaaactctcctatgtatgatcgtaaatggaaaaaagcaaaactccctaaaaagaataaaattaaaaaagaagacattaaacatttaaaaattattgatgtattaaagaaaattttagcaaatccaaatgtgtgcagtaaagaatggatttggcaacaatatgatcacactgtaatgggagatacaatacaaaaacctggtggagatgcaggcgttgtgagagttcatggaacagataaagctgtagctgcatctgtagactcttctgcggtttattgctgggcccaccctttaactggtggaaagcaagtgggtttgtga

SEQ ID NO: 318676 - DNA, 411 bp, Unknown
  Bacterial polypeptide expressing nucleotide sequence isolated from the Sargasso Sea
catgaatgaagagttaatacttcaacacggtttaactttagatgaatttcaggtcattagaaaatatctaaacagagacttaagcattgaagaattgggtattttttctgctatgtggaatgaacactgttgttataaaacttcaaaaaaatggcttaagaaactccctacagataatgaaattgtaattcagggaccaggagaaaacgctggtgtaattgatttgcaagataacgatggtattgcgtttaaaatagaaagccacaatcatccaagctacatagaaccttttaacggttcagcaactggtgttggaggtatacttcgtgatatatttacaatgggagcaagaccaattgctactcttgactcaattagatttggtttaatagaaactgaaaagacaaaata

SEQ ID NO: 318677 - DNA, 685 bp, Unknown
  Bacterial polypeptide expressing nucleotide sequence isolated from the Sargasso Sea
gatgaaatcttcagtaataatttttccaggatcaaattgcgatagagatatagatgtagcattaaaaaaatttggctttaaaaatcaaatggtatggcataacaatgaaaatatacctaaaagcgatttaattgttttgccaggaggattctcctatggggattatttaagatgtggaagtatagcgggcaagtctaaaattataaaatcggtagtagattttgcagaatctggtggcttagtaatgggaatttgcaatggttttcagatacttactgagactgggctattacctggaattcttcaacagaataaaaatctaaattttatatgtaaaaatgtttttgttaaaattaaagataaaaataataaatattttaaaaatatcaaaaaagatacactagagcttcatattgcgcataatgaaggaaactatttttgttctgatgaagaattaaaatctttggaagataacaaccaaatagctttaacctattgtgataataaaggtttagaaaatattgaaaataatcccaatggagctgtaaaaaatattgcagggatattcaataaaaataaaaatgttttaggaatgatgcctcacccagaaagaatgatagataaatatctttcgggagaagatggatctcttttttttgaaaatcttttaggaaatttaaaataa

SEQ ID NO: 318678 - DNA, 661 bp, Unknown
  Bacterial polypeptide expressing nucleotide sequence isolated from the Sargasso Sea
atgcgagcagcggttataatttttcctggatcaaattgtgatcgagatctgctcgcagcacttcgttttgccggacatgagacaatttcaatttggcacaaagaaacagaattaccaaaatatatagaccttattgcaattccgggtgggttctcttttggggattatcttagatgcggagccatcgccgccaagtctcctatttttagggagataattaagcatattgaccgtggaggatacgcattaggtatctgtaatggatttcagatctttaccgaagctggtattttgccaggtattctacagcaaaataaaggcactaaatttatttcgaaagttattgatctgcgtgttaccaatacatcaagtacttttacacataattactcatataacagtgttatctctatacccatcgcacatcatgaaggaaattattttgcctcaaaggatgacttaaaaaaactcaaagacaaaaattgtattgcttttgaatacattgataatccaaatggcgcttcggataatatcgcaggtattttatcagaaaatcatcgtgttttaggtatgatgcctcaccccgagcgccacactgagagtgcgcatggatgccaggatggttatccttttttcaagggcttgcttgagactagttaaa

SEQ ID NO: 318679 - DNA, 460 bp, Unknown
  Bacterial polypeptide expressing nucleotide sequence isolated from the Sargasso Sea
atggaagaaataacacgacaagttgttttagaacatggactaaaggatgacgaatacgagaagatattggaaatcctaggcagagaacctaattatacagaactaggtatattttctgtgatgtggtctgagcattgttcctataaatcctccaagaagtggctaaaaaccttgccgacagaagctccttgggtgatttgcgggccaggggaaaacgcgggagtagttgatataggagacggcttgtcagtaattttcaaaatggaaagtcacaatcatccatcattcatagaaccctaccagggtgcggcaactggggttgggggtatattaagagatgtatttactatgggtgctcgtccattcgctattcttaacgctcttaggtttggcagtccagaaaatccaaaaactcgccatttgctatctggagtagtacgcggcataggggggtacggaa

SEQ ID NO: 318680 - DNA, 679 bp, Unknown
  Bacterial polypeptide expressing nucleotide sequence isolated from the Sargasso Sea
atgaagtcggctattatcatttttccgggaactaacagagagcgagaaatgataacagccttgggtgaggcacttggcaaccaaccatatgttatatggcacgaagagaatagctttccgcaagttgatttaattgttttaccaggcggtttttcatatggagattatcttaggcctggttcaatggcagctaattctccaattattgcagaaataattaatagagccaatagaggagtttacgttctggggatttgtaatggttttcaagttttaactgaggcccgtcttttgcctggtgcactgatgagaaatattgatcttaactttatttgcagggaagtttaccttcgaacggaaaaccctaattcacagttcttgcaaaaatataattcaggtgaggtattaaaaattcctgtagctcatcatgatggtaattattatgcatctgaggatattctagatgatttagaacagagagacttggtggctttccgctattgcagtcctgatggccaaactagtgaaagttttaatcctaatggttcaaagaggaatatagcaggtatttacaatcacaatcgaaatgtattggggatgatgccccatcccgagaatgcatttgcgcttccttctgatcatggaagaagactctttatgggttttgctgataattagg

SEQ ID NO: 318681 - DNA, 688 bp, Unknown
  Bacterial polypeptide expressing nucleotide sequence isolated from the Sargasso Sea
gatgcgctgcgcggttattgtttttcccggctccaattgtgactccgacctctataaggccgtcaatgcattcgaaggagtggatgcagaatatgtttggtacaccactgaaaacctggatgccttcgacttgattttgcttccgggtggtttcgcctacggggattatctccgtgccggggcattggcggcgaggactcctgttcttaaggctttgatccgggcttcggagaggggtgcccgggtgattggaatttgcaatggttttcaggttcttaccgagtgtgggcttcttcccggagcgcttcagcgtaattccggtctccatttcatctgtgatactcctctcatcgaggtggttcaggaccaatcttcttttacttcgcgttaccgacagggggaattgattcgtctcccgatagcccatggcgagggaaattacatttgtgatgaactcaccttaagacatctccaggcggaaaaccggatcgttttccgttatgcatcaggcagcaatcccaatgggtccgttgataacatcgcaggcatcctcaactccaaaggcaatgtgctgggtatgatgcctcatcctgagcgggccatggctgactggatgggcagcagtgatggccgtcatctttttgagtcagcccttaacctgtttccggaaacagccgatgccgcctga

SEQ ID NO: 318682 - DNA, 2305 bp, Unknown
  Bacterial polypeptide expressing nucleotide sequence isolated from the Sargasso Sea
ctgaacgatgatcaaattaaagaaaaactatctgagttaaatatcccactgactcctgaggaaggacgaaaaatacagcatgaaatgctaggccgctcgccttcattggctgagttggtattattctctatccaaggctcagaacactgctcctataaaagtagccgctctcacttgaaaaactttgttaccgatgggccggatgtggttttaggggcaaaagaagatgctggtgttgttgcaataaccaaggataaaaatgggaaccgttggtgtattgtaatgagccatgagtcacacaatcacccttcccaaattgttccctatgaaggtgctgctacaggcattggtggaaatgtaagagacgtaatgtgtatgggggccgaggtcattgcctgcacagactctttccgatttggaaatataaaacacagcaaaactaaatggattcatgacggggttgttgctggcgtagctggctacggaaaccccctaggaattccaaacatcggtggtgacatatattaccacgatggctattccgaaaactgcctagttactctagtatctcttggtattgttcgggaagatcatataatccactcatatgccccagaaaatgcagagggctacgatctaatcctcataggaaaaccaactgacaacagtggttttggaggcgctagcttcgcatcattagagctggaggaagagaaaaaagaacaaaacaagggagcggttcaagagccaaatgcatttttagaaagacaccttttaaaatccacttacgcgcttttccaatatcttcaggaaaacaatctatgtgaaagggttgggtttaaagatctaggtgccggaggagtggcatgtgccagtgtagaactagcggaaacatcaggctatggatctgaggtttggctggataaggtacacattggaatggagggcctccacccaagcgtatatctatgttcagagacgcaagagagattcatgtgggtatcacctccagagctgactgaaaaaataatttcgcactacaatgaagtttttgatcttccaggggtatcatctggagcgagagcatctgtgataggtaaaattcgtaatgacaaacaatatattgttcacaataatggggaaaaaataattgacgcacttgctgaagaggtaacaaaagggtttttatatgacagagagtataaaaagccagatcaggaatttcatgaaccatcgttgccagcctcattagaccataatgcaatactgaaaaaaatactcgctcatgaaaatattgcatcacgaagcgtggtatatgaatcttatgataaacaagtacaagggagaacagttactgaggcaggccaaagtgatagtggtgttatggcaccatttaatagcgataactatccagaggaaattagaaaagtaggcatcgcactttctacagatcacaatcctagatacagcataattagcccgtatttgggtggtgtaaatgcggttgtagaggcaatgagaaatgtagcagccgttggagcaactccgcatgctttatctgattgcttatgttttggaaatccagaaaaacctcaccaaatgtgggaatttgtagaagcggtcagaggtatctctgatgcatctaacggtataaagttgaaagaaaatcaaaaccacccgacgccaataatcgccggaaatgttagtttttataatgagtctaagtctggtgctattccccctagccctattgttagctgtctagggaaaattaataacgtggaaaacacaatctcgatgtcatttaaaaatgaaaactccgctattctaatagttggctctagaaaagatgaactcggaggtagtcttttctatgatttacatggagaattaggtgcgaatgtccctacaccaaaccttgaagaagttaaaaaccagatatatgcaataacagattgtattgaagaaaaattatttttttcatgccatgatatatctgatggtggacttgccgtagctatttcagaaatgacatttaagaataatatcggatgtgatgtaatggttccaggcaatttagctttagaaaaattattattttctgaaacaggtggatttataatcgaaacagaaccgaaacatctccagcagattaaaaatatttttaaggttcatgatatagtttattataatattggtaaaacaaataataatgggcgcattagatttaatgatgcgattgacttagacctgaaagaagcgaaaactttgtggtcaaacggactcagggataaaataaaatagt

SEQ ID NO: 318683 - DNA, 2272 bp, Unknown
  Bacterial polypeptide expressing nucleotide sequence isolated from the Sargasso Sea
aatgattacgaaagaaatttgcaaaagattaaagagaaaacctaatagaacggaattaggtatgtttggcgtaatgtggtctgaacattgttgttatagaaattcaaaacctttactatctaagtttcctactaaaggtaaaaatgttttagttggacctggagaaaatgctggcgttattgatgttggaaataatcaaaaacttgtttttaaaatagaaagtcataatcatccttctgctattgaaccttttcaaggcgcagcaacaggtgtaggaggaattttaagagatatattcacaatgggtgccaggccaatcgcagtcttgaattcattgagattcggcaaccttgataaatcatcaaatgttgatttactacgaggagttgtatccggtatttcacattatgggaattgcgtaggtgtgccgactgttggaggtgaaattgacttcgatgatagttactctggaaatcctctagtgaatgttatggctttaggacttttagagactgaggaaatcgtttgttctggagctaaaaatgtaggatcaccagtgttatatgttggtaatacaactggcagagatggtgttggtggtgctagttttgctagttcagaattaactacaacttcattggatgatagacctgctgttcaggtaggtgatccatttgttgagaaaagtcttattgaagcttgtttggatgcttttaagacaggggatgtaattgcagctcaagatatgggtgctgcaggtttaacatgcagtagcgcagaaatggccgcaaatggaaatttagggatatctatcgatttagatttggtcccttctagagaagatgatatgtcttcataccagtatttattatctgaatcgcaagaaagaatgttatttgtcgttaaagaagaaaaaattaatgatcttattgaaaaatttaataaatggggattatatgccagtgttattggtgaagtgataggaactaatgaagtaattatttctcataaaggtaaaattgtggcccaaatacctacttctgccttatctgatgatactcctgttaattttcacaatgtgattaataacccaccagatgatcttttaaaaaaatgggaatggaaagaaaatgatttaccagaaattcatgagcaaaaaatattttcattgaaggaaaataagaatttttctttttcagaaatcattttaaaactactctctaatccatcaatagcttctaaacgatggatttataaacaatatgattctcaagttcaggcaaatacagtttttaaacctggaaaatcagatgcagcagtagtaagactaagagaacaaaataaaaaaaataaaagtaaagtattttctggtgtcgctgcttcagttgattgcaatagtagatgggttgcgcttgatccttttagaggatctatcgctgccgttgctgagtccgctagaaatgttagttgtgttggtgctgaaccagtagcaattacaaataatttaaatttttcttcccctgagaatgcaataggatattggcaactttcatcttcatgtaatggaattgctgaagcctgtaaagctttagaaactcctgttacaggaggtaatgtatctttatataatgaatcaaaaaataaagataatctaattactcctatcaatcctacacctgttattggaatggttggaaagatagataatgtcgaaaaagctataagtagtgaatggaaaaatattgaagatgaaatctggttaattggttcttccaaatcagaaataaaaattgcagctagttcttatctggaatattttcatggagaaattacaggtcggcctccaaaaatagatttgttggatgaaaagttttgccagagttttttaagaaatgcgattttaaatagttttgtagtttcttcgcacgatatcagcgacggaggtttagctatagctttagcagagtcttgcattttgtcctcaatgggcgcaactatagaattagagaaaaatgtaaatagagttgataatttattgtttgccgaaggggggtcaagaattattttttcaattagtaaaatgaaacaaaatgaatggtttaattatttaaaacaaaatcaaataaatttcccatcaagtgtttttgtaaaaaaaataggatacgtatctagtgacacgctgaagataaaaatcaacgaaaaaaatatttgcaatattagggttgaggaattaaccgaaaaatttaataatagtatttcaggttacttttaa

SEQ ID NO: 318684 - DNA, 691 bp, Unknown
  Bacterial polypeptide expressing nucleotide sequence isolated from the Sargasso Sea
atgaattctaccattgttatatttcctggaaccaaccgcgaacacgatatggtgatggccgtgcagcaagcaagtggtaaaaaaccgaactttgtttggtacaatgatacaagttttccaaaaacggacttaataatagtgccaggcggtttttcttacggcgattatcttcgctccggtgcaatggcagcaagatcccctgcaatgaattcggttttagagtatgcatctaaaggggttccgatactcggcgtatgtaacggatttcaaatcctaacggaagttggtctattgccgggtgcattaatccgaaacaagaacctgaaatttatatgcagaaatgttagtataaaagttgaagttgatgactcgatctttacatcgcgatattcaaaaggtcagattttatctataccagtagcgcacaatgatggaaactattttgctagcgaaggtcttttacaggaattacatgacaagagtcagatcgccttcaagtatactgatcaatcaggcagagtagatgcgtcaacaaatccaaatggatcctgtgaaaatattgcagggatattgaatgcgcaaaagaatgtactgggattaatgccccatccagaaaatgctactgaccgtaatcttggaggtatagacggcagaccacttttccaaagtttagtggatgcgatcacatgac

SEQ ID NO: 318685 - DNA, 1550 bp, Unknown
  Bacterial polypeptide expressing nucleotide sequence isolated from the Sargasso Sea
gttgttaaagagaacccctaatatcacagaactagggattttttctgcaatgtggaatgaacattgctcttataaatcatcaagattacatttaaagaagctacctactaaaggaaagaaagttatccaaggtcctggagaaaatgcaggtgttatcgatattgaggataatgatgcaatagtttttaaaatagaaagtcacaatcacccatcatttattgaaccttatcaaggagctgctactggtgttggaggaataatgagagatgtatttacaatgggtgcaagaccaattgctaatttaaactctatacattttggatcaccacagcacaaaaaaacaaaaaatttattaagaggagttgttcatggcataggtggttatggaaattgtatgggtgttcctacaattgcaggccaaacaagttttgatagctcctataatggaaatattttagtcaatgctatgacattaggattggtcaaaaaagataagattttttactctaaagcagctggcttaaataagcctgtcatttatgttggatctaaaactgggagagatggaatacatggtgcaagtatggcttcagctagttttgatgaaaaaattgaggagaaaaaaccaacagttcaagttggagatccgtttactgaaaaacttttacttgaggcttgtttagagttgatggcaggagactcaattatagcaatacaggatatgggtgctgctggtttaacatcatcaagtattgaaatggcatctaaaggaaaccttggaattgaaatcaatttaaacaaagtgccatgcagagaaactaaaatgacaccttatgaaattatgctctctgagagccaagaaagaatgttgattattttagaaaacggcaaagaggaagaggcaaaaaaaatatttgataaatggaacttagattttgcagtgattggaaaaaccactaaatctaaaaaaatagaactttattttgatgaagaaaaagttgcagatattccagttaatactttggttgagaactctcctatgtatgatcgtaaatggaaaaaagcaaaactccctaaaaaaaataaaattaaaaaagaagatataaaacatttaaaaattattgatgtattaaagaaaattttagctaacccaaacttatgtagtaaagaatggatttggcaacagtatgatcatacagtcatgggagatacaatacaaaaacctggtggggatgctggtgttgtaaaagttcatggaacggataaagctgtagctgcttctgtagactcctctgcagtttattgttgggcccatcctttaactggtggaaaacaagtagtttgtgaaagttttagaaatcttgtttctgttggtgctaaaccaattgctatcactaattgtttaaattttggtagcccagaaaatgaagaaaatatgggtgagtttgtagaatgtgttcaaggtattggtgaagcaagcgattatttaaaattcccagtagtttctggaaatgtatctttctataaccaaacaaaagataaaggcataa

SEQ ID NO: 318686 - DNA, 1117 bp, Unknown
  Bacterial polypeptide expressing nucleotide sequence isolated from the Sargasso Sea
tatgactcaatcaaaagagaaaatacatacatccacgttagttgatgcagaaattattgcagagcacggtttatcacgggaggagtacaacaaaatattagatattatgggccgagaaccaaatcttttagagctgggaattttttcggttatgtggtcagagcattgctcctataaatcttcgaaatactggctcaaaactttgccaacggaagcaccttgggtaatatgtgggccaggtgaaaatgctggcataattgacattggagatggccaagcagccgttttcaaaatggagagccataaccatccgtcttatattgagccctatcagggcgccgcaacaggcgttggaggtattctacgtgatgtatttacaatgggcgcccgtccaatagccaatatgaatgtattgaggttcggtcgacccgagcaccaaaaaactaaatatctattggaaggggttgtcgctggcataggtggatatggaaattgtgttggcgtgccaactgtcggtggcgaatgcctctttcataagtcatatgatggcaacattttagtaaacgctatgactgtcggaattgcggacaccgataggattttctattctgcggcaaccggtatcggtaatccattgatttatgttggctcaaaaaccggacgcgacggcattcacggagcgacaatggcgtctgcggagttctcctcggaaaccaatgacaaaaggcctactgtccaagtaggagacccgttcacagaaaagcttttaattgaggcgtgtatagaactaatgcagacagattgcatcatagccattcaagatatgggggcagcaggcctgacttcttcaagttttgagatggcttcaaaaggtggcgtgggagttgagatcgatctggataaagttccgcaacgcgagaagaacatgagcgcttacgagatgatgctatccgagagccaagagcggatgctaatggttcttaaaccaggcagtgaggagagagcccgagacatttttaagaaatggacactagatttttctattatagggatgttaactgagactggtcgtatggtgctcacgcatcacgggaagagagtggccgaccttccaatc

SEQ ID NO: 318687 - DNA, 1156 bp, Unknown
  Bacterial polypeptide expressing nucleotide sequence isolated from the Sargasso Sea
atgataaatctagaatataatgatctatatgatcttaatgaagcacttaaatttgaaaatttaacaattaatgattatgaagaaatctgcaaaagattaaagagaaaaccaaataggactgaactaggtatgtttggtgttatgtggtctgaacattgttgttatagaaattcaaaacctttactatctaagtttcccactaaaggaaaaaatgttttggttggtcctggagaaaatgccggcgttattgatgttggaaataatcaaaaactagtttttaaaatagaaagtcataatcatccttctgcaattgaaccttttcaaggagcggcaacaggtgtagggggaatattaagagatatttttacaatgggagcaaggccaatcgcagtattgaattcattgagatttggaaatcttgataaaaattcaaatgttgatttgcttcgaggagttgtatctggtattgcacattatggaaattgtgtaggtgtgcctactgttggaggtgaaattgacttcgatgatagttattctggaaatcctattgtcaatgttatggctttaggacttttagagactaatgaaattgtttgttctggagctaaaaatataggttcaccagtattatatgttggcaatactactggtagagatggtgtaggcggcgcaagttttgcaagttcagaattaactactacttcattagatgatagacctgcagtgcaagtaggtgacccatttattgagaaaagtcttatagaagcttgtttagattcttttaagacaggagatgtaatcgcagctcaagatatgggtgcggcaggtttaacttgcagtagtgcagaaatggctgcaaatggaaatttaggcatatctattgatttagatttggttccttctagagaagataatatgtcttcataccaatatttattatctgaatcgcaagagagaatgttgtttgtcgtaaagaaagaaaaaattaataatcttattgaaaaatttaataaatggggattatatgccaatgtaattggtgaagtaatagagactaatgaagtaattatttctcataaaaataaaattgttgctcaaatccctacttctgctttatctgatgatactcctgtgaatgttcataatgtaattaata

SEQ ID NO: 318688 - DNA, 904 bp, Unknown
  Bacterial polypeptide expressing nucleotide sequence isolated from the Sargasso Sea
aatgattgtaaacgaaaaaatagccattgatcatggattgaaaaaagatgagtataaaaagatctgtgaactcttaaaaagaaaccctaacataactgaattaggaattttctcagcaatgtggaatgaacactgctcctataaatcttcaagactacatttaaaaaaattacccactaaagggaaacaagttattcaaggacctggtgaaaatgcaggagtgatcgatattggtgacaatgatgcaattgtctttaaaattgaaagtcataaccacccttcatttatagaaccttatcaaggtgctgctaccggagttggtggaataatgagggatgtattcacaatgggtgctagaccaatagctaatttaaattcaatacactttggttcatcacagcataaaaaaactaaaaatctattaagaggtgttgtgcatggaataggaggttatggaaactgtatgggagtgcctacgattgcaggacagacaagttttgatagctcttataacgggaatatcttagtgaacgcaatgacgttaggactagtaaaaaaagataagattttttactcaaaagctgctggtttaaataaacctgtaatatacgtaggatctaaaacaggtcgtgatggtattcacggagcgagcatggcctctgctagctttgatgacaaaattgaggaaaaaaaaccaaccgtacaagtcggtgatccttttacagaaaaacttttacttgaagcgtgtttagaattaatggcaggagactcgatcattgctattcaggatatgggagctgcaggtttaacttcttcaagtattgaaatggcttcaaagggaaatcttggaatagaaattaatttaaataaagtgccatgtagggaaacaaacatgaccccttag

SEQ ID NO: 318689 - DNA, 685 bp, Unknown
  Bacterial polypeptide expressing nucleotide sequence isolated from the Sargasso Sea
aatgaaatcatctgtaattatttttccaggctctaactgtgatagagacatggatgttgcattaaaaaaatttggttttaaaaaccagatggtttggcataatgatactaatataccaaaaagtgatttaatagtattgccaggtgggttttcatacggtgactatctaagatgtggaagtatagcagctaagtctaaaattattaaatcagtcattgattttgcaaattctgggggtttggtattgggtatttgcaacggttttcaaatattgattgaaacaggacttcttcctggtgctttattaacaaacaagtatttaaaatttatttgtaaaaatgtttttgtaaaattaaatgaaaatgagagtaaatattttaataaaatcaaaaaaaatatccttgaactgcatattgctcacaatgatggtaattatttttgtacagatgatgagctaaaatctttggatgataataatcaaattgcagtaaaatattgtagtaaagatggagatatttctgaaaattataatccgaatggatcaataaaaaatatcgcaggcatatttaataaaaataaaaatattttaggaatgatgccacatccagaaagagtcattgatcgaagtttatcaagcgaagatggggctttcttttttaaaaacctaattgaaaacctaagataa

SEQ ID NO: 318690 - DNA, 700 bp, Unknown
  Bacterial polypeptide expressing nucleotide sequence isolated from the Sargasso Sea
atgagaaaaaataaatttgcagttttaaatttccctggttccaattgcgaaaaggattgccattttgttattgagcatgttttaaagcaaaattgtaaatatatttggcatgaagagacagacataaataatgttgactgtataataattccaggtggattttcctatggagattatttaagaactggatcaattgctgctcaaagtaaaatagcaaaaagtttgaaaaaatattctaaacaaggtggcacaataattggcatctgtaatggttttcagattttaacagagctcaaacttttaccaggaactttacttagaaatcgttcattaaatttcatttgcaaagaggttaatttagttgtaaataataagtccagatttacaagtaagtatgatcataatgaagtgattaaggtgccaatagctcatgcagagggaaattactttgcaaattcaacaattcataaagaattaataaaaaataatcagataattttttcatactgtgataaagagggtaatattaatgattcttctaaccccaatggatcattaaatggaattgctggcattacaaataaagaaggaaatgttcttggaatgatgcctcaccccgaaagagtatccgaaaaagtttttggtaacacacaaggtctgggtgtttttgaatcaattttagattttcacactaactgat

SEQ ID NO: 318691 - DNA, 685 bp, Unknown
  Bacterial polypeptide expressing nucleotide sequence isolated from the Sargasso Sea
atgaaatcttccgtaattatttttccaggatcaaattgtgatagagacatggatgtagctctaaaaaaatatggatttaaaaataaaatggtatggcacaatgatacagagcttcccaaaagtgatttgattgtcttgcctggtggattttcctatggtgactacttaagatgtggaagtatcgcagccaaatcaaatattattagatcggttatggattttgcaaaaaatgggggactggttgtaggtgtatgtaatgggtttcaaatattaattgaaactggtctactaccaggagccttgttaagaaataaatatttaaagtttatttgtaaaaatgtatttataaaaattaataattttgaaaataaatattttaaaaatattaataaaaacatacttgaacttcatatagctcataatgatggaaattatttttgtacaactgatgaactaaaatctattaaagacaataaccaaatagctttgaattactgtgatcataatggaaaagcaacaaaagattcaaacccgaatggttcactagaaaacatagcaggtatttttaataaagataaaaatattcttggtttgatgccacatcctgaaagaatgattgacaaatatttatcaggtgaagatggaaagatattttttgaaaatttattaaataatttaaaatgat

SEQ ID NO: 318692 - DNA, 1572 bp, Unknown
  Bacterial polypeptide expressing nucleotide sequence isolated from the Sargasso Sea
aatggaagtcactgaggcagttgcaatagatcacggattaaaaaaggaagagttttctaaaatatgtgaacttttgaagagaacgcctaatttaactgagcttgcaatattttctgcaatgtggaacgaacattgttcctataagtcctctagaaaacatttaaaaaaaatgcacaccaaaggtaaacaggtcattcaaggaccaggagaaaatgctggtgttattgatattggagatgatgatgcaatcgtatttaaaattgaaagccataatcacccttcgtttattgagccttatcaaggtgctgcaactggagttggtggaatcatgcgggatgtatttacaatgggagcaagaccaatagcaaatttaaattcaattcatttcggttcacctcaacataaaaaaacaaaaaacttattaagaggagttgttaaagggataggtggatatggaaattgtattggagttccaacgattgctggtcaaactacatttgatgagtcttacaatggaaatattttagtaaatgccatgacccttggtttagtaaataaaaataagattttttattcaaaagctgctggtttagataagccagtaatatatgtcggttcaaaaactggaagagatggaattcatggtgccagtatggcttcagcaactttcgatgacaaaattgaagaaaaaaaaccaacagttcaagtcggagacccatttactgaaaaattattacttgaagcatgcttagaattaatggccgataattcaattattgcaattcaagatatgggtgcagcaggattaacttcttctagtgttgaaatggcatcaaaaggaaatcttggaattgaattaaatctaagcaaagttccttgtagggaagaaaaaatgactccatacgaaataatgttgtcagaaagccaagagagaatgctaatagttcttgaaaaaggaaaagaagaacacgctaagaaaatatttgataaatggaacctagattttgcaattataggtaaaacaacagattcaaaaaaaatagaattaatatttgatagtaaaaaagttgccgaaataccaattgatctcctcgctgaaaatgctccaatttatgatcgtccttggaagaaaactaaattacctcaaaaattaaaatttgataaagatgagtttaaatccctaaaattatcagattgtctaaagaagattttaagtaattcaaatatttcagataaaaagtggatatgggaccaatatgatcatacagtaatgggtgacacaattcaaaaaccaggaggcgatgctggagttgtaagagttcatgggacaaataaagctgttgctgcatccgtagactcgtctgcattatattgtttttcacatccattaaccggaggaaaacaaatagtttgtgaaagctatagaaatcttatttcggtaggagctaaacctattgctattacaaattgtttaaactttggaaatccagaaaaagaaaaaaatatgggtgaattcgtaaaatgtgttgaaggaattacagaagcaagtaagtatctagatttccagtcgta

SEQ ID NO: 318693 - DNA, 1723 bp, Unknown
  Bacterial polypeptide expressing nucleotide sequence isolated from the Sargasso Sea
aatgattgtaaacgaaaaaatagctattgatcatggattaaaaaaagatgaatacaaaaaaatctgtgaacttttaaaaagaactcctaacattacagaattaggaatattttctgcgatgtggaatgaacactgctcttataaatcttcaaggcttcacttaaaaaaattaccaaccaaaggtaaacaagttattcaaggacctggtgaaaatgctggggtagttgatattggagataatgatgcaattgtctttaaaattgaaagtcataaccacccttccttcattgaaccttatcaaggtgctgccacaggagttggtggaataatgagagatgtctttacaatgggtgcaagaccaatagctaatttaaattcaatacactttggttctacacaacataaaaaaactaaaaacctccttagaggtgttgtccatggtataggaggttatggaaactgtatgggggttccaaccattgcaggacaaacaagttttgatagctcttataatggaaatatcttagttaacgcaatgacgttagggttagttaagaaagacaagattttttactcaaaagcagccggtttaaataaacccgtaatatatgttggatctaaaacgggtcgtgatggtattcacggagcaagtatggcttctgctagtttcgatgacaaaattgaggaaaaaaaaccaacagtacaagttggtgatccctttacagaaaaacttttgcttgaagcatgtttagaattaatggctggagactcaattattgctattcaagatatgggggcagcaggtttaacttcttcaagtattgaaatggcttcaaagggaaatcttggaatagaaattaatttaaataaagtgccatgtagggaaacaaaaatgactccttatgaaatcatgctttctgaaagtcaggaaagaatgttgattgttttagaaaatggaaaagaagagcaagcaaaaaaaatatttgataagtggaatttagattttgctgtaattggaaaaacaactaaatcaaagaaaattgaactttactttgatagtgaaaaagttgctgatattccagttaatactcttgttgaaaattcaccgatgtatgatcgtaaatggaaaaaagcaaaacttccaaagaaaaataaaattaataaagacgatataaatattttaaaagtaatagaggtcttaaaaaaaattttagctaatccaaatgtctgtagtaaagaatggatttggcaacagtatgaccatacagtgatgggagacactattcaaaaacctggaggcgactctggtgtggtgagagttcatggcaccaataaagcagttgcagcatctgtagactcttcagcagtttattgttgggctcatcctcttacaggtggaaagcaagtggtgtgcgaaagttttagaaatttgatatccgttggagcaaaaccaattgctattacaaattgtttaaattttggtagtcctgaaaatgaggagaatatgggagagtttgttgaatgcgttcagggtattggagaagcaagctcttatttaaaatttcctgtcgtatctggaaatgtttctttctataatcaaactaaggaccagggaataaaacccactccatctataggcggagttggccttataaaagattataataaaatgattactatggattttaaagaagtcgataatgttgttttagttattggtaaa

SEQ ID NO: 318694 - DNA, 685 bp, Unknown
  Bacterial polypeptide expressing nucleotide sequence isolated from the Sargasso Sea
atgaaatcagcagtcattacatttccaggttctaattgtgatagagatatggatgttgctttaaaaaaatttggttttaaaaataaaatggtttggcatcaagatgttgagttgcccaaaagtgacttggtagttttgccaggtggtttttcttatggagattatcttagatgtggcagcatggcttctaaatctaagattatgcaatcagtaattaattttgcaaattctggtggaatggtgatgggtatttgtaatggttttcaaattttagttgaaacaggattagtgcctggagttttattaagaaacaaatatttagaatttatttgcaaaaatgtttttgtaaaaataaacaataaaaacaatggttatttcaaaaatatcagtaacgatgtattagaactacatatagctcataatgaaggaaactacttttgtacaaatgatcaattaaaagaaattgaagacaatacccaagttgcgattaattattgcgatcctgaaggtaaaattggagaaccattcaatcccaatggttctataaataatattgctggaatttttaataaagaaaaaaatgttttaggaatgatgcctcatcctgagaggatgattgatcattctttatcaggtgaagatggttctcatttttttaaaaacctaatcaataacttaaaatgat

SEQ ID NO: 318695 - DNA, 2194 bp, Unknown
  Bacterial polypeptide expressing nucleotide sequence isolated from the Sargasso Sea
aatggaagtaaatgaaaaaatagctattgatcatggtttaaaaaaagaagaatttaaaaaaatttgtactctattaaaaagagtaccaaatattactgagcttggaatattttcagcaatgtggaatgagcattgttcttacaaatcatcaagaaaacatttaaaaaatcttcatacaaaaggaaaaaaagtaattcaaggccctggtgaaaatgctggcgtaattgacattggtgacgatgatgcaattgtatttaaaattgaaagccataaccacccatcattcatagagccttatcaaggtgctgcgacaggtgtaggtggaattatgagagatgtttttactatgggtgcaagacctatagcaaatttaaattctatacattttggctctccacaacataaaaaaacaaaaaatcttttaagaggtgttgtaaggggaattggtggatatggaaactgtattggagttcctactatagctggtcaaacttcttttgatgaatcttataatggaaatattttagttaatgctatgactttgggtttagtaaataaaaaaaaacttttttattctaaagcagcaggtatagataagcctgtaatatatgttggatctaaaactggcagagatggcatacacggtgctagtatggcatcagcaatttttgatgataaaatagaagaaaaaaaacctacagtccaagttggagatccatttacagaaaaattattattagaagcttgtttggagttaatggcagataattctataattgcaattcaagatatgggagctgctggattaacctcctctagtgtagagatggcatcaaagggaaaactgggaatagaattagatttaagcaaagtaccttgcagggaagaaaagatgacaccttatgaaattatgttatctgaaagtcaagaaagaatgctcatagttttagaaaatggaaaagaaaaaagtgcaaaaaaaatatttgataaatggaatttagattttgctgttataggaaaaaccaccaatactaaaaaaatagaaattaattttaataataaaaaagttgcagacatacctttaaatttactctcagaaaatgctcctatttatgatagaaaatggaaaaaaaataaacttccacaaaaaattaaatttaaaaaagaactttttaaatctctaaaattaagcgattgtttaaaaaaattattaatgcatccaaacatttgtgataaagaatggatttgggaacagtatgatcatactgttatgggagatactattcaaaagcctggtggtgatgcaggtgtagtaagagtgcacggaactgaaaaagcagttgcagcatctgtggattcatcagccttatattgtcatgctcatcctcttactggtggaaaacaagttgtatgcgaaagttggagaaatttaatctcagttggtgcggaaccgatagctataactaactgtttaaattttggaaatccagaaaaagaagaaaatatgggtgaatttgttgaatgtgttcagggaatatctgaagcaagtaaatacttagattatccggttgtgtcaggaaatgtttctttttacaacgaaactaaagataaaggaattaaacctaccccttcaattggtggtgtaggtcttataaaaaattataaaaaaatgatgaatatggaactaaagaaagaaggaaatttaattttagttattggcaaaactgaaggtcatttagaacaaactatctttgcaagggaaatactttcagaaaaaaaaggcccacctccagaaataaatttgtttaatgagaaaaataatggccttacaatttcaaaattaataaaagataatttaattgaatcttgtcacgatatatcattgggtggcattttaatagctgcttctaaaatgtgcatcaaaagcaacaaaggaataaaaataaataatttaaaaaatctaataaataaatttgagtattttttttcagaagatcaaggtagatatctaattgaaattaataaggacaactttaaaaaagttgaaaaaatattcattgataattcagtacattttgacgaacttggagttgttaataatgataaatttttgttttccgatgaaattaacctgtcaattgaagatataattaaagcgtataaaaattggcttaaagagtatatggtaaattaa

SEQ ID NO: 318696 - DNA, 598 bp, Unknown
  Bacterial polypeptide expressing nucleotide sequence isolated from the Sargasso Sea
aatggtttggcataatgatactgaattgccaaaaagtgacttaatcgttttgcctggcggtttttcttatggtgattatttaagatgtggaagtattgcaggtaaatctaaaataattaactctgttattgaatattctaacactggagggttagttctaggtatttgtaatggatttcagatattaacagaaactggactacttcctggtgtattacagcaaaataaatacctagaatttatttgtaaaaatgttcatgtcaaaatcaatgacactaaaaacaaatattttaaaaatattaaaaaagaaattttagaacttcatatagctcataatgagggaaattatttttgttcaaatgatgaattaaaattaattgaagataataatcaaatagctgtgacttattgtgataaagatggtacttgtgataataatagcaatccaaacggtgcaataaaaaacattgctggaatttttaataaaaataaaaatattctcggaatgatgccccaccctgaaagaatgatagataaatatctttctggtgaagatggttcaatattttttgaaaatttaataggaaatttaaattaa

SEQ ID NO: 318697 - DNA, 826 bp, Unknown
  Bacterial polypeptide expressing nucleotide sequence isolated from the Sargasso Sea
atggaagtaacagaaactgtcgctttagatcatggtttaaaaaaagatgagttcgcaaaaatatgtgaattattaaaaagaattcctaacctaactgaattagcaatattttcagcaatgtggaatgaacattgttcttataaatcatcaagaaaacacctaaaaaaacttcatacatcaggaaaacaagttatacaaggtccgggtgaaaatgcgggagttatagatattggtgatgatgatgcaatagtttttaagattgaaagccataatcatccatcttttatagagccttatcaaggagcagcaacaggcgttggtggtattatgagagatgtattcacaatgggagcaaggcctattgcaaatttaaattcaattcactttggctcacctcagaacaagaaaactaaaaatttattgcgaggtgttgttaaaggaattggaggatatggtaattgtattggggtaccaactatagcaggacaaacatcttttgatgattcttacaatggaaatattttagttaatgcgatgactataggtctagttaataaaaataaaattttttattcaaaagctgccggaataggaaaaccagttatttatgttggatcgaaaactggtagagatggaattcatggcgccagcatggcatctgctacttttgatgacaaaattgaggaaaaaaaacctacagttcaagtaggagatccatttacagaaaaattattactagaagcctgtttagaattaatggcagataaatcaattattgctatacaagacatggggggctgcaggattaacttcatcaagtgttgaa

SEQ ID NO: 318698 - DNA, 691 bp, Unknown
  Bacterial polypeptide expressing nucleotide sequence isolated from the Sargasso Sea
aatgaaggcatctataattgtctttcctggatcaaattgcgatagagatattgctgtatctattaaaaaacttacagatctagaaccaataatggtctggcataaagaaacctccatacctgattcagatttaatagttattccaggcggatttacatttggagattatttaagatgtggttctatagcagcaaatagcccaattatgaatgatgtcattaaaaaagcaacaggcggattaccaactttaggaatatgtaatggttttcaaattcttacggaatcaggattgctacctggaacactcattaaaaatgattgtctttcctttttatgtaagactgtttcaataagggttgagaataatgaaacaaatttttctaaaaaatataagcaaaatgaagtgatcaatatacctattgctcacaatgaaggtaatttctttgctaatgaagatacattgaaaaaaattaaagactctaatcaaataatttttaaatattgcaatcaaaatggagaggtaaataatgaaacaaatccgaatggttcaatcgaaaatattgctggtataacaaatgagcaaggtaatgttttgggtatgatgcctcatcctgaaagagcaacatgtgaaattacaaaactttcagatggagaaaacctttttaaatctatatcggagtttttattgtga

SEQ ID NO: 318699 - DNA, 679 bp, Unknown
  Bacterial polypeptide expressing nucleotide sequence isolated from the Sargasso Sea
atgagatcatctgtaatagtttttcctggttcaaattgcgatagagacatagctgtagcgttagaaaagctgcaatttaagaattcaatgatttggcataaagaaaatgaactgcccaagtcagaccttatcgtaattcccggaggattttcttatggggattatttaaggtcaggagcaattgctgcaaaatcaaacatattaagtgaggtcattagtgcgggtaaaagaggctctttaattttgggtatatgtaatggatttcaaattttaatcgagtgtggtttattacaaggtgctttgttgagaaattctggattaaaatttatatccaaagatatacacgtgaaagttcaatctaataaaaataaattttttaataagtacaaattaaatgaaatattgaaattaaatattgcacataatgaaggcaattacttcactgataaaaaacatttagatgaattagaaaatgatgatctaataccaattaagtattgtgataaaaaaggaaatattaattctggaattaatccaaacggatctataaataatattgctggtatttttaataaaaataaaaatattttaggtatgatgcctcatcctgaaagaatgtctgataaaattttatcaaatgaagatggattgggattatttttaagtttaatgaattaac

SEQ ID NO: 318700 - DNA, 403 bp, Unknown
  Bacterial polypeptide expressing nucleotide sequence isolated from the Sargasso Sea
atgactataacaaaacaacaaatcgaagtacatggtttaaaacttgatgaatacaaaaaaattaaggatcttttaggtcgagaacctaatttattagaattaggtattttttctgcaatgtggaatgagcattgctcctataaatcgtcaaaactacatttaaaaaaattgccaacgaaaaataatattgttattcaaggaccgggtgaaaatgcaggtgtcattgatgtaggtgacaatgatgcaataatttttaaaattgagagtcataaccatccatcttttattgagccttatcagggagccgcgactggtgttggtggtatactgagagacgtctttacaatgggtgctagaccaattgcccttatgaattcaatacattttgttcgcctgaaaataa

SEQ ID NO: 318701 - DNA, 1656 bp, Unknown
  Bacterial polypeptide expressing nucleotide sequence isolated from the Sargasso Sea
aatgagtttccaagaacatgaaaaattacacattgaaaaaaatgttaaacgagaactaactactactgaatcgcaaatccttgcagcagaatggtctgaacactgttcatacaagtcctcaaaacaacatctcaagatgttgccgacgacaggtccaaatgttattgtagagaaaggatatgattccggtgttttagatgttggcgatggttatgtagtaactgttcacattgaaagtcataaccatccttctgctgtagaaccatttggtggggctgcaactggtgttggcggcgtcattcgtgatattctatctgcaggtacaaggcccattgcactatttgacggcttacgatttggcaatatagaaactgattcgcatgctagatggttattcaaaaatgcagttgcaggaattgcagattatggaaattgtcttggcattcccactattggtggtgaagttgaatttgatgaatgctacaaaaattatgctctagtagatgttgctgcagttggttttggaaaaaaatcaaaattaattaaaaaccatgcaaacattggtgatttagttattctcataggcggttctactggccgtgacggcgttggtggttctcaatttgcgtctgatgcattagaaggcgaagaccgttctgcagtacaaattccggatcctttcattgaaaaattaatcattgaagcaattctggaatgccgtgatcaaaactgcatcaatgcgatgaaagatttaggcggcggaggattatcttgtgctatatctgaaacagctgaaagtttaggaataggtattgaattagatgtaaaaaatgtacatctgcgtgagtctgatttggcgcctgaagaaattatgatatctgaatcccaagaaagaatgcttgttattgccagtccagacaatctttcaaaaattaacagtatctgtgacaaatttagaatccagtgttctgttcttggtaaagtaaaagaagacaaaatgatgcatgttaaaaatggaaatgaaactattgcattacttcccgctgactttgtagcacgaggacccctaatctctagagagaaatcaaaaccaaaatacctttcaaatttacctgtggctcctgagcaacaaaacaatctgtcttttacagacgtattgctgaaattgctttcttctccaaatattgcaagtaaacattgggtatatcgtcaatatgatcatgaagttggaattagaactgtgattaaacctggatatgacagctcagtattacgtctggataatggaaaatcattatctgtaaaaatagatggtaatccgaagcattgttacctgaatcctagacagggagcaattggttgttttgaagaagcatgtagaaatgttgtatgtactggtgctactccgataggaatggttgatcatttacaatttggaaatcctgaggatcctgaaatattttggacattcatggagtctattgaaggaatcacggattttgcaaaatctctaaacataccatgtgttggtggtaaagtaagcttctataacgaaactattgacggtccaataaaaccaactccgttaataggcgtacttgggttaggggatagttctccgctccatcctaatcctccttcagaaaatgatgtgat

SEQ ID NO: 318702 - DNA, 649 bp, Unknown
  Bacterial polypeptide expressing nucleotide sequence isolated from the Sargasso Sea
aattgtgatcgtgacatgcatcacgtacttactgatgtatttgacttaaacgccgaattcttttggcatgaaaaaaacctccctgaaaatattgatgctgtggtacttcctggtggattctcttatggagatagattaagagcaggtgtaattgcggctcatagcccaattatctctgatgtgaaaaaattagctgaaaagggtatccctgttttgggcgtatgtaatggatttcaaattcttgtagagtctggacttcttccgggcgttttattgaaaaatgaatcattgaatttcatgtgtgagtggacaaatctaattgtaaaaaataacaaaaccccttttacaaacaaacttgaacttaatcaaaaaatcccaatcccgattgcaaacggtgaaggtagatactttgttgatgaacaaactcttgaacaactagaaaaaaataatcaaattgtattttcttatgaaaataaagttaatggatccgtatctcaaatagcaggtgtttgtaattctgatggcaatgttgttggtatgatgcctcatcctgaacgtgcagctgaaaaagaaatcaatcaaattgatcacaagccttcttctctaatctttgaatctcttgttgaaacggtaggtatgaaaaaatgag

SEQ ID NO: 318703 - DNA, 1868 bp, Unknown
  Bacterial polypeptide expressing nucleotide sequence isolated from the Sargasso Sea
aatgatagttaatgaaaaaattgccatagaacatggtcttaaatctgatgaatataagaaaatttgtgatttattaaaaagaaatccaaatataactgaacttggaattttttctgcaatgtggaacgaacattgctcttataaatcatctagacttcatctaaaaaaattaccaacaaaaggtaaaaaagttattcaaggaccaggtgaaaatgcaggtgttatagatattgaagatggtgatgcaatagtatttaaaattgaaagtcacaatcacccctctttcatagaaccttatcaaggagcagctactggcgtaggtggaattatgagggatgtctttacaatgggtgctcgaccaatagctaatttaaattcaattcactttggctctccccaacataaaaaaactaagaatcttttaagaggtgttgttcatggaattgggggttatggtaactgtatgggtgttcctacaatagctggtcaaacatcttttgatagctcttacaatggtaatattttagtcaatgctatgactttaggtttggttaaaaagaataaaatattttattcaaaagcagcaggactaaataaaccagtgatttatgtaggttctaaaactggaagagatggtattcatggtgctagtatggcttcagcaagttttgatgaaaagattgaagaaaaaaaaccaactgttcaggttggagacccttttactgaaaaacttcttttagaagcatgtttagaattaatggctggcgactcaatcattgctattcaagatatgggtgcagcaggtctgacatcttcaagcattgagatggcatcaaaagggaatttaggagtagaaataaatctaaataaagttccttgtagagaagctaaaatgacaccttatgaaattatgctatcagaaagtcaagaaagaatgttgatcgtattagagaatggtaaagaagaattagcaaagaaaatattcgataaatggaatttagattttgcaataattggtaaaactactgactcaaaaaacattgaattattttttgacgataaacaagttgcaaatatcccagttaatacattagttgaaaactcacctatgtatgatcgaaaatggaaaaaatctaaattgccaaaaaaaaataaaataaaaaaggtttcattaaatagtcttaaaattaaagatgtattaaagaaaattttatctaacccaaatatatgtagcaaagaatggatttggcaacaatatgatcatacagttatgggtgatacaattcaaaaacctggtggggactctggtgtagtaagaattcatgggacaaataaagcaatagcagcgtcagtagactcatcagcagtttattgttgggcgcaccctttaactggtggaaaacaagtagttgcagaaagttggcgaaatttaatttctgttggtgcaacaccaatagcaataacaaattgtttaaattttggaagtccagaaaatgaggataacatgggtgaattcgttgaatgtgttcagggtattggagaggcatgtgaatacttaaactttcctgtcgtttcaggaaatgtttctttctataatcaaacaaaggaaataggaatcaagccaacaccttctataggtggagttggactaataaaagattataataagatgattactatgaattttaaagaaattaataatatagttatggtcattggaaaaactgaaggacatattgatcaaagcctttttgctagatcaattttagatgaaaaaaatggccccccgccagaagtaaacctttttaatgaaaaaaataatggagagacattattaaatttaatacaaaaaaggtcatataaaaggc

SEQ ID NO: 318704 - DNA, 691 bp, Unknown
  Bacterial polypeptide expressing nucleotide sequence isolated from the Sargasso Sea
aatgaaggcatctataattgtctttcctggatcaaattgcgatagagatattgctgtatctattaaaaaacttacagatctagaaccaataatggtctggcataaagaaacctccatacctgattcagatttaatagttattccaggcggatttacatttggagattatttaagatgtggttctatcgcagcaaatagcccaattatgaatgatgtcattaaaaaagcaacagacggattacccactttaggaatatgtaatggttttcaaattcttacggaatcaggattgctacctggaacactcattaaaaatgattgtctttcctttttatgtaagactgtttcaataagggttgagaataatgcaacaagtttttctaaaaaatataagcaaaatgaagtgatcaatatacctattgctcacaatgaaggtaatttctttgctaatgaagatacattaaaaaaaattaaagactcaaatcaaataatttttaagtattgtaatcaaaatggagaggtaaataatgaaacaaatccgaatggttcaatcgaaaatattgctggtataacaaatgagcaaggtaatgttttaggtatgatgcctcatcctgaaagagcaacatgtgaaattacaaagctttcagatggagaaaacctttttaaatctatatcggagtttttagtgtga

SEQ ID NO: 318705 - DNA, 1542 bp, Unknown
  Bacterial polypeptide expressing nucleotide sequence isolated from the Sargasso Sea
aatgattgtaaacgaacaagtagcagttgatcatggcttaaaaaaaaatgaatatgctaaaatctgtgaactgttaaagagaaatccaaatatcacagaacttggtattttttctgcaatgtggaatgagcattgttcttataaatcatcaagattacatttaaaaaaactacctactaaaggaaagaaagttattcaaggtcctggagaaaatgctggcgttatcgatattgaagataatgatgcaatagtatttaaaatagaaagtcacaatcacccttcatttattgaaccttaccaaggtgctgctaccggtgttggaggaataatgagagatgtatttacaatgggtgcaagaccaatagctaacttgaactctatacattttggatcaccgcaacataaaaaaacaaaaaatttattgagaggtgttgttcatggtataggaggatatggaaactgcatgggtgtcccaacaattgcaggtcaaacaaattttgatagttcctataatggaaatattttggttaacgctatgactttaggattagtcaaaaaagataaaattttttactctaaagctgctggtttaaataagccagttatttatgttggatccaaaactggaagagatggaatacatggtgcaagtatggcttcagctagttttgatgaaaaaatcgaagaaaaaaaaccaacagttcaagttggagatccgtttaccgaaaaattactaatggaggcttgcttagaattaatgaaagataattctattatttcaatacaagatatgggtgcggctggattaacttcatcaagtgttgagatggcttcaaagggaggcttagggatagaattaaatttagaaaaagtcccatgcagagaggaaaatatgacaccttatgaaatgatgctttctgaaagtcaagagagaatgttgattattcttgaagatggaaaagaaaaatacgctgaagagatattcaaaaaatgggatttagattttaatataattggtaaaactactgatacaaataaattaacgctcaagtataaaaataagattcaaggagaaattcctattgatgctttagcttctaaggcaccagtttatgatagaaaatggactaaaaaaaaattgttaaataaaaaaattaactttaaaaatttaaaaaaagtaaaggtagaagatgctttaataaaaattttatcttcaccgaatcattcaaataaaacatggattacaagccaatatgatcaaatggttatgtgcgacactgcacaaaaatctggtggcgatgctgctattattagaattcataataccaataaagctattgcagtatcggttgattcctccgctaactactgcaaggcacaccctttcacgggaggcaaacagattgtatgtgaaaattggagaaatctagtttctgttggtgctaaaccaatagccattactaattgtttaaattttggtaatcctgaaaatcctgaaatcatgggagaatttgctgagtgtttactcggaattaaagaagc

SEQ ID NO: 318706 - DNA, 1630 bp, Unknown
  Bacterial polypeptide expressing nucleotide sequence isolated from the Sargasso Sea
atggaagtaaatgaaaatatagctatagagcatggtcttaaaaaagaagaatttgataaaatatgtgatctattgaaaagaaaaccaaatcttactgaacttggtattttctcagcaatgtggaatgaacattgttcttacaaatcttcaagaattcatcttaaaaaattaaatactaagggaaaaaaagttattcaagggcctggagaaaatgcgggtgtaattgatatcgatgataacgatgcaatagttttcaaaattgaaagccataatcatccatcttttattgagccatatcaaggtgctgcaactggagttggtggaattatgagagatgtttttacaatgggcgcaagaccaattgctaatttaaactcgattcactttggatcgccagatcatcctaaaacaaaaaatttattaagaggtgttgttaaaggtattgggggatatggaaattgtatgggtataccaaccataggaggacaaacatcatttgatgagtcttacaacggaaatatacttgtaaatgctatgaccttgggattagttgataaaaaaaaaattttttattcaaaagcagcaggtataaataaacccgttatttatgttggttccaaaaccggaagagacggtattcatggagcaagtatggcctctgcaatctttgatgataaaatagaggaaaaaaaacctactgttcaggtaggagatcctttcactgaaaaattattgttagaagcttgtttagaattgatgtctggtaaatcaataatatcaattcaagatatgggtgcagcaggattaacctcgtcaagtattgaaatggcatcaaaaggtaatcttggtattgaattacatttagataaagttccatgtagagaggaaaatatgactccttacgaaattatgctttctgaaagtcaagaaagaatgctaattgttttagaaaatggtaaagaagatgaagcaaaaaaaatatttgataagtggaatcttgattttgcaataataggaaaaacaactaattcaaaaaaaattgaattattttttaataaagacctggttggaacaatacctattaacatattagcagaaaacgcacctctttatgatagaaagtggaaaaaaactaaactaccaaataaatctaaaataaataaaaataattttaaaaatttaaaattaatcgatacattaaaaaaaatattaagtaatccaaatgtcacaagtaaagaatggatatgggagcaatatgatcacacggtaatgggtgatactatcgaaaaacctggctcagactcaggaatagttagagtccatggaactaataaagctgtagccacttcagtagattcatctgctgtgtattgtttcgctcatccattaactggtggaaaacaaatagtttgtgaaagttggagaaatttaatttcgtgtggatcaacacctattgctattaccaattgtttaaattttggtaatccagaaaaagaaaaaaatatgggtgagtttgttgagtgcgttgaaggaattaatgaggctagcaaatatctcgattttcccgttgtttcaggaaatgtatctttttataatgaaactaaagataaaggaattaagcctactccgg

SEQ ID NO: 318707 - DNA, 1099 bp, Unknown
  Bacterial polypeptide expressing nucleotide sequence isolated from the Sargasso Sea
atggaagtgaatgaaaaaattgctgtagaacatggacttaaacctgatgaatatcaaaaaatttgtgatttattaaaacgtgttccaaatttaaccgaacttggaattttttcagcaatgtggaatgaacattgttcttataaatcctcaagattacatttaaagaaattaaatactaagggtaaaaaagtaattcagggcccaggtgaaaatgctggtgtgattgatattggagatgacgatgcaatagtttttaaaattgaaagtcataaccacccatcgtttatagaaccctaccaaggtgccgcaacaggtgttggtgggataatgagagacgtttttacaatgggcgcaagacctattgcaaacttaaactcaattcattttggctcaacacaacataagaaaactaaaaatttgttaagaggggttgttaaaggaattggaggctacgggaattgtattggagttccaactatagctggccaaacttgctttgatcaatcctataatggaaatatcttagtcaacgcaatgacattgggtttggtaaataaaaataaaattttctactcaaaagctgcagggataaacaaaccagtaatatatgttggttcaaagactggaagagatggtattcatggagcaagtatggtgtcagcaatatttgatgacaaaatagaggaaaaaaaacctactgtccaagttggagatccttttactgaaaaacttcttttagaggcttgtttggaattaatgtccgataaatcgattattgcaattcaagatatgggtgcagcaggattgacttcatcaagtattgaaatggcatcaaaaggaaatttaggaattgaattacatttagataaagttccttgcagagaagagaaaatgacaccttatgaaattatgttgtctgaaagccaagaaagaatgttgatagttttagaaaatggaaaggaagatagtgcaaaaaaaatatttgataaatggaacctagattttgcagtaataggaaaaacaactgactccaaaaatattgagctttattttgaaaaagaaaaagtagcaaatgtaccaattaaatttttagcataat

SEQ ID NO: 318708 - DNA, 685 bp, Unknown
  Bacterial polypeptide expressing nucleotide sequence isolated from the Sargasso Sea
atgaattcatcggtaattatattcccaggatctaattgtgatagggatatggatgttgcattaaaaaagtttggttttaaaaataaaatggtctggcatgacaatgataagttgcccaaaagtgacttaatagtcttgccaggtggattttcttatggggactatcttatatgcggaagtatagctggaaagtctaaaattattcaatcagttatagattttgcaaattctggaggtatggttttaggaatttgtaatggatttcaaatcttaacggaaactggtctgttaaaaggagttctccaacaaaataaaaatattgaatttatttgtaaaaatatatttgttaaaattaacaatagtgaaaacaaattttttgaaaatatacataaagatgttttggaacttcatatacctcataatgaaggtaactatttttgtactgaagatgaactaaagtcattagaggacaacaatcaaattgcagctttttactgtagctctgatggaaaaatagatgataagtcaaatccaaacggtgcaagaaaaaatattgctggaatattcaatgaaaagaaaaatattttaggaatgatgcctcatcctgagagaatgatagataaatatttgtctggtgaagacggttcaaaattttttgaaaatttaattagaaatttgaaataat

SEQ ID NO: 318709 - DNA, 673 bp, Unknown
  Bacterial polypeptide expressing nucleotide sequence isolated from the Sargasso Sea
aatgaagacacatgtaattgtttttccgggttcgaactgtgacagagatgtcgctgttgcaattcaaaacattattggctcttcacctgaaatggtttggcacaaagattcaacaataaaacaatcagatttgattgttgttccaggtggattttcttacggtgattatttacgatgtggcgcaatggcgtcaacatcacctatcatgaaaagtgtgattgaaaatgcaaataaaggagtgccagtaatgggcatttgtaatggatttcaaattctaattgaaagcggtcttcttcaaggcgcgctaataaggaatagcagtttaagctttatatgtcgcgatataataatcaaaccaacaaatacaaaaactatatttactaataaatctaaaatttcgaaaatgccaatagctcacaatgagggaaattactttgctaacagtaatcaaataaaagaaattgaagacaacgatcaaattgcatttcaatactgtgacgaaaacggagatatcaatgcccattcaaatccaaacggttcaataaataatattgctggggtgttcaacaaaagcaaaaatgtactaggtatgatgcctcaccccgaaagagcagctgaaagcattcatggatgtgatgatggaagaaatatttttgaaagtcttctaagttaa

SEQ ID NO: 318710 - DNA, 685 bp, Unknown
  Bacterial polypeptide expressing nucleotide sequence isolated from the Sargasso Sea
gatgaagtcagctgtaataatatttccaggatcaaactgtgacagagatatggacgttgcgttaaagaaatttggttttaaaaaccaaatggtttggcacaatgatcaagaaattcctaaaagtgatttaattgtattacctggtggtttttcctatggagactacttgagatgtggaagtatagctgcaaaatcaaaaataattaaatctgttatagatttttcaaattctgggggtctgatattaggtatatgcaatggatttcaaatactaacagagactggtttattaccaggagttcttctacaaaacaaatatcaaaaatttatatgtaaaaatgttcatgtaaaaataaatgataaagaaaataagtattttaaaaatatcaaaaaggaaattctagaattgcatattgcccataatgaaggaaattatttttgttcagatgatgaaatgaaatcattaaatgataataaccaaatagcagttacctattgcaatgaaaaaggcaaagaagatgaacaattcaatccaaatggtgcatcaaaaaatattgctggcatttttaataaaaaaaaaaatatcttaggaatgatgccacatcctgaaagaatgatagataaatatctttcaagtaatgatggtaattttttctttgaaaacttatttgaaaatttaaaataa

SEQ ID NO: 318711 - DNA, 484 bp, Unknown
  Bacterial polypeptide expressing nucleotide sequence isolated from the Sargasso Sea
atgcggagcaattgcgagattctctccattaataaatgccttggatgagtttgttaaaagcggcaaaagagttttaggaatttgtaatgggtttcaaattttgacagaatcaggatttttgcctggtgctcttgttgcaaataaaaatcttaattttatatgtgatgacgttgaactggatatcgtctcttcaaaaggaggttggtttaataatggagatgaaaaacaatctattaagttgccaatagcccatggagaaggaagatatcattgtgattctgatactttaaaaaaacttgtagataatgaattaatcgctttgagatataaaaataatcccaatggatcctcatttgatatcgcaggcataactaatgaaaagggaaatgttctaggtttaatgcctcatccagagcgtgcatgtgacgagacaattggtgggactgatggtctctttacattaaaatcattaatattgaaataa

SEQ ID NO: 318712 - DNA, 685 bp, Unknown
  Bacterial polypeptide expressing nucleotide sequence isolated from the Sargasso Sea
aatgaaatcatctgtaataacttttcctggttcaaattgtgatagagatatggatgttgctcttaaaaaatttggttttaaaaatcaaatggtttggcataacgataatgaattacccaaaagtgatttagttgttttacctggaggtttttcttatggagactatttaagatgtggaagcatggctgcaaaatccaagataatgcaatcagtaataaattttgcaaaatcaggtggtttagttatgggtatttgtaatggctttcaaatattagttgaaacaggtttagtaccaggagttttgttaagaaataagtatttagaatttatttgtaaaaatgtttttgtcaaaattgataataaagaaaatccatactttaaaaatttagataaagaagtttttgagtttcatattgctcacaatgaagggaattatttttgtacaaatgatcaattgaaagaaattgaagacaacaatcaagtagccatatattattgtagtagcagtggtcaaactgaggaaacatttaatccaaatggttccataaaaaatatagcaggtatttttaataaggaaaaaaatgtcttaggaatgatgcctcatccagaaagaatgattgacaagaacttatctggagaagatggctctatatttttaaaaaatttaattggaaatattaaataa

SEQ ID NO: 318713 - DNA, 667 bp, Unknown
  Bacterial polypeptide expressing nucleotide sequence isolated from the Sargasso Sea
gatggataattttactgtaggagttgttgtcttccctggttctaattgtgatcgtgatgtttcatgggcattggaaggttgtctagacataagaacaaaatacttgtggcatgagtcttcagatttaagtgatgtagatgcaatagttttacctggaggatttagctatggtgattatttgagatgcggagcaattgcgagattctctccattaataaatgccttggatgagtttgttaaaagcgggaaaagagttttaggaatttgtaatgggtttcaaattttgacagaatcaggctttttgcctggtgcccttactgcaaataaaaatcttaatttcatctgtgatgatgttgaacttgatatcatttcttcaaaaggaggttggtttaataatggaggtgaaaaacaaactattaagttgccaatagcgcatggggaaggaagatatcattgtgatcctgatactttaaaaaaacttgtagataatgaattgattgctttgagatataaaaataatcctaatggatcctcattcgatattgcaggcataactaatgaaaagggaaatgttctaggtttaatgcctcatccagagcgtgcatgtgacgagacaattggtgggactgatggtctctttacattaaaatcattaatattgaaataa

SEQ ID NO: 318714 - DNA, 1483 bp, Unknown
  Bacterial polypeptide expressing nucleotide sequence isolated from the Sargasso Sea
atgattaattcaaaaaataggcaaagaaaagtttcccggtcaattgcccttgaccttggcttaactaattctgaatataataaagtattagaaattcttggaaaaaaaccaaactttacagaattatgtattttttcagccatgtggagtgaacactgctcttataaatcatccaaaaaatggctgaaaactatggactttcaaaatgatagtgtgatttgtggaccaggggaaaatgctggtgtaattgatataggcaacggacttgccgctgtatttaaaatggaaagccataatcatccatcctatatagaaccattccaaggtgcagctactggagttggaggaatacttagagatgtattcactatgggagctagacctatagcaaacctgaattgtataagatttggatcgcccaaacaccctaaaacaaagtaccttttggagggtgttgtggcaggtataggagggtatggtaattgtgtgggtatacctactgtaggaggggaaacgtattttaatgaacattacaataataatattcttgtaaatgcaatgactgtagggataactaaaagtaacaaaattttttattctaaagcttcaggggttgggaatcctgttgtttacgtaggctctaaaactggaagggatggaattcatggagctagcatgtcatcagctgagtttgatgagactattgaaactaagagacccaccgtacaagttggagacccctttactgaaaaattattgcttgaagcatgtctagaattgatggaaagtgatgcaataatctcaattcaggatatgggagcagctggattaacatcctcatcttttgaaatggcatcaaaaggtaacctgggaatagaaataaacttagacatggttcctcagagagaattaaacatggaagcatttgaaataatgctgtctgaaagtcaagaaagaatgttaatagtgattaaaaagggaaaggagaaagacgcagaacaaattttccaaaaatgggagttgccattttctataattggtatgttaacaaatactggcaatatgactttatataaaaatagttcattagtagcaaaattgccaattgctccacttgtttcggaagctcctgaatatgacagaaaatggaaaaaaacaactcaagaaaataatctgtctattaaaaaattagaccaaataaatatacaagaaagtctattaaaaatattaagttctccaaacttaagttcaaaaaaatgggtttggggccaatatgatcacatggttatgactaatactatagttggaccaggatcagatgcagcagttattagaatagggaaaagcaatactgctttagcaataacaacagactgtaatcctctttatgttaatggaaacccaaagttaggctctatacaggcagttgctgaaagctggagaaatttaatttgtgttggcgcaaaccacttgcaattactga

SEQ ID NO: 318715 - DNA, 993 bp, Unknown
  Bacterial polypeptide expressing nucleotide sequence isolated from the Sargasso Sea
catgaataaaattacagaaaaaatggttgaagaacacggaatcagttctgaagagtatgattttattctcgagtcattaaaccgggaccctactatcacagaattaggtatcttttctgctatgtggtcagaacattgctcttataaatcttcaaaatattggttaagtcaattacctacaaaaaatgattttgtaattcaggggccaggtgaaaacgccggtgttattgatattggggatgggtatgctgctgttttcaaaatggaaagtcataaccacccatcttttatagagccatatcaaggtgcagcgacaggcgtaggtggtatacttagagatgtattcactatgggggcaaggcctgttgcacttcttaactcaattaggtttggcgaaacttcacatgaaaaaactaaacatctactgacaggagtagtttccggtattggaggttatggaaattgcatgggaattccaacagtaggtggtgaagttgaatttaattcatcatataatgataatattcttgtgaatgctatgtgtgttggaatagcaaaaaaagataaaatattttattcaaaagcatcgggggtaggtaattctgtcgtttatgttgggtcaaaaaccggaagagacggaattcatggcgcaacaatggcttctgcagagtttgatgataactctgaagaaaaaagacctacagttcaagttggtgatcccttttccgaaaagctgcttctagaggcatgtatggaacttatgaaaatggatgtaatagttgctattcaggatatgggtgcagctggacttacatcatcggctgttgaaatggcgggtaagggaaatttaggtattgaacttgatttggataaggttccttgtagagaagaaagaatgtcagcttatgaaataatgctctcagaaagtcaggaaagaatgcttatgattttagagccagataaagaagatattgcaaagaaaattttgaaaag

SEQ ID NO: 318716 - DNA, 541 bp, Unknown
  Bacterial polypeptide expressing nucleotide sequence isolated from the Sargasso Sea
atttacatttggtgattatttgagatgtggttcgattgcagcaaatagcccaataatgaatgatattataaagaaagcttcagacggattaccaactctaggaatatgtaatggttttcaaatccttacagagtcaggtttgttgccaggaactcttataagaaatgactgcctttctttcttatgtaagacagtttcaataagagtcgaaaataatgaaacaaaattttctaacaaatataaacaaaaagaaataataaatattcccatagcccataatgaagggaatttttttgctaatgaagatactttaaaaaaaataaaagactctaatcaaatcatttttaaatattgtgaccaaaatggtgaagttaatgaaaaatcgaacccaaatggttcaattgaaaatattgcaggcataacaaatgaaaaaggtaatgtcttagggatgatgcctcacccagaaagagcaacatgtaaaattacaaaactaacagatggtgaaaacttgtttaaatcaatatatgagtttttatcatga

SEQ ID NO: 318717 - DNA, 685 bp, Unknown
  Bacterial polypeptide expressing nucleotide sequence isolated from the Sargasso Sea
atgaaatcatcagttattacttttcctggttcaaattgtgacagagatatggatgtagctttgaagaaatttggatttaaaaataaaatggtttggcacgatgatgctgaattgccaaaaagtgatttagttgttttgccaggtggattttcatatggcgattacttgagatgtggaagtatggcatctaaatcaaaaataatgcaatctgtaattaattttgcaaattcaggcggtatggttatgggtatctgtaatggatttcaaatattagttgaaactggtttggttccaggagttttgcttagaaataaatatttggaatttatttgtaaaaacgtttttgtaaaaattaatgataaaaaaaataattattttaaaaatgttaataacgaaattttagaatttcatatagctcataacgagggaaattatttttgtactaatgatcaattaaaagaaattgaagataataatcaaatagctattaactattgtgataaaaatggaacaatagaagaccaatttaatcctaatggatccataaaaaatattgctggtatatttaataaagcaaaaaatgttctaggaatgatgccccaccctgaaagaatgattgacaaatctttatcaggtgaggacggatcattattttttaaaaacctaataaacaacctaaaatgat

SEQ ID NO: 318718 - DNA, 1588 bp, Unknown
  Bacterial polypeptide expressing nucleotide sequence isolated from the Sargasso Sea
tatgttggatctaaaactggggagagatggaatacatggtgcaagtatggcctcagctagttttgatgaaaaaattgaggagaaaaaaccaacagttcaagttggagatccgtttactgaaaaacttttactagaagcttgtttagagctaatggctggagactcaattatagccattcaagacatgggtgctgcaggattaacttcctcaagtattgaaatggcatcaaaaggaaaccttggaatagaaattaatttaaataaagtgccttgtagagaggccaagatgacaccttatgaaataatgctctcagagagccaagagagaatgttgattgttttagaaaacggtaaggaagaacaagcaaaaaaaatatttgataaatggaatcttgattttgctgtaattgggaaaaccactaaatcaaaaaaaatagaactttattttgatgaagaaaaagtagcagatattccagttaataccttagttgaaaactctcctatgtatgatcgtaaatggaaaaaagcaaaacttcctaaaaagaataaaattaaaaaagaaaatatcaaacatttaaaaattattgatactttaaaaaaaattctatcaaacccgaacgtatgtagcaaagaatggatttggcaacaatatgaccatactgtaatgggagatactatacagaaacctggtggagacgcaggtgttgtaagggttcatggaacagataaagccgttgctgcttctgttgactcatctgcagtttattgctgggcccaccctttaactggtggaaagcaagtagtttgtgaaagttttagaaatcttatatctgttggtgcaagaccaattgctatcaccaattgtttaaattttggtagtccagaaaatgaagaaaatatgggtgagtttgttgaatgtgttcaaggcattggagaagcaagcgaatatttaaagttcccagtagtttctggaaatgtatccttctacaaccaaacaaaagaaaaaggagtaaaacccacaccagcaattggaggtgttgggctaatcaaggattataaaaatatgatcactatggagtttaaagaacttgataatttagttttagtaattggaaaaactgatggacatattgatcaaagtttatttgcaagaagtattttagacgaaaaaaatggaccaccacctgaggtaaacctatttaatgaaaaaaataatggagaaacattgctcaaattaattgatagcaaattaataaagagtgcacatgatgtttcattgggcggaattattactgcagtagcaaaaatgtgtattaatggcaaaaaaggattgtatattaaaaaacctaaatatcttattaatcaaatagaatacttatttgcagaagatcaaggtagatatgttgtggaaatagataaaaaagattttaaaaaagtagctgatatattgaataaaaatgcagttcattttgatgaacttggaacaatcaatgaaaatgagctatatataaacgataagtcaaaagttacaattgacgaattatcaacttcgaataatagttggttaacaaattatatgaataaataa

SEQ ID NO: 318719 - DNA, 1590 bp, Unknown
  Bacterial polypeptide expressing nucleotide sequence isolated from the Sargasso Sea
atgtaggctcaaaaactggcagagatggaatccatggtgcttcaatggcatctgctgaatttgatgaaaaatctgaggaaaaaaaaccaactgtgcaagttggggacccttttacagaaaaacttttaatggaagcttgcttagagttaatgaaagataactcaattatatccattcaagacatgggtgcagcagggttgacgtcatctagcgttgagatgtcatttaaaggaaatttaggaatggaaataaatttagatcttgtgccctgtagagaaagtaatatgtctccttatgaaatgatgctttcagagagtcaggaaagaatgttattgataattaatgataataaaaccacacatgcaaaaaaaatatttgaaaaatgggacctagattttgtagtgattggaaaaactatcaaggaaaaaaaattaattttaaattataaagacaatgaggttgctaatctaccaattgatgctttatcgtctcaagctccggtgtacgacagaaaatggaagaagataactttacctaataaagagcccagacttgaaaaactaaaaaaaataaaatttgaagattcatttttaaaaattttatcttctcctaatttttctaataaacaatgggtcacaaatcaatatgatcaaatggttatgggtgataccattcaaagatcaggatcagattcagcaataataagaatccacaaaaaaaataaagcaatagctataaccgtagactcttcgtctaattattcaaaggcacaccctcttacaggtggaaaacaaatagtttgtgagaattggagaaatcttattagtgctggatcaaaaccattagctataacaaactgtttgaattttggaaatcctgaaaatgaggaaatcatgggtgaatttgcagaaactattcaaggtatgaaagaagcatgcgaatatttagattttccagtggtttctggaaatgtttctttttataatggtacaaataaaaaaaatatttttcctacaccagtgattggtggaattggtttgatagaaaatgttaaattttctacaaacaataatttcaaaaaaattggtaatagaataatcttaataggaaaaacttttggacatttatatcaaagcgcttttttttcagaatgttgtaaaatttatgacggcccacctcctgaggtaaatttaaaaaatgaaaaaaataatggtgaaacaatattgaaattaatagaaaaagaccttttaagctctgttcatgatgtttcctcaggtgggctaattatgtcgttagctgaaatgtctattaattcgtcaattggagtgcatattataaaaccaaaaaaattaaaaaatatatttgaatatttttttggagaagaccaaggtagatatatcgttgaaattgatgataataaatttgatttagttgaaaagattttaaaggaaagtaatgttttttatgaaattattggcaaaacgcaaaaagatttttttgaaatatatggtgagacaaaatttaaagtaaatgaactttataatatcaatacaaaatggtataaggaatataatgccactaccaattgat

SEQ ID NO: 318720 - DNA, 1195 bp, Unknown
  Bacterial polypeptide expressing nucleotide sequence isolated from the Sargasso Sea
aatggaagtaaacgaacaaacagcaatagatcacggtttaagtaaagatgagtttagaaaaataaatgatcttctcaaaagaaaaccgaacttgactgagttagcaatcttttcagctatgtggaatgaacattgctcatataaatcttctagaaaacatcttaaaaatttacacacagaaggatctcaagttattcaaggaccaggtgaaaatgccggtgtggttgatattggagacgatgaggcaatagtttttaaaatagaaagtcacaaccatccttcttttattgagccataccaaggtgctgctacaggcgttggaggaattatgagagatgtatttactatgggcgcaagacccatagcaaatctaaattcaattcatttcggatctactcaaaataaaaaaacaagaaatttattaagaggcgttgtaaaagggattggcgggtatggaaattgtattggtgtaccaacaattgcaggacaaactcattttgacgagtcttataatggaaatattttagttaatgcaatgacgcttggtcttgttaataagaataagattttttattctaaggctgccggattaaataaacctgtaatatacgttggttccaaaactggtagagatggaattcacggtgcaagtatggcgtctgctgtgtttgacgataaaattgaggagaagaaacctactgttcaggtaggtgatccatttactgaaaagttattacttgaagcatgtctagagttaatgaaagaagactctataatttctattcaagatatgggagctgcagggttaacttcttctagtgtagagatggcatcaaaaggtaagcttggtatagagttagatcttagcaaagttccttgtagagaaacagaaatgactccttatgagatcatgttatctgaaagccaagaaagaatgttaattatattagaaaatggcaaagaggataaggctaaagaaatttttgataaatggaatttagattttgcagtaattggaaaaacaacaaatactaaaaatttagaacttatttttaaaaacaataaggtagctcaaataccaatagattttttagcagaaaatgcaccgatgtatgacagaaagtggaaaaagtctaaacttccacaaaaaattgattacccgaaagaaatatttaaatcacttaaaatagaaagc

SEQ ID NO: 318721 - DNA, 2392 bp, Unknown
  Bacterial polypeptide expressing nucleotide sequence isolated from the Sargasso Sea
ttgcccagtaaagatcgtatcggttggccctcagcggcacgaaactattattcgataattgtgtttacaaaagagatagttgattttaccggtcttacaaatgaagagattctaggtcgactcagaaaactcaatattccgcttacagctcaagaagcattaaagatccaaaacgagatgctaggtcgagcgccttctttggccgagcttatattattttccattcaaggctcagagcattgtagctacaaaagcagtcgcatacatttaaaacaatttacaacagaaggccctgatgttgttttaggcgcaaaagaagatgccggtgttgtatcgatcgccaccgataacaagggtaatcgatggtgtattgtaatgagccacgaatctcacaaccacccatcacagatcgtaccatatgaaggagccgctactggagtggggggtaatgttagggatgtcatgtgtatgggggctgaagtgatcgcttgtaccgactctttccggtttggagatattaaaaagaataagaccaagtggatacacaatggtgtggtagcaggcattgcaggatatggaaacccattgggtattcccaacattggtggcgatatttattatcatgaaggttataacgagaattgcctggtaacactagttacactgggcattgttcaagaaaacaatatcctgcattcctacgcaccagagaatgctgatggctatgacctgatcctgatcggcaaacctacagataatagtgggtttggtggcgctagttttgcttctttagaattggaggaagataaaaaggaacaaaacaagggcgcagttcaagaacccaatgcatttctagagcgtcacttattgaaatcatcctatgccttatttaagacgcttaaagaaaaagaccttatcaacagggtcgggtttaaagatcttggagctggaggggtcgcttgcgcaagtgttgagctagcagaaacatccgggtatggcgctgaagtgtggatggataagatccatgttggcatggacaatctccatccttctgtctatctgtgcagtgaaactcaagagcgttttatgtgggtctctccaccagagatcactcccctgatcgtagagcattataatacagtctttgatctacctggcgtaagtgagggagcacaagcttctgtcattggaaaaattcgcaataatggtcaatacattgtacacaatggggacgaagaaattattaatgctccagcagcagaggtaacggaagggtttttatacgaccgtccctatgaagctccagaaaaggcctttacagaaccagatattccagagccggacaattataatgaggttttacttgagatattatcccatgaaaacatatccagccgagagccggtctttgaagcctatgataaacaggttcaagggagggtacacactgaaacaggtcaggcagatgcaggcattatggcaccttttaattccgaggattacccagaagagatccgtaatgtgggaatcgcgctttctacagaccacaacccacgctatgcgctaatagatccttactggggtggtgtaaatgctgtggtagaagctatgaggaatgtgtctgctacaggggcaaccccccatgctgtttctgattgtctttgttttggaaacccggaaaaaccataccaaatgtgggaatttgttgaaagtgtgaagggcattgctgatgcatgtcatgcgatcacgcttaaagataaccccaatgatccaactcctattatcgcaggcaatgtaagcttttataacgaatcgaaaaatggcgccatacctccaagtccgatcgttagttgcctgggtcgcataaaagatattcgacattccattaccatgcattttcaaaaaactgactctatagtattgatgataggagagagaaagaatgaactagggggctctgtatattattctctctacaatgagctaggggctcacataccaaaaccaaacttagatgaggtcaaaaaccagatatttgctattactgactgtgttgataagggactgatactatcctgccatgatatttctgatgggggtatggcaactgcagtctctgaaatgaccattaatggcggcattggttgtaaagtgaatatggatacggctttgtctcctgcgaaggccttattttcagagacaggaggtttcattgtagaaacatcccaagaaaatgttacagaggtccagtctgttttttcagaccatggcttagatgctttggagatcggggtcactggtggagaattggtcaacatcaatgaatccgtaaacgttctcgtgagcgaagtaaaagaagcttggacaaacgggttacgcgataagttatgag

SEQ ID NO: 318722 - DNA, 1129 bp, Unknown
  Bacterial polypeptide expressing nucleotide sequence isolated from the Sargasso Sea
atggttgaagttaacgaaaaaatagcaattgaacatggcttaaaaagtgatgagtataagaaaatctgtgatcttttaaagagaacgccaaatattactgaactaggtgttttttcagcaatgtggaatgaacactgttcttataaatcatctagaagacatctaaaaaaattacatactaaaggtgatcaagttatccaaggtccaggagaaaatgctggtgttgtcgatattgaagatgatgatgcaattgtatttaagatagaaagccataaccatccttcatttattgagccctatcaaggtgcagcaactggtgttggtggaattatgcgagatgtatttactatgggtgccagacccattgctaatttaaactctatacattttggctctccagaccatgaaaaaactagaaatctattaagaggagttgttaagggtattggtggatatggtaattgtattggtgttccaactatcgctggccaaacttgctttgatgaatcttataatggaaatattcttgtaaacgcaatgacattgggtttagttaataaaaataaaatattttattcaaaagctgctggagttgataagcctgttatatatgtagggtcaaaaacaggaagagacggaattcatggtgcaagtatggcatcagctattttcgatgataaaatagaggaaaagaaaccgacagttcaggtgggtgatccatttactgaaaaactgcttttagaagcttgtttagagttaatggcaggtaaatcaattatatcaattcaggatatgggagctgctggactaacttcatcaagtattgaaatggcatcaaaaggtgatttgggtattgaaatagatttaacaaaagtaccttgtagagaaaaaaatatgacaccttatgaaataatgctttcagaaagccaagagcgaatgttaattgtattagaggctggaaaagaaaatgaagcaaaaaaaatatttgataagtggaacttagattttgcagttataggaaagacaaccaatactaaaaatatagaactattttttaaaaataaaaaagttgctgaaattccgatagagtttttggctgaaaatgctcctatgtacgatcgtaaatgac

SEQ ID NO: 318723 - DNA, 1468 bp, Unknown
  Bacterial polypeptide expressing nucleotide sequence isolated from the Sargasso Sea
aatgaaaattaataaagaacagattgaaaaacatggtttaaaattagaagaatataataaaattaaagaacttttgggaagagaagcaaatttattagaacttggaattttctctgctatgtggaatgaacattgttcttacaaatcctcaaagattcaccttaaaaaattgcctacaaaaaataatatagtgatccaggggcctggcgaaaatgctggtgtcattgatattggagatgatgatgccattatttttaaaatagaaagtcataatcacccttcgtttattgaaccctatcaaggagcggctactggggttggtggaattttaagagatgtttttacaatgggagctagaccgatagctttgatgaactcaattcactttggctcaccaacaaataaaaatactcaaaacttattgaatggtgtcgtttccggaattggtggttacggaaactcagttggtatacctacggttggtggggaaaccaagtttaatagcacttacaatgaaaatattttggttaatgcaatggctgtgggacatgcaaataaaaataaaattttttactcaaaagcaaaaggaattaataaaccagtggtttatgttggctcaaaaactggtcgagatggaattcatggagcaactatggcttctgcagagtttgatgaaaactctgaagaaaaaaaaccaactgttcaagtaggagacccgtttactgaaaagcttttacttgaggcatgtttagaattaatgaaggaaaactcgattatttcaattcaagatatgggtgcagctggtctaacatcatcaagtatcgaaatggcatcaaaaggtaaacttgggattgagttagatttaaataaagttccatgtagagaaaataatatgtctccttatgagatgatgttgtcagaaagtcaggagagaatgttaataatacttgacgaaaaaaaagaaaaaaaagccaaaaaaatatttgataaatgggacttagattttgtagtaattggaaaaactacagatactaatcgtttagttttaaattttgataacaaaatagttgcagatatacccatacgagcactagcagatgaagctccacagtatgataggaaatggaataagcctaaaataaaaaaaaataattcgaaaaaatatgatctgaaagaaattaaaatagaagatgctttaataaaaattttatcctctccagatcattcaaataaaagttggattaccgatcagtatgatcaagttgtaatgtgtgatacaatacaaaaatcaggtggagatgctgcggttgtgagaattcataacaaaaataaagctatatcaatatcagtagactcatcagcaaattattgtagctcagatcctaaaagtggaggaaaacaaattgtttgtgaaaattggagaaatctaatttctgttggttcaaaaccattagctatcacaaattgt

SEQ ID NO: 318724 - DNA, 679 bp, Unknown
  Bacterial polypeptide expressing nucleotide sequence isolated from the Sargasso Sea
atgaaatcatcagtaatagtttttcctggatcaaattgtgacagggatatagcggttgcattagaaaaattacaattcaaaaactctatgatatggcataaggaaaacgtcctgccaaaatcagatcttattgttgtacccggaggtttttcatacggtgattatcttagatctggcgccatagctgctaaatcaaatatattaaatgaggttataaaagctggagagcgcgggtctttaatacttggtatttgtaatggttttcaaatacttattgagtgtggtcttcttaagggtgcacttttaagaaattcaggtttaaaatttatatcaaaaaatatttttataaaaattcaatcaaataaaaataagttttttaacaaatataaaaaaaatgaaatattagaactcaatatagctcataatgaaggtaatttttttactgataaaaaacatttgaatgagttggaagacaatgatttaatacctataaagtattgtgataaagagggaaatataaacccaaaaacaaatccaaacggttctttaaataatatagctggaatttttaataaaaataaaaatattttaggtatgatgcctcatccagagagaatggctgataaaacatgttctaatgaggatggtcttccgctttttttgagtttaatgaattaaa

SEQ ID NO: 318725 - DNA, 679 bp, Unknown
  Bacterial polypeptide expressing nucleotide sequence isolated from the Sargasso Sea
aatgaactcctcagtaattgtttttcctggatcaaactgtgacagagatgttgcaactgctcttacaaatcttcaatttaaaaataaaatggtttggcataaagatagcgaactaccaaaatcagatttaattgttattcctggtggtttttcatatggagactatttaagatcaggtgcaattgccgcgaaatctaatattttaaaagaagttataaaagcagcaaacttaggttgtcttgtactaggtatatgtaatggatttcaaatacttatagaaactggacttctacaaggagcactattaaggaataaaaatctaaagtttgtatcaaaagatgttaatttaaaaataattgataataaaaataaattttgtaataattataagaaaaatagtgtaataagtttaaacattgcacacaacgaaggcaattattttactcataaagatcacgtgaaagaattggaagataataatcttatacctttcaagtattgcgacatagaaggttcaataaatgaaagcagtaatcctaatggttctttaaagaatatagctggaattttaaataaaaataaaaatattttaggaatgatgcctcatcctgaaagaatggttgacaatttgattagtaactcaaatggtattgaattgtttacaagtattttaagctaa

SEQ ID NO: 318726 - DNA, 452 bp, Unknown
  Bacterial polypeptide expressing nucleotide sequence isolated from the Sargasso Sea
aatgaaaattacaaaagaaataatcgatttacacggtttaaaatcagaagaatattctaaaataaaacttttaatgaatagagagccaaattatttagaattaggtattttttcagctatgtggaatgaacattgctcatataaatcatcaaaaattcatttaaagaagttacctgttaaaaataaaaatgtaattcaaggtccaggcgaaaatgctggagtaattgatattggagacagtgacgcaatagtgtttaaaatagaaagtcacaaccatccttcttttatagagccctatcaaggtgctgcaacaggtgtaggaggaatactaagagatgtttttacaatgggtgctagacctatagcgctacttaattcaattcattttggagacccaagtaacagaaaaacaaaaaaccttttaaatggtgttgtctcaggtattggaggat

SEQ ID NO: 318727 - DNA, 515 bp, Unknown
  Bacterial polypeptide expressing nucleotide sequence isolated from the Sargasso Sea
aatggctagttttactgttggtattgtcgttttccctggctctaattgtgatcgtgatgtttcctgggctttagaaggttgtttagacattaaaacaaaattcctatggcatgaatcatctgatttgaatgatgttgattcaattgttttgccaggaggatttagttatggtgattatttaagatgtggagcaatagcaagattctctccattaataaattctttacatgactttattaaaagcggaagacgtgtattaggcatatgtaatgggtttcaaattttaactgaatcaggttttcttccgggagcacttgttgctaataaaaatctcaatttcatatgtgatgatgttgacttgaatgtgatcacttcgaaaggaggttggtttcaaaagttaaacgaaaatcaaaatataaaattaccaattgcgcatggagaagggtgttatcattgcgatcaagacactttaaaaagacttgttgataatgatttaattgcactgaaatacaaaa

SEQ ID NO: 318728 - DNA, 685 bp, Unknown
  Bacterial polypeptide expressing nucleotide sequence isolated from the Sargasso Sea
atgaactcatcggtaataacttttccaggatcaaattgcgatagagacatgcatgtagctctaaaaaaatttggatttaaaaataaaatggtttggcacaatgatgctgaattgcctaaaagtgatcttgttgttcttccaggaggcttttcttatggggattatttaagatgtgggtctatggcttcaaaatctaaaataatggaatcggtaattaattttgcaaattctggtggtttacttatgggtatttgtaatggttttcaaatacttacagaaacagaactattacctggtgtgcttttaagaaacaagcatgcagaatttatttgtaaaaatgtttttgtaaaaatcaatgataatgacaataattatttcaaaaatatcaaaaaaaaaaccttaaaacttcacatagcacataatgaaggtaattatttttgttcaaaagaacaaatgaaggaaattgaagattatagccagatagctttactatattgtgataaaaatggcgaagttaaccaaagttcaaatccaaacggtgcgatcaaaaatatagctgggatagttaacaagaaaaaaaatattctaggcatgatgcctcatcctgaaagaatgatagatatagccttatcaggtgaggatggttctattttctttgaaaacttagttaataatttaaaataat

SEQ ID NO: 318729 - DNA, 1210 bp, Unknown
  Bacterial polypeptide expressing nucleotide sequence isolated from the Sargasso Sea
agctcttacaatgggaatattttggttaatgcaatgactttagggttggttaaaaagaataaaatattttattcaaaagcagcaggattaaataaaccggtgatttatgtcggttctaaaactggaagagatggtattcatggtgctagtatggcttctgcaagttttgatgaaaagattgaagaaaaaaaaccaactgttcaagttggagacccttttactgaaaaacttcttttagaagcatgtttagaattaatggctggcgactctatcattgctattcaagatatgggtgcagcgggtctgacatcttcgagtattgagatggcatcaaaaggaaatttaggaattgaaataaatctaaataaagttccttgtagagaagctaagatgacaccttacgaaattatgctttctgagagtcaagaaagaatgttgattgtattagaaaatggtaaagaagaattagcaaaaaaaatattcgacaaatggaatttagattttgcaataattggtaaaactactgatacaaaaaacattgagttattttttgacgataaacaagttgcgaatattccagttaatacattagttgaaaactcacctatgtataatcgaaaatggaaaaaatctaaattgccgaaaaaagttaaaataaaaaaggactctttaaatggtctcaaaattaaagaaatattaaaaaaagttttatcaaacccaaatatatgtagcaaagaatggatttggcaacaatatgatcacacagtaatgggtgatacaattcaaaaacctggcggagactctggtgtagtaagagttcatggtacaaataaagcaatagctgcttcggtggactcatcagcagtgtattgttgggctcaccctttaactggtggaaaacaggtagttgcagaaagttggcgaaatttaatttctgttggtgctacgccaattgcaataactaattgtttaaattttggaagtccagagaatgaagaaaacatgggtgaatttgttgaatgtgttcaaggtattggagaggcgtgtaaatacttaaactatcctgtggtttcaggaaatgtttctttttataatcaaacaaaagaaataggaataaaaccaacaccttctataggaggagttggtttaataaaagactttacaaaaatgggttactatgaatttaaagaaattaataatatagttatgt

SEQ ID NO: 318730 - DNA, 685 bp, Unknown
  Bacterial polypeptide expressing nucleotide sequence isolated from the Sargasso Sea
atgaattcatcggtcattatattcccaggatctaattgtgatagggatatggatgtcgctttaaaaaagtttggatttaagaataagatggtgtggcatgatgatgataaattacccaaaagtgatttaattgttttgccaggtggattttcttatggggactatctgagatgtggaagtatagctggaaaatctaaaattattcaatcagttatagattatgcaaaatctggtggtttagttttaggaatttgcaatggatttcaaatcttaacagaaactggtctactaaaaggggttcttcaacaaaataaaaatattgaatttatttgtaaaaatgtatttgtcaaaattaataatagcgaaaacaaattttttgaaaatatagatagagatattttagaacttcacatagctcataatgaaggtaactatttttgtagtgaagacgaattaaagtcgttagaagataacaatcaaattgcagcctactattgtagctctgatggaaaagtagatgatagatcaaatccaaacggtgcaataaaaaatattgctggaatatttaatgaaaagaaaaatatcctaggaatgatgcctcacccagagcgaatgatagatcaaagtttatctggtgaagatggctcaatattttttgaaaatttattaaagaatttgaaataat

SEQ ID NO: 318731 - DNA, 685 bp, Unknown
  Bacterial polypeptide expressing nucleotide sequence isolated from the Sargasso Sea
aatgaaatcgtctgtaattatatttcctggttcaaattgtgatagagatatggatgttgcactaaaaaaatttggttttaaaaatcaaatggtgtggcataacgatggtaaaatccctaaaagtgatctagttgtgcttcctggtggtttttcttatggagattatttaagatgtggaagtattgcttccaaatcaaagattatacaatctgttattgaatttgcaaattccggaggtttggttcttggaatatgcaatggatttcaaattttaactgaagcaggtttattaacaggcattcttcagcaaaataaatatcttaatttcatatgcaaaaatgtttttgttaaaattaaagataaaaagaataaatatttttataatataaagaaggatattttagaacttcatatagctcataatgaaggaaattatttttgtagcgatgatgaattaaaatcattggaagataacaatcaaatagctgttacttactgtgataataaaggattagaaaataacaataacaatccaaatggagctataaaaaatattgccggtatatttaataaaaataaaaatgttttaggtatgatgccccaccctgaaagaatgatagataaatatcttactggggaagatggatcacttttttttgaaaaccttctaggaaatttaaaataa

SEQ ID NO: 318732 - DNA, 687 bp, Unknown
  Bacterial polypeptide expressing nucleotide sequence isolated from the Sargasso Sea
ccatgaagtcctctgtaataatatttcccggctctaattgtgatagagacatggatgttgccttaaaaaaacatggttataaaaacaagatggtatggcacgatgatattgatttacctaaatgtgatttagttgttttaccaggtggattttcttacggagactatttgcgatgtggaagtattgctggaaaatcaaaaattataaagagtgtaattgaatttgcaaattcaggtggtcttgttcttggtatttgtaatggttttcaaatattgactgaaacaggcttattgcctggtgtgttacaacagaacaaatatctaaatttcatatgtaaaaatgttcatgttaaagtaaataataaggaaaatagttattttaaaaatataaaaaaggaaattcttgagctgcatattgcacataatgaaggaaattatttctgtactaaggatgaacttgaagtcataaaaaacaataatcaaattgcattaacttattgcaatacagaaggttctgatgaagaggaattcaatcctaacggtgctttaaataatatagcgggattattcaataagaacaaaaatgtgcttggaatgatgccacatccagaaagaatgattgataaatatttatcaggaaacgatggttcaattttttttgaaaatctaataaaaaattacatttaat

SEQ ID NO: 318733 - DNA, 1156 bp, Unknown
  Bacterial polypeptide expressing nucleotide sequence isolated from the Sargasso Sea
tttgtagcaataaaggccctagatatatcgctaaatgaatctgataaagatttattagtgccaagactttttgctgaggaagttggtgtcgtaatagaagttaaaagtgaagacctaaaagatgtaaaagaatatttagcaaaaaaagacctctactttgatgaaattgcaaagaagaatgagaaaaaagaaataaatatcactaatttcaacgatgagattttttcagataaaattgaaaacctctttgagcagtggagtgaagtgagtaactctattaaagcaataagagataacccagttactacaagtgagcaaatagcaacttataagaaagaagacatctttttaaatccaaaaataaatttcgaggtccctaaagtaagttccagaattttttcttcaagacctaaagttgcactgctaagagaacaaggaattaatggtcattatgatatggctgcagctttaatggcttcaggctttgaggttcgtgatgttcatatgagcgagttagggaccaaagtgaaaaactttgatgactgttcaggtttagtggttcctggaggtttttcatatggcgatgttcttggggcaggttcaggcatgtccaatacaattatgcacaatgcaaaattgaagaaaatttttaagaatttttttgaaaatgaagataaatttgtcttaggagtatgcaatggatgtcagtttttatctggcttaaaagatattattcctggcgcaagtaattggccaaaatttgaaaaaaatctttccaatcaatatgaatgtaggcttgtgcagataaaaattgctgaaagcagatcaatattttttaaagatatgcaaaacagtgtgattccaataatggtttcacatggcgaaggtcgtgttggcgtgaatgtaaatgaaaatgtaattggaaactacgtagattcgtctcacaacatagcagaattgtatcctttgaatccaaatggctctaaaaatggaatagctggtgtttgtaatgaagatggaagaattaccattatgatgcctcatccagagagaacttttatgacaaaacagttttcatgggcacctaatgactgggacgaacattcgccttggttcaagatgtttgataatgcctacaaattttctaagaattaat

SEQ ID NO: 318734 - DNA, 1351 bp, Unknown
  Bacterial polypeptide expressing nucleotide sequence isolated from the Sargasso Sea
gatcttattgaaaaatttaataaatggggattatatgccagtgttattggtgaagtgataggaactaatgaagtaattatttctcataaaggtaaaattgtggcccaaatacctacttctgccttatctgatgatactcctgttaattttcacaatgtgattaataacccaccagatgatcttttaaataaatgggaatggaaagaaaatgatttaccagaaattcatgagcaaaaaatattttcattgaaggaaaataagaatttttctttttcagaaataattttaaaactactctctaatccatcaatagcttctaaacgatggatttataaacaatatgattctcaagttcaggcaaatacagtttttaaacctggaaaatcagatgcagcagtagtaagactaagagaacaaaataaaaaaaataaaagtaaattattttctggtgtcgctgcttcagttgattgcaatagtagatgggttgcgcttgatccttttagaggatctatcgctgccgttgctgagtccgctagaaatgttagttgtgttggtgctgaaccagtagcaattacaaataatttaaatttttcttcccccgagaatgaaataggatattggcaactttcatcttcatgtaatggaattgctgaagcctgtaaagctttagaaactcctgttacaggaggtaatgtatctttatataatgaatcaaaaaataaagataatctaattactcctatcaatcctacacctgttattggaatggttggaaagatagataatgtcgaaaaagctataagtagtgaatggaaaaatattgaagatgaaatctggttaattggttcttccaaatcagaaataaaaattgcagctagttcttatttggaatattttcatggagaaattacaggtcggcctccaaaaatagatttgttagatgaaaagttttgccagagttttttaagaaatgcgattttaaatagccttgtagtttcttcgcacgatatcagcgacggaggtttagctatagctttagcagagtcttgcattttgtcctcaataggcgcaactatagaattagagaaagatgtaaatagagttgataatttattgtttgccgaaggggggtcaagaattattttttcaattagtaaaatgaaacaaaatgaatggtttaattatttaaaacaaaatcaaacaaatttcccatcaagtgtttttgtaaaaaaaataggatacgtatctagtgatacgctgaagataaaaatcaacgaaaaaaatatttgcaatattagggttgaggaattaaccgaaaaatttaataatagtatttcaggttatttttaaa

SEQ ID NO: 318735 - DNA, 1089 bp, Unknown
  Bacterial polypeptide expressing nucleotide sequence isolated from the Sargasso Sea
atcttctaaaattcatctcaaaaaattaccaacaaaaaataaaattgtaattcagggcccgggagaaaacgctggagttatagatattggagatgatgatgcaattgtttttaaaattgaaagccataatcatccatcatttattgaaccatatcaaggtgcagcaactggtgttgggggaatattaagagacgtgtttactatgggtgctcgaccgattgctttgatgaattcaattcactttggttctcctgaaaataaaaaaacacaaaatttattaagtggagttgtttcaggaattggaggttatggtaactctgttggtatcccaacagttggtggtgagactaaatttaatagtacttataatgagaatattttagtaaatgcaatggcaattggccacgcaaaaaaaaataaaatattttactctaaggctaaaggaataaataaacctgtagtatatgtcggttcaaaaactggtagggatggaatacatggggcaactatggcctcagcagaatttgatgaaaattcagaagaaaaaaaacctacagttcaggtgggagatccttttacggaaaaactattattagaagcatgcttagagttgatgaagaaaaattcaatcatttcaattcaggatatgggagctgcaggattaacttcctcaagtatagaaatggcatcaaaaggaaaacttggtattgaattaaatttagacaaagtgccgtgtagagaaaaaaatatgacaccttacgagatgatgttgtcagaaagtcaagaaagaatgcttataattttagatgataaaaaggagaatgaagcaaagaaaatatttgataaatgggatcttgactttgtagttattggtaaaaccacagatacaaatagattggttttaaattttcaaaataaaaaggtagcagatataccaatttctgcattagcagatgaggcaccccaatataataggaaatggaataaatctaaaattaaaaagaataattttaacattaaagatttaaaaaaaattaaaactgatgaggccttaataaaaatattatccactccggatcactcaaataa

SEQ ID NO: 318736 - DNA, 1330 bp, Unknown
  Bacterial polypeptide expressing nucleotide sequence isolated from the Sargasso Sea
atggttaaagaagaaactttaaaagaattagcactttctagatcagaatataatcttatactagataaactcgaccgtgaaccaaatgatttagaattaggactttttggagctttatggagtgaacattgtggatataagcatacaaaaaaattattaagatctataaaatctacttctgaatttaccctaactgaagcaggagcagaaaatgcaggtgctgtaaatatcggttcaaataaagcaatagttatgaaaatagaatctcacaatcatccttcagctgtagagccatatgaaggagctgctacaggtgttggaggtattgtaagagatatttttgccatgggagcaagacctatagctcttttgaattcactaaggtttagtaatttagaatctgatagaaacgtacaaattgccaagggagttattgaaggaatttctggatatggaaattgtcttggaattcctaatattggaggggaatgcttttttgatgaatcctatgaaagtaatcctttagttaatgcaatgtgtgttggactagtagatgctgacaaaatattaagtgcaaaagcagatagacccggagatttattaataattattggagctgaaacgggaagagatggaattcatggtgcatcaggtttagcatctcaaaactttgaagagacaattgaacttagatctgctgtacaagtaggtaatccatttttagaaaaattacttattgaagcttgtttagaaatttctaattttaatgaacttgttggaatgcaagattgtggtgctgcaggtattactagtgctgcaattgaaatggctgaaagatcagaattaggactaaagattgatgtttccaaagttccagttaaagaagattctatgactccatatgaaataatgctctctgaatctcaagaaagaatgcttatagcagtaaagaaaaatcaacatcaaagaatttttgatattttagaaaaatgggatctcaagtgttcaattattggagagtttattgaaggtaatgaagttcaaatttttgatggtgaaaaaattatttctcaaacatcaattgaagccttaacttcaccaccagaatatgatttatctctattatcgaaaggttataaaaataaaaaaaataaaattaaaataaaagaagaatataaaaactttgacaaaaaaataatcaataaatatttatttgaaattttaggctcaaataacttaattagtaaagaaagtatatatagaaaatatgatcatcatgttcagactaatacagttgtagaaccaggttcagatgccgctgtaataagat

SEQ ID NO: 318737 - DNA, 697 bp, Unknown
  Bacterial polypeptide expressing nucleotide sequence isolated from the Sargasso Sea
ttgaaaataggtatagctgtatttccaggaacatggagtgaaactgatactcattacgctactcaagacgtattgggaataacctctgagtatatttggcataaagatcaaaatcttaacaatgtagattttattattttgcctggtggtttttcttacggggattatctaagaacaggagctattgctagcttttcacctattatggaaaaaataaaagaatttgctaactctggtggtcctgtactaggtatctgtaatgggttccaaatattatgcgaatcaaatttattacctggaattttgataagaaataagaccttgtcatttgtttgtaaaaattccaatcttaaagttaacaataattcaaaatttacaaatttatataaaaaagatcaaattattaagattccaatttctcatggtgagggtaactatcaagctgataaaaacactataaataaactagaagaagaaaatagagttatattcagatactcctcaagatcaggtgatacttcagaacaatataatcccaatggctcaataaataatatagcaggaattataaatgatgcgggaaatattttaggtatgatgccgcatccagaaaaggcttgtgaaaaaatcattggaagtgacgatgggttaggtatattttcttcaattattagttcaatggtaaaaaatggttaaa

SEQ ID NO: 318738 - DNA, 2065 bp, Unknown
  Bacterial polypeptide expressing nucleotide sequence isolated from the Sargasso Sea
cattgctcttacaaatcatcaagaatccaccttaagaaactaaatacaaaagggaaaaaagttattcaagggcctggagaaaatgctggagtaattgatatcgatgatgatgatgcaatagtatttaaaatcgagagccataatcatccatcttttattgaaccttatcagggtgcagccactggtgttgggggaataatgagagatgtttttacaatgggagcaagaccaatagcaaatttaaattctattcattttggatcacccgatcacccaaaaacaaaaaatttattaagaggcgttgttaaaggtataggaggatatggtaactgcatggggataccgacgattggaggccaaacatcattcgatgaatcttacaatggaaatatacttgttaacgctatgactttaggattagtaaataaaaataaaattttttattcaaaagctgctggagttaataaaccagttatttatgttggttctaaaactggcagagatggtattcatggagctagtatggcttctgcaatttttgatgacaaaatcgaagaaaaaaaaccaacagttcaagttggggacccttttacagaaaaattattattagaagcttgtttggagttaatgtcaggtaaatcaattatatcaattcaagatatgggagctgctggattaacgtcttctagtattgaaatggcatcaaaaggtaacttaggtattgaattaaatctagataaagtaccgtgtagagaggaaggtatgaccccttatgaaattatgctttctgaaagtcaggagagaatgttgattgttttagaaaaaggtaaagaggcagaagcaaaaaaaatatttgataaatggaatcttgattttgcaataataggaaagactacaaattctaaaaaaatagaactattttttgataagaaaaatgtaggaacgatacctattgatattttagctgaaaacgcacctgaatatgacagaaaatggaaaaaaactaaacttccaaataaatctcaaataaacaaagataattataaaaatttaaaagtaactgaaaatttaaagaaaatattaagcaatcctaatgtttctagcaagcaatggatttgggaacagtatgatcacactgttatgggcgatacaatcgaaaaaccaggatcagactctggtatagttagagtccatggaacaaataaagctgtagcaacatcagttgactcctcagcagtatattgctttgctcatccattaaccggaggaaaacaaatagtttgtgaaagttttagaaatttaatctcttgtggttctacacctattgctattacaaattgtttaaactttggtaaccctgaaaaagaaaaaaatatgggtgagtttgttgagtgtgttcagggtattaatgaggcaagtaaatatctcaattatcctgttgtctcgggcaatgtgtctttttacaatgaaactaaagataagggaattaagcctactcctgctattggcggggttggattaataaaagattataaaaaaatagttactatggatttgaaaaatgaagaaaacttgatttttgttgtaggtaaaacgaatggtcatattgatcaaagtatatttgcaagagaaatattaaatgaaaaaaaaggacctcctcctgaagtcaatttatttaatgaaaaaaataatggtgagaatgttttaaaactaattagtgaaggattaatagagtctgcgcatgatgtgtcattgggtggtattattacatctttgtcaaaaatggccattaaaggaaaaaaaggttttaaattgaataaaattaaaagtttaattaataaatttgaatattactttggggaagatcaggcgagatatattgtagaggtaaaatcaactaatattaataaatttcaaaaaattttaggtaataattcagttcattatgatgaaattggcattgtaacaaaaaaagatataattatagataaagagccaattcttcacattgacgaattaattgaatctaataaaagttggttaatagattatatggaaaattaaa

SEQ ID NO: 318739 - DNA, 844 bp, Unknown
  Bacterial polypeptide expressing nucleotide sequence isolated from the Sargasso Sea
aatgattgtaaacgaaaaagtagctgtagatcacggtttaaaaaaagaagaatataaaaaaatttttgaattgcttaaaagaacccctaatatcactgaacttggaatcttttcagctatgtggaatgaacattgttcttacaaatcctcaagacttcatttaaagaaacttcctactaaaggaaaacaagttattcaaggtccaggagaaaatgctggagtagtggatattggagataatgacgcaattgtatttaaaattgagagtcataaccacccttcttttattgagccttatcaaggagccgcaactggtgttggtggtataatgagagatgtttttactatgggtgcaagacctatagccaacttaaactctattcattttggatcaccacaaaacaaaaaaacaaaaaacttattaagaggtgttgttcatggaattggtggttatggaaactgtatgggtgttccaacaattgcaggtcaaacaagttttgatagttcttataatggtaatattcttgttaatgcaatgactttaggattagttaaaaaaaataaaattttttattctaaagctgcaggcttaaataaacccgtaatttatgttggctctaaaacaggtcgtgatggaattcatggagctagtatggcatcggctagctttgatgaaaaaattgaagaaaaaaaaccaactgtccaagttggagatccatttacagaaaaattattactcgaagcttgtttagaattaatggctggagactctattattgctattcaggatatgggggctgcaggactaacctcatcaagtatagaaatggcttcaaaaggaaat

SEQ ID NO: 318740 - DNA, 685 bp, Unknown
  Bacterial polypeptide expressing nucleotide sequence isolated from the Sargasso Sea
atgaagtcgtcagtaataacattccctggttcaaattgtgatagagatatggatgttgctctaaaaaaatttggttttaaaaataaaatgatttggcacgatgatgttgagcttcccaaaagtgatttggttgttttgcccggaggcttttcctacggagattaccttagatgtggaagtatggcttctaaatcaaagataatgaaatcagttattaactttgcaaattcaggtggtatgataatgggtatttgtaacggttttcaaattttagttgaagcaggcttggtacctggcgtcttattgagaaataaatatctagaatttatttgtaaaaatgtatttgtaaaaattaataataaacaaaataattattttaaaaatattaataataacattttagagtttcacatcgcacataatgaaggaaattatttctgcaccaacgatcaattaaaagaaattgaagataatgaacaaattgcgataaattattgtgataaaaatggtgtaattgaagataaatttaatcctaatggttcaattaaaaacattgcaggaatttttaataaagaaaaaaatgttttaggtatgatgcctcaccctgaaagaatgattgattcaagcctatctggtgaagatggatctcttttttttaatagtttaattaataacattaaatgat

SEQ ID NO: 318741 - DNA, 685 bp, Unknown
  Bacterial polypeptide expressing nucleotide sequence isolated from the Sargasso Sea
atgaagtcagctgtaataatatttccaggatcaaactgtgatagagatatggatgtggctttaaaaagatttggttttaaaaaccaaatggtttggcacaatgatcaggaaattcctaaaagcgatttaattgtattacctggtggtttttcctatggagattatttaagatgtggaagtatagctggaaagtcaaaaataattaaatcggttgttgaatttgcaaattcaggaggcctggtattaggaatatgtaatggatttcaaatactaacagagaccggtttgttaccaggtgttcttctgcaaaataaatatcaaaaatttatatgtaaaaacattcatgtaaaaataaacgataaagaaaataaatattttaaaaatataaaaaaacaaatcctagaattgcacatagctcataatgaaggaaattatttttgctctgaagatgagttaaaatctttaattaataataatcaaattgctgttacttattgtaatgaaaatggtaaagaatctgatgagtataatccaaatggagcattaaataatatagctgggatatttagtaaaaataaaaatatattaggaatgatgcctcatcccgaaagaatgatagacaaatatctatcaagtaatgatggtagtttcttctttgaaaatctaatcgagaatttaaaatgaa

SEQ ID NO: 318742 - DNA, 685 bp, Unknown
  Bacterial polypeptide expressing nucleotide sequence isolated from the Sargasso Sea
atgaaatcttcagttattacttttccaggttcaaattgtgacagagacatggatgttgctctaaaaaaatttggatttaaaaataaaatggtttggcatgctgatgctgaattaccaaaaagtgatctagttgtattgccaggtgggttctcatatggtgattatttaagatgtggaagtatggcatctaaatcaaaaataatgctatctgtaattaattttgcaaattcaggtggtatggttatgggtatctgcaatggatttcaaatattggttgaaactggtttagttccaggtgttttgctcagaaacaaatatttagaatttatttgtaaaaatgtttttgtaaaaattaatgataaaaaaaataaatattttaaaaatgttgataacaacgttttagaatttcatatagctcataatgaaggaaattatttttgtaccaatgatcaattaaaagaaattgaagataatgatcaaatagctattaactattgtgatgaaaatggaaaaatagaagatcaatttaatcctaacggatctataaaaaatatcgctggtatttttaataaagaaaaaaatgttctaggaatgatgcctcatcctgaaagaatgattgatacatctttatctggtgaggatggatcattattttttaaaaacttaataaacaatttaaaatgat

SEQ ID NO: 318743 - DNA, 361 bp, Unknown
  Bacterial polypeptide expressing nucleotide sequence isolated from the Sargasso Sea
atgattgtaaacgaacaagtagcagttgatcatggtttaaagaaagatgagtactctaaaatttgtgagctgttaaagagaacccctaacatcacagaactaggtattttttctgcgatgtggaatgaacattgttcttataaatcatcaaaattacatctaaaaaaactacctactaaaggaaagaaagttattcaaggtcctggagaaaatgcaggtgttattgatattgaggataatgatgcaatagtttttaaaatagaaagtcacaatcacccttcatatattgaaccttatcaaggtgctgatacaggtgttggaggaataatgagagatgtatttacaagggcgcaagaccaat

SEQ ID NO: 318744 - DNA, 646 bp, Unknown
  Bacterial polypeptide expressing nucleotide sequence isolated from the Sargasso Sea
aatgatagtaaacgaacaagtagctattgatcatggtttaaaaaaagatgaatatgctaaaatttgtgaattattaaaaagaacaccaaatattactgaacttggtatcttttctgcaatgtggaatgagcattgttcttataaatcttcaagacttcatttaaaaaaacttccaacaaaaggaaaaaaagttattcaaggtcctggagaaaacgctggtgttattgatattgaagataatgatgccattgtatttaaaatagaaagccataaccacccatcttttattgagccctatcaaggtgcagcaactggcgttggtgggattatgagagatgtatttacaatgggtgcaagacctattgcaaatttaaactctattcattttggttcaactcaacacaaaaagacaaaaaatcttttaagaggtgtagttcatggaattggaggatatggaaattgcatgggtgttccaactatagcgggacaaacaagttttgatagttcatataatggaaatatcttggttaatgcaatgaccttgggtttggttaaaaaagataagattttttactcaaaagcagctggtttaaacaagccagttatttatgttggttcaaaaacaggtagagacggaattcatgga

SEQ ID NO: 318745 - DNA, 685 bp, Unknown
  Bacterial polypeptide expressing nucleotide sequence isolated from the Sargasso Sea
aatgaaatcatctgtcattacttttcctggatccaattgcgatagagatatggatgtcgctctaaagaaatttggatttaagaataaaatggtttggcatgatgattctgaacttccaaaaagtgatttaattgtattaccaggaggattttcatatggtgattatttaagatgtggaagtatggcatctaaatcaaaaatcatgaagtcagtcattaattttgccaactctggtggcatggtaatgggaatttgtaatggatttcaaatattagttgaaactggactagttccaggtgttttattaagaaacaaatatttagaatttatttgcaaaaatgtattcgtaaaaattaataacaaaacaaataattattttagtaatattaaaaatgatgtcttagaatttcatattgcacacaatgaaggaaattatttttgtacaaaagatcaattaaaagaaattgaagataatgaacaagttgcaataaattattgtgatgaaaatggaagaatagaggaacagttcaatccaaatggttccattaaaaatattgctggtatttttaataaagaaaaaaatgttttaggtatgatgcctcatcctgaaagaatgattgataattgtttatctggagaagacggttcaattttttttaataatttaattaacaatttaaaatga

SEQ ID NO: 318746 - DNA, 685 bp, Unknown
  Bacterial polypeptide expressing nucleotide sequence isolated from the Sargasso Sea
aatgaaatcatcggttattacttttcctggttcaaattgcgatagagacatggatgtcgctttaaagaaatttggatttaaaaataaaatggtttggcatgctgaagctgaattaccaaaaagtgacttagttgtattaccaggtggattttcatatggagattacttgagatgtggaagcatggcatctaaatcaaaaataatgcagtctgtaattaattttgcaaattcaggaggtatggttatgggtatctgtaacggatttcaaattttggttgaaactggtttagttcctggtgttttacttagaaacaaatatttagaatttatttgcaaaaatgtttttgtgaaaattaacgataaaaaaaataaatattttaaaaatgtaaataacgaagttttagaacttcatatagctcataatgaaggaaattatttttgtaccaatgatcaattaaaagaaattgaagataataatcaaatagctatcaactattgtgatgaaaatggaaaaatagaagatcaatttaatcctaatggatctataaaaaatattgccggtatattaaataaagaaaaaaatgttctagggatgatgccccaccctgaaagaatgattgatacatctttatctggtgaagatggatcattattttttaaaaacttaataaataacttaaaatga

SEQ ID NO: 318747 - DNA, 326 bp, Unknown
  Bacterial polypeptide expressing nucleotide sequence isolated from the Sargasso Sea
aatgattgtaaacgaacaattagcagttgatcatggtttaaagaaggatgaatacgctaaaatttgtgaactgttaaagagaactcctaatatcacagaacttggtattttttctgcaatgtggaatgagcattgttcttataaatcatcaaaattacatttaaaaaaactacctactaaaggaaaaaaagttattcaaggtcctggagaaaatgctggtgttgttgatattgaagataatgatgcaatagtatttaaaatagaaagtcacaatcatccttcatttatcgaaccttatcaaggcgctgctactggagttgggggta

SEQ ID NO: 318748 - DNA, 1887 bp, Unknown
  Bacterial polypeptide expressing nucleotide sequence isolated from the Sargasso Sea
ataaaaaaacatggcttaaaaatagaagagtacgaaaatattaaaaaacttcttaagagaagtcccaatatgttagagcttggaattttttctgctatgtggaatgagcattgttcttataaatcctcaagaatacatttaaaaaaactacctacgaaaggaaaacaagttattcaaggtcctggagaaaatgcaggtgttattgatattggagatgatgatgcgattgtatttaaaattgaaagccacaatcatccatcattcattgagccctatcaaggggctgcaactggggtcggaggaattttaagagatgtttttacaatgggggcaagacctattgcacttttaaattcaattcactttggttctccgtcccaccctaaaactaaaaatttattaaatggtgttgtttctggcataggggggtacggtaattgtattggaatacctacagtggctggagaaacaaaatttaatgaaacttataatgaaaatattttagtaaatgcgatggctgttggccatgctaaaaaagacaaaatattttattcaaaagcacaaggtataaataaagcagtagtttatgttggatctaaaactggtcgcgatggtattcatggtgcatcaatggcttcagcagaatttgatgagaaatcggaagataaaaaacctactgtacaagttggagacccttttacggaaaaattacttttagagggttgtttggagttgatgaaagacgattctattattgctattcaagatatgggtgctgcaggtttaacttcatcaagtgttgagatggcctcaaaggggtcgttagggattgaattagatcttagtaaagttccttgtagagaggaaaatatgactccctatgaaatgatgctttctgaaagtcaagaaagaatgttgattattcttgaagatggaaaagaggaacacgcaaaaaagatctttgctaagtgggatttagattttgtaattataggaaggacaaacaaaactaaaaaccttaccttaaaatttgaaaaacaaattgtgggagagatacctttagatgctttagccacaaaagcaccgatgtatgacagaaaatggacaaaaaaaaagatttcaaaaaaaaaattaaacttgaaaaaattaaaaaaaattaagatcgaagatgctcttatcaaaatattatcatccccaaaccacactaataaaagttggattactgatcaatatgatcaaatggttatgtgcgatacagcacaaagatcaggttcagatgctgcaattgttagaattcataacaaagataaagctattgcagtttcagtggactcatcagcgaattattgcaaatctcatccaataaccggaggtaaacaaatagtgtgtgaaaactggagaaatatagtttcagtaggtgcaaaacctttagccatcacaaactgtcttaattttggaaatccagaaaatcaagaaattatgggagagtttgcagagtgcttgcaaggaataaaagaagcatgtgagtttttaaattatcctgtagtatccggaaatgtatctttctataatggaacaaataataaaaacatttttccaactcctgtaattggtggagttggtctcatacaaaactatcctcatcttttaagtcatagatttaaaagtattggtagtgagataattttaattggtaagactttcggtcatttagaacaaagttgttttttaaaggaaaactattctatagttgatggaagtccacctgaagttaatcttttaaatgaaaaaaataatggagaaattgttttaagtcttattagtgaaaatttaatatcttcagctcatgatatttcaaatggaggtttaattgtcgctttaagtgaa

SEQ ID NO: 318749 - DNA, 2038 bp, Unknown
  Bacterial polypeptide expressing nucleotide sequence isolated from the Sargasso Sea
tgtagatgacaacggaaataggtacggtcttgttgtaagccatgaatcgcacaatcaccctagccaaattgtaccctatgagggtgcggctactggagtcggaggaaacgtaagagatgtttgctgtatgggagctgaggtgatgtctttgggtgatagtttaaggtttggagatatccatagaaataaaacaaaatggattagtgacggtgttgtatctggtattgcgggctatggtaatccacttggtataccaaatatttgtggtgacttgtattttgacaaagaatataatgaaaattgtttggttactgtattaacagccggcatagttaaagaaaaaaatgtaatcaggtcaaaggctcctaaaaattctgttgactatgatttaatattggttggaaaaccaacagataatagtggatttgggggagcaagttttgcatcgctagagcttgaagaagaaaaagagcagcaaaacaaaggggctgttcaggaaccaaacgcatttcttgaaaggcatattctaaaatctacttatgccctttttgactttttacaagaaaacaatttaataaatagggttggttttaaggatttgggcgctggtggtgttgcttgtgcaagcattgagcttgcggacgctgctgggcttggcgctgaagtttgggtggataaaattcataccagtatgccggagctcgacggtcatgttatcctttgttcagaaacacaagaacgctttatgtgggcctgtccaaaagatttgacacaaaccattttagaccactacaacaatgtgtttgattttccaaatgtttcggttggtgcaatggcaagcgttgtaggaaaaattataaatgaaaagcattatactgttttttataaagataaaaaacttgtcgatgggccaatagaaaaaataaacgagggctttgtttataatcgcccaatgtctgaaaagaaaacccaaatagaaaatgatcctctaccagaaaaaattgactataacgatttaatgttaaaaattttatctcacgaaaatgtggcttcccgcgctcctgtttatgagtcttatgataaaaatgttcaaggaagagttgttaatgaaagaggaaaaacaaacgctggtgtaattgctccttttgactcaaaaaaatttccaaaagaaattaggggtgattgtttttctgctgctcttgctcacaacccttcaattggtaaaattgacccttacattgttgcacaacacgctgttatagaggcttgtgcaaaaactgtttctgtgggggcttccccgcttgcacttactgactgtttgtgttttggaaatcctgaaaaacctgaacaaatgtggcaattttcacaaagctgtgttgccattagggaggcttgtagccttttacattttaatggaacagacaatctgccgatagtagcaggaaacgtaagcttttataatcagagtggggatcaatctattccagcaagcccaatgatcggttgtttcgggaaggtttccaaagaacaggttctaatgaacggatttagatctagcgatgctaatatatatttggtaggcgaaactcctgaatttattggtggaagcattgttgttgatgttttaaacataaagaacacaaaggttaaaaaaattgacgtacaaaaatatagcaatatgttaagctgtgttttgaaagctaattcagaaggtcttgtaagctctggtagttatgttggccttggtggtctggcaacatgcctttttaaaatgggctttgtaaacaatgtgggttgttctattgataaagatatagacaaaaacttattatttagtgagaactttgcatttgttgttgaggtttcggaagaaagctctgctccctttgaagagatattaaataagagcaagtgtacctataaacaaattggtaaaactaataaatccagtaagattgttgtaaaaaatttcatagacttggatgtggctcaaacaaaaagaacttgggaaaatgctcttagagaaaaacttcaataa

SEQ ID NO: 318750 - DNA, 1684 bp, Unknown
  Bacterial polypeptide expressing nucleotide sequence isolated from the Sargasso Sea
gaacattgttcttataaatcatcaaaatttttggctcaaaaaactaccaacatcgggtgaacgagttgtacaagggccaggagaaaatgctggagtgattgatattgatgacggagatgttgctgtctttaaaatggaaagccataatcacccttctttccttgagccatatcaaggtgcggctactggagttggtggcatacttcgagatgtcttcacaatgggtgctcgccccgtagctaatttaaatgccttgagatttggagaacccaaccatccaaaaacaaaacatttattatcgggtgttgtcagcggtattggtggatatggcaattgcattggtgtgccaaccgtcggtggtgaagtcaattttcatccttcatacaacggcaatattttagtaaatgccatgacagttgggatcgcaaagaaagataaaatcttttactctgcagcggcaggaattggaaaccccgttgtatatgtaggatcaaagactggacgtgatggcattcacggtgcaaccatggcatctgctgaattcgacgaagattcagaagataaaaagccaactgttcaggttggggatccattcactgagaaattattgttagaagcttgtctcgaattgatgaaagaagaagcgattattgcaattcaagatatgggggcagctggattaacttcttcttcaattgaaatggcgtccaaaggtgatgtgggtttagaaattgatctttcaaaagtgccaatgcgtgcacaaaatatgtcagcatacgaattaatgttgtcagaaagccaagagcgcatgcttatggtcctcgatccatcaaaagaagaaatggccagagatatttttaagaagtgggatcttgaatttgaagtgattggcaaagtaacagatacaaaaagacttatactcatgatgaacggcaaagaagaagccagcatacctattaatatattagttgaagatgctcctgaatatcaaagagattacattgttgaagaaccatctccaattaaagaatacaaatcagaagacttcgatcagaataatattttaaaggacttaaacacgatgattatgcatcccgatctaagtagccggaaatggatatgggagcaatatgatcatatggtcatggcagatactgtggtaagaccagggtccgatgcagcagttgtacgtgttcacggaacaaataaaggactagccatgagcacagactgttctccggtatattgcaaacacaacccttatgaaggtggaaagcatgcagttgttgaaacatggagaaatataatagcttctggcgcccttccaattgcaattacagattgtatgaactttggtaatcccgagaaaccagaaatcatgggacaatttgtggagtgtattagaggtatgggcgatgcttgttcaaaattaaactatcctgtcgtttcaggaaacgtctcactttacaacgaaactaatggtgaaggcatatatccaactccagccataggaggtgtcggattaatcaaagatttatcaaatgtaaaaaccctttcatttaaagaagatggtaattttctatgcgtggtagggaaaacagctaatcacttaggtatttcaaagtatatatctattatccaatctaaagaggaaggtggaaacactgaaattaacttagaaact

SEQ ID NO: 318751 - DNA, 1861 bp, Unknown
  Bacterial polypeptide expressing nucleotide sequence isolated from the Sargasso Sea
catacttcgagatgtcttcacaatgggtgctcgccctgtagctaatttaaatgccttgagatttggagagcccaaccatcctaaaacaaaacatttattatcaggcgttgtcagcggtataggtggatatggcaattgtattggtgtgccaaccgttggtggtgaagtcaattttcatccttcatataacggtaatattttagtaaatgccatgacagttgggatcgcaaagaaagataaaatcttttactctgcggcagcaggaattggaaaccccgttgtgtatgtaggatcaaagactggacgtgatggtattcacggtgcaaccatggcgtccgctgaattcgacgaagcttcagaagataaaaagccaactgttcaggttggagatccatttactgagaaattattattggaagcttgtcttgaattgatgaaagaagaagcaattattgcaattcaagatatgggagcagctggattaacatcttcctcaattgaaatggcgtccaaaggtgatgtgggtttagaaattgatctttcaaaagtgccaatgcgcgcacaaaatatgtcagcatatgaattaatgttatcagaaagccaagagcgcatgcttatggtcctcgatccatcaaaagaagaaatggctagagatatttttaagaaatgggatcttgaatttgaagtgattggcaaagtaactgatacaaaaagacttattctcatgatgaacggcaaagaagaagccagcatacctattaatatattagttgaagatgctcctgaatatcaaagagattacattgttgaagaaccatctccaattaaagaatacaaatcagaagacttcgatcaggataatattttaaaggacttaaataccatgattatgcaccctgatcttagtagccggaaatggatatgggaacaatatgatcatatggtcatggcagatactttggtaagaccaggatccgatgcagcagtagtgcgtgttcacggaaccaataaaggtctggccatgagcacagactgttctccagtatattgcaaacacaacccttatgaaggtggtaaacatgcagttgttgaaacatggagaaacataatagcttcaggcgccctaccaattgcaattacagattgtatgaactttggtaatcctgaaaaacctgaaatcatgggacaatttgtagagtgtattcgaggcatgggcgatgcttgttcaaaattaaattatcctgtcgtttcaggaaacgtttcactctacaacgaaactaatggcgaaggcatatatccaacaccagccataggaggtgttgggttaatcaaagatttatcaaatgtaaaaactctttcattaaaagaagatggtaattttctatgcgtggtagggaaaacagctaatcacttaggcagttcaaagtatatatctattatccaatctaaagaagaaggcggaacacctgaaattaacttagacactgaattaagaaatggaaattttgtaatggatgcaataaataaaaaattaattgcttcagcacatgacgtcggagaaggaggtattttagtggctatatcggagatgtgtatgtcaggaaatcttggaatattaatagaaaatgagtcagactttcctcatggctatttttttgcagaagatcagtcacgttatctaatagaagtaagtcccaataattatgatgaatgccaaaaattagcaaataataatgatgttcattttgaaaaaataggaatagttggtggagacaaaatcagtattaaaaatataggtgatcaacacatttctgctttgaaacgcagtttcgaaacgggcattaaacagatatctcaatag

SEQ ID NO: 318752 - DNA, 1727 bp, Unknown
  Bacterial polypeptide expressing nucleotide sequence isolated from the Sargasso Sea
cggaaattgtattgaatttccaactgttggaggtgaagtaaattttcatccatcgtatacgggcaatatattggttaatgctatgacagttggtatcgcaaaaaaagataaaattttctactcagcggctgcaggaataggaaatccagtagtgtatgttggttcaaaaacaggtagagatggtattcatggtgcaacaatggcatcagctgaatttgatgatgactctgaagaaaaaaaacccactgttcaagtaggcgatccttttactgaaaaactattacttgaggcttgtctagaactcatgaaagaggatgcaattatagcaattcaagatatgggagctgcaggtttaacttcatcatcaattgagatggcatccaaaggaaatgtagggattgatataaatttatctaaggttcctatgcgagcggctaacatgactgcctacgagctcatgctttcagaaagtcaggaaagaatgctaatggttattcagcccaaaaaagaggaacttgcccgaagcatttttaaaaaatgggatcttgaatttgaagtgattggtgaagttacagatacaaaaaaattaatattgcatatggatggtgaagagcaggcaagtataccaattaatattttggtagaggatgcgccagagtatcagcgagattatattgtcaatgacccttctcccctaattagtttcgaaagtaaggattttgaagataaagatatcttaagcgatttattaaaaatgatcagtcatccaaatttatgcagcagaaaatggatatgggaacaatatgatcacatggttatggcagatacagttgtacgacctggttctgatgcagctgttgtcagagtgcatggaaccaacaaaggaatagcgatcagtacagactgttcacccacctactgcagacacaattcctatgaaggaggaaagcatgcggttgttgaaacttggcgtaatattgttgcatccggagctgagccaattgcaattacagattgtatgaattttggaaatcctgaaaagccagaaatcatgggacaatttgtagaatgcattcgtggcatgggagatgcttgcagtaagcttaattaccctgtcatttcaggaaatgtatcactctataatgaaactaacggtgaagggatttatcctactcccgctattggtggagttggactaattagagatttatctaatacaatgacaatagatcttaaaaatgagggtaatgttttatgcctcattggggaaagcaacaatcatttaggcaatagtcattatctctcaatcatacaaagtagagaagacggcggtaccccgtcaattaatttggatgatgaactaaaaaatggaaaattcattctagattgcattgctaagaaattactaaaatctgttcatgatgttggtgaaggtggtgttcttgttgcaattgctgaaatgtgcatctcaggtaagcaaggtataaaaattgatataacaaaagattttcttcacggattcttttttggtgaggatcaagctaggtacctggttgaggtctcacaaaataaacttgaacaactagaagttgatgcaagcaagagtgcggtcaaaatagaaagaattggagaaattggaggaacatctatctcaattaattcaattggagagatagaattatcaagcttaattgaccaccatacaaaatggttcaatgaattttgac

SEQ ID NO: 318753 - DNA, 2335 bp, Unknown
  Bacterial polypeptide expressing nucleotide sequence isolated from the Sargasso Sea
atggcatttacaaaagaaattgttgatttcagtgatttagatacgcaaggtatcaaagaaaaattagctgagctgaacatacctctatctcctgatgaggtgctaaaaattcaaaatgaaatgttaggcagggccccttcgcttcccgagttagttttattttcaattcaagggtctgaacactgtagctacaaaagcagccgcacacatttaaagcagtttacaaccgatgggccagatgtagtgcttggtgcaaaagaggatgctggtgttatagcgattgcaacagatgaggatggtcgccgttggtgtattgttatgagccatgaaagtcataaccacccatctcagattgttccatatgaaggcgcagctactggagttggtggaaatgtacgcgatgttatgtgcatgggtgcaagggtagtagcgtgcacagattcttttagatttggggaaataagaaacaacaaaactaaatggattaatgatggtgtggtttctggaatagcaggctatgggaatccattaggtataccaaatattggtggtgatatatattatcatagtggatataatgaaaattgtttagtaactctggtaacgttaggaattgtacgtgaggatcatattattcattcttatgcgccagaaaatgcagatggatacgatttaattcttgttggtaagcccacagataacagcggcttcggaggcgcaagctttgcttcgcttgaactggaagaagaaaagaaagatcaaaataaaggtgccgttcaagagcctaatgctttccttgaaagacatttattaaaatcatcgtatgcattatttgataaaataaaaaaaatgaatttaattgatcaggtgggcttcaaagatctgggggcgggtggtgtagcttgcgccagtgttgaattagctgaaacctcagggtacggatcggaggtttggctagacaaggtgcatactagtatggagggtctgcatccttcagtgtatttatgtagcgaaacacaagaaagatttatgtgggtctgcccacctgatataacacagttaataattgatcactataatacaacctatgatctgcctggagttagcgatggagccatggcttccgtcattggcaaaataagatctgatggccaatacattgttcattataatgatgaaataattgtagatgctaaagcaaatcaggtgaccaaaggttttttatataatagaaggtttagcccaattaatacaaatctcgatgctcccaaattaaatagcaatcgtgattataatactgaattaatcaatctactggctcatgaaaatattgctagtagaaaatcagtgtacgataaatatgacaagcaagttcagggcagaataataacagaggcgggaagagcagatagcggaatacttgccccattcaattcagaaaattatccaaaagaaattagaaacatcggtatagcgctctcaacagatcacaatccactatatgggactattgatccctattgggccggcgttaatgcagttgttgaatccatgagaaatgtggcagctgtaggcgctacacctcatgcattaacagattgtttatgttttggtaatcctgaaaaggaaaaccaaatgtgggaatttgtggaaagtgtaaagggcataaaagatgcttgtagtgcaataaccttaaagcataatccagaacacgctacgccaataattgcaggaaacgtaagcttttataatgagtcaaaaaatggttctattcctcctagcccaattgtcagttgtcttggtaaaataaatgatgtaaatgattgcattggaatggattttagtttaattggttcgaatattatcatggttggtaaaagaaaaagtgagcttggcggctctgctttttatcacctgcataatgaattaggctccacgttgcccaagccagatttacaagaagcaaagaatcaaattcatgctcttacagattgtattgataaaaacttagtattgtcttgtcatgatattgctgatggtggagttgcggtagctttagctgaaatgacttttaaaaataaaattggatgcaatgtttctattgaaagcaatctaaaaactgatgaaatattattttcggaaaccgggggattcattttagaagttggggatgaaaatataaatgaaattgttcgttgtttttctgattacggtatagaagtttttatgattggaaaaacggttaaatccaatatcataattaatgatgaaataaatatctctatagaacaaagctatgatgcttggaagaatggactaataaataaactataaa

SEQ ID NO: 318754 - DNA, 1984 bp, Unknown
  Bacterial polypeptide expressing nucleotide sequence isolated from the Sargasso Sea
gaaatcgtatccgtttgggcctcaacgccacgagaccattattcgttaattgtgcttactaaagagacagtcgacttcactggactctcaaatagtgagattcaaacaaaacttaaagaactaaacatcccgcttacctccgaagaggctttaaagattcaaaatgagatgctcggaagagctccctcacttgctgaactggtcttattctccattcaaggttcagagcactgcagctataaaagtagtcgaacacatttaaaacaatttacaactgaaggccctgatgttgtcctaggagcaaaagaagatgcaggagttgtgtcaatcgctagtgataaaaacggagatcggtggtgtatagtcatgagccatgaatcgcataatcacccatctcagatagtcccgtatgaaggggccgctacgggtgttgggggaaatgttcgagatgtcatgtgcatgggtgcagaagtgatcgcctgtacagattcttttcgatttggcgctattgaaaataataaaacaaagtatatacatgatggtgtagttgcaggtattgcaggttacggcaaccctctggggataccgaatattggaggagacctttattatcatgaagggtataatgagaactgcctggtaaccctggtgaccctgggggttgtaaaggaagacgatataattcattcttatgcccctaaaaacgccaacaactatgaccttatccttattgggaaaccaacagataatagtgggttcggtggtgcaagttttgcgtctcttgaattggaagaggaaaagaaagagcagaacaaaggtgcggtacaagaaccaaatgctttccttgaaagacatcttctcaaatcaacctatgccctttttgaaatgcttaggttaaaaggattaacgtcacaagttgggtttaaagatctcggcgcgggcggtgttgcatgcgcaagtgttgagctcgcagaaacctctggatacggttcagaagtttggatggacaaaattcataaaggaatggacaatctacattcgtcagtatatctctgtagtgaaactcaagaacgatttatgtgggtttgcccacccagcttgacacctcttattgttgatcattataataacgtctttgacctcccgggtgtgagtgccggtgctcaagcatcggtcattggcaagataagatcagatgggcaatacattgttcatgatggttcagaagaaatagtgaacgcatctgcaacggaggttactaagggatttttatatgaccgggtttttgaggatccaatgaacaacttttctgagccttctcttgtcccacctacaaattataatgagattcttctaaagataatgtctcatgagaatatggctaatagagaacctgtttacgaaaagtacgataagcaggttcaaggcagggtatatattgaagctggcttggcagactctggcataatggcgcccttcaactcagaaaagtaccctaaagagatacgaggtgtcggtatcgctctctctactgaccacaaccctcgctatggtatgatagacccttattggggaggggttaactcagttgttgaggcaatgagaaatgttgcagcagttggagctacaccacatgctattactgactgcttgtgttttggaaacccagaaaagccacatcaaatgtgggagtttgtagaaagtacacgaggtattgctgaggcatgcaacagcataaaccttaaagaccatcctcaagaggctacccctattatagctggaaatgtcagcttctataatgaatcaaaaaagggagcgatcccacccagccccattgtaagctgtttagggagattaaaaaatgtagaaaaagctgtccctatgcattttcaaagatcaggttcaacggtatgcatggtaggtcaacgaaaagatgagctaggcggctctatctattatagcttaaataatgaattaggggcat

SEQ ID NO: 318755 - DNA, 814 bp, Unknown
  Bacterial polypeptide expressing nucleotide sequence isolated from the Sargasso Sea
ttccctcctggccactatctgtggagcaaagaaggtaaaatcactaagtattacaagcgcgactggatggaatacgacaacgtaaaagacaacaccagcgatttagacgaactacgtgtagcgtttgaaaaagcggtgaagtctcatatgatgtctgacgtgccgtacgctgtactattgtctggcggcttagattcatctctggtatccgctgttgctgcacagtacgtagcaaagcgtgtagaagatgaagacaaaaccgatgcgtggtggcctcgtttacacagctttgcggtgggtcttgaaggtgcgccagatttaaaagcggcgaagaaagtggcggatatgattggtaccgttcaccatgaaatccatttcaccattcaagaaggtttagatgccatccgcgatgttatcttccatctagaaacctacgatacgacaacgattcgtgcagctactcctatgtatctaatgacccgtaagattaaagcgatgggtatcaaaatggtactatctggggaaggctcggatgaaatctttggcggctacctgtatttccacaaagcaccgaacgcaaaagagttccacgaagaaaccgtacgtaagctagatcgcctccacatgttcgactgtgctcgtgctaacaaagcgacctcagcctggggtgtagaagcgcgcgttcctttcttagataagaacttcattgacgtcgccatgcgcctaaacccacaagacaagatgtgtcttgacggcaaaatagagaagtggatcttgcgtaaagcatttgataacggcgagacacttccggcgg

SEQ ID NO: 318756 - DNA, 517 bp, Unknown
  Bacterial polypeptide expressing nucleotide sequence isolated from the Sargasso Sea
tatgattgtctaagagcaaacaaatcactagctgcatggggtattgaaggaagagttccattcttagataaagaatttattgatatagctatgaaaataaatcctgcagacaagatgattactaatgaaagaatggaaaaatgggtggttagaaaatcgtttgaagattatcttccaaaacaggtagcttggagacaaaaagagcagtttagcgatggtgttggttatagttggattgatagtttaaaagaattagtagataatgaagtaagtgacaaaatgtttgaaaatgcatccgaaagatatccttttcaaacacctcaaaataaggaagagtatttttatagatctattttcgaatcacattttccttcacaagctgcagctgaaacagttccatctgttccctcagttgcatgcagcactccaatcgctcttgagtgggataaatcgtttaaaaatttaaacgatccatcaggtagatctgttttaaatgttcacaaagattcttattaga

SEQ ID NO: 318757 - DNA, 537 bp, Unknown
  Bacterial polypeptide expressing nucleotide sequence isolated from the Sargasso Sea
tatgtgtggaataattggtatatttgatataaaagataaagttaagtgtctggatcaatcattaaaaatggttccaaaaataaggcatcgtggacctgattggagtggtagttatgtggatgatttttgtataataaaacatgaaaggttgtcaatagtagatgttgaaaatggggcacaacctctatatgattctattaatcagagggttttggctgttaatggtgagatttataatcatataagtttagcaaaaagacttaaaaaaaaacatgaatggaaaacgtcttcagattgcgaggttttactatatctatacgatgagtttgggcccgattttcttaatgatttagatgggatttttgcttttattttgtatgatccaaaaactaaagaatattttgttgctagagatcatataggcattattccattatatattggatgggatgattctaagcaagtttacttagcaagtgaaatgaaggctattgagtcctattgttctaaaattatggaattccctcgagggaatta

SEQ ID NO: 318758 - DNA, 526 bp, Unknown
  Bacterial polypeptide expressing nucleotide sequence isolated from the Sargasso Sea
atgtgtggaattacttgcgcctttgatctcaaagaagatagctcggttatgaggcctcaattattagaaatgtccaagaaactgaggcacaggggtcctgactggagtgggatttattctgacaataatgcaatactatctcatgaaagattagctattgtagaccctgcttctggtaagcagcctctttatgggcaaaatgatgatgttgtattagctgttaatggagaaatttataatcatcttactctcaaagaagaatttgaaggtaattataattttagaacggaatcagactgcgaggtaatacttgctttatatgaaaaatatggatttgattttataaacaaactaaatggtatttttgcttttgcactttatgatatcaaaaacaaagaatacctgattgctagagaccatataggaatagttccgttgtatatgggctgggataagaaaggaacattctatattgcatcagagctaaaagcccttgaaggattttgcagtaaaattgagatatttc

SEQ ID NO: 318759 - DNA, 787 bp, Unknown
  Bacterial polypeptide expressing nucleotide sequence isolated from the Sargasso Sea
tatgtgtggatttattggatatatttcaaataaaagtgaccttaacaatcaaaaatatgaaaataagtttaacaaatatttgatcaaattaaacaatcgcgggcctgattatcaagagaaaaagaagatttttaattttgagaaaatattaaacttgggattttcaagattagcaatacaggatttatcaaaaacatcgaataaaattttttcaaataataaaaaaattctacttttcaatggtgaaatatataattttttagaacttaaaaaaaaatttttttacaatgagaaatttgaaacaaatacagatactgaattattatttaaactatttgataaatttggtccagataaaatttccgaatgtaaaggaattttttcaatagttttttttgatttaaataactcagaaatttatttattaagagatccaaccggtactaaacctctgtattatattcgaaataatcaattttttgctttttcatcggaagcatggtttccttatagtttatcagaaaaaaaaataaataacgatacattaaatttttttttaaattttggttttactagtgtaagcgaaaccttgatagataatgtaaaaaaaattgtgccaaggaaaatttataaatataactttttaaatgataactttgaaatcaaggagtattttaatattgctaaatcaaaaaactctataataccagatcaaaataatttgaatttaaaaattgaaaaatcaattgaaagcaatttaatatccgatgcaaaaattggaactttt

SEQ ID NO: 318760 - DNA, 607 bp, Unknown
  Bacterial polypeptide expressing nucleotide sequence isolated from the Sargasso Sea
catgtgtggcattgcaggcattgtaaattctaataaagattcaggtgaactggaaaatatcgggtctttgatgataaagcagctgcatcataggggtccagatggaagtggcatcaaaataattagcaaaaaagataaaagaaatatccttttggcgcatacaagactcagcattattgatttaagtgaacgtggctctcaaccaatgtctaatatcagtggcgatatatggattaccttcaatggagaaatctataactatgcagaaataagaaaagatctttcaattgagggatataaattcaggacagatagtgatactgaggtaattattcatgcttataagcattggggcatggattgttttaagagatttatcggaatgtgggcaattgcaatttgggatcacgaaagagagaggtttatactttctagagatagactggggataaagcctctgtattactcttttgatggagagcttctaatgtttggatctgaaccaaaagtgatcctagagcaagacccaactaagagaaaattgaacttaaatgctttatcagattatttgagttatcgatatgtactggatggcagttcatttttc

SEQ ID NO: 318761 - DNA, 433 bp, Unknown
  Bacterial polypeptide expressing nucleotide sequence isolated from the Sargasso Sea
tatgtgtggaattgtctgtgcttttaatattaaaagcaatagtgatgccgttagatccaatgttttgaaaatggctaagaaggtaaggcaccgtggtcctgattggagtggagtatactcgaatcaaaatgctgttcttgcacatgaaagactagctatagttgaccccacgtcgggtaaacaaccaattatctcagaagatggttgtaaagtaattgctgttaacggagaaatatataaccatatacagcttaaagaaaaatatactaaagattataacttcaaaacagaatcagattgtgaagttattctggcactttatgaaaagaaagggataaattttttaaatgatctaaacggcatttttgcttttgctttatatgattcatctgatgataaatacataattgcaagggatcatatcggtataata

SEQ ID NO: 318762 - DNA, 973 bp, Unknown
  Bacterial polypeptide expressing nucleotide sequence isolated from the Sargasso Sea
actgttttggataatatggtaagtgctctaatacatagagggccagattcatcaggttattataaagaagagtcctataatgctggtatgagacgattgagcattaatggaatagagtctggaaatcagccattatataatcaaaataagaatgtagtattattatataatggagaaatatacaactctttagaattaagaaaagaccttcaaaaaaaaggttataagtttaaaacaaattcagatggcgaagtcatttgccatctttttgacgaataccaagaagaatgttttgataagttagatggaatgttcgcaattgctatgtggattgtagatcaaagaaaattatttttagcaagagatcttgctggtgaaaaacctctatactatagttgcctatcccacaatgaaattgcttttagctcagagctcaaaagtctcaaattatttccaaaaataagtaaagaattgaattataaagctatttgggattttccaacatttttatggatacctgagccagatactatttacaaaaatattcatgcagttatgccaggagaattacttataattgatgaaaaagaaattctttcaaggcagataataaatacatttgagacccaattagatgaagattctgacgaatacctaatttaccaaacgaaaaaaattgtagagcaatctgtaaaaagaagacttttatctgatgttccaataggaagttttttaagtggtggccttgatagttcaattgtttcctctattgctgcaaaaaatctagatactcttgatactttcacaattgggtttgaaaacgttatagacccataccatggtatggctgatgaatcaacagcagctcgaagctttgcagataagttaaatacaaatcaccatgaaattaaaataactagccaagattttaatgatatgcttgattcgttctgtaaatttggtgatcaaccct

SEQ ID NO: 318763 - DNA, 724 bp, Unknown
  Bacterial polypeptide expressing nucleotide sequence isolated from the Sargasso Sea
agtttagaaacttatgatgtaacaactataagggctgcaacgccaatgtatcttatggcaagagttattaagtcaatgggaataaaaatggttttgtccggcgagggggcggatgaaatttttggtggttatctatattttcacaaagcacctaactccgaagaatttcatgaagagactatacgaaaattgaaagatttacatctttatgattgtttaagagcaaataaatctatggccgcatggggggttgaggcacgagtaccttttttagataaagagtttttagaggtagcaatgaagatagatcctaaaattaaaatgataaatcataaaaaaattgaaaaacttattttaagagaagcctttgaagattatcttcctgaaaaaatcctttatagacaaaaagaacaattttctgatggtgttggatatgattggattgatactcttaaaacggttgctgaagaaagggttacggatgatcaatttaaaaattcatctttgatttttacattaaatactcccttaagtaaagaagaatattattatagaaaaatatttaatgaattttttccctctaatagtgcagctttaactgttccttcaaagccatcggttgcttgtagttctgaaactgctcttaaatgggataagagttttgataacctgaacgatccatctggtagagcagtatccacagtacatgaaaactcaaattagt

SEQ ID NO: 318764 - DNA, 892 bp, Unknown
  Bacterial polypeptide expressing nucleotide sequence isolated from the Sargasso Sea
atgtgtggtatagtaggtagtataaatataaaatggtctaaagaccctttattgagtatcattaacaggggtccggattatcaggactttattaatattaaaaatgtttttttaggtcatacacgtttaagtatccaagacttatcatcgcttgggaatcaacccatgcaaagttcagatggcaggtttacattagtgtataatggtgaaatttataatcattggcaaataagagaaaatcttattaagaaagggtatacttttaactcaacatcagatacagaaactttgatgtatagctgggttgaatgggggcaagatgcaattaattatttcaatggtatttttgcatttgcaatacatgatatgaaagaaaataagttatttatagttcgtgatcagtttggtgttaaacctttatacatttataataaagggggggaaatagctttctcttctgaaataaaggcattcattaatattaaagattttgattcaactcttaattttgaatccatcgtaaattatttaacatttttatggtcaccagggcctagaacgatgtataaatacgttaataaattgattccaggccagataatagaaattgatacaaagacattagcgaccaagcaaaatagagtacctccctccaaattatttaatggagaatattgggatctttctgaatctgaatggatcaaaaaaattgatgataaattaaatgttgcagttgaaaagcaattgctttctgatgcaccattaggttattttttatctggaggtttagattcaagtttgttagtcgctatagctaaaactcaaagaccaaataatgggttagaatgttttacaatagatcaatttaaagatagtagtggggatggtttca

SEQ ID NO: 318765 - DNA, 822 bp, Unknown
  Bacterial polypeptide expressing nucleotide sequence isolated from the Sargasso Sea
aatgtgtggaattggtggaattgttagcactaacaattctaaaatcgaccaaaatattgcaaataatatgaaagtctccctggaacacaggggacccgaccattcttccattaattatatttcagattcacaatgttttatccatagtaggctttcaattattgatttagattccagatcaaatcaaccctatcaggacgaagaaaaaagatatacaattgtttttaacggtgaaatctataactttaaagaaatcagaaccgaattagaaaataaaggtataaattttttaacagaaggcgatacagaggtattacttaaaggatatatagaatataaagctgaaatattagaaaaattaagaggccaatttgcatttgcgattcatgatgtaatgacgaattccatctttttagcaagagacagaattggaatcaaacctttatactttgcaaagagtgaagattggttcgtattctcttcagagttaaaaactatagaacaatcaaatttaattccatttgaaccggatattgagtcttatattgcctacctaaggcatctttgtgttccgatgaataggacaggaaatttgaacatttcaaaagtacaacctggagagtacatcgaatttttcacagacaactctataaaatctcatcaatattgggatccctttgttattgaagttgataatgatatctcagaagatgaagcaattaaaaatatagacagattattaaccgaatctgttgagtacaggaaagtaagtgatgttgaggttggattatttctatctggagggcttgactcatccttgat

SEQ ID NO: 318766 - DNA, 845 bp, Unknown
  Bacterial polypeptide expressing nucleotide sequence isolated from the Sargasso Sea
tttagaaaattatgaatgggttaaatcaaaaattgagtatttaaaacatagaggtccagacaataaaaaaatttggagctctgagacaaataatataattttcggacacactaagttatccattattgatttaagcaaagaaaatattcaaccgatgagagatgaattaaataatataacattaacttataatggagaaatatataattacctagatttaagaaaggaactttcaaaaaatcatgaatttaatactaatagtgatacggaggtgataattaaatcctatttagagtggggagaaaaatttttaaacaaaattcaaggtatgtttgccttcgctctctttgatgaaaaaagagaaatagtattattagctagagatagattgggagaaaaaccccttttttattattcaaataatgatcaatttttattttcatccgagttaagtgcatttttttctttatcaaatattaataaaagaaatttaaacgaaactctgctaaatggttttccaattaatagagaagaaactcttctttcaaatgtaaatcaagttgaacctggtacattcgttaaactagatttaaaaaatcgagatatctttaaaaaaaaattttgggatataaactttaatataagctcagaaaaatttgttaatcaagaaaagtttgataaaattttaaattcaaacatagagaaatgtcttatatctgacgtaagaacttgtgttacattaagtggtggacttgactcaagtttaattgttgctgtagcttctggacaaaaaaaaattgatactttctctattgtttttaagaataaacaatttgatgagagaa

SEQ ID NO: 318767 - DNA, 745 bp, Unknown
  Bacterial polypeptide expressing nucleotide sequence isolated from the Sargasso Sea
ttgagagatgttatatatcatcttgaaacatatgatataacaactgtaagagcttctactcctatgtatttgatggcaagagcaataaaatcactaggaattaaaatggtcttatcaggtgaaggtgcagatgaactattcgggggatatttatattttcataaagctccatcagctgaagaatttcataatgagactgttagaaaacttaataaattacatcaatatgattgtttgagagctaacaaagctctagcggcatggggaattgaagggagagttccttttctggataaagaatttattgaagtagctatgaatataaatccaaaagataaaatgatcaataaagatagaattgagaaatgggttatcagaaaagcttttgaagagtacctgcctgatgaagtattatggagacaaaaagaacagttttctgatggagttggatattcttggattgatagtctaaaagacttagttgcgaaggaaataactgatgagcaaatggaatcagcttcaaaaaaatatccaattaatccccctcaaaataaagaagaatattactacagaagaatttttgaagaacattttcctagtgatgcagcagcaaaatcagttccatcagttccatcagtagcatgtagttctcctgaggcattaaagtgggatgaatctttccaaaatcaaaatgatccaagcggtagagctatatcaaatgttcataagaaatcttatgaataaa

SEQ ID NO: 318768 - DNA, 881 bp, Unknown
  Bacterial polypeptide expressing nucleotide sequence isolated from the Sargasso Sea
ttatctcacaggggtccagattttaaagatattattaattttaaaactaaaaaatcagaatgttatttgggatttaacagattggctattattgatttaaacagtaatgctaataaaattttttataatgatcaatatgcgtttctttttaatggtgagatatacaatatagaaaatttaaaaaaaaaatatttaatcaaatataaatttgaaacaaaaactgatacggaaatactatttaggttattaattaattttggatcaaaaataattaaagagcttgagggtatgtttgcatttacttttatcaataaacttgatggtacaatgcttctatgcagagactatacaggaataaaaccattgtattattttcacaataattatggattttttttttcttctgaagcttggtttttgtatagtctttctaataaggaattaaattatagtgcctgtaaattttactttaatcatggttttagccctgaggacagcacattaataaaaaatgttaataaagtactacctgggtcaatagtaacttataattttaaaaataactcaaaacaaactgaatatttttttcgtctttcgaaaagtaaaactgtaaataaatttaaaaataccaaaaatttaattaaagatgtaataaaaaaaaatttaattacagacacaaaagtaggaatttttttatcaggaggtttggactcttcaattttagcagtgacagctaaaaatttaggttttgaggtagaggcttatacatcttattttttaccagaagataaatttacaaagtttaatgttgactacaaatacgcagatattttaagtaaaaaatttaattttaaattaaataaagttggaattgatgaaaa

SEQ ID NO: 318769 - DNA, 879 bp, Unknown
  Bacterial polypeptide expressing nucleotide sequence isolated from the Sargasso Sea
gatgaaatataataaggttgtagcttataatggagaaatatataactttaaagagttaagaaaaaaattaattaataatggatatgactttagttctgattctgactgtgaggttctaatagctggatgggatttttggggaaaaaaattcctaaacttaatagatggaatgtttgcatttgcaatatgggattataatttaaaaactttaactttagcaagagacccttatggtaaaaaaccattattatactatataaaagataaaaaaatatgtttttcttcagacctaaaaagtttagaaaaaattattgataattttgatattaataagaaagcaatagaaagtttatttaggtttagatttattcatgagccccttacaatttataaacaagtaaataaattacctcctggtcatatattagagtttaaatgcaataataataatatagagaaatggtataatttgcctttacgaaataatttaaattataatagatcagaaattagaaaaaatattgtaggactttttgataaagcagttgctaaaagattatatgcagatgtacccttgggggtactattatctggtggattagattccagtttaattgtagcatcattagctgaacaaggcaggtctgtatcaacttatactatgggctttgagaacgctagtagctattatgaagaaagaccagaagcaaaaaaattatcagattattatgggatgaaacatttcgatttagaaatatcctcaaataaattactcaatattgtgcctgaagtgtttgatgctaatgatgagccttttgcagatagcagtgccttaccattttttgctttatcaaaagaagtgtctaaaaatgttacagt

SEQ ID NO: 318770 - DNA, 440 bp, Unknown
  Bacterial polypeptide expressing nucleotide sequence isolated from the Sargasso Sea
aatgtgttctattttcggcattctggacatcaaatccgatgcggccgcgctgcgcaaatcggcgctggagatgtccaagcgattgcgtcaccgcggtcctgactggtccggcgtctacagctccgacaaagccattctggtgcacgagcgcctggccatcgtcgatccgggcaacggcgcccagccgctctacaaccccgagcgcacccacgtgctggccgtcaacggcgagatctacaaccacaaggagctggagaagaacctcaaggtcgacttccagttccagacccactccgactgcgaggtgctgctggccctctacaaggagaagggcccggcctttttggacgatctcaacggcatcttcgccttcatcctctatgacgccgagcaggatgcctacctgattggtcgcgaccacatggggatcatccccctct

SEQ ID NO: 318771 - DNA, 808 bp, Unknown
  Bacterial polypeptide expressing nucleotide sequence isolated from the Sargasso Sea
ctcaacagttgttgagaatgtgaagcgatctcttgaacatagaggtcccgaccactcatctcatcaatttatcaaagaatctgtttgcttaatccacactcgattatcaataatcgatttaaatgatcgttcaaatcagccttttcaatcaaatgatgagagatacacaatagttttcaatggtgaaatttataattataaagaattaagaaaggaattagaaacaaaaggacataaatttataacaaatggagatacagaagttcttttacaaggctacatagaatacgaagaaaaaatattgaataaacttcgtggtcaatttgcatttgtaatatacgacaaaattaccaatgaattgtttatggcgagagacaggattggtattaaacccctatattattcagttaatgacaattggattctctttggctcagaaattaaagcgatagaactatcaaaactaatagaatttgaacctgatattgattcttatttagcctatctaaggcacctttgtgtaccagctgacagcactggtaataaaaatattaaaaaattagaaccaggacaatttattcgaatagataaaaatgggaaaatatcaaagaaaatttattgggacccatttaccttttcagttaatcatgatttgaatgaaaaaaatgttgttgaggaattagataggctactcaatgaatctgtagaatatcgaaaagttagtgatgttgaggttggtctttttctctcaggaggcttagattcatctcttttaggcaaattgatgaaacaaaattccgattcatct

SEQ ID NO: 318772 - DNA, 871 bp, Unknown
  Bacterial polypeptide expressing nucleotide sequence isolated from the Sargasso Sea
ttacaatcatagggaaatcagaaaaaaacttaaaaataaatatcaatttaaaactaattcagactgcgaagttattcttgctttatataaagaaaaaggtaaaaactttttagatatcatgaatggtattttcgcttttgcaatttacgatactattgaagataaatattttatagctcgagatcatgtaggaattattcctttatatattggctgggataacagaggaaccttttatgtttcatctgagctaaaatcattggagtccatttgtgaaaaaattgaattatttccaccaggacactatttatcaagcgatgaagagggatttaaaaattggtattctagagactgggaatcttttgataaagtcaaaaacaattcaacagatattgatgaacttgaaaaagcattatcaagtgcagtgcataggcagttaatgagtgatgttccatatggagtacttttatccggaggtttagattcttcaatcacatctgctttagctaaaaaatttgcatctaaaagggtcgagtctaatgatacaaaaggggcttggtggcctcaattacattctttttctgttgggcttaagggatcacctgatttagtggctgcaagaaaggttgctgaccatataggtactattcatcacgaaattaaatttacaatacaagaaggcttggatgcattaagtgatgttatatatcatttagaaacatatgatgtcacaactgttagagcctcgactccaatgtatttaatggcaagagcgataaaatctttgggtattaaaatggttttgtctggcgagggtgcggacgaattatttggaggttacttatattttcataaagcccccgggtgcaaa

SEQ ID NO: 318773 - DNA, 562 bp, Unknown
  Bacterial polypeptide expressing nucleotide sequence isolated from the Sargasso Sea
tatgtgcggaattgtttgtgcttttgatataaatagtaatagtgatgaagtaagatctaatgtcttaaggatggcaaaaaaggttaggcatagagggcctgactggagtggtatctattctaatgaaaaagctgttcttgctcatgaaagacttgctatagttgaccctacttctgggaaacaaccaataatttctgatgatggtaataaagtaatagctgtaaatggagaaatatataatcatatagatcttagagaaagacatactcctgactataattttaaaacagaatctgattgtgaagtaattttagcattataccaaaaaaagggaatcgatttcttaaatgatttaaatggaatttttgcttttgcattatatgactcatctaatgataagtatttaattgctagagatcatatgggtattattcctctttatattggttgggataaacaaaatatcttttatgtttcgtctgagcttaagtcattagaaggtgtgtgtaataagatagaaatgtttccacctggacattatcttgacagtagtgatggtaaa

SEQ ID NO: 318774 - DNA, 888 bp, Unknown
  Bacterial polypeptide expressing nucleotide sequence isolated from the Sargasso Sea
tttagaatgtctagaagaattagacataggggggccagattggagtggtatttactcctcaagtaatgcaattcttgctcacgaaaggttagggatagtcgatccaacatcagggaaacaacctctttattcaaatgacaacaagcttgttttggctgcaaatggtgaaatttataatcataggagcttaaggaaatatataggagataaatacgatttttctactggatctgattgcgaggtgattttagcactttataaactaaaaggcaaaaacttcattgacgatttaaacggcatgtttgcatttgcactttatgatcaagaaaaagacagctatttaattgcaagagatcatatggggataatcccattatatatgggttgggacgataaagacactttttacgtagcttctgaactaaaagcattggaagggttttgcaaaaagattgagctgtttcctccagggtgctatttatgcagtaaagatgcagaagttaaaaagtggtaccacaggagctggaaagactacaacattgttaaatataaaaaaacggagataagggctattagagaatctttgtccaatgctgtaaggagacaattgatgtcggatgttccatatggtgttttgctttctggtggattagattcatcaataacatctgcagtggcaaaaatatatgccgataaaagaatagaatcggatggaaaaaatgaagcttggtggccaacattgcattcgtttgctgtagggctagaaggctcaccagatttaattgctgctaataaagtggcaaaacacataggaacggttcatcacgaagtgaaatttaccattcaagaaggattagacgccattaaagatgtaatatatcatttaga

SEQ ID NO: 318775 - DNA, 871 bp, Unknown
  Bacterial polypeptide expressing nucleotide sequence isolated from the Sargasso Sea
gaagcggggctcggccttgctcaccgccggcttgcggtaattgaccctacgccggagggtcggcagccgacggtctcgcgatgcgagcgctacgttctggtcttcaatggcgagatctacaatttccgggaactggcgcggcaactcgcgacagaaggccacccggtcgacaccagctccgatactgttgtgttgcgcgaggcgatcgctttctgggggatacggaaaaccaccgagtccctggtcggcatgtttgctttcgcagtcttcgatcgcaaaacacgcaccctctcactggtcagggacagggtcggaatcaaacctgtgtactggacgcatcagaacggcgccttcgtattcgggtcggagatcaaggcgttgctggcttccgaacgcatagaggccaagcgagacccgagcgcgctagctgcctatctgcagttcgcctatatcccggcaccagccactatctaccacaacatccagaagcttccgcctggcacgatcctggcgctgcgcaaagaccaggaacccgaactggaaacctactgggacatcgcgcaaatcgcgcgcaccggtcagggaaatccggcctcgctagccgatcctgaggttggcgttcaattggagcgactgctcgcccaggccgtcaccgatcgaatgatctcggacgttcccttgggcgcctggttgtcgggcgggctggattcctcgctcgtcgtcgcgctgatgcaagccaacagcaccagaaaggtgcgaaccttctcgatcggatttcctgccttcggctatgacgaggccgacgatgcacgccagatcgccgcgcaaatgggcaccgatcacgaggagtttcaggtttccccacaagacg

SEQ ID NO: 318776 - DNA, 580 bp, Unknown
  Bacterial polypeptide expressing nucleotide sequence isolated from the Sargasso Sea
atgtgttcaatctttggggtattagatattaaatctgatcccgctcaattgcgaactcaagcaattgaaatgtcaaaattactacgacaccgaggcccagattggtctggtgtttacgcgtctgaaaaagcaattttagttcacgaacgtcttgcaattgttggcgtatctagtggtgcgcaacctttatacaaccctgaaaaaacgcatattttagcggtaaatggggaaatatataatcacaaagagctagctgcaaacttaaacactgattttacttttcagacacagtctgactgtgaagtaatattagcgctgtataaacagaaaggtcctgagtttttagatgacttgaacggtatttttgcattttgcttatacgatgaagaaaatgacgcctacttaattggtcgcgatcacattggtattataccgctatacactggccacgatgagcacggtaacttttatgttgcatctgagctaaaagcactttctccaatttgtaaacatattgaagaatttcctcctggtcattacctttacagtaaagatggtgaattaaagccggtattataaa

SEQ ID NO: 318777 - DNA, 884 bp, Unknown
  Bacterial polypeptide expressing nucleotide sequence isolated from the Sargasso Sea
tatgtgtggcattgcttgtgtttttgatttcaacagagatttaaactctcaaagaccatttgttctcgagatgtctaagaaattgcgtcaccgtggaccagactggaatggtatatatacatctaaaaatgccattttagcacacgaacgtttagcaattgttgatcctacttctgggaaacagcctttgtatggtagtgaaggcgaactagttcttgctgcaaatggtgagatttataatcatcttgaattgagaaagcaatttaaaaataattatgattttttgaccagttcagattgtgaaataatccttgctttatatcaacgtaaaggagttaattttttggatgaattaaatggaatctttggttttgcaatctatgataataagaaaaatgaattttttattgctagagatcatattggaattataccactttacattggttgggattctaatgaaactttatatgtcgcttctgaattaaaagcacttgaaggaatatgtgaaaaaatagaatcatttcctccaggtcattattggcatagttcaaatccaaagcctgtaaaatggtataaaagagattggattgattttcaaaatgttaagaaaaataagacttcaataaccgaattacatgatgctcttgctagtgcggttcatcgccaattaatgagtgatgttccatacggagttcttctttcaggaggtttagactcatctataacatctgcactagcaaaaaaatttgccccaaaaagaatagaaagtaatgacaaacaggctgcatggtggcctcaattgcattctttttctgttggactagagggttctcctgatcttttggcttcaagaaaagttgcagatcatatagggacaattc

SEQ ID NO: 318778 - DNA, 898 bp, Unknown
  Bacterial polypeptide expressing nucleotide sequence isolated from the Sargasso Sea
gagatctccgaccagcccatgaccatcaacaacgttacgctgatttgcaacggcgaaatctacaactatcgcgagctattcgaactcatgggcgtggagcccgaaacaggatccgattgtgaaatcataatacacctttataagaagtatggtattaaggagacattatctctcatcgacggagtgttcgcctttgtactgtatgactactctgactaccgcgatcctgctagggtctacgtcgcgcgggaccctctaggcgtgcgccctctctacgtgctatctgctagtggtccccgcttcgaggatcgcgatcttgacagtgtgaagataacatatgataacatatactgttttaccagcgagctgaagcctcttcaatcccttatgaatgtacatgggcctatttattatgattctttcaggccgaattcgcttacgcgcgcgcagggatgtcctccgcccctttcgacacgtgggcttctcgtggcgaagcagtatccccccgggacgtattcattatttagcttgtcacacggagctcatcgtacttggaccccaaccgctatggcgattccgtacgcctcccttaatgtatcgagttcttctttgagaacggagagtgagactgtcgggcgttcggcttatgagatagctgtatgggatactcttaacgaagctgttcgcaagcgcacggttggtacgacagagcgaggtatagcgtgctgtctctccggtggactagatagtagtctaattgcggcacttgtcagtaagtattacgatggtgatctcgagacgtactcgattggtatggagggatcggacgacctaaagtacgccaaagtggtggcaacccatcttggctcgaaacatacagagataatcttgagcgagg

SEQ ID NO: 318779 - DNA, 749 bp, Unknown
  Bacterial polypeptide expressing nucleotide sequence isolated from the Sargasso Sea
gataaaaaaataacaataatttttaaaagactttccataatagatttgaccaagaaatcaaatcaacccatgttttctaaaaatagaaggtatgtgattgtgtttaatggtgaaatttataattatcttgaaataaaaaatatcttattacagaaaggagttaaatttaaatcaaaaggtgatactgaagttttattaaatgcatatattttttggggtgaaaaatttgtaaaccatcttaggggcatgtttagcttttgtatttgggatagaaaatattctaagatggttgcgtatagagatagatttggccaaaaacctttatattattataaaacaaaaactggaattattatatcttcagaaattaaagatataactcaaattgttaaagtaagcacaaatgagaaagttattacaaaatatattttaagaaatattatggataatgacaaaaatactttttataaaaacctgtatagagtggaaccatctcataagctagaatattcaaagaaaaaaattattttaaaaaaatatttttcgttaaaatattcagaagaaaaaaacttcaataaggaggaatttttagaagtatttcaagattgtgttaattcacatttaaatgcagatgtaaaagttgcttttttattaagtggaggattggattcaacatctttagcttcaattgctagcattaataaaagggatatcaaaactttttctgttattccaaagcatacttataa

SEQ ID NO: 318780 - DNA, 871 bp, Unknown
  Bacterial polypeptide expressing nucleotide sequence isolated from the Sargasso Sea
gaaaatttaatgatgtttaatggcgagatatacaactataaagaattaaaacaaattcttttgagaaagggcattacttttaactcaaaaaattctgatacagaagttctattagaaggattgtctatatttggtctcgattttgtaaaaaatattattggacagtttgcaatagtattttatgacattaaaaataaaaatatacatttaattagagatcgagtgggacaaaaaccattatttttcaacctctctgatagaagtttagtttttggatcaaacctaatttctgttgcagatttattaggtgagaaacaaattaatgataaagaaattggtaatttttttaattatggtgtcataaaatctccaaatacaatatataaaaatatttataaacttaaaccaggtgaaataatttcttttaatttagaaaaaaatctccaacctcaaaaccatatatattggtctccgatagatgaaatagatgaaaaaaaatttattgataatgaattttatgaattattttcaagttctgtaaattacagacttgaatcagatgtgccagttgcaaattttttatcgggtggactagattcttcatcaattattaaaaatttatctgataataaaaaaaatataaatactttttcagcaatttatagcgataaaaaatatgacgaaagcttttggataggaagtgttaaagaaaaatatcaaacaaaccatattgaggaaaagctagatttggaacttgacttcaacactttactggatgtaattaatatttttgacgaaccttattgtgatccatcaattgttccttcttatatgttaagtcgtttgatatcaaaaaaatataaggttgcta

SEQ ID NO: 318781 - DNA, 757 bp, Unknown
  Bacterial polypeptide expressing nucleotide sequence isolated from the Sargasso Sea
atgtgtggaatattcactacctacaatgccagcagccaatgggactccattgagcaatcttttcaaaagatctcatatagaggaccagactccagtgagcatttacatattaataataaactaacaatggcttttcataggcttgctataatgggtattagtgattctggtaatcagccaatgaaacacccaaaagataattctttaacactgatatgtaatggggaaatatataattacaaaaaacttgctgatgattatggttttaagctgactactggttcagacagcgaaataatacttcatctttttaaagaaattggtattgaaggtacagtaaaagctctggatggtgtttttatgtttgtactgtatgatgaaatcaatgatatcttgtatgctggtagagatcctataggagttaggccagggtttattagtctaaatggcgatgaagttttcatatcatcagaagctaaatcattaattaaaatagccaaggatatagtgccatttcctcctggctcttggtggtcgtccaaagataataaaaaatttaataaatattttcattgcaagcctgatggtgaaactgacgatagccatattgatattttacaaaatataaaaagtcttctaacagatgctgttataaagcggcttatgtctgaaagagagattggctgtctactttcaggtggtcttgactctagcttgatatcaagcattgtagccaaaaattatcctggcgataaac

SEQ ID NO: 318782 - DNA, 806 bp, Unknown
  Bacterial polypeptide expressing nucleotide sequence isolated from the Sargasso Sea
gatgacagattgtattgcgcaccgtggacctgatgactctggttattttaaagatgaaaatgtcagttttggttttagaagattatctatcatagatgttactcatggtcaccaacctatgacatcaatagataatagatacataatcgtatttaatggcgaaatatataatttcaaaaaaattaaaaatgaattaatcgagtctggttatgtatttgaaacaaactgtgatactgaagtaattatttattctttcgatttatggggcaaagaatgtgttaatagatttaatggaatgtttgcttttgtgatttatgacaaagaattaaataatatttttattgcaagagacagattaggaattaaaccgttttattacactttcgtaaataataattttatttttggatcagaaataaaatctatattagcatgtaaagaatttaaaagagaagctgatttaaaagcaatcagttcttatttaactttcagatatacatttagtgataggactttttttaaggatattaaaaaattactccctggtcatcatattacaatagaaaaaaatgtttttttaattgaaaaatattgggagataccatttatagatgaaaaagatgatcaaggagaaaaattctatctagataaagttagaagcttattggaaaaagcggttgagagaagattaataagtgatgtacctttaggtgccttattatctggagggttagactcctctatcattgtggcttttatgtcgaaattaagcggtacaaaagtaaattcttattcaataggttttg

SEQ ID NO: 318783 - DNA, 856 bp, Unknown
  Bacterial polypeptide expressing nucleotide sequence isolated from the Sargasso Sea
ttcaataaagatgctttgcttttatttaatggagaaatttataatcaaaaaattttgagagaaaaatacttaaatttagagcaattttctacatctacagatacagaagtattattcaagctattattaaaaaaaggaacaaaaattgtaaatgaaataagtggaatattttcatttgtattttttgatcttaaaagaaatacattagaatgtgtaagagacttcactgggactaagcctttgtactatttaatacaaaataataattttttcttttcgtcagaggcatggtttctttattctttaactgaaaaaaaaattaataaaaaaagtctaaatttttttttaaattttggttttacacctgaagaaaatactttgattgatgaagtaaaaaaaattaaacctagaaatatctttaaattagattatgaaaaatttaaatctgagaagagggattactttattataaatgaaaataaaaattcagaatttgtatcaagagaagaacttaataatacattagaaaatgtaattaaaagtaatcttataaccgatactaaaattggaacgtttttatcgggtggtttagactcttcaactgttacagctatagcaaaaaaatataacaataaaattgagggatttacaactgtttttttacccgagaaaaaatacgagaaatttaatcaagattatatatatgctaaaaaattatctaatgaattaaatataaagcttaatgtaaattttattgataatatttcatctacactggatgacttctatgaaataacaaactatctggacgagcctatttctaatttaaattttttaaatacatattggcagtcta

SEQ ID NO: 318784 - DNA, 544 bp, Unknown
  Bacterial polypeptide expressing nucleotide sequence isolated from the Sargasso Sea
tatgtgtggaataactggattttggttaaataaatcatatcattttgattcgaatgaagttttagaagggatgatggatgctatcagtcatagagggccagatagcaatggatcttacataagtaatgaggataatctttgttttggtcatgttcgattatcaattttagatttaagctcagcaggccatcaaccaatgcaatctcattcaaagagatatgttcttacatataatggagaaatttataaccacaaggaaattagaaaaatacttgaatccggtctaattcaaaaaaaatggataggcacctctgacactgaaactttgcttgcagcaatagagtgctggggtttaaatgaagcaatcttaaagtgtagaggcatgtttgcatttgcactttgggacaagcaagaaaaaaaactcttttttgttagagataggattggcgaaaagccattatattttttacaggacgaagataagatagtttttgcctctgagataaaagccataagaaaattctcaaatgaaaagcttctaatc

SEQ ID NO: 318785 - DNA, 979 bp, Unknown
  Bacterial polypeptide expressing nucleotide sequence isolated from the Sargasso Sea
atgtgtggaatctgcggaaaagtaaattttaacgaatctcctccattacccatggatgaacttaactatatgtgtgaaaaaatagctcacagaggtccagatggcacaaaaaaaatgattcgtgaaaaaatagccttcggtcacacaagactatctattattgatcttgaatcaggatggcaacccatatcaaacaataaagaaaatatttttacaatttttaatggagaaatatataactatcaagccttaagagacatgttgattaaattaggatataaatttaaaacccaatctgatacagaaaccatagttcatctgtacgaagaatatggagaagacttcatccaatacattgatggaatgtttgctatcgcattatgggatgaaaagaaagagaaacttttattatatagagatagatttgggaaaaaaccattattttactactttgataacaacgagttatatttctcttctgaaataaaaagttttccgaaaaaaattatacattcaacaaaaattaatataaaagccgtttttgaatacttaaatttaggttatataccaaattctatgagcatatacgaaaaaatacataaattagaacctgctcattatttggtgtttgaaaaaaataatatcaaagttattagatattggaattttgatcctaaaattaacaatagtttgaaatctgaagaaattcaagaaacagtaactaatttacttgataaatctgtaaaatctagactaatcagtgatgtgcccctaggattttttctcagtggagggctagactcatcagcaattgtagcgactgctagtaaatttacaaataaaataaatacatactctattggatttgaggataaatcatataacgagctaagttatgctcacatggtatcaaaaaaatttcatacaaatcatgaagaattcatagtaacacccaatattattaatgatattgaaaaaa

SEQ ID NO: 318786 - DNA, 1282 bp, Unknown
  Bacterial polypeptide expressing nucleotide sequence isolated from the Sargasso Sea
atgtgtggaattaatggagtaatttttaaaacatctaaaaccgatgtttcaaaaattcttaaaatgaatgcgcttctagatcataggggaccggatgatagtggatatattaatcataaaaatcttttacttggtcatactaggctatctattatcgatacatcaaatcttggttctcaaccaatgtctgtagatggaagatattggattatttataatggagaaatttataattataaaagtttaagggaagaactaattctaaagaaatataagttttattcaaattcagatactgaggttgtccttaatgcatataaagaatggggtgttgattcatttcaaaagtttaacggagaatggtcttttgcaattttagataaaaaacataatgaagtaataatttgtagagatggtattggatataagccttgttatatttatgataacaacaatttttttgcatttagttctgaaataaaagcattttacgcattagaaaatacaattgattttgataataataatttaggtataaattttactactctaaataattgctctaaaacaatttttaaaaatattaatcaacttacacaaggaagatatttaaaagtaaatttaaataatctagaaaaaaagttagttagatgggactatcctcttaataatttaccaaaaataaattcaggtttcagagaaaatgttcatgattattttgatcttctttatgaatctacaaaattaagattaaacagtgacgtaaaaactggtacttcactgagtggtggtttggattcttctgctattttcacattgatgaatttaatacaaaagaaagaaaaatttgctgaagatgatttagatttaaatccgattataatgaattatcaggaaatgaaaacaaaagaggatgcagttcaactatcaaaaaaatttcaaagaaactaccaagtagttgattttgaaaatgtgacagcagataaaacaatggatcttgtttcatcacttgaagtagttgaagaatattttatccagtatgagctatataaaaaacaaaaagaaaaaggaataaaagttagtcttgatggtcatgggtcagatgaatttttaggatatccaaactggataccagaattatctgtagatatttataatagcattgcgaataattttaaaacaataaataaatttggaaaaactcaaaatattaataaatttaaaagattatttggtctaggtgaacaagaaattacttctatatctttcaaatcagtacccg

SEQ ID NO: 318787 - DNA, 1591 bp, Unknown
  Bacterial polypeptide expressing nucleotide sequence isolated from the Sargasso Sea
atgtgtggaatattttcatataatggtaaaaaatataattggtctcagttaaataaagaatttgataaaataagttatcgaggtcctgacaatagtcattatgaggatattagtggtaatgtattgtttggatttcatcgtttggcaataatgggtattagtgattctggaaatcaaccaatgtctcacccagaggatgaatcattaacattgatatgcaatggagaaatctataattatctagatattgcaaaaaaatatcattttgatttaaaaaccgggtcagattctgaaataatattgcatctatataaaaagataggtattgaaaaaacaattaatgagcttgatggtgttttcatgtttgttctttatgatgcaaaatctgatctaatcctagcatccagagatccaatgggagtgagaccaggatttataggaaaaaaagaaggtgaagtttttatcgcgtctgaggcaaaggctattatgcaattttgcgatgaagttattccattccctccaggaacatggtggagctcaaaaaacattgatcagcataatagatattttaattataattctgagaagatcaatgaaagtagtgaaaagttaatatgtgataaaattaataaacttttaatagatgcagttaaaaagagacttatgtctgaaagagatataggatgcttattatctggaggacttgattcaagcttgattactagcatagtatcaaaatatcaatatgaaaatcaactaaatacattctcaatcggcatgcaaggaagtatagatttagaatattctgaaactgttgctaattatcttaatacaaaacatcatcaaatagagatttctgaaaatgaatttttagaggctattgaaactgtcatttataatatagaatcctatgatactacaactgttcgagcgagtgtagggaattatcttgtatctaaatacataaaagaaaatacagattgtaaagtaatatttaatggagatggcagcgatgaagtttgttgtggatatgtttatcttaaaaactcaccttcagaaaatgagctgcaaaaagagagtaagcgattagtaaaagaattacattattttgatgtattacgttcagatcgaagtatcagttctaatggattagaagccagaactcccttcttagataaagcatttgtaaagtattatttatctataccagctgagttaaaagaatttgatggtgtacaaagacttgaaaaacatttacttaggaaagcatttgataataaagattttctaccaaaaaatgttctttggcgccgtaaatgcgcattttctgatggtgtaagctctaaaaataattcatggcataaaattatacaaaatcatattgataaaattattactgataaagaatttaatgaattaaaggacacatacgatcattgtccaccccagttaaaagaaagctactactatcgtaaggtatttgattcattttttcctaatcagcataaattaattccacatttttggatgcctaaatggactaatgtaacagatccatcagctagggaattagaagagtattcagaataaa

SEQ ID NO: 318788 - DNA, 895 bp, Unknown
  Bacterial polypeptide expressing nucleotide sequence isolated from the Sargasso Sea
aatgtgtggaattaatggaataatatttaaaacatctaaaactgatgtttcaaaaatcctaaaaatgaatgcacttttagatcatagaggaccagacgatagtggatttattaatcacaaaaatcttttacttggtcatactaggttatctattattgatacatcaaatcttggctctcaaccaatgtccgtagatggaagatattggattatttataatggagaaatttataattataaaactttaagagaagaactaatactaaaaaaatataaatttttttcaaattcagatactgaggttgtacttaatgcatataaagagtggggtgtagactcatttcaaaagtttaatggagaatggtcttttgcaatactagataaaaaaaatgatgagataatagtttgtagagatggtattgggtataaaccttgttatatatttgataataataatttttttgcattaagttctgaaataaaagcattttatgcattagaaaataaaattgaatttgataataataatttaggtataaattctactactctaaataattgctctaagacaatatttagaaatgtgaatcaacttacccaaggaagatatttaaaaataaatttaaacaatttagaaaaaaaattttttagatgggattatccacttaaaaatttaccaaaaatcaattcaggatttagagaaaatgttaatgattattttgatcttctatatgagtctacaaaattaagattgaacagcgatgttaaaactggaacttcacttagtggtggtttggattcctcttctatcttcacattgatgaatttgattcaaaaaaaagaaaatttggttgaagatgatttggatttgaaccccaattataatggattatga

SEQ ID NO: 318789 - DNA, 1843 bp, Unknown
  Bacterial polypeptide expressing nucleotide sequence isolated from the Sargasso Sea
aatgtgtggaataggtggaattattaacactaataattccaaaattgacccaaatattattgaaaatattaaagattccttagaacataggggaccggacaactcttccataaaatacatttccgaatcaaattgttttgtacatacaaggctttcgataattgatttaaatgacagatcaaatcagccttttcaatcatccgatggcagatatacattggtatttaatggtgaaatatacaactttaaagaaataagaaaagacctggagtcaatcgggatcagttttaatactgaaggcgatacggaagtactcttaaaaggttttatagaacatggtgaaggcatattggaaaagcttagaggtcaatttgcttttgctatttatgatgagggagaagaaagtgtttttcttgctagggatagggttggaattaaaccattatatttttctacatataaagattggtttgtttttggttctgagattaaagcaattgagaaatctggtgtagtaccctttgagcctgacattgactcatatgttacatatttgagacacctttgtgtaccgtctgatagaactggaaataaaaatattttaaaacttcaaccaggtgaatatgccatctattcaccaaagaatggaattttaaaaaagaaatattggaacccttttaattttgaggtaaataatgatatcaatgaaaaagaagccatttcagaagtagatagactattgactgaatctgttgaatataggaaagttagtgacgttgaagtaggcttgtttctctctgggggaatagattcatcactaattggaaaactaatgaaagaaaacgaaacggctggattaaaaggttttaacatagattacgaagaccactttgcagggtatgaaggagaagcagctgaagctgaatttgcttcttcaaatatagatattgaattaattaaagaaaatataaagtattctgattttcaagatttattaaataattattctttttaccaagatgacttaattggagatgaagtaggtataccgctgtattttcttggaaaaagtacacggtctaatggaatgaaagttgtacaagtaggagaaggagctgacgaactgttttatggctatgatcattggttaaggtttataaagttaaataaatatataaaaacaataaatcaatctcgttcaaactttttaagttttaaaaatcatcgaatcaatctagtttcaaatattctatttaatagaacttcattttctggaggagcaataggatttaatttatctgaagtagatagtcttattgatggaggattatcaaatgaatttcaacttattaactatgttgataataagtgggatgaatatttcacaaagaaaaatgcaaatttatcaaaatggatgacattaattgatttgaatatacgtcttccagaattacttttaatgaggatggacaaattagtaatgcaatctggtgtagaagcaagggtcccatttttagatcataaacttgttgagtatgtcttaacaatacctgaagagatattagttaatacttcatcaacaaaaccattgttaaaaaaagtagctagaagtcatattcctgatcaaataatagacagaaaaaaacaaggttttagagcgccaataggagagtggattaaaaaagatgaggattatttttacgaatcaataaaagaatttaattctctagtaaatttatttagtgagagagaattaaagaaagttcttcaaggtaatgactttcaaaaaaaatggtatttagttaatctttctcgatggcatatgacaagggttgcgaattga

SEQ ID NO: 318790 - DNA, 868 bp, Unknown
  Bacterial polypeptide expressing nucleotide sequence isolated from the Sargasso Sea
tatgtgcggatttttaggttcaattacttttaaagaaatttctaatgttaattttgaaaaatacaataaacgtattgaatgcagaggtccagacgaaaaagtagttatttgcaacaaaaatttcgtaaatccagatatataccacaactatacattcaatagactttcgattattgacttaagtaaaaatgcatctcagccaatgcagtcagatgaatttaattcgttaataatgttcaatggtgaaatttataaccatagagagttaagggcttttctagaacaaaaaggagtaatgtttaaatcatctcattcagacactgaagcgttgttgcttggcttgtctgcaatgggtatggatttcttgaaaaaactaaatggacaatttgctattttctttcacgatataaataaaaatgaatactacttaataagagatagggttggacaaaaacctttatattttgcaaagaattctgagggattttattttggttctgatttaatatcagtgaaaagcttatcaaataatcacaaatttaatgaagatcaaatcaaaaattttattaattttggaacatctataacgcctaattctttttttagcaatgttttttctgtaagcccgggtgaatttataaaaatttctttaatgaataataattttgaaataaacaaatatagttactgggatttaccaagctttcttgatgacaaagaatttatcgaagaggaatttattgacatatttgaaaatagtgtcgaaaaacgattagagagtgatgttcctgtttctaattttttatcaggaggattggattcttcagctgtaattaaagctttaaataaaaaaaagaaaaaaattaat

SEQ ID NO: 318791 - DNA, 1006 bp, Unknown
  Bacterial polypeptide expressing nucleotide sequence isolated from the Sargasso Sea
atgtgtggaattgttgcaattaattcaactgttggatcctcctttcctgtacaattaatgttatcatctatgaaacatcgtggcccagatgattctggaacatttatttctgatcaacatgactgccattttggacatctgcgtctttctattattgatttatcacctgcaggacaccaaccgatgtctgattcctctaatcgttattacattacttttaatggagaaatatataattaccttgatttaataaaatatcttgaaaaattatatggaagaattaaatggaaatctgcatctgacaccgaagttttaattgaaggatttgcaagagaaggaatcccttttttagataaacttaatgggattttttctttaagtatatatgatacagaaaaaagaaatatgtatgttttaagagatccattaggcattaaacctttatttatttataaaaataatagtagtgtattgttttgttcagaattaaaaggtttattatcattgcctgatctgaaaaaaaatattcgtattcaatcacttgcagatcaacttgcatttatgtatgtacctgagcctcatacaatgtacaaagaaatccaaaaggttgatcctggagtttgttttacttatcatatgggtaatcttgtaaattcaacaagtttatttagtcgtttaaataaaccgatatctttttcaagtgaagccgaaatattagaaagtttttacaataatttttcttcagcagtaaggaaacaattaatttcagatgttcccgtttctgttatgctaagtggtggattagattcgtctgcagtcgtatatgagataataaatgctggcgcaaaagtacaagatgcatatacaatttctatttcttctaaagatagtaattatgataaacaaagtgacgatttatattatgctaaaattattgcacaacaaatgggattaaatcttaatattattgaagcaaatgcagattttacctctcttctaccaaata

SEQ ID NO: 318792 - DNA, 1759 bp, Unknown
  Bacterial polypeptide expressing nucleotide sequence isolated from the Sargasso Sea
tatgtgtggaatagctggatatatcaataagaaaaaccttgaaatggataattcatttatttctaatgcaataaatagcataaaacatcgaggtccagatgaagatgggttctatacaaatgataaagtttgcttgataaatacaagattgagtattattgatttatctaatggcaaacagccctttattaatgatgatagttctgtagtggttgttcaaaatggtgaaatttataattatttagaaataaaagatttcttaatcaagaatcatcatacagaatttaaaactaatagtgatactgaagtcattcttaaagcatatgaaatattgggagataaatgcttttctcatttcaatggaatgttttcgatagcaatatttgatgctagaaaaaacaatgttttattagcaagagataggctaggagttaaaccactctatatatgcaaattaagtgataggatccttttctcttcagagataaaaacttttttatctgcacaagactttactaatgatatcaataatcaatctattcataattatcttaaatttaattatataccgcttccagaaacaattttttcagcggtatcacatgttatgcctggaacatcaattaagattgacttaaatgattttacatttacaacaaaaaagtattgggagattaaaaatactaaagaaaatgaaattagtgaggaagatctttttagaaaaatggatgaggtcttaaatgacgcaataaaaataaggctaagaagcgatgttgaaattggagcattcttaagtggcggattagactctagtctagtctccgccatgactaagaaaaacttcaataaatcattgaataccttttcaatagggtttccagaaaaagaatttgatgagtctcattgggcaaaaaaagttgctgatctatatgatttaaataataaaaaacatgttctagatagtgagatagtatctttatgggaaaaagttacttggtataacgaccaaccacatggagacgtatctttcatcccgacctttgttctctcagaatttgcatcaaaggactataaagttgtttttactggtgatgggggagatgaattttgtgcagggtacacaaaatattttggaatttttgaaaatagttttaaacaatactttcatcatatttctttaataaaagatgatgatgaatttagaaatttatataaagacaattttttaaactcaatcgatattgatagacctctagaaatttttaatgaagcaattgaagaagtgtcaaataaagacgatataaacaagatattatatttcgatgtgaaacacttgttgccaggaaataatcttgtaaagccagacaaaatggcaatggctaattctcttgaaactagaagcccaatgcttgattatagatttcttgaattaatgcaatctattccgggaagtttgaagttaactgaacaagaaactaaatatacccttaaaaaatttgctttaaaatatttgcctaatgatattgtgtatcgctcaaaacaaatgttcaccgtgccaattggtgaatggtttaaaactaaattaaagaattatcttaaaaaaattgtattgagtgattcattagatgaaagaaatatttttgataggacatatttagaaaaaatggtagatagccatatagcaggctctaaagactttactagagaattaagagcaataactaatcttgagatctggtttagagagtttttagattaa

SEQ ID NO: 318793 - DNA, 1027 bp, Unknown
  Bacterial polypeptide expressing nucleotide sequence isolated from the Sargasso Sea
ctaaaagccttagagggtagatgtgagaaaattgagatttttcccccaggtcattttatgactagtaaggattgtaagttgaaaaaatggtatgtaagagattggatgaattatgatagtgttcagaataatgaaacaaacattgaaactttaaaaaaatctcttgagaattctgtatatagacaattgatgagtgatgtcccttatggtgttctcctatccggtggtttggattcttcaataacttctgctttggctaaaaagttttcaaaaaagagaattgagagtaaaaatactgaggatgcttggtatcctcaattgcattcattttctgttggtttgaagggatcacctgatctaattgctgctaaattagtcgctgataaaattgggtcaattcatcatgaaattaattttactattcaagagggcttggatgccataaaggatgttatataccacatagaaacatatgatgtaaccacggtaagagcatcaacccctatgtatttgatggcaagagtaatcaaatccatgggtatcaaaatggtactttcaggtgaaggtgctgatgaaatttttggtggttatttatactttcataaagcgccaaaccctaaggagtttcacaaagaaactgtaagaaaaatagataagctatatcaatacgattgccttagagctaataaatcgcttgcagcgtggggaatagaaggtagagttccatttcttgataaagaatttattgatgttgcaatgagaattaatccaaaggataaaatgataacaaatgatagaatggagaagtgggttttgcgaaaagcttttgaatcatatttacctaatgaggttgcttggagacaaaaggaacaattcagtgatggtgttggttacagttggattgatagtttaaaggaattagttaatagtgaagttagcgatgatgaatttaaaaatgctgataaaagattcccttttcaaacccccatgaataaagaggaatattattatagatctatttttgagg

SEQ ID NO: 318794 - DNA, 979 bp, Unknown
  Bacterial polypeptide expressing nucleotide sequence isolated from the Sargasso Sea
ctctcaagatggtaaaaaaattatagctgttaatggagaaatttataatcatcaaatcctcagagaaagtttcttaaatagttacaacttaaaaacacaatcagattgcgaagtaataattccattatatgagtctaagggcgttaacttcctgaatgatcttaatggaatatttgcatttgcactttacgattcatctaaaggcacttacattattgctagagatcatatgggtattatccctttgtatatgggatgggataagaaaaatattttttatgtttcttcagaacttaagtcccttgagggtgtatgcgataaaattgagctttttcccccaggtcactttctagaaagtcatgatatgaagcttaaagagtggtataagccagagtggacttcttttgattcagttaaaaatgctaaaacttctatatcttcaattcatgattccctttcagatgcagtaaaaagacagcttatgagtgatgtcccttatggtgttttgctttcaggaggacttgactcttcaattacctccgctttagctaaaaaatttgcatccaaaagaatagaatcaggagataaacaagatgcttggtggcctcaacttcattcattttctgttggtctaaaaggtgctcctgatttaaaagctgctaagattgttgctgaccatattggcactgtgcatcatgaaataaattttactgttcaagaaggtattgacgctattagagacgtgatttatcacctggaaacatatgatgtgacgactgttagagcttcaactcctatgtatttaatggcaagggcaattaagtccttgggaataaaaatggtcttatcgggtgaaggagctgatgaattatttggaggatacctttactttcacaaagctccaaattcaaaagaatttcatgaagaaactgtaagaaagcttgaaaaacttcatcaatatgattgtttaagagcaaac

SEQ ID NO: 318795 - DNA, 694 bp, Unknown
  Bacterial polypeptide expressing nucleotide sequence isolated from the Sargasso Sea
tagagacttaatttggcatcttgaaacatatgatacaaccactattagagcgtcaacgccaatgtatcttctttccagaaaaattaaggcatatggaattaagatggttctttcaggagaaggtgcggatgaaatcttgggaggatacctttatttccataatgctccaggcaatgaggaattccataaagagtgtgtagatagggtgaaaaatcttcaccattttgattgtctaagagcaaataaatctactatggcgtggggtgtggaagcgcgtgtaccattccttgaccaggaatttattgagacagcaattgccgttcatcccgaattaaaattaaaggattcggttgaaaaatggattctaagagaagcattcaatgatgaaaatgaaccatatttacccaaagatattctatggagacagaaggaacaattttcggatggtgtaggttactcatggattgatggtttaaaggaaatgacggaaaatgcgattacagacgaagattttgaagaaaataaggacgctctcggtgtaaaatcgaaagaggaattatactataaacgaatttacaatgaattattccccgaaaacatcggaattaaaagatgggttcccagaactgattgggatggagtaggttatgacccaagtggtagagcacagggtgttcatgaaaataagtattaa

SEQ ID NO: 318796 - DNA, 829 bp, Unknown
  Bacterial polypeptide expressing nucleotide sequence isolated from the Sargasso Sea
tcagagctaaaagctttagaaggatactgtaataaaattgagatattccctcctgggaaatacttttcaagtaaaaaggggaatttagagaggtggtatgaaagaagttggagtcttcatacatccacagataacgagaataaaatagccgataaactgaggacatcattagagaaagcagtgtatcaacagttgatgacggatgtcccctatggggtattgctgtccggtggccttgattcatcaattattgctgctatcacaaagaaatactcaaacaaaagaattgaaacaaatgattcatcagaggcatggtggcctcggttacattcattttcagttggtcttcaagggtcacctgatctcaaagcagctaaaaaagtttcgcaacatattgatagcatacatcatgaagttattttcacaattcaagaaggccttgatgcaatagaggacgttatctacagtctggagacttacgacgttaccactgtgagagcagcaactccaatgtatctaatggcaagagtgatcaaatcaatgggcattaaaatggttttatctggtgagggtgctgatgaaatttttggtggctatctatattttcataaagcaccaaacgcgatagaatttcacaatgagaccattagaaagctaaaaaaattacacctttatgactgtctcagagccaataaggcaatggcagcatggggagtcgaggctagagtaccatttttggataaggaatttattgatattgcaatggggatagatccaaaaaataaaatgataggtccagataaaatggaaaaatcaatccttcgaaaag

SEQ ID NO: 318797 - DNA, 529 bp, Unknown
  Bacterial polypeptide expressing nucleotide sequence isolated from the Sargasso Sea
cttcatcaatatgactgtttaagggctaataagtctcttgctgcatggggaattgagggtagagtaccttttttagataaagaatttattgacgttgctatggggataaatcctgaggataaaatgataaaaaatggtagaattgaaaaatgggtgttaagagaagctttcaaagactaccttcctgaaagtgttctttggaggcaaaaagaacaattctctgatggagttggatattcttggattgatagtttaaaagaacttgtttcaaaggaggtttcaaattctgattttgaaaatgcttctaaaatattccctataaatccccctcaaaacaaggaagaattctattatagatcaatttttaaagatcattttccaagtgatgctgctgcaaaatcagtcccttcagttccttctgtagcatgtagtactcctcaggcacttgaatgggatgaagcctttaaaaacatgaatgacccaagtggtcgttctgtctcaaatattcataacgaatcatatgaataaa

SEQ ID NO: 318798 - DNA, 715 bp, Unknown
  Bacterial polypeptide expressing nucleotide sequence isolated from the Sargasso Sea
tctgccgcgtgagcgtggtgtgcgagtcgcagcctctgaaccctcgcacgtcgcaccggagcgcgccgtacctgagctgcgatggtgcacgcaccccgtactactccatgccatgcgactcaccgctgtcgcaccgcgcgacagtttcgacacgccggaggcccccttcctgcctgcggaggtcttgtggcgccagaaggagcagttttccgacggggtgggctacagctggatcgacggcctcaaggcccatgcggagcaagttgtgtccgacttggagctggagacggcgaaaagtcgcttcccgtacaacacgcccaccaccaaggaggtgcgagccgctctcgcaagggaggccccacgcggccctgcggtgctcgctgcctctgccttcggtgctgagcctccgggtgatccgcactggcagggcgcctacttccgcaccatcttccactcgcacttccccaacaaccagtacggaaacggcatcgagaagaccgtgcccggcggcccttccgtcgcttgctcgacagctaaggccatcgagtgggacgccgccttttccaaccctaacaaccaggaccagagcggccggatggtcgacgtgcacgatgacgctaccgtggacgcttccgtcgacaaggcggatgacgcttcgttcgaaaaggtggaggtcgaccaagaggccgaccaggagtctgtcgcagcagcataa

SEQ ID NO: 318799 - DNA, 895 bp, Unknown
  Bacterial polypeptide expressing nucleotide sequence isolated from the Sargasso Sea
cagcaggcgctacagttatctaagttattacgccaccgtggaccagactggtcaggtgtatggaacaacgacaatgcaattttagtgcatgagcgtctggcgattgtagatactgaaaatggcgctcagcccctgattaatccaaatcgaaatcacattctggcagtgaatggtgagatttataatcacaaaaatttagagaaaaacttaaccgtcgactaccagttccagaccaagtcggactgtgaagtgatattgcctttgtatttacagcacggcgctgactttattgatcagctgcaaggtatgtttgcttttattctgtatgacgcagagcaaaaccgttacctgattgcccgtgaccatatcggtattattccgctgtattacggttacgacgagcacggtcagctgtatgtggcctctgaattaaaagctctggttcctgtctgtaaacaaatgcaggaattcccgcctggtcactattttgatagcaaagtcggcaaactggtgaagtactatcagcgcgactggcaaagttttgatgcagtcaaagacaatccggctgacttaggtgaactgcgcgctgctctggagcaaagcgtaaaaagccatttaatgtccgacgtgccttatggcgtgttactctccggtggtttggattcgtcactgatttcggctatcactcagcaatttgcccgtaatcgtgtcgaagatgatggtcagtccgaagcctggtggcctcgcctgcactcttttgctgtgggtttaaagggttcacctgacttagcggccgcacgtaaagtggctgacgccataggcacagtgcaccacgaagtgctctttactgtgcaggaaggtttggattcactgcgtgacgtgatttatttcctcg

SEQ ID NO: 318800 - DNA, 853 bp, Unknown
  Bacterial polypeptide expressing nucleotide sequence isolated from the Sargasso Sea
atgtgcggaattttcagcgttttgcgcctcacgggcgacgcgaggaagaaccgtcagcgcgtgtatcaactggcgaagcgcttgcgtcatcgaggaccggattcgtacgggatggaggtgcgcgtggacgacgaggggaggcaaaccttcatggtgcacaagcgtctgagcatcgtggcgccggggaagagcggcgatcaaccgttgttcacggacgcgagtaagaagacggcgttcatcgcgaacggtgagatttacaaccacgcggaattacgggaaaagtacggcatcgtgagcgagaataagagcgactgtcaagtcatcgggcacctgtacgagcaacacggaccgagctttgtgtccgagttggacggtatgtttgcgtttgtgatcgaggatcgcgagaacgatgtcatcgtggcggcgagagatcatatgggtaagattcccatgtacatggcgaacggaaaggatgggagcgtgtggtttagtagcgaaatgaagacgctgcacgacgacccgggggtggccaactacgaagccttcccgcccggttacgtgtacgtgaagaagggtgatgcgccagcgacgatggaacgttggtacaacccgcagtgggtggctgatgaaaactacgtgccgaccaaggaggccaacttgcccgaacttcgagagtgcatcgtcgacgccgtcaccaagcgcttgatggctgatgttccgtacgccgtgctcctctccggtggcttagactcctcgctcatcacctccatcgccgtgcgtcaacgtaaactagcgaaaaacacgtacggtgccgatgaactcggtgcactctttctccgatcggtatcagagg

SEQ ID NO: 318801 - DNA, 724 bp, Unknown
  Bacterial polypeptide expressing nucleotide sequence isolated from the Sargasso Sea
aatgtgtggaatagtttgtgcctttgatataaaaggtgatcaggaagttgtaagagccagtgttttaaaaatggcccaaagggttagacatagaggtcctgattggagtggtatatattccgatgacaatgccattttagcacatgaaagacttgcaatcgttgatcctacatcaggaaagcagccgataatctctcaagatggcaaaaaaattattgctgttaatggagaaatttataatcatcaaattcttagagaaagcttccataatagttacaactttaaaacacaatcagattgcgaagttataattccattatacgagtcaaaaggtgttgacttccttaatgatcttaatggaatatttgcatttgcactttacgattcatctaaagacacttatcttattgctagagatcatattggcattattcctttgtatatgggatgggataagaaaaatattttttatgtttcttcagaacttaagtcccttgagggtgtgtgcgataaaattgagctttttcccccaggtcactttctagaaagtcatgatatgaagcttaaagagtggtataagccaaagtggacttcttttgattcagttaaaaatgctaaaacttctatatctttaattcatgattccctttcagatgcagtaaaaagacagcttatgagtgatgtcccttatggtgttttgctttcaggaggacttgactcttca

SEQ ID NO: 318802 - DNA, 889 bp, Unknown
  Bacterial polypeptide expressing nucleotide sequence isolated from the Sargasso Sea
gatgtgtggcattgtattttataaggttaacaaaaaaaaaaatttgtctttatttaaagaaaaattattaaaaagttctaaattaattagacatagaggtccagattggtctggtaatagtatttataaaggaaaagaaaataatattttaattagtcatgaaagattatctattattgatcctataggtggttctcagccaattatttatcaaaaaaataatggtcataaaattatattagcagttaatggagaaatatataattataaagaacttaaaatagatgaacataagtatttaacaagtagtgattgtgaagttattatatctcaatatttaaattgtggagacgactataatttattattagacagtttagatggtcaatttgcttttgtactatatgatacagaaaaagaattattattatctggaagagacccaattggtattgctagtttatattatggattagataatgaaaataatttaatgattagttctgaaatgaaagcattatatttatgtgaaaatgtttttacttttccaaatggtaattatttattactagataataaagattataatttagaaacaattaaaaataattttatatcatattattctaaaaatagttttggaagatggttaattaattcttctattccagataatttaattagtattaaagaaaatcaagaacaaaaattttacgatctagtaaaaaatactctaattaaatcagttgaaaaaagattaatgtctgatgttccatttggtgttttattaagtggaggtttagatagcagtttaataactagtattacagttaaattaattaaagaaaataaaacaaagttaaactggggagataaaatacatagtttt

SEQ ID NO: 318803 - DNA, 859 bp, Unknown
  Bacterial polypeptide expressing nucleotide sequence isolated from the Sargasso Sea
ataaatgaccttacggaagctgggatgcaaccgtttattgatgataaatctatgttaatgtgtaatggtgagatttacaatcacaagattttcaggtatggattcgaaaaaggtacgagtgattgtgaaatcctattacctatggtgaatgaccttggaatgatgaagacaatggacatgataaacggagattttgctatcgtatggacaaatggaaagagaattatggctgcgagggaccccgtaggtgtacgacctctgttttatacgagatatgataaggattctatcgcatttgcgagtgaagtgaaggctcttagatttttacaatctaaaattgaaatattcccacccggtcatatttttgattcatatttaaatgactttgtgtgttatcatacagggtattggcatgtaaataagtatgtagatacgtataatgacaaattaaaagaatcgtttattcaatgtgtacacgaacgtctcgccactacggagcgagaaataggttttcttctttcgggtggtctagatagtagcctcatagcttctatcgcggctaaaaaaataggtaaaatcaacaccttttctattggtctcaagggaagtccggacctcgaagccgcgagaaaggtggcgaagtatctgaactctaatcacacagaggtcacgtttacaaccgaggaaggtatttcacatgttaacgacgttatttactctttggaatcgtacgatacgactactgtaagagcaagtacacctatgtggctcttatgtaaatatataaaagaacacacaaactgtagatacattttctcgggtgaaggaagtgatgaactattgggtggatatctctatt

SEQ ID NO: 318804 - DNA, 823 bp, Unknown
  Bacterial polypeptide expressing nucleotide sequence isolated from the Sargasso Sea
ttttcaattttagatattcaatccgatgcgaaagagctgcgccaagtggcactggaaatgtccaaactgatgcgccatcgcggccccgattggtcaggcatttacgccagcgacaaagcgattttggcccatgagcgcttggcgattgtcgatattgaacacggtgcgcagccactgctaaccgaagacggcagccttatcctcgcggtcaacggtgagatctacaaccataaagaactcaaagcccaactcggcgataaatatagctatcaaaccaactctgactgcgaagtgatcttggcgctatatcaagaatacggcactgaattccttgataaattaaacggtattttcgccttcgtactctacgataaagccaaagacgcctaccttattggccgtgatcatatgggcattatcccactgtacacgggacgtgatgcggcgggtaacttctacgttgcctccgaaatgaaggcgttgatgctggtctgtaaaaccgtggccgaattccagccggggcaatacctgtactcaagcatcggtgagccagtgcaatactacactcgcgattggcagagctttgatgccgtgaaagataacggcgccagccaagaagaattacgcgatgccctcgaagccgccgttaagcgccaattgatgtccgacgtgccctacggtgtgttgttgtctggcggtttagattcatcggtgatctcggcgattacccaaacctttgccaaacgccgtatcgaagatgacgatcaaagtggcgcttggtggccaccagctacactcttttgctgtcggttaaaaggcgcgc

SEQ ID NO: 318805 - DNA, 836 bp, Unknown
  Bacterial polypeptide expressing nucleotide sequence isolated from the Sargasso Sea
aagtgtttatttggctcatgaacgtctttctattatagatccattaaaaggcagtcaaccaattatctatgaaaatgatgcaagacgaattgttctttgtgtcaatggtgaaatttataattacaagcaattgagagaagaatgttccgaatattcttataaaacaaacagtgattgtgaagttataattgcgctttatatgaaatatgttgatagcaatattgagtcaaataatcatcttaatatggttgattttaatactgttctcaataaattagacggacaattttcattctgtctatatgataataaatgggatgtattgttgattggacgtgatcctattggtattactagtctatattatggttttgatgagaataataatctcatggtttgttcggaaatgaaaggacttcatctttgtaaaactgttaatacttttaataatggttgttatagttgtataacaagttctaatcttaatactaatatatttcaatcttttgggagtctacaagccacaggtatgttgtcatttgtaaattattatgggctatcaagggaaggttcatggcaaaataaatcaatgttaaataataatattattaataaacttaattttaaaactgaaagtgaatatgaggagttgatttaccgtcaaattagacaagtatttacaaaagcggtaaaaaaacgtcttatgactgatgttccttttggagtattattgagtggtggattggatagcagtcttgtttcctcgattacagttaaacttattaaagaaggtgaggttgatttgaaatggggaaacaaaattcattcattttcga

SEQ ID NO: 318806 - DNA, 847 bp, Unknown
  Bacterial polypeptide expressing nucleotide sequence isolated from the Sargasso Sea
agtgataacgccattctggcacacgaacgtctgtccatcgtcgacgtcaacgccggtgctcagccgctgtacaacgtgaagaaaacgcatatcctggcggttaacggtgaaatttataaccaccaggcgctgcgcgctgagtacggcgatcgctatcagttccagaccggttccgactgcgaagttatcctcgcgctgtatcaggaaaaaggcccagagtttctggatgatctgcaaggcatgtttgcttttgccctgtacgacagcgagcaggacgcttatctgatcggtcgcgatcatattgggatcatcccgctgtatatgggttacgacgaacacggtaacttctatgttgcgtctgaaatgaaagcgctggttcctgtctgccgcacaatcaaagaattcccggccggtagttatttgtggagtaaagacggtgaaattcgtcagtactaccagcgcgactggtttgaatacgatgcagtcaaagacaacgttaccgataaaaacgagctgcgccaggcgctggaagatgcggtgaaaagccacctgatgtcagatgttccttatggagtactgctgtccggcggtctggattcatccgtcatttccgcgatcactaaaaaatacgcggcacgccgtgttgaagatcaggaacgtagcgaagcctggtggccacagctgcactccttcgccgtcggcctggaaggcgctcctgatctgaaagctgcacaggaggtggcgaaccatttgggtaccgtgcaccacgagatccacttcaccgtgcaggaaggtctggatgctatccgcgacgtgatttatcacatcgaaacttacgatgtcacga

SEQ ID NO: 318807 - DNA, 1072 bp, Unknown
  Bacterial polypeptide expressing nucleotide sequence isolated from the Sargasso Sea
atgtgtggaatagctggaatatttgacttttctgataatgatataaatccagaaatagcaaacaggataggtgcttcattagagcatagagggcctgattactctgaagttcaatttattaaaaacaatgtagtttttattcatacacgcttagcaattattgatttagatcaaagatctaatcagccttttaaatcagacgacaaaaggttcacaatagtatttaatggtgaaatctataactatagagagataagaaaagaactggaagccttaggtgttaattttagaacagaaggtgatacagaagttttactatatggatatatagaatttggagaacaaatacttcataaattaagagggcagtttgcatttgctatctttgattcatttgaaaacagtgtctttttagcaagagacaggatcggcattaagcctttgtattattcattaaatgatgagtttataattttcagctcagaactaaaaactatcgagcaatcagggataataaactttgaggctaatgtagattcatatttagcctatttaaggcacctttgtatacctggtgaccagaccggaaacaaaaatatttttaaattagaaccaggacaatacacagtgataaataaaaatggagatatttacaaaaaaacttattgggatccttttaaatatgaaataaacaatgatataagtgaacatgaagctataaaaaaagtcgaagagcttttaattaaatcggtcgaatacagaaaagtaagcgatgttgaagttggtttatttttatcaggaggactagattcttcacttataggtaaattaatgaacgaaggtaacgactcaaaaataaaaagtttcaatatcgattatgaagaacattttgagggctacaagggtgaagtacaagaagctaggtttgcggcatctgaaattggtgttgaattagtagaagacacaatttcttactccgattttaagcaattacttgataattattctttttatcaagatgacttggtaggagatgaggtaggtattcctctttattttttaggaagatctt

SEQ ID NO: 318808 - DNA, 1012 bp, Unknown
  Bacterial polypeptide expressing nucleotide sequence isolated from the Sargasso Sea
atgtgttcgatattcggggtgcttgacatccagactgatgttaaagccttgcgccagcaggcgctacagttatctaaattattacgccaccgtggaccagattggtcaggcgtatggaacaacgaccatgccattttagtgcatgaacgtctggctatcgtagatactgaaaatggcgcccagcccctgattaatccaaatcgaaatcacattctggcagtgaatggtgagatttataatcacaagaatttagagaaaaacttaacagtcgattaccagttccagaccaaatcggactgcgaagtgattttgcctttgtatttacagcacgacgttgattttatcgatcaactgcaaggcatgttcgcttttattctgtatgacgcagaacaaaaccgttacctgattgcccgtgaccatattggtattattccgttgtattacggctacgacgaacacggtcagttgtatgtggcgtctgaattgaaagctctggtgcctgtatgtaaacaaatgcaggaattcccgccaggccattactttgacagcaaagtaggcaagctggtgcagtactatcagcgcgactggcaaagttttgatgcggtcaaagacaatccggctgacttaggcgaattacgcgcagctcttgagcaaagtgtaaaaagccatttaatgtccgacgtgccttatggtgtattgttatccggtggtctggattcgtctttaatttctgcaattactcagcaatttgcccgtaatcgcgtggaagatgacggtcaatccgaagcctggtggcctcgcctgcactcttttgctgtaggtttacaaggctcacccgacctagtggctgcccgtaaagtggcagacagcattggcacagtgcaccatgaagtgctgtttactgtgcaggaaggtttagattctttgcgtgacgtgatctatttcctcgaaacctatgatgtcaccactattcgtgcttcaacccctatgtacttaatggctcgtaaaatca

SEQ ID NO: 318809 - DNA, 892 bp, Unknown
  Bacterial polypeptide expressing nucleotide sequence isolated from the Sargasso Sea
atgtgtggaatagtttgtgcttttaatataaaggataataaagagttaattagatcaaatgtcttaaaaatggctcaaaaagtcaggcatcgtggtccagattggagtggaatctactcaaatgataatgctgttctagctcatgaaagacttgctatagttgatcctacatctggaaaacaacctttaatttctcaagatggtaaaaaaatagttgccgttaatggtgaaatatataatcatcaaatccttaggcaaaattctttaaaagactacagttataaaactcaatctgactgcgaagtaataattcctttgtatgagttgaaaggcgttaattttcttaatgacctaaatggaatattcgcctttgcactgtatgattcgtcaactaatacttatttaattgctagagatcatatgggaataataccgttatatatgggttgggacgacaaaaatgtattttatatttcttcagaattgaagtctttagaaggggtatgtgataaaattgagcttttcccacctggacattatctgtgcagtaatgatatggagttaaaaaagtggtataagccagattggacctcttttaacaatgtgaagaatgcagaaacaaacatatctaaaattcatgattccctttctgatgcagtaaaaagacaacttatgagtgatgtaccgtatggagttttactttctggtgggcttgattcatccataacttcagctttagctaaaaaatttgcatcgaaaagaattgagactggagataaacaagacgcatggtggcctcagcttcattcattctctgttggacttaaaggagctccagatctaaaagcggctaagattgtcgcagatcatattggaactgttcatcatgaaa

SEQ ID NO: 318810 - DNA, 931 bp, Unknown
  Bacterial polypeptide expressing nucleotide sequence isolated from the Sargasso Sea
atgtgtggaattgtttgtgcttttaatataaaaagcaatagtgatgttgttaggtctagtgtcctaaaaatggccaagaaggtaagacatcgtggccctgactggagtggaatatactcagacaacaatgctattcttgcgcatgaaaggttagctatagttgatcctacttctggaaagcaacctataatttctgatgatggtaataaagtaattgctgttaatggagaaatatacaatcataaagaccttaaagaaaaatatacctcagactataattttaaaacggaatcagactgtgaagtaatactagcactttatgaaaagaaagggattaattttttaaacgatcttaacgggatttttgcttttgctttatatgattcatccaaaaacaaatatatagtagcaagagatcacatgggtataatacctttatacattggctgggacaaagaaaacattttttatgtttcatctgagcttaaatctttagagggtgtatgtaagaagattgagttatttccacctggccattatttagatagtaaaactgacgaattaacaaaatggtatgatcctaaatggaaattatatgacaatgtaaaagactcagaaacaaaaattaaagaaattcatgattccttatcagctgcagtcaagagacaattgatgagtgacgtaccatacggcgtattgttatctgggggattagattcttcaattacctctgcgcttgcaaaaaagtttgcatcaaaaaggattgaatctgatgataagcaagaggcatggtggcctcaactccactctttttctgttggattaaaaggagctcctgatttaaaagctgcaaaaatagttgcagatcatatcggaactgtacatcatgaaattaattttacagttcaagaggggaatagatgccattagg

SEQ ID NO: 318811 - DNA, 1843 bp, Unknown
  Bacterial polypeptide expressing nucleotide sequence isolated from the Sargasso Sea
aatgtgtggaattggtggaattgttagcactaacaattctaaaatcgaccaaaatattgcaaatgatatgaaagtctccctagaacacaggggacccgatcactcttccattaattatatttcagattccgaatgttttattcacagcaggctttcaattatcgatttagactcaagatcaaaccaaccttatcaggatgacgacaaaagatatacaattgtatttaacggtgaaatctataatttcaaagaaattagagctgaactacagagtaaaggtgttaaattttctaccgaaggcgatacagaggtattacttaaaggatatattgaatataaatctgaaattttaaaaaaattaagaggtcaatttgcctttgccattcatgatgcaaagacgagctctatttttttagctagagatagaatcggaatcaaacctctatactttgctaggaatgatgattggtttatattttcttcagaattaaagactatagaacaatctaatttaattccatttgaacctgatattgagtcttatattgcatatctaaggcatctttgtgttccaatgaatagaacaggaaatttaaacatatcaaaagtacaacctggtgagtacatagagtttttttccgataattcaataaaatcaaatcagtattgggatccatttgatattgaagttaataatgatatctcagaagaagaagcaattgaaaatatagatagattattaaatgaatctgttgagtacaggaaagtaagtgacgttgaagtaggactatttctatctggagggcttgactcatccttgattggcaagctcatgaaacaaaatgaaaaagctggactgaaaggtttcaacatagattttaaagaccatttccccggatatgagggagagttaaacgaagcaaaatttgcggcaagtaataatgacatagatttaattgaggagaatatttcttatcaagaattccaagagcttcttgataattattccttctatcaagacgacttagttggcgatgaggttggaattccactttatttcctaggtaagaaaactaacaacagcaaaattaaagttgttcaagtcggggaaggtgcagatgaattattttatggatatgatcattggaatagatatctcaaattgaataaattttttaagcccttttttaaatctacaaaaaaatactcaagttttaagaatcatagattaaatatgcttagcaatattctatttaatagaacttcatttgcaggcggagctttgggttttaatttaaaggaattagatagcttgatagaagatggtttaccaaatcattctgatctaatattttacgctgacaataaatggaaagattatttttctaacaaaaattcaaaaatttctaagtggatgactttaattgatttaaagataaggcttccggaacttttacttatgagaatggataagcttgtaatgcaatctgctgttgaggctagggtgccttttcttgatcataaattagtagaatatgtactttccttgccggaagaattacttattgacttaactaatacaaaaagtcttctcaaaaaggttgcgttgaaatatttacctgatcaaatcataaatagaaaaaaacaaggatttagggctccaataggtgagtggatcaagaaagatgaggaaaaattctatgaatctgtgcaacagttcaattctctagtaaatttatttaatgaaagagaattaaatcatatccttaatggaaatgactaccaaaaaaagtggtatttaattaatctttcaaattggcatttagcaagggttgcgaattga

SEQ ID NO: 318812 - DNA, 1843 bp, Unknown
  Bacterial polypeptide expressing nucleotide sequence isolated from the Sargasso Sea
aatgtgtggaattggtggaattgttagcactaacaattctaaaatcgaccaaaatattgcaaataatatgaaagtctccctggaacacaggggacccgatcattcttccattaattatatttcagattctcaatgttttatacacagcaggctttcaattattgatttagactccagatcaaatcaaccctatcaggacgaagagaaaagatatacgattgtctttaacggcgaaatctataacttcaaagaaatcagaaccgaattagaaagtaaaggtataaaattttcaacagaaggcgatacagaggtattactgaaaggatatatagaatataaagctgaaatattggaaaaattaagaggccaatttgctttcgctattcatgatgcaatgacgaattccatctttttagccagagatagaattggaatcaaacctttatactttgcaaagagtgaagattggttcatcttctcttcagagttaaaaactatagagcaatcaaatttaattccatttgaacctgatattgagtcttatattgcatacctaaggcatctttgtgttccaatgaataggacaggaaatttaaacatttcaaaagtacaacctggagagtacatagaatttttttcagacaactctataaaatcaaatcaatattgggatccctttgttattgaagttaataatgatatctcagaagatgaagcgattaaaaatatagatagattattaaccgaatctgttgagtacaggaaagtaagtgacgttgaggttggattatttctatctggagggcttgactcatctttgatcggtaagctcatgaaacaaaatgaaaaagccggacttaaaggattcaacatcgattttgaagatcattttcctggatatgaaggagaattaaatgaagcaaaatttgcagcatctaataacgacatagatttaattgaagagaatatttcatataaagaatttcaagatcttctgaataattattcattctatcaagacgatttagttggagatgaggtaggaattccactttattttctaggtaagaaaacaagaagtaagaacattaaggtcgttcaagttggagaaggtgcagatgaattattctatggatatgatcattggaatagatttctcaacttgaatagatatttaaaacctttatttaaatcaacaaaaaaatactcgagttttaagaatcatagattaaatttactaagcaatattttcttcaacagaacttcctttgcaggtggagcattgggttttaatttgaaagaactagatagcttaatagtcaatggcttaccaaatgattctgatttgatatattatgctgacaataaatggtcagaatatttttcaaataaaggatcaaaaatttctaagtggatgactttaattgatttaaaaattagacttccagaacttttacttatgagaatggataagcttgtaatgcaatctgctgttgaggcaagagtgccttttcttgaccataaattagtagaatacgtactttccttgccagaagatatactaattgacttatctaatacaaaaagtcttcttaaaaaggttgcttcaaaatatttacctaaacagatcattaatagaaaaaaacaaggattcagggctcctataggtgagtggattaagaaagatgaggaaaaattccatgaatctgtgcaacagttcaattctctagtaaatttatttaatgaaagagaattaaaccaaatcctaagtggaaaggattatcaaaaaaaatggtatttaattaatctttcaaattggcatttagcaagggttgcgaattga

SEQ ID NO: 318813 - DNA, 826 bp, Unknown
  Bacterial polypeptide expressing nucleotide sequence isolated from the Sargasso Sea
aaatgtaaaaaacaacaatacaagtattgatattttaaaaaaatctttagaagatgcagttcatcgtcagttaatgagtgatgttccttatggcgtattactttctggtggtttagactcttctataacctctgctcttgcaaaaaagttctcaaaaaataggattgaaacaggtgatgaggaagaagcatggtatcctcagcttcattcattttctgttggtttaactggttctcctgaccttaaagctgcaagattagtagcagataaaattggttccattcatcacgaaattaattttacaattcaagaaggtttagatgcaattagagatgtaatttatcatattgaaacttatgatgttacaacagttagagcctcaactccaatgtatttaatggctagagttattaaatccatgggaataaaaatggttttgtcgggtgaaggtgcggatgaaatatttggtggatacctatattttcataaagcaccaaattcagaagaatttcataaagaaacagtaagaaaaatagataaactttatcagtatgattgtttaagagcaaataaatcacttgcagcatggggaatcgaaggtagggttccttttttagataaagattttattgatgttgcaatgcagcttaatccaaatgataaaatgattacaaaagatagaatggaaaagtgggttttaagacaagcttttgaatcttatttaccaaaggaagtggcatggaggcaaaaagaacagtttagtgatggagttggctacagttggatagatagtttaaaggatttggttgaaaaagaggtttctgat

SEQ ID NO: 318814 - DNA, 862 bp, Unknown
  Bacterial polypeptide expressing nucleotide sequence isolated from the Sargasso Sea
tcgattggcctcgagggctcgcccgacctcgccgcggcccagcaggtgagcgatttcatcggcaccgagcactacggcttcaccttcaccgtcgacgaagggatcaacgcgatctccgacgtcatctaccatctggagacgtacgacgtgacgacgatacgcgcgggcacgccgatgtttttgctcgcgcgcaagatcaaggcgatgggcgtcaagatggtcatgtcgggcgagggcgccgacgaggccctcgccggttacctctacttccacaaggcgcccaatggcaccgagctgcacgaggagtgtgtgcgcaagattggcgacctctccaagtacgactgcctgcgcgccaacaaggcgacgatggcgcacggcctcgaggcgcgcgtgcccttcctcgacaaggacatgctcgacgtaatgatggagatcgacggcaccgagaagatggtcaacaagggggcggccaagggcttcatcgagaagtggatcatgcgcgcagccttcgacgtcgaggacggcgagacgccctacctgccaaaggaggtgctgtggcgccagaaggagcagttctccgacggcgtgggctactcgtggatcgacggcctcaaggcgcacgccgaggcgcgcatcggcgacattgagatgcagacgatggccacgcgcttccccttcaacacgccggcgaccaaggaggcggcctacttccgcacgatcttccactcgcacttccccaacaacaactatggcaacggcatcgagaagaccatccccggcgggccgtcggtcgcgtgctccaccgccaaggccattgagtgggatgcgtccttctccaacccgctcaaccaggaccagtcag

SEQ ID NO: 318815 - DNA, 990 bp, Unknown
  Bacterial polypeptide expressing nucleotide sequence isolated from the Sargasso Sea
aaaaatattttttatgtttcttcagaacttaagtcccttgagggtgtatgcgataaaattgagctttttcccccaggtcattttctagaaagtcatgatatgaagcttaaagagtggtataagccagagtggacttcttttgattcagttaaaaatgctaaaacttctatatcttcaattcatgattccctttcagatgcagtaaaaagacagcttatgagtgatgtcccttatggtgttttgctttcaggaggacttgactcttcaattacctccgctttagctaaaaaatttgcatccaaaagaatagaatcaggagataaacaagatgcttggtggcctcaacttcattcattttctgttggtctaaaaggtgctcctgatttaaaagctgctaagattgttgctgaccatattggcactgtgcatcatgaaataaattttactgttcaagaaggtattgacgctattagagacgtgatttatcacctggaaacatatgatgtgacgactgttagagcttcaactcctatgtatttaatggcaagggcaattaagtccttgggaataaaaatggtcttatcgggtgaaggagctgatgaattatttggaggatacctttactttcacaaagctccaaattcaaaagaatttcatgaagaaactgtaagaaagcttgaaaaacttcatcaatatgattgtttaagagcaaacaaatcacttgctgcttggggcattgagggaagagttccttttctggataaagagtttattgatacagctatgaaaattaaccctgatgacaaaatgattaaaaatggaagaattgaaaaatgggttttaagagaggcttttaaggactatctaccagaaagtgttttatggagacaaaaagagcaattctctgacggtgtagggtattcttggattgatagtcttaaagaattggtctctaaagaggtgtctgacggagatatagaaaaagcttca

SEQ ID NO: 318816 - DNA, 1666 bp, Unknown
  Bacterial polypeptide expressing nucleotide sequence isolated from the Sargasso Sea
atgtgttcaattttttcaattttagatattcaatccgatgcgaaagagctgcgccaagtggcactggaaatgtccaaactgatgcgccatcgcggccccgattggtcaggcatttacgccagcgataaagcaattttggcccatgagcgcttggcgattgtcgatattgaacacggtgcgcagccactgctaaccgaagacggcagccttatcctcgcggtcaacggtgagatctacaaccacaaagaactcaaagcccaactcggcgataaatacagctatcaaaccaactctgactgcgaagtgatcttggcgctatatcaagaatacggcactgaattccttgataaattaaacggtattttcgccttcgtactctacgataaagccaaagacgcctaccttattggccgcgatcatatgggtattatcccgctctacactgggcgtgatgcggcgggtaacttctatgtcgcctccgaaatgaaggcactgatgcccgtctgtaaaaccgtggccgaatttcagcctgggcaatacctgtactcaagcattggtgagccagtgcaatactacactcgcgattggcagagctttgatgcggtgaaagataacgctgccagccaagaagaattgcgcgatgccctcgaagccgccgttaagcgccaattgatgtccgacgtgccctacggcgtgttgttgtctggcggtttagattcctcggtgatctcggcgattacccaaacttttgccaaacgccgtatcgaagatgacgatcaaagtggcgcttggtggccgcagctgcactcctttgccgtggggttaaaaggcgcgccggatttagccgccgctaagaaggtcgccgatgcgattggtaccattcaccacgagatcaactttaccttccaagagggtttagatgcgattaaagaagtcatctaccacttagaaacctatgatgtgaccaccattcgtgccgcgacacctatgtacctaatggcgcgtaaaatcaaggcgatggggatcaaaatggtgttatcgggtgaaggcgccgacgaactctttggcggttacttgtacttccataaggcgccaaacgcgcaggccttccacgaggaactcgtgcgtaaactggataaactgcatctgttcgattgtctgcgcgccaacaaagccatggcggcgtggggactcgaagcccgtgtgcctttcctggataaggaatttatggatgtggcgatgcgcatcaaccctgaggcaaaaatgtctaaggatggccggattgagaaacacattctgcgccaagcctttgagcataaactgccaaaagaagtcgcctggcgtcaaaaggagcaattcagcgatggcgtaggttactcttggatcgatggtttaaaggcccatgccgctgagcaagtagacgacttgcaactggccaatgcgaagttccgcttcccgtacaacacgccagaaaccaaggaagcctatttctaccgttgtttctttgaagaacattatccattgccaagtgccgctgaaacggttcccggtggcaagtcggtcgcctgctctactccagaagcgctagcatgggatgaaagcctacgtggcattatcgacccatcgggccgcgccgtacgctcagtgcatgccgccagctattaat

SEQ ID NO: 318817 - DNA, 1231 bp, Unknown
  Bacterial polypeptide expressing nucleotide sequence isolated from the Sargasso Sea
ccattatatatgggttgggacgataatggaactttttatgtagcctctgaactaaaagcattagaagggttttgcaaaaagattgagctgtttccaccagggtgctatttatacagtaaagatgcagaggttaaaaaatggtatcacaggagctggaaatactacaataccgttaaagaaaaaaaaacggagataagagccattagagattctttgtccaatgccgtaagaagacaattgatgtcggatgttccatatggtgttttgttatctggcggattagattcatcaataacatctgcggtggcaaaaatatatgccgataaaagaatagagtctgatggagaaaatcaagcttggtggccaacattgcattcgtttgctgtagggttagaaggctcaccagatttaattgctgctaagaaagtggcaaaacacataggaacggttcatcatgaagtaaaatttaccattcaagaaggattagatgccatcaaagacgtaatatatcatttagaaacatatgatgtaaccacaattagagcttccacgcctatgtttttaatggcaagagtcatcaaatcaatggggattaaaatggtcctttctggagagggttctgatgagatttttggagggtatctgtatttccataaggccccaaatgcagaatcttttcatgaagaaacagttagaaaacttgataagcttcatcaatacgactgtttgagagctaacaaggctttagcttcttgggggatcgaaggaagggttccttttttagataaagaattcatggacgttgcaatgagtatcaacccctctgacaaaatgattaattcagaaaggatggaaaaatgggtattaagaaaagcgtttgaagatcttctccctaaagaagttgcgtggagacaaaaagaacaattttctgatggtgttggatacagttggattgacactctaaaagaaagagttgaggaaataatttctgatgatgtttttgacaatgcatcaagtgtatttgatataaacacccctttaaacaaagaagaatatttttatagaacaatttttgaagagcattttccttcaaaaacagcagcttcttctgtgccttctgttccatcagttgcttgctcaagtcctgaagccctaaagtgggatagttcgttttctaatatgaatgacccatctggaagagcgattaaaacacacgaaaggagttattaaa

SEQ ID NO: 318818 - DNA, 1669 bp, Unknown
  Bacterial polypeptide expressing nucleotide sequence isolated from the Sargasso Sea
atgtgtggaattgtctgtgcctttgatctaaaggacaacccagatagtattagaccaaatattctaaagatggtcaaaaaagtgaggcatagagggccagattggagtggtgtatactcttcaaaaaatgctgttatggctcatgaaaggttagctattgttgacccaacctccgggaagcaaccaatattatcagatgataataccaaagcaatagcagttaatggagagatatataatcatcttgaacttagagataattttgccaaggattacaaatttaaaacagattcagattgtgaaattatattagcactctataaaaaaaacaaatatgattttctaaatcaattaaatgggatttttgcttttgctttatatgattctgataatgatacctactttattgcaagagatcatatgggtatcataccattatatattggatgggatgaaaaaggcacactatatgtagcctctgaattgaagtcattagagggagtttgctcaaagatcgagctatttcctcctggacattacttagagagtaataaagaagactatgttaaatggtacaatcctgaatgggttaaatttaataatgtttctaatgctacaacatcaataagtgaattgcatgattcactctcatctgcagttaaaagacaattaatgagcgatgttccatatggtgttttattatcaggaggtctagattcatctataacatcagcattagctaaaagattttcatcaaaaagaattgagagtggagatactcaagatgcttggtggccacaacttcactcattttcagttggcttagagggttctccagatttaaaagctgctaaagttgtatctgatcatattggaacaattcatcatgaaataatattcactattcaagaagggatagatgctttgagagatgttatatatcatcttgaaacatatgatattacaactgtaagagcttctactcctatgtatttaatggcaagagcaataaaatcactaggaattaaaatggtcttatcaggtgaaggtgcagatgaactattcgggggatatttatattttcataaagctccatcagctgaagaacttcataatgagactgttagaaaacttaataaattacatcaatatgattgtttgagggctaacaaagctctagcggcatggggaattgaagggagagttccttttttggataaagaatttattgaagtagctatgaatataaacccaaaagataaaatgatcaataaagatagaattgagaaatgggttatcagaaaagcttttgaagagtacctgcctgatgaactattatggagacaaaaagaacagttttctgatggagttggatattcttggattgatagtctaaaagacttagtttcgaaggaaataactgatgagcaaatggaatcagcttcaaaaaaatatccaattaacccccctcaaaataaagaagaatattactataggagaatttttgaagaacattttcccagtgatgcagcagcaaaatcagttccatcagttccatcagtagcatgtagttctcctgaggcattaaagtgggatgaatctttccaaaatcaaaatgatccaagcggtagagctatatcaaatgttcataagaaatcttatgaataaa

SEQ ID NO: 318819 - DNA, 1666 bp, Unknown
  Bacterial polypeptide expressing nucleotide sequence isolated from the Sargasso Sea
atgtgttcgattttttcaattttagatattcaatccgatgcgaaagagctacgccaagtggcactagaaatgtccaaactgatgcgccatcgcggccccgattggtcaggcatttacgccagcgataaagcgattttggcccacgaacgcttggccattgtcgatattgaacatggcgcgcagccactgctaaccgaagatggcagccttatcctcgcggtcaacggtgaaatctataaccacaaagaactcaaagcccaactcggcgataaatacagctatcaaaccaactcagattgcgaagtcattctggcgttgtatcaggaatatggcactgaatttcttgataaattaaacggtattttcgccttcgtactctacgacaaagccaaagacgcctacctaatcggccgcgatcatatgggtatcattccgctctacacgggtcgagatgcggcaggtaacttctatgtcgcctccgaaatgaaagcactgatgccagtgtgtaaaacggtggaagaattccagccgggccaatacttatactcaagcgatgctgcggcagtgaaatactacacccgcgattggcaacagtatgatgcagttaaagataacggcgccagccaagaagaactgcgtgaagctctagaagccgcagtaaaacgtcaattgatgtccgatgtaccttacggagtattactctccggtggtttagactcatcggtgatctcggctatcacccagacatttgccaaacgccgcatcgaagatgacggtgaaacgggcgcttggtggccgcagctacactcctttgctgtcggtttaaaaggcgctccggatttaatcgcggccaaaaaggttgctgatgccattggaacgattcaccatgagatcaactttaccttccaagaagggctagatgcgattaaagaggtcatctaccacttagaaacctatgatgtcaccaccattcgtgctgccacacccatgtatctgatggcgcgtaaaatcaaggcgatggggatcaaaatggtgttatcgggtgaaggtgccgatgaactctttggcggttacttgtacttccataaggcgccaaacgcgcaggccttccatgaggaactcgtgcgtaaactggataaactgcatctattcgactgtctgcgtgccaacaaagccatggcggcgtggggattggaagcccgtgtgcctttcctcgataaggaatttatggatgtggcaatgcgcattaatcctgaagcaaaaatgtctaaggatggccggattgagaaacacattctgcgccaagcctttgaacataaattacctaaagaagtcgcctggcgccaaaaggaacaattcagcgatggcgtaggctactcttggattgatggcttaaaagcccatgccgcagaacaggtcgacgatttgcaactggccaacgcgaagttccgcttcccgtataacacgccagaaaccaaagaggcttacttctatcgctgtttctttgaagagcattatccattgccaagtgctgccgaaacggttcctggtggcaagtcggtcgcctgctctaccccagaagcgctggcatgggatgaaagtttacggggtattatcgacccatcaggccgcgccgtgcgctcagtgcatgccgccagttattaac

SEQ ID NO: 318820 - DNA, 1666 bp, Unknown
  Bacterial polypeptide expressing nucleotide sequence isolated from the Sargasso Sea
atgtgcggtattgtttgtgcactaaacgttaaaaaaacttccccaaagcttagatctgaagtgttagaaatgtctaaaaaattaagacacagaggtccagattggaatggtatttactctgatgagaatgttattttagctcacgaacgcctcgcaattgttgatccaaaatcaggaaaacaaccactttttagccatgatggaagatatattcttgctgccaatggcgagatttacaaccacaatgaattaagagaaggcttagaaaaaaattataattttttaactaagtctgattgtgaagtaattattgctctttacaatgaaaaaagagaaaaatttattgatgatttgaatggtattttcggatttgtaatatatgataaagttgaaaaggaatttcttgttgcaagagaccacattggtataattcctctttacatgggctgggattctgcaggtacattatttatttcatcagagctaaaagctttagaaggtagatgtgaaaaaattgagatttttcctccaggtcattttatgactagtaaggattgtaagttgaaaaaatggtatgtaagagattggatgaattatgatagtgttcaggataatgaaacaaacattgaaactttaaaaaaatctcttgaggattctgtatatagacaattgatgagtgatgttccttatggtgttctcttatctggtggtttggattcttcaataacttctgctttggctaaaaagttttcaaaaaagagaattgagagtaaaaatactgaggatgcttggtatcctcaattgcattcattttctgttggtttgaagggatcacctgatctaattgctgctaaattagttgctgataaaattgggtcaattcatcatgaaattaattttactattcaagaaggcttggatgccataaaggatgttatatatcacatagaaacatatgatgtaaccacggtaagagcatcaacccctatgtatttgatggcaagagtaatcaagtccatgggtattaaaatggtactttcaggtgaaggtgctgatgaaatttttggtggttatttatactttcataaagcgccaaatcctgaggagtttcacaaagaaactgtaagaaaaatagataagctatatcaatatgattgccttagagctaataaatcacttgcagcgtggggaatagaaggtagagttccatttctagataaagaatttattgatgttgcaatgagaattaatcccaaggataagatgataacaaatgatagaatggagaagtgggttttgcgaaaagcttttgaatcatatttgcctaatgaggttgcttggagacaaaaggaacaattcagtgatggtgttggttacagttggattgatagtttaaaagaattagttaatagtgaagttagcgatgatgaatttaaaaatgctgataaaagatttccttttcaaactcctatgaataaagaagaatattattacagatctatttttgaagaacattttccatcaaaaactgcatcagaaacggttccttctgtaccatctgtagcttgtagcagtcctattgcaattgagtgggataattcattcaaaaaccttaatgatccatcaggaagatcaattcaaaatgttcacaatgattcatattaac

SEQ ID NO: 318821 - DNA, 1669 bp, Unknown
  Bacterial polypeptide expressing nucleotide sequence isolated from the Sargasso Sea
atgtgtggaattgtctgtgcctttgatctaaaggacacatcagatagtattaggccaaatattctaaagatggttaaaaaggtcaggcatagagggccagactggagcggtatatattcctcaaaaaatgctgttatggctcatgaaaggttagctattgttgacccaacctctggaaagcagccaatattatcagatgataataccaaagcaatagcagttaatggagagatatataatcatcttgaacttagagataattttgctaaggattataaatttagaacagattcagattgtgaaattatattagcactctataaaaaaaacaaatatgattttctaaatcaattaaatgggatttttgcttttgctttatatgattctgataatgacacctactttattgcaagagatcatatgggtatcattccattatatattggatgggatgaaaaaggcacactatatgtagcttctgaattaaagtctttagagggggtttgctctaagattgagctatttcctcctggacattatttagagagtaataaagaagactatgtaaaatggtataatcctgaatgggataaatttaataatgtttctgatgctaaaacatcaataagtgaattgcatgattcgctctcatctgcagttaaaagacagttaatgagcgatgttccatatggtgttttactatcaggaggcctagactcatctataacatcagcattagctaaaagattttcatcaaaaagaattgagagtggagatactcaagatgcttggtggcctcaacttcactcattttcagttggcttagagggctctccagatttaaaagctgctaaagttgtatctgatcatattggaacaattcaccatgaaataatatttactattcaagaagggatagatgctttgagagatgttatatatcatcttgaaacatatgatataacaactgtaagagcttctactcctatgtatttgatggcaagagcaataaaatcactaggaattaaaatggtcttatcaggtgaaggtgcagatgaactattcgggggatatttatattttcataaagctccatcagctgaagaatttcataatgagactgttagaaaacttaataaattacatcaatatgattgtttgagagctaacaaagcgctagcggcatggggaattgaagggagagttccttttctggataaagaatttattgaagtagctatgaatatgaatccaaaagataaaatgatcaataaagatagaattgagaaatgggttatcagaaaagcttttgaagagtacctgcctgatgaagtattatggagacaaaaagaacagttttctgatggagttggatattcttggattgatagtctaaaagacttagttgcgaaggaaataactgatgagcaaatggaatcagcttcaaaaaaatatccaattaatcccccccaaaataaagaagaatattactacagaagaatttttgaagaacattttcctagtgatgcagcagcaaaatcagttccatcagttccatcagtagcatgtagttctcctgaagcattaaagtgggataaatctttccaaaatcaaaatgatccaagcggtagagctatatcaaatgttcataagaaatcttatgaataaa

SEQ ID NO: 318822 - DNA, 1241 bp, Unknown
  Bacterial polypeptide expressing nucleotide sequence isolated from the Sargasso Sea
tattcctctatatatgggctgggatgatagaaatattttttatgtttcatcagaacttaaatctctagagggtgtgtgtgataaaattgagctttttcctccaggttactatctagaaagtcatgatatgaaacttaaagagtggtataaaccagagtggacttcttttgattcagttaaaaatgcaaaaacttctatagcctcaattcatgattccctttcagctgcggtaaaaagacagcttatgagtgatgttccctatggtgttttgctttctggtggacttgactcctccattacctctgctttagctaaaaaatatgcatctaaaagaatagaatctggagataaacaagatgcttggtggcctcaacttcattcattttctgttggcttaaaaggtgctcctgatttaaaagctgctaagattgtagcagatcatataggcactgtacatcatgaaataaatttcactgtacaagaaggtatagacgctattagagatgtgatttatcatttagagacatatgatgtaacaaccgttagagcttcaactccaatgtatttaatggcaagggcaattaaatctttaggtataaaaatggtcttatccggtgaaggagctgatgaattatttggtggatacctttactttcataaagcaccaaattcaaaggaatttcatgaggaaactgtaagaaagcttgaaaaacttcatcaatacgattgtctaagagctaacaaatcacttgctgcatggggaattgagggtagagttccgtttctggataaagaatttattgaaacagcaatgaatattaatcccaaggataaaatgattaaaaatggtagaattgaaaaatgggttcttagagaggcttttaaggactatcttcctgaaagtgttttatggagacaaaaagaacaattttctgacggtgtaggttattcttggattgatagtctgaaagagttagtctctaaagaagtatctgatgaagatatagaaaaagcttctgaaatatttccagtaaacactccacttaacaaagaagaatactattacagaactatttttcaagaacatttttctagtgaagcagctgcaagatctgttccttcagttccatctgtagcatgtagtacacctcaagctttagagtgggacgaatctttcaaaaatgttaatgatccaagtggtagatctgtatcaaatattcataatgaatcttatgaataaa

SEQ ID NO: 318823 - DNA, 1081 bp, Unknown
  Bacterial polypeptide expressing nucleotide sequence isolated from the Sargasso Sea
aatgtgttctattttcggcattctggacatcaaatccgatgcggccgcgctgcgcaaatcggcgctggagatgtccaagcgattgcgccaccgcggtcctgactggtccggcgtctacagctccgacaaagctatcctggtgcacgagcgcctggccatcgtcgatccgggcaacggcgcccagccgctctacaaccccgagcgcacccacgtgctggccgtcaacggcgagatctacaaccacaaggagctggagaagaacctcaaggtcgacttccagttccagacccactccgactgcgaggtgctgctggccctctacaaggagaagggccccgccttcctggatgatctcaacggcatcttcgccttcatcctctatgacgccgagcaggatgcctacctgattggtcgcgaccacatggggatcatccccctttacaccggccgcgacgagcacggcaacttctacgtcgcctccgagatgaaagcgctggtaccggtctgcaagagcgttgaaaccttcccgccgggacactacctgtggagcaaggatggcgagcttaaacagtggtacaagcgcgactggatggagtacggcgcggtcgagcacaacgtcagcgacaaggccgagctcaaagccgcgctggaagcggcggtcaaacgccagctgatgtgcgacgtgccctacggcgtgctgctctccggcgggctggattcgtccgtcatctccgccatcaccaagctctatgccgcccgccgggtggaagacgatggcaagagcgaagcctggtggcctcagctgcactccttcgccgtcggcctggaaggttcgccggatctcgccgccgcccgcaaggtggccgatcaccttggcaccatccaccaccagatccacttcaccgtgcaggaggggctggatgccctgcgggacgtcatctatcacctcgagacctatgacgtcaccaccatccgcgcctccacgcccatgtatctgatggcccgctacatcaaggcgatggggatcaaaatggtgctctccggcgaaggctccgacgagttgttcggtggctacctctac

SEQ ID NO: 318824 - DNA, 124 bp, Unknown
  Bacterial polypeptide expressing nucleotide sequence isolated from the Sargasso Sea
tgaatttattaaatctcctgcatttagctttcaagggcaccctgaggcaagtccaggaccacaggagattcaaattttgtttaaaaagtttagcactatgatagaagaatatgccaaaacgtaa

SEQ ID NO: 318825 - DNA, 613 bp, Unknown
  Bacterial polypeptide expressing nucleotide sequence isolated from the Sargasso Sea
ttgaacaaaaagcaaaaagtaaactcaaaaaaattctcacatttatcatcgggcgttttagttcttgaaaataaaaaaatatttaaaggtattggtattggatatcaaggaacagccacgggagaagtttgcttcaatacttctttaacaggttatcaagaaattatatccgatccatcttatgctggacaaattatcaattttacttttcctcatattggaaatgttggtactaacaaagaagaccatgagtcagacaaaatttggactaaaggagttatttttaatacagaaataactaatccatcaaactacagatctttaaaaaaattggatagttggttgaaaaaaaataagatagtaggaataaccggactagacactagaagcctaactaattttataagagacaaaggggcacctaaaggtactatttctaataataataaaggtatttttaatctaaaaaaattaaccaatagctccattaaatggccaggattaaatggccttgatttagcaaaaatagttacaactaaaaaaaaatatttatggaaaggtttcaaaacatggaaaaaagagaaaggtttgaaaaaaacaaaaagaaaaaata

SEQ ID NO: 318826 - DNA, 301 bp, Unknown
  Bacterial polypeptide expressing nucleotide sequence isolated from the Sargasso Sea
taactttcagcttaagtttggtcatagaggaggtaaccaacctgtccaagatttgagaaccatgaaagtttacataactgctcaaaaccatggatatgctgttgatcctgagacactgccacctgaactaaaggtttctcatgtgaatttgaatgatggaacggtcgcgggcttgattcatcaacatttgcctgtgtttaccattcagtatcattctgaggctgcgcctggtcctctggataatatgtacttgtttgatcaatttgttgaagccgtgcggcaggcgaaggaaaacagttag

SEQ ID NO: 318827 - DNA, 588 bp, Unknown
  Bacterial polypeptide expressing nucleotide sequence isolated from the Sargasso Sea
aatggataagcaaccaaaacaagcagtattgcttttagcagatggacgtgaattttacgggaattcatttggttatcatggagaaactacaggggaagtttgttttaatacggggatgtctggttatcaagaaattcttactgatccatcttattgtaaacaaatagtcacgatgacatcgcctcacattggcaattatggtgtaaataaagatgatattgaatcaaaaaatattcaagtagctggttttgtaattaaagaagaatctgaaatcccttccaattggagatcagaattatctattggagaatatcttgatcagcaaaaaatagtgggtataaaaaatattgatacaagagcattaacacgtcatatcagagataatggagcaatgaatggaattatatcatctattgatcatgatataaaatcattaaaattaaaacttgataaaataccatccatgaatggcctagatttagcaaaattggttacaacaaacgaatcatatgaatggtcaaataataatggattatataaagtagctgccattgattatggaattaaactaaatattttacgattatt

SEQ ID NO: 318828 - DNA, 290 bp, Unknown
  Bacterial polypeptide expressing nucleotide sequence isolated from the Sargasso Sea
attgaaagaaaaacataaatataaaattgcaattaaaccaaaatttccttctgctattttaattttagataataaaacaattttcagagggattggtcttggtcataaaggagaagcaacaggcgaggtttgttttaatacctcgttaacaggctatcaagaaattatatctgatccatcttacgcaggacaaataattaattttacatttccgcatattggaaatgttggtactaataatgaggacattgagtcagataaaatttggaccagaggtgtaatttttattc

SEQ ID NO: 318829 - DNA, 361 bp, Unknown
  Bacterial polypeptide expressing nucleotide sequence isolated from the Sargasso Sea
attgatcaaaaaagtaaaaaaagctcactcaaaaaattctcaaaaaaacacaggtattttaattttagaaaacaaaaagatttttagaggtattggaattggatatcagggagaagcaactggtgaagtttgctttaatacctcattaacagggtaccaagaaataatatcagatccctcttatgcaggacaaataataaactttaccttccctcatattggaaatgtaggtacaaacaaagaagattttgaatctgataaaatatggactaaaggtgttatttttaattctgagataacatcaccatcgaattatagatcttttcaacatttggatacttggttaaaaaaaaataagata

SEQ ID NO: 318830 - DNA, 265 bp, Unknown
  Bacterial polypeptide expressing nucleotide sequence isolated from the Sargasso Sea
aaatcatcccgtgcagagcttggcggatggaacggtcatggtaactagccagaaccatggcttcaccgtctccgatgagcaactgccggacacattgaaagtaactcaccgttcgctttttgatggaacgctccaaggtattgctcgaatagatgttcccgcttatagctttcagggccatcctgaggctagtcctggaccgaatgatgctgagacgttattccgcccctttataaaagctatgcagcagcggtgggcagtgtga

SEQ ID NO: 318831 - DNA, 517 bp, Unknown
  Bacterial polypeptide expressing nucleotide sequence isolated from the Sargasso Sea
tttgagacaggtcataaatagaaaaaaaaataattcacataatttttccacaggtattttagtttttgaagatggcactagcttttcaggtgatggcattggttatgaaggtaatgctgttggagaggtttgttttaatacctcaataactggttatcaagaaataataacggatccatcttactcagaccaaattataaattttacttttcctcatatagggaatgttgggacaaatccagaggataatgaagcagacaaagcttgggttaaaggagttatatttaattcaaatgtcactgaaccatcaaattacaggtcaattaaaaagttagataaatggctaaaaaaaagaaaaatagttggtatcgttggattagatacaagggttattacaaattacataagggataaaggagctcccaaaggtgctattcgattttcaacaaaaggcaaacatgatctgaaagaacttctagataaatgtaaatcgtgggagtggtcttctgggtcttga

SEQ ID NO: 318832 - DNA, 184 bp, Unknown
  Bacterial polypeptide expressing nucleotide sequence isolated from the Sargasso Sea
ttgccgaaaaatataaaaattacgcacttatctctttttgataaatctcttcaaggtatagaatttactgatactcctgcatttagttttcagggtcatcctgaagctagtcctggaccacaagagattcaggttctctttaaaaaatttagtttaatggttaaagaatatgccaaaacgtaag

SEQ ID NO: 318833 - DNA, 718 bp, Unknown
  Bacterial polypeptide expressing nucleotide sequence isolated from the Sargasso Sea
cccggcagaggattcattcccggtgctgatgtatccggagttaacgaccctcccagttttcccgatgcagccgatgctttactagattctagtagccctgacccgccttctggagccgatggattactactactcgctgatggaacgcgatatcgcggacgactatttggagccccggtaatcgccgaaggagaactcgtctttactacagggatgaccggttaccaagagagtttaaccgatccgtctttcgcaggacagattctaacatttacatggcctctacttggaaattatggagtgcactcaggagcctcagaatccgctggcgtctggcctagaggggtagtttgtagacaattgatggaagtacctgaccacagagattcaataggtagtgtacatgatcttctttttgctcatggagtgcctggtattcaggagattgacacaagagaactgactcgccgagttagagagcacggaaccgttctgtgtatttttggtccggctgaggctgagagagaaatgttagtccgtcttgacgagatgactcctccagatgcagaagatttagtggctgaggtcacatgtgatgaagcggtaataattaatccgggtgcagtagataatgaaggaaaaccgcttcctaggttggcggctatagattgtggagtcaagcacaatattttgcgagagttagccctaacgctttgag

SEQ ID NO: 318834 - DNA, 408 bp, Unknown
  Bacterial polypeptide expressing nucleotide sequence isolated from the Sargasso Sea
aaaatttgggaggaaccgtacaacgtgctaaggatcagcagtttgaaattgggttctacgacttacagcctaccggtgaagggcataagatatttcaaaatcagaaaacattttttcaatggcataaagaaggttttaaagtgccgaatgtatgtgatgttcttgcttatggcgaaacatttccacagcaagcctttaagtataaaaatgcgataggtattcaatttcatccagaggtaaatctgaaaatgcatttaagatggctctattatgctggttatatgctgcgagaaaagggtgctcaaaaacgtaaatatcaaatgcatcaaagacttagtcatggtaaaaaaattaatatgtggttagactcttttttagataattattttcttatggataaatcatgaa

SEQ ID NO: 318835 - DNA, 356 bp, Unknown
  Bacterial polypeptide expressing nucleotide sequence isolated from the Sargasso Sea
attgatcaaaaaacaaaaaaataaaattgcaattaatcatccattttctacaggtattttagttctagataacaagctagttttcaaaggtattggccttggatatcaaggaacttcaactggagaggtttgttttaatacatctttaacaggatatcaggaaattatatcagacccatcttatgctggacaaattataaactttacatttcctcatattggaaacgttgggaccaataatgaggatttagaatctgataaaatttggacgaaaggtgtaatatttaattccgaaattacttctccatcaaactatagagcattacatacattagatgaatggcttaaaaaaaatc

SEQ ID NO: 318836 - DNA, 256 bp, Unknown
  Bacterial polypeptide expressing nucleotide sequence isolated from the Sargasso Sea
cttgcaacctgaagaatgcaacgcagcattagtattacaagatggtagcgttttttggggatatggagcaggattaagcgaccaagactttaaagataccgttggcgaagtatgcttcaatacttcttgtaccggatatcaagaaatattgacggacccgtcatactgcgaccaaatcattacctttacaagttcgcatataggaaacgtgggaaccaacaaccaagatatgaaactaaaaagcctagtgtcagag

SEQ ID NO: 318837 - DNA, 427 bp, Unknown
  Bacterial polypeptide expressing nucleotide sequence isolated from the Sargasso Sea
ttgagacaggttctagatagaagaaaaaaaaattcaaataatttttcgacaggtattttagtttttgaagacggcactaattttttaggtaatggtataggctacgagggtagtgcagttggtgaagtatgtttcaatacatcaataaccggttaccaggaaataatcacagacccttcttattcagatcaaattattaattttacatttccacacataggaaacgtcggcacaaacccagaagataatgaggcggataaagcttgggtaaaaggggttgttcttaattgcaacataacagagccatcaaattatagatctataaaaaagttagacaaatggttaaaaaagagaaaaattgttggggtagcaaatttagatacgaggataattacaaattacattagagacaaaaggtgctcctaaa

SEQ ID NO: 318838 - DNA, 369 bp, Unknown
  Bacterial polypeptide expressing nucleotide sequence isolated from the Sargasso Sea
attgaaagaaaaacacaaaaataaaattgcaattaaatcaatcttttcatcagctattttaatattagaaaataaaacaatttttaaaggtatcggtcttggttaccgtggggaggcaacaggagaggtctgctttaatacctctttaactggttatcaggaaattatatcagacccatcttatgctggacaaataataaactttacttttcctcatattggtaatgttggaactaataatgaagatatagagtcagataaaatttggacaagaggtgtaatttttaattcagaagtaacaaatccctcaaactatagatctcttaaacatttagatgagtggcttaaaaaaaataaaatagtaggtat

SEQ ID NO: 318839 - DNA, 469 bp, Unknown
  Bacterial polypeptide expressing nucleotide sequence isolated from the Sargasso Sea
ttgttagtaaaaacaaatttaacgcatcaaataaaagataatctcaaaaagattaatcccacaggcattttagttttggaagatggcagtttttttgaaggtcacggatttggattcgaaagtacaacaactggagaagtttgtttcaatacctctataacaggttaccaggaaataatatcggatccttcttatgctggacaaataattaattttacatttccacacattggaaatgtgggaacaaataatgatgatcatgaatcagacaaaatttggactagaggagttatttttaattccgaaatttcaaatccatcaaattatagagctttaaaacatttggatatttggttaaaaaaaaataaaatagtcggtattactggccttgatactagaagtttaactaactttataagagataagggcgcaccaaagggaactatttcatattctaaaaaaaggtaaa

SEQ ID NO: 318840 - DNA, 193 bp, Unknown
  Bacterial polypeptide expressing nucleotide sequence isolated from the Sargasso Sea
ttaccaagaaacatagagattactcataaatccttatttgatgaatgtattgaaggaataagattaagaaataaaccagttttttctgttcaatatcatccagaatctaatcctggtccacaagacagtgtctatttatttcaagaatttataaaaatgattaaaaaaaatgccaaaaagaaaagatattaaa

SEQ ID NO: 318841 - DNA, 397 bp, Unknown
  Bacterial polypeptide expressing nucleotide sequence isolated from the Sargasso Sea
ttgatcaaaaaagcaaaaaaaacaaactcaaaaaaatctcaaaatcatacaggtgttttagttctcgaaaataagagaatttttaaaggtgttggaattggataccaaggaaaagcaactggtgagatttgctttaatacctctctaacaggttaccaagaaattatttctgatccttcttatgctggtcagattattaattttacattcccacatattggaaatgttggaactaataaagaggatattgagtctgacaaaatctggacaagaggtgtgatctttaattctgaaataacctctccttcaaattatagagcatttttgcatttaaattcttggctcaaaaaaaataaaattgttggaattacaggattagatactagatgtttaacaa

SEQ ID NO: 318842 - DNA, 377 bp, Unknown
  Bacterial polypeptide expressing nucleotide sequence isolated from the Sargasso Sea
attgactttaaaacgaaaaaacaaaacttcacatctcttaaattttaacacagctattttagttcttgaaaataaatcagtctttaaagggattgggcttggacatgtaggagaggcaactggagaagtatgctttaatacctcattaactggttatcaagaaatcatttctgacccatcttatgcgggacaaataataaattttacatttccacacattggaaacgttggggctaataaagaagacattgaatctgataaaatatggacaaggggagtaatttttaattcagaaataacaagtccatctaattatagatctctgcaaaatttagataaatggctaaaaaaaaacaaaatagtaggcataactggtc

SEQ ID NO: 318843 - DNA, 602 bp, Unknown
  Bacterial polypeptide expressing nucleotide sequence isolated from the Sargasso Sea
attgatcaaaaaagcaaaaaaaaatagctcaaaaatttctcaaacacacacaggtattttagttcttgaaaacaagaaagtttttaaaggtataggaattggtttcgaaggagttgcaacaggggaggtctgttttaatacctcattaactggctatcaagaaataatatctgacccctcttatgcaggtcaaattattaattttacttttcctcacataggaaatgttggaacgaaccatgaggatcatgagtcagataaaatctggactagaggagtaatttttaattctgaaataactaatccctcaaattacagatcatttttacatttagattattggcttaaaaaaaacaaaattattggtatcactggattagatactagaaaccttacaaatttcattagagataaaggggcccctaaaggtaccatttgttattccaataaaggtaaattcagtattaacaaactcacaaatacaacaataaaatggggtggtttaaaaaatttagatcttgccgaggtcgtatccaccagaaaaaattatatttggaaagggcttaaaacttggaaaaaagaaactggttttgagaaaaata

SEQ ID NO: 318844 - DNA, 151 bp, Unknown
  Bacterial polypeptide expressing nucleotide sequence isolated from the Sargasso Sea
tttgataattgtgtggaaggaattagatctaaaactggtccattttttggagttcaattccatcctgaagcttcaccaggtccacaagactcgttttatctttttaatgatttcatcaatcttgttaaacaaaatgccaaaaagaactgat

SEQ ID NO: 318845 - DNA, 415 bp, Unknown
  Bacterial polypeptide expressing nucleotide sequence isolated from the Sargasso Sea
aatgtccaataaaaaaagaaagaaaggtctcgtactgttagctgatggtacgattttttatggtcgttctgcagggattgatggcactgcacttggtgaaatttgttttaacacaggagtaacaggatatcaagaaatatttaccgatccctcatattttggacagattatggttacaacaacttctcatattggtaactatggaataaaaatgtctgaatctcaatcaaatgagatatttattagtgggttaatatgtaagtcatttagctcagttaattcaaggtcaaattcaaaatcattaagagaatggtttaagtcaaacaaattggttacactttgtgatgttgatacaagagcattagttagatatattagagataatggagcaatgaacgctgctattacaaactga

SEQ ID NO: 318846 - DNA, 241 bp, Unknown
  Bacterial polypeptide expressing nucleotide sequence isolated from the Sargasso Sea
gttgaaatcaccagtcaaaatcatggttttgtagtggttgaagaaactttacctaaaaaaattgaagtaactcataagtctctatttgacaacaccattgagggaataagacttaaaaacaaaccaatattttcagtacaatatcatccagagtctaaccctggaccacaagatagcgtctacctctttcaagaatttattaacaacatgaaaaaaaatgccaaaaagaaaagatattaaa

SEQ ID NO: 318847 - DNA, 143 bp, Unknown
  Bacterial polypeptide expressing nucleotide sequence isolated from the Sargasso Sea
tgaaggaattaaattaaaaaataagccagttttctctgtacaataccatcctgaatcaaatcctggaccacaagatagtcattatttatttagtgattttattaaagatgtaaaaaaatatgccaaaaagaaaagatattaaa

SEQ ID NO: 318848 - DNA, 694 bp, Unknown
  Bacterial polypeptide expressing nucleotide sequence isolated from the Sargasso Sea
aatgtcttataaaaagaggaaaaaagggattgtacttctagctgatggaacaattttttatggtaaatctgtaggtgtaaaaggaactgttattggtgaaatttgtttcaatactggtgttacaggttaccaggagatttttaccgacccatcttattatggacaaatcatggttacgaccacttctcatataggtaattatggaataaaagaaaatgagtctcaatcagaaaatatatatatatcagggcttatttgtaaaaattttagctatgttaattcaagggtatcttcgaggtctgtagattcatggtttaataaacagaaattgattgcaatttcagatgttgatactagagctttagttagatatattagagaaaatggtgctatgaatgcagcaattactactgatatagataatctagatgaattaaggaaaaagttgattaattctccagagatggaaggtttagaactggcttcaaaagtatcaacaaaaaaggcatactttttaggaaacgcaaaagcaaaatatagactagctgttttagatcttggagttaaaaaaaatattttatccaatttcatcaatagagatttttatataaaagttttcccttataatactgaatttagtgaattacttaaatttaagccaaatggtttctttctttcaaatggcccaggagat

SEQ ID NO: 318849 - DNA, 607 bp, Unknown
  Bacterial polypeptide expressing nucleotide sequence isolated from the Sargasso Sea
attgatcaaaaaagcaaaaaaaaatagctcaaaaatttctcaaacacatacaggtattttagttcttgaaaacaaaaaagtttttaaaggtataggaattggttatgagggcgttgcaacaggagaggtctgttttaatacctcattaactggctatcaagaaataatatctgacccctcttatgcgggtcaaattattaattttacttttcctcacataggaaatgttggaacgaaccatgaggatcatgagtcagataaaatctggactaaaggagtaatttttaattctgaaataactaatccctcaaattatagatcatttttacatttagattattggctaaaaaaaaacaaaattattggtatcactggattagatactagaaaccttacaagttttattagagacaaaggggcacctaaaggtaccatttgttattcaaataaaggaaaatttagtattaacaaactcacaaatacaacaataaaatggagtggtttaaaaaatttagatcttgctgaggtcgtatccaccagaaaaaattatgtctggaaagggcttaagacctggaagaaagaatttggatttgaaaaaaataaaaaa

SEQ ID NO: 318850 - DNA, 295 bp, Unknown
  Bacterial polypeptide expressing nucleotide sequence isolated from the Sargasso Sea
ctcgcgccgctcacccccccccgccccctcttccctcctccccgccatatacgtagtctccgccgcggtctcctcggagaagccctggaagaagtccgactgccgcctcgtcctcgaggacggcagcgtctggcccgggcagagcttcggcgcgtcgggcacggtcctcggcgaggtggtcttcaacacctccctctccggctaccaggagatcctcaccgacccgagctacgcgggccagttcgtcttgttcacgtgccccgagatcggcaacgtcgggatcaacctcgaggac

SEQ ID NO: 318851 - DNA, 401 bp, Unknown
  Bacterial polypeptide expressing nucleotide sequence isolated from the Sargasso Sea
gctggtgccgctcgctgcgaccgcgcgcgaggtaccgccgcccgccgaccacgtggacgccgatggcccgtacgtgttcaccaccgcaacgggcctggaggcgcagtgggtgtgcaacgaccacgtggtgcgccgcaccctgcccgcccgccgcgcgggtaccgtgatcgcaccggaatgcggttacgcccatcccctcaccgtggtacccgcgcagaccgccgctgcggcgcggctgccggccacgccgcgcatcgtcgcgctgtcggacatccacggccagtacgacctgctggtcaggctgctgcacgcccatcgtgtgatcgatgcggcagaccgctggtcgctcggcgatgccacgctggtggtcgccggcgacgtcttcgatcgcgggccgcagg

SEQ ID NO: 318852 - DNA, 401 bp, Unknown
  Bacterial polypeptide expressing nucleotide sequence isolated from the Sargasso Sea
attgaacaaaaagcaaaaagtaaactcaacaaatttttcaaatttatcatcaggcgttttagttcttgaaaataaaacaatatttaaaggtattggtatcggataccaaggaacagcaacaggagaagtttgcttcaatacttctttaacaggttatcaagaaattatatctgatccatcttatgccggacaaattattaattttacttttccacacattggaaatgtcggtactaacaaagaagatcacgagtctgataagatttggacaaaaggagttatttttaatactgaaataactaatccatcaaattacagatctttaaaaaaattagatacctggctgaaaaaaaataaaattataggaattacaggattggatactagaagtttaaccaatt

SEQ ID NO: 318853 - DNA, 418 bp, Unknown
  Bacterial polypeptide expressing nucleotide sequence isolated from the Sargasso Sea
attgactacaaaacgaaaaaaaaagaattcaattaaacctcaattttcttcagctattttagttcttgaaaacagatcaatatttaaaggaattggtttaggttaccaaggaaatgcaactggtgaaatttgttttaatacttccctaacaggttatcaagaaattatatctgacccatcatatgctggacaaattataaattttacttttccacatattggcaatgtaggaactaataatgaagatttagagtctgataaaatatggacaagaggagttatttttaattcagaaataactaacccatcaaattatagatctcttaaaaatctggacgaatggttaaaaaaaaacaaaattgttggaataactggccttgatacaagaagtctaacgaattttataagagataaaggg

SEQ ID NO: 318854 - DNA, 358 bp, Unknown
  Bacterial polypeptide expressing nucleotide sequence isolated from the Sargasso Sea
aatcaatacaggcattttagttcttgaaaataaaaaagtatttaagggaattggaattggataccaaggagaagctacaggggaagtttgctttaacacatcattaacaggatatcaggaaataatctctgatccatcgtatgcaggtcaaattataaattttacttttcctcatattggaaatgtaggaacaaataaagaagatcatgaatctgataaaatatgggcaagaggtgtaatatttaattccgaaataacatcaccttcgaactatagatcttttttacatttggatgcttggttaaagaagaataaaattgttggtataactggcttagacactagaagtctaacaaac

SEQ ID NO: 318855 - DNA, 424 bp, Unknown
  Bacterial polypeptide expressing nucleotide sequence isolated from the Sargasso Sea
ttgaaagaaaaacataaaaataaaattgcaattaaatcaaaatttccatcagctattttaattttagataataaaaggatcttcagaggtattggacttggttatcagggtgaagcaactggagaggtatgttttaatacctctttaacaggatatcaagaaattatatcagacccatcttatgcaggacagataattaacttcactttcccccacattggaaatgttggagctaataatgaagatatagagtcggataaaatttggacaagaggggtaatttttaattctgaaataacaaatccatccaactatagatctttaaaacatttagatgaatggcttaaaaaaaataaaattgtgggtattacaggacttgatactagaagtttaactaactttataagagataaagggctccaaa

SEQ ID NO: 318856 - DNA, 455 bp, Unknown
  Bacterial polypeptide expressing nucleotide sequence isolated from the Sargasso Sea
attgaacgaaaaacaaaaaaacaaaattgcaattaaacatcaatttccaacaggtattttagttctagataataggctaatttttagaggtattggccttggatatcagggaacttccactggagaagtttgttttaatacatctttaacaggatatcaggaaattatatcagatccatcttatgccggacaaattataaactttacattccctcatattgggaatgttggaaccaattatgaagattttgagtccgataaagtttggacgaagggtgtaatatttaattctgaaataacatctccatcaaattatagagctttaaaaaccttagatgggtggcttaaaaaaaataaaattgttggattaactggattagatactagaagcctaacaaactttattagagataaaggggctccaaagggtactatttcgaatagtaaaaatggaa

SEQ ID NO: 318857 - DNA, 289 bp, Unknown
  Bacterial polypeptide expressing nucleotide sequence isolated from the Sargasso Sea
tctgtcttataacgatttaatcaaaaaaaacaattattctgcagttttaattttgaaaaatggtgacatattttatggttatggttttggagcacaaggatttagggttggtgaattgtgtttcaatacttctatgtcaggatatcaagaaatcattaccgatccatcttataatggtcaaataattaattttacttttcctcacataggaaatgtaggaactaatacagttgacaatgaagcaaataaatctttcgcttctggaattatcacgagagaaccgcctcct

SEQ ID NO: 318858 - DNA, 220 bp, Unknown
  Bacterial polypeptide expressing nucleotide sequence isolated from the Sargasso Sea
catgggttttgaaattattaaagaaagtctgcctaagaacgttgagataactcacaaatcattatttgatgactgtattgaaggaattagattaaaaaacaaacctgttttttcagttcaatatcacccagaatcaaatcctggaccgcaagatagcgtttatttatttcaagaatttattaataatattaaaaaaaatgccaaaaagaaaagatcttaa

SEQ ID NO: 318859 - DNA, 662 bp, Unknown
  Bacterial polypeptide expressing nucleotide sequence isolated from the Sargasso Sea
attgggcaaaagtaaattaaatcagtcttatatagaaattctcaaaaaaaacaatcttacagctatattaattttagaaaccggagaagtttttcatggatcaggatatggaaaaccaggaataaaattgggggaagtttgctttaatacttcattgacaggttatcaagaaataattactgatccatcttacaacggtcaaataatcaattttacatttccacatattggaaatattggaacgaatcaagaggacaatgaagctaacaagtcttatgcttcaggaataatcactagagaacccccaacaggaagtagtaattggcgctcaaataaagatctcaatgactggttatttgaaaaaaatattactggtatttcaggattagacacaagacaacttacaaaaattattaaagataaaaatgctcctatgggtttaatatgttataatttaaataaacgatttaatatagactcacttaaacagaaactgttatcacatcctaagataaaggggtcaaatttagtccctgtagtatcatcaaacaaatcttttaattggaataagagcacgtcatggccccaaaacataaattataataaaaatagaatttttcatatattagcttatgactttggaataaaatacaatattctaa

SEQ ID NO: 318860 - DNA, 358 bp, Unknown
  Bacterial polypeptide expressing nucleotide sequence isolated from the Sargasso Sea
ttgatcaaaaattcaaaaaaaattaactcaaaaaatattcatcaaattaatactggcgttttagttcttgaaaataaaaagatattcaaaggaattggtgttggctatcagggagaggctactggagaagtgtgctttaatacttctttgacaggttaccaagaaataatctcagatccttcttatgcgggtcaaattatcaattttaccttcccacatattggaaatgtaggtacaaacaaagaagatatagagtctgataagatttggactaaaggagtaatttttaattcagaaataactgatccttcaaactatagatcttttttacatcttgatgcctggcttaagaaaaaca

SEQ ID NO: 318861 - DNA, 351 bp, Unknown
  Bacterial polypeptide expressing nucleotide sequence isolated from the Sargasso Sea
attgatcagaaaagtaaaaaaaaatttcttaaaaaattcaaaaaaaaacacagctattttagttcttgaaaataagaagatttttagaggtattgggattgggtttcaaggaatagctacaggtgaagtttgctttaatacttcatttacaggataccaagaaataatatcagacccatcttacgcagggcaaataattaattttacctttcctcatattggaaatgtaggaaccaataaagaagattttgagtctgataaaatatggacacgaggagttatttttaattcagagataacctcgccatcaaactatagatcttttcaacatttagatatttggttaaaaaa

SEQ ID NO: 318862 - DNA, 157 bp, Unknown
  Bacterial polypeptide expressing nucleotide sequence isolated from the Sargasso Sea
ttcgatggaagtattgaaggcataagattaaaaaataaaccagtattttctgttcagtatcatccagagtccaatccagggcctcaagatagtgtttatttatttcaagaatttattcataacataaaaagaaatgccaaaaagaaaagatattaaa
